United States Patent Application Publication US 2018/0126003 A1 - sequence listing, part 59

SEQ ID NO: 104800 - DNA, 2812 bp, Artificial Sequence
  derived and/or modified sequence
agggagggaggggatttaaaaacctgcagcaacatgggggaggaggctgtttgtccttctctctctggggaagtaactcgctcaaactgccttccttgctgagctgcttcgcgtagctttgaggaaggtctagtgaaattggtctttccattacatctggatgtactaccagagagttctgctgctgttgttttttttagcttttctttctttgagtctttaaagggcaattgtcgacactctgcaaacataccgatttgttgtctgcccactttggagtcttcaatctgggcagtaactatttaccctttttcctgctagcctgtccccctctctggattgaagtcacctgctaagacaatggactaccgaccagactcccggaaatcatgttggtaggatcccagtctttttcgcctggagggcccaatgggatcattagaagccagtcctttgcgggtttcagcggcctccaggaaaggcgatccaggtgtaactccttcattgaaaattcctccgctctcaagaagcctcaggccaaactgaagaaaatgcacaatttaggccacaaaaacaacaatccccccaaagagcctcagcctaaaagggtggaagaagtctacagggccttgaaaaatggacttgatgaatatctggaggttcaccagacggagctggacaagttgacagctcagttaaaagatatgaaaagaaactctcgcctgggtgtactgtatgacctagacaagcaaattaaaacaattgaaagatacatgagacgcctggagtttcatataagtaaggtagatgaactctatgaagcttattgtatccagcgacgcctccaggatggtgccagcaaaatgaagcaagccttcgcaacatcccctgccagcaaagctgcccgggagagtctgacagagatcaatcggagcttcaaggagtacacagagaatatgtgcaccattgaagtggagctagagaatctgctgggagaattctccatcaagatgaaaggtctggctggctttgcacgcctctgtcctggagatcaatatgaaattttcatgaagtatggccggcagcggtggaaactgaaaggcaaaatagaagtaaatggcaagcagagctgggatggagaagaaacagtttttctgcccctgatagttgggttcatctccatcaaggtcacggagctcaaagggctagcaactcacatcctggtaggtagcgtgacctgtgagaccaaagagctgtttgcagcccgacctcaggtagtggctgtcgacatcaatgaccttggtaccatcaaactgaacctggaaatcacctggtatccatttgacgtggaggacatgaccgcatcctcaggcgctgggaacaaggcagcagcccttcagaggagaatgtccatgtacagccagggtaccccggaaacgcccaccttcaaagaccactccttcttttcaaatctacctgatgacatctttgaaaatggaaaggcagccgaggagaaaatgccactgtcgctcagcttcagtgacctgcccaacggggactgcgccctcacctcccactcaacaggctccccttccaactcaacaaatccagaaattaccatcacccctgcggagtttaacctcagcagcttggcctcccagaatgagggtatggatgacaccagctcagcatcttccaggaactccctgggagaaggccaagagccaaagtcacacctgaaggaggaagacccagaggagcccagaaaacctgcctcggccccatctgaggcttgccgccgacagtcctcaggtgctggggctgagcacctgttccttgagaatgatgttgcagaagcacttctgcaagagtctgaggaggcctctgagctcaagcctgtggaactggacacttcggaaggaaacatcacaaagcagctggtcaagaggctcacatctgcagaggtgccaatggccacagacaggctgctctctgagggttctgttggtggagaatctgaaggctgcagatcctttctagatggaagcttagaggatgcttttaatgggcttttacttgcattagaaccacataaagagcagtataaagagtttcaggatctgaaccaagaagtcatgaatttggatgatattctaaaagatgctaaacaccttgacgatcagaaactaaatggtgctgcctcttggacggagatcactgagggtgaatgagacaactgtgatttaaaagaccgaaagacgttttcccatgtgcttttgtgccatcttgagtgtcagagacagatccctgcaaggcccttcctaccttgcgctaagaaatcagcaaggagtgtcacctaactggatggaggacatttagtgcttctaacttgcagaatttgtcccattcgacccaccccagcatcctcttgaatatttggaaatacttctctccaactctgtgcccatagcaactggcattgttttgcttgtaatgtttctgcatgtggccagcattatagaatgctccaggccagagaatgggattgctcccatgatgccagggcctggtcagggaagtggtgggacttgttccctttgaggcagagctccagaggaagcagggctgcttcttgtcatgcccaaggcattcattctttcctcagtcctcagaggaaaaattatatgctgtgagcaggtgcggtggctcatgcctgtaatcccaacactttgggaagcccaggattgctggagcccaagagttcaagaccggtatggtcaacatagggagaccctgtctctgcaataaaaga

SEQ ID NO: 104801 - DNA, 1944 bp, Artificial Sequence
  derived and/or modified sequence
atggtgctgccctcccgattacattggataagaaataggccgtggcgagataggatacgcagaaggcagctgaataggctgccaacgagattgccggagattatgctggtgggcagccaatcattctcaccagggggacctaatgggattataaggtctcagtccttcgctggttttagtggcctgcaagaacggcgctccaggtgtaatagttttatagagaactctagcgcactgaaaaagcctcaggctaagctgaaaaaaatgcacaatttgggccacaagaataataaccctcccaaggaaccacagcctaaaagggttgaggaggtgtatcgagctctgaaaaatggcttggatgagtatctggaggtgcatcaaacagaactggataagttgacagcacaactgaaagacatgaagcgcaatagcagattaggtgtcctatatgacctcgacaagcagataaagaccattgagaggtacatgcggagactagagttccacatttccaaagtggatgagctgtacgaggcttattgtatccagcgacgcctgcaggacggcgcctcgaagatgaaacaggctttcgcaacgagtcctgcctcaaaagccgctagagagtcactcactgaaatcaaccgatcatttaaggagtacacggagaacatgtgtacgattgaggtagaactcgagaacctgcttggggaattctcaattaaaatgaagggtctggccggtttcgcaagattgtgtcctggcgaccagtacgagatctttatgaagtacggcaggcagagatggaaattgaagggcaagatagaggttaatggaaagcagagttgggacggcgaagaaacagtttttctgccccttattgtggggttcatttctattaaggtcactgaactcaagggcctggcgacccatattctggtgggtagcgttacttgtgaaaccaaggaactgtttgcagcacgcccacaggtggtcgcagtggatatcaatgaccttgggaccataaaactaaacctcgagatcacatggtaccccttcgacgtggaagacatgacagcgagcagcggcgccggcaataaagcggccgcccttcaaaggcgcatgtccatgtacagccaagggacaccagagacacccacatttaaggaccatagcttcttttctaatcttcctgacgacattttcgagaacggcaaggcagcggaggaaaaaatgccgctgagcctgtcatttagtgatcttcccaacggcgactgtgctctcacctcccactcgactggttcaccttccaactccaccaatcctgagataactattacacctgcagagttcaatctctcatccttggcatctcagaatgagggtatggatgatacatcctccgcatcctcccgcaatagtcttggcgaaggccaggagccgaaatctcaccttaaggaagaagatcccgaagagcctagaaaacccgccagcgccccatctgaggcatgtagaaggcaatcctccggggccggagctgagcacttgtttttagaaaatgatgtcgcagaggccctgctccaggagagcgaagaagcatcggagcttaagcctgttgaattggacactagcgagggaaatattaccaaacagctggtcaaacgattgacgagcgcggaggtgcctatggcaacggaccggctgcttagtgaaggttccgtcggaggcgagtcagaaggctgccgaagctttctcgacggaagccttgaggacgctttcaatggactcctcttggcactggaacctcacaaggaacagtacaaggaatttcaggacctcaaccaggaggtgatgaatttggacgacatactgaaggacgctaagcatctggatgaccagaaactcaacggagccgctagctggactgagattaccgaaggcgagtag

SEQ ID NO: 104802 - DNA, 1944 bp, Artificial Sequence
  derived and/or modified sequence
atggtgctgcccagccggctgcactggatccggaaccggccctggagggaccgcatcagaagacggcagctgaaccggctgcccacccggctgcctgagatcatgctggtgggcagccagagcttcagccctgggggccccaacggcatcatccgcagccagagctttgctggcttcagcggcctgcaggagaggaggagccgctgcaacagcttcatcgagaacagcagcgccctgaagaagccccaggccaagctgaagaagatgcacaacctgggccacaagaacaacaacccccccaaggagccccagcccaagagggtggaggaggtgtaccgggccctgaagaatggcctggatgagtacctggaggtgcaccagacagagctggacaagctgacagcccagctgaaggacatgaagaggaacagccggctgggcgtgctgtatgacctggacaagcagatcaagaccatcgagcgctacatgaggcggctggagttccacatcagcaaggtggatgagctgtatgaggcctactgcatccagaggcggctgcaggatggagccagcaagatgaagcaggcctttgccaccagccctgccagcaaggccgcccgggagagcctgacagagatcaacagaagcttcaaggagtacacagagaacatgtgcaccatcgaggtggagctggagaacctgctgggggagttcagcatcaagatgaagggcctggccggctttgcccggctgtgccctggggaccagtatgagatcttcatgaagtatggccggcagcgctggaagctgaagggcaagattgaggtgaatggcaagcagagctgggatggagaggagaccgtcttcctgcccctgattgtgggcttcatcagcatcaaggtgacagagctgaagggcctggccacccacatcctggtgggctctgtgacctgtgagaccaaggagctgtttgctgcccggccccaggtggtggccgtggacatcaatgacctgggcaccatcaagctgaacctggagatcacctggtacccctttgatgtggaggacatgacagccagcagtggagctggcaacaaggccgccgccctgcagaggaggatgtccatgtacagccagggcaccccagagacccccaccttcaaggaccacagcttcttcagcaacctgcctgatgacatctttgaaaatggcaaggctgctgaggagaagatgcccctgagcctgtccttcagtgacctgcccaacggggactgtgccctgaccagccacagcacaggcagccccagcaacagcaccaaccctgagatcaccatcaccccagctgagttcaacctgagcagcctggccagccagaatgaaggcatggatgacaccagcagcgccagcagcaggaacagcctgggggagggccaggagcccaagagccacctgaaggaggaggaccctgaggagcccaggaagccagccagcgcccccagcgaggcctgccggcggcagagcagcggggccggggctgagcacctgttcctggagaatgatgtggccgaggccctgctgcaggagagcgaggaggccagcgagctgaagcctgtggagctggacaccagcgagggcaacatcaccaagcagctggtgaagaggctgaccagcgctgaggtgcccatggccacagaccggctgctgtctgagggctctgtgggcggggagagcgagggctgccgctccttcctggatggcagcctggaggatgccttcaacggcctgctgctggccctggagccccacaaggagcagtacaaggagttccaggacctgaaccaggaggtgatgaacctggatgacatcctgaaggatgccaagcacctggatgaccagaagctgaatggagctgcctcctggacagagatcacagaaggagagtag

SEQ ID NO: 104803 - DNA, 1944 bp, Artificial Sequence
  derived and/or modified sequence
atggtgctgcccagccggctgcactggatccggaaccggccctggagagacagaatcagaagaagacaactgaacaggctcccaacacggctgccggaaattatgctagttggatcccagtcgttctcacctggcggaccgaacggtattattaggtcccagagctttgcaggattcagcggactgcaagaacggcggagccgctgcaattccttcattgagaattctagtgctctcaagaagccgcaggctaagctgaagaagatgcataatcttggccacaaaaataacaaccctcctaaggagccacagccaaagcgagtcgaagaggtttaccgggccctcaaaaacgggcttgatgaatacctggaggtgcaccagacggaactggataaactaaccgcccagttgaaagacatgaaacgaaactccagattgggtgtactgtatgacttggacaaacagattaagacaatagaacgctacatgagacgcctggaatttcatatcagtaaggtggacgagctttatgaggcctactgcattcagagaaggctgcaggacggagcttccaagatgaagcaagcctttgcaacttcccccgcttccaaagccgcgcgcgaatccctgactgaaataaatcgatcattcaaggagtacacagagaatatgtgtaccatcgaggttgagctggagaatcttttgggcgaatttagcatcaagatgaagggcctggcaggctttgctagattgtgtccaggtgaccaatatgaaatcttcatgaaatacgggcggcagcgctggaaactgaagggcaagattgaagtgaatgggaaacaatcatgggacggagaggaaaccgtgttcctgccactcatcgtgggattcatcagcattaaagtgactgaattaaaggggttggcaacccacatcttggtcggttccgtgacatgcgaaaccaaggagttgttcgctgcccgaccacaggtggtggctgtagatataaacgacctgggcaccatcaaactgaacttggagattacctggtatcctttcgacgtggaagacatgacagcctcttccggcgcagggaataaggcagccgcactgcagcggagaatgtccatgtattcccaggggactccggaaacgcctacctttaaggatcacagtttcttcagcaacctgcccgacgacattttcgaaaatggtaaggcggccgaagagaaaatgcctttaagtttgtccttctctgacctgcctaacggcgactgtgccctgacctcacattctactggatcaccgtctaattcaactaacccagagattaccatcacccccgcggagttcaatctttccagccttgcctcgcagaacgaaggcatggacgatacctccagcgcatcttccagaaactccctaggcgaaggccaggaacctaagagtcacctgaaggaagaggaccctgaagagccccgcaaacctgcttcagctccatccgaggcctgccgacggcagtccagcggagcgggggctgagcacctattcttggaaaatgatgtcgcggaggccctgctgcaggaatctgaagaggctagcgaactgaaacccgttgagctcgatacaagtgagggaaacattactaaacagctggtgaagagactgacgagcgctgaggtccctatggctaccgaccgcctcctatcagaaggaagcgtaggaggcgagtccgaaggctgccgctcttttcttgacgggtcactggaggacgcctttaacggactgttgctggcgctggagccacacaaggaacagtacaaggagttccaagaccttaaccaggaggtgatgaacctggacgatatcctaaaggacgctaaacacctggacgatcagaaactgaacggcgctgcaagttggactgagattactgagggagaatag

SEQ ID NO: 104804 - DNA, 1944 bp, Artificial Sequence
  derived and/or modified sequence
atggtgttaccctcacggcttcattggattaggaatcgtccttggagagataggataagacgcagacagcttaacagactgccaactagattacctgagattatgctagtgggaagccaatccttcagtcctggtggcccaaacggcatcattcgaagccagtccttcgcgggattcagcggcctccaggaacggagaagccggtgtaattctttcatagaaaattcctccgctctcaaaaaaccgcaagccaagttgaagaagatgcacaacctgggacacaaaaataacaaccccccaaaagaaccgcagcccaagagagtggaagaggtgtatagagccttgaagaacggtctcgacgagtatctcgaggttcaccaaactgagctcgacaaactgacagcccagctgaaggacatgaaaaggaatagtagattaggggtgctgtacgacctggataaacagatcaaaaccatcgaacgctatatgaggcggttagagttccatatatctaaggtagacgagctgtatgaagcatactgcatacagcgtagactgcaagatggtgcctctaaaatgaaacaggcctttgctacaagtcctgcctccaaggcagcacgggaaagcctcacggagatcaatcgttcttttaaggagtacacagagaatatgtgcacaatcgaggttgagctggagaatctcttgggagaattttcaatcaaaatgaagggtttggcaggattcgcgcgtctttgcccaggcgatcagtacgaaatttttatgaagtatggccgacagagatggaagctgaaaggcaaaatcgaagtgaacggtaagcagagctgggacggtgaggagacggttttcctgccactgattgtagggtttatttctattaaggtcactgagctgaaggggctggccactcatatccttgtgggcagtgttacatgcgaaaccaaggaattattcgcagcacgaccccaggttgtcgcagtggatattaacgaccttggcacgattaagctgaatttagaaatcacttggtatcctttcgatgtggaggacatgaccgccagcagtggtgcaggcaacaaagccgctgcccttcagaggaggatgagcatgtactcacagggcacaccagagacccccactttcaaggatcactctttcttcagtaacttacctgatgacattttcgagaatgggaaggcggctgaagaaaagatgcctctttcgctctcattcagcgatctaccaaacggcgattgcgctctgacaagccacagtaccgggtctccaagtaatagtaccaacccggagatcaccattaccccagctgaattcaatttgtcttcactcgctagtcagaatgaaggaatggacgacacctctagcgcttcaagccgcaacagtttgggagaggggcaagagcctaaatcacacctgaaggaagaagaccctgaagagccgagaaaaccagctagcgccccttcagaagcctgcaggcgccagtcctctggggctggcgcagagcacttgtttctggaaaatgacgtcgctgaggctctgctccaggagagtgaagaggcctccgagctaaaacccgtggagttggacacatctgaaggcaacatcacgaaacaactggtgaaacgacttacctccgcagaagtgcccatggctacagacaggctcctgagtgaaggctccgtaggcggagaatccgaggggtgccgctctttcctagacgggagcctagaggacgcttttaacggattgttactggctctcgagccccacaaggagcagtataaggagttccaggaccttaatcaggaggtgatgaacttggacgatatcctgaaagacgctaaacatttggatgatcagaagctgaatggagcggcatcttggactgagatcaccgaaggagaatag

SEQ ID NO: 104805 - DNA, 1944 bp, Artificial Sequence
  derived and/or modified sequence
atggtgctgcccagcagactgcactggatcagaaacagaccctggagagacagaatcagaagaagacagctgaacagactgcccaccagactgcccgagatcatgctggtgggcagccagagcttcagccccggcggccccaacggcatcatcagaagccagagcttcgccggcttcagcggcctgcaggagagaagaagcagatgcaacagcttcatcgagaacagcagcgccctgaagaagccccaggccaagctgaagaagatgcacaacctgggccacaagaacaacaacccccccaaggagccccagcccaagagagtggaggaggtgtacagagccctgaagaacggcctggacgagtacctggaggtgcaccagaccgagctggacaagctgaccgcccagctgaaggacatgaagagaaacagcagactgggcgtgctgtacgacctggacaagcagatcaagaccatcgagagatacatgagaagactggagttccacatcagcaaggtggacgagctgtacgaggcctactgcatccagagaagactgcaggacggcgccagcaagatgaagcaggccttcgccaccagccccgccagcaaggccgccagagagagcctgaccgagatcaacagaagcttcaaggagtacaccgagaacatgtgcaccatcgaggtggagctggagaacctgctgggcgagttcagcatcaagatgaagggcctggccggcttcgccagactgtgccccggcgaccagtacgagatcttcatgaagtacggcagacagagatggaagctgaagggcaagatcgaggtgaacggcaagcagagctgggacggcgaggagaccgtgttcctgcccctgatcgtgggcttcatcagcatcaaggtgaccgagctgaagggcctggccacccacatcctggtgggcagcgtgacctgcgagaccaaggagctgttcgccgccagaccccaggtggtggccgtggacatcaacgacctgggcaccatcaagctgaacctggagatcacctggtaccccttcgacgtggaggacatgaccgccagcagcggcgccggcaacaaggccgccgccctgcagagaagaatgagcatgtacagccagggcacccccgagacccccaccttcaaggaccacagcttcttcagcaacctgcccgacgacatcttcgagaacggcaaggccgccgaggagaagatgcccctgagcctgagcttcagcgacctgcccaacggcgactgcgccctgaccagccacagcaccggcagccccagcaacagcaccaaccccgagatcaccatcacccccgccgagttcaacctgagcagcctggccagccagaacgagggcatggacgacaccagcagcgccagcagcagaaacagcctgggcgagggccaggagcccaagagccacctgaaggaggaggaccccgaggagcccagaaagcccgccagcgcccccagcgaggcctgcagaagacagagcagcggcgccggcgccgagcacctgttcctggagaacgacgtggccgaggccctgctgcaggagagcgaggaggccagcgagctgaagcccgtggagctggacaccagcgagggcaacatcaccaagcagctggtgaagagactgaccagcgccgaggtgcccatggccaccgacagactgctgagcgagggcagcgtgggcggcgagagcgagggctgcagaagcttcctggacggcagcctggaggacgccttcaacggcctgctgctggccctggagccccacaaggagcagtacaaggagttccaggacctgaaccaggaggtgatgaacctggacgacatcctgaaggacgccaagcacctggacgaccagaagctgaacggcgccgccagctggaccgagatcaccgagggcgagtag

SEQ ID NO: 104806 - protein, 613 aa, Artificial Sequence
  derived and/or modified sequence
MLVGSQSFSPGGPNGIIRSQSFAGFSGLQERRSRCNSFIENSSALKKPQAKLKKMHNLGHKNNNPPKEPQPKRVEEVYRALKNGLDEYLEVHQTELDKLTAQLKDMKRNSRLGVLYDLDKQIKTIERYMRRLEFHISKVDELYEAYCIQRRLQDGASKMKQAFATSPASKAARESLTEINRSFKEYTENMCTIEVELENLLGEFSIKMKGLAGFARLCPGDQYEIFMKYGRQRWKLKGKIEVNGKQSWDGEETVFLPLIVGFISIKVTELKGLATHILVGSVTCETKELFAARPQVVAVDINDLGTIKLNLEITWYPFDVEDMTASSGAGNKAAALQRRMSMYSQGTPETPTFKDHSFFSNLPDDIFENGKAAEEKMPLSLSFSDLPNGDCALTSHSTGSPSNSTNPEITITPAEFNLSSLASQNEGMDDTSSASSRNSLGEGQEPKSHLKEEDPEEPRKPASAPSEACRRQSSGAGAEHLFLENDVAEALLQESEEASELKPVELDTSEGNITKQLVKRLTSAEVPMATDRLLSEGSVGGESEGCRSFLDGSLEDAFNGLLLALEPHKEQYKEFQDLNQEVMNLDDILKDAKHLDDQKLNGAASWTEITEGE

SEQ ID NO: 104807 - DNA, 1842 bp, Artificial Sequence
  derived and/or modified sequence
atgctggtcgggtcccaatccttctcccccggtggtccaaatggaataatcaggtcacaatctttcgcaggattcagtgggctccaggagcgtcggtcacgatgcaattccttcatcgagaactcttccgccttaaagaagccacaggcgaaactgaagaagatgcacaacctcgggcacaagaacaataaccctcccaaagagcctcagcctaaaagagtggaggaggtttacagagcactgaagaatggccttgacgagtatctagaggttcaccaaaccgagctcgataagctcaccgcccagttgaaagatatgaaaaggaattctaggctgggagtgctatacgatctagataagcagattaagaccatcgaacgctacatgagaagactggaattccacatatcgaaagtggacgagctgtacgaggcctactgcatccaaagacggctacaggacggagcaagcaaaatgaaacaagcattcgctacatctcccgcctcaaaagccgcacgggaatccctcactgaaatcaatagatcctttaaagaatacactgaaaacatgtgcacaatcgaggtggaattggaaaacctcctcggagagttttcaattaaaatgaagggactggcaggtttcgcgcggctgtgtcctggagatcagtatgaaatctttatgaaatatgggcggcagagatggaaattgaaagggaagattgaggttaatggaaagcagagctgggatggcgaagagaccgttttcttacctctgatcgtgggcttcataagcataaaggtgacagagctgaaaggattggcgacccacattctggtcgggtccgtcacatgcgagaccaaagaactgtttgctgcacgccctcaggtcgtcgctgtcgacatcaatgatttgggaaccataaagctgaacctagagatcacgtggtacccgttcgatgtggaggacatgacagcttcgtcaggcgctggaaacaaagcagcagcactacaaaggcggatgtctatgtactcccagggaacgcctgagaccccgacattcaaggatcacagctttttctcaaatctacctgatgacatcttcgaaaacgggaaggccgcagaggagaagatgcccctgtccttgtccttctcggacctaccaaatggggattgcgcccttaccagccactcaacaggcagtccttcaaactcgacaaaccccgaaatcactattacccctgcagaatttaaccttagttctttggcttcgcaaaacgaaggtatggatgatacctcttccgctagtagtcgaaattcactgggagaagggcaggaacccaagtcccacctgaaggaagaagatcccgaggaacctcgcaaacccgcatccgccccaagcgaagcctgtcggcggcagtcaagcggcgctggggctgagcatttgttcctcgagaacgacgttgctgaggcactgctgcaggagtccgaggaggccagcgagctcaaacccgtggagcttgacacatccgaagggaacattacaaaacagctggtcaagagattgacttcagccgaagtaccaatggcgacggaccgactactctcagaggggtccgttggcggagaatctgaagggtgccgctctttcctcgatgggagcctggaggatgcttttaatgggctgctattggcactcgaaccacacaaagaacagtataaagagttccaggacctgaaccaagaggttatgaacctggacgatattctgaaggatgctaaacatttggacgatcagaagctgaatggggcagcatcttggacagagattaccgaaggtgagtag

SEQ ID NO: 104808 - DNA, 1842 bp, Artificial Sequence
  derived and/or modified sequence
atgctggtgggcagccagagcttcagccctgggggccccaacggcatcatccgcagccagagctttgctggcttcagcggcctgcaggagaggaggagccgctgcaacagcttcatcgagaacagcagcgccctgaagaagccccaggccaagctgaagaagatgcacaacctgggccacaagaacaacaacccccccaaggagccccagcccaagagggtggaggaggtgtaccgggccctgaagaatggcctggatgagtacctggaggtgcaccagacagagctggacaagctgacagcccagctgaaggacatgaagaggaacagccggctgggcgtgctgtatgacctggacaagcagatcaagaccatcgagcgctacatgaggcggctggagttccacatcagcaaggtggatgagctgtatgaggcctactgcatccagaggcggctgcaggatggagccagcaagatgaagcaggcctttgccaccagccctgccagcaaggccgcccgggagagcctgacagagatcaacagaagcttcaaggagtacacagagaacatgtgcaccatcgaggtggagctggagaacctgctgggggagttcagcatcaagatgaagggcctggccggctttgcccggctgtgccctggggaccagtatgagatcttcatgaagtatggccggcagcgctggaagctgaagggcaagattgaggtgaatggcaagcagagctgggatggagaggagaccgtcttcctgcccctgattgtgggcttcatcagcatcaaggtgacagagctgaagggcctggccacccacatcctggtgggctctgtgacctgtgagaccaaggagctgtttgctgcccggccccaggtggtggccgtggacatcaatgacctgggcaccatcaagctgaacctggagatcacctggtacccctttgatgtggaggacatgacagccagcagtggagctggcaacaaggccgccgccctgcagaggaggatgtccatgtacagccagggcaccccagagacccccaccttcaaggaccacagcttcttcagcaacctgcctgatgacatctttgaaaatggcaaggctgctgaggagaagatgcccctgagcctgtccttcagtgacctgcccaacggggactgtgccctgaccagccacagcacaggcagccccagcaacagcaccaaccctgagatcaccatcaccccagctgagttcaacctgagcagcctggccagccagaatgaaggcatggatgacaccagcagcgccagcagcaggaacagcctgggggagggccaggagcccaagagccacctgaaggaggaggaccctgaggagcccaggaagccagccagcgcccccagcgaggcctgccggcggcagagcagcggggccggggctgagcacctgttcctggagaatgatgtggccgaggccctgctgcaggagagcgaggaggccagcgagctgaagcctgtggagctggacaccagcgagggcaacatcaccaagcagctggtgaagaggctgaccagcgctgaggtgcccatggccacagaccggctgctgtctgagggctctgtgggcggggagagcgagggctgccgctccttcctggatggcagcctggaggatgccttcaacggcctgctgctggccctggagccccacaaggagcagtacaaggagttccaggacctgaaccaggaggtgatgaacctggatgacatcctgaaggatgccaagcacctggatgaccagaagctgaatggagctgcctcctggacagagatcacagaaggagagtag

SEQ ID NO: 104809 - DNA, 1842 bp, Artificial Sequence
  derived and/or modified sequence
atgctggtgggcagccagagcttcagccccggcggccccaacggcattattcgctcgcaatcctttgcaggctttagcggtctgcaagaaagacggtcaaggtgtaatagcttcatcgagaacagctctgcactcaagaagcctcaggctaaactcaagaagatgcataacctgggacacaagaataacaacccccccaaagaaccacagccaaaacgtgtagaggaagtttacagggccctgaaaaacgggctagacgagtatctggaagtacatcagacagagctcgataagcttactgctcagttgaaggacatgaagagaaattcaaggctgggagtgctgtatgacttagacaagcaaatcaagaccatcgaaaggtatatgcgccgccttgagttccacattagcaaggtggacgagctctatgaagcctactgtatccagcgcaggctgcaagacggcgcaagtaagatgaagcaggcgtttgctactagtcccgcctccaaagccgcccgcgaaagtctaactgagatcaaccgatcttttaaggagtacaccgaaaacatgtgtacaatcgaagttgaattggaaaatcttctgggcgagttctccattaagatgaagggcctggccggctttgcacggctctgtccaggagatcagtatgagatttttatgaaatacggtcgccaacgttggaaactgaagggcaagatcgaggtcaatggcaagcagtcgtgggacggcgaggaaacagtgttcctaccactgatcgtcggttttatctccatcaaggttacagagctgaagggacttgcaactcacatcctcgtgggatcagtaacctgtgaaacaaaagaattgttcgccgcccggccacaggttgtggccgtggatatcaacgacctggggaccatcaaactaaacctcgagataacttggtacccattcgacgtagaagacatgacagcatcaagcggtgccggcaataaggccgctgcactccaacggcgcatgagtatgtactcacagggcacacctgagacgcctacgttcaaagaccactccttcttttcgaaccttcctgatgacatctttgagaatggaaaagctgcggaggagaagatgccactctccctttctttcagtgatttgccaaatggcgactgcgctctcacgtctcactcaactgggtccccttccaactccaccaaccctgaaataaccatcacaccagccgaatttaatctgtcaagtctggcgtcccaaaatgagggcatggatgataccagctcagcctcttcccgaaattcactgggggaaggtcaggaaccgaagtctcacctcaaagaagaggatcccgaagaaccaaggaagcccgcatccgcgccctcggaggcttgccgacgacaatcatcaggagccggggcggagcatctgttcctggaaaacgatgtggccgaggccctgctgcaggaaagcgaagaggctagtgagctgaaacccgttgagcttgacacatctgaggggaatatcacaaaacagctcgtcaaacggctgacctccgccgaggtaccaatggccaccgatcggctgctcagcgagggtagtgtcgggggcgagtccgaagggtgtaggagtttcttagacggctccctggaagacgcattcaatggacttcttctggcattagagccacataaggagcagtacaaagaatttcaggatctaaatcaggaagttatgaatttggatgacatactcaaggacgccaaacaccttgacgaccaaaagctgaacggtgccgccagttggaccgagatcactgagggggagtag

SEQ ID NO: 104810 - DNA, 1842 bp, Artificial Sequence
  derived and/or modified sequence
atgttggtaggctcccagtcattctcacccggaggacctaacggcatcattagatctcagtctttcgccggattcagtggcctgcaggaaagaagatcaagatgcaactctttcatagaaaatagctcagccctgaagaaaccccaggcaaaactgaagaagatgcacaatctaggtcacaaaaacaacaatcctcccaaagaaccccagcccaagcgggtcgaggaagtgtacagggccttgaaaaatggtttggatgagtacctggaggtacaccagactgaactcgataaactgaccgctcagctcaaagatatgaaaagaaattccaggctgggagtcctctatgatctcgataagcagattaaaaccatagagcgttatatgcggaggttagagtttcacatttcaaaggtggatgagctctacgaggcttattgcatccagaggagactgcaagatggtgccagcaaaatgaaacaggcgtttgcgacctctcccgctagtaaggcagccagagaatcactaaccgagattaaccggtcgtttaaagagtataccgagaacatgtgcaccatcgaggtcgagttggagaatctgcttggcgaattcagcatcaagatgaagggcctggccggattcgcgagattatgtcccggagaccaatacgagatttttatgaaatacgggaggcaaagatggaagctgaagggcaagatcgaggtgaacgggaagcagtcctgggacggagaagagaccgtcttcctgccgctcattgtgggtttcatttctatcaaagtcaccgaactcaaagggctggcaactcacatcttagtgggatccgttacctgtgaaactaaagagctgttcgcagccaggccccaggtcgtggccgtagatatcaatgacctggggacaataaagctgaacctggagatcacatggtatccattcgatgtggaggacatgacagcgagcagtggagccggtaacaaggccgcagcactgcagagaaggatgagtatgtacagccagggcacacccgagacacctacgtttaaagaccatagcttcttctcaaacctccccgatgacatcttcgagaatggaaaagcggcagaagagaagatgccacttagtctctccttcagcgacctcccaaatggggactgcgccctgaccagccactccacaggcagcccatctaactctaccaatcctgagattaccatcacacccgctgagttcaacctgtcttctctggccagccagaacgagggaatggatgatacaagctcagcttctagcaggaatagtttgggggaggggcaggaacctaaatcacacctcaaggaagaagatccagaagaaccgcgtaagcctgcctccgccccttccgaggcatgcaggcggcagtcatccggtgccggagcagagcacttattccttgaaaacgatgtcgcggaggcactgctgcaggaaagtgaagaggccagcgaactgaagccagttgaactggatacaagtgagggcaacataacaaagcaacttgtcaaaagacttacctccgcagaagtgcccatggcgacagatcgcctgttgtctgagggatcagtgggcggagagtcagagggttgtaggagctttttggatggtagtctcgaggacgcattcaacggattactgctagccctcgagccgcacaaggagcaatacaaggagtttcaggatttaaatcaggaggtgatgaatctggacgacattctaaaggacgccaagcacctggacgaccagaagctaaatggagctgcttcctggacagagatcacggagggagaatag

SEQ ID NO: 104811 - DNA, 1842 bp, Artificial Sequence
  derived and/or modified sequence
atgctggtgggcagccagagcttcagccccggcggccccaacggcatcatcagaagccagagcttcgccggcttcagcggcctgcaggagagaagaagcagatgcaacagcttcatcgagaacagcagcgccctgaagaagccccaggccaagctgaagaagatgcacaacctgggccacaagaacaacaacccccccaaggagccccagcccaagagagtggaggaggtgtacagagccctgaagaacggcctggacgagtacctggaggtgcaccagaccgagctggacaagctgaccgcccagctgaaggacatgaagagaaacagcagactgggcgtgctgtacgacctggacaagcagatcaagaccatcgagagatacatgagaagactggagttccacatcagcaaggtggacgagctgtacgaggcctactgcatccagagaagactgcaggacggcgccagcaagatgaagcaggccttcgccaccagccccgccagcaaggccgccagagagagcctgaccgagatcaacagaagcttcaaggagtacaccgagaacatgtgcaccatcgaggtggagctggagaacctgctgggcgagttcagcatcaagatgaagggcctggccggcttcgccagactgtgccccggcgaccagtacgagatcttcatgaagtacggcagacagagatggaagctgaagggcaagatcgaggtgaacggcaagcagagctgggacggcgaggagaccgtgttcctgcccctgatcgtgggcttcatcagcatcaaggtgaccgagctgaagggcctggccacccacatcctggtgggcagcgtgacctgcgagaccaaggagctgttcgccgccagaccccaggtggtggccgtggacatcaacgacctgggcaccatcaagctgaacctggagatcacctggtaccccttcgacgtggaggacatgaccgccagcagcggcgccggcaacaaggccgccgccctgcagagaagaatgagcatgtacagccagggcacccccgagacccccaccttcaaggaccacagcttcttcagcaacctgcccgacgacatcttcgagaacggcaaggccgccgaggagaagatgcccctgagcctgagcttcagcgacctgcccaacggcgactgcgccctgaccagccacagcaccggcagccccagcaacagcaccaaccccgagatcaccatcacccccgccgagttcaacctgagcagcctggccagccagaacgagggcatggacgacaccagcagcgccagcagcagaaacagcctgggcgagggccaggagcccaagagccacctgaaggaggaggaccccgaggagcccagaaagcccgccagcgcccccagcgaggcctgcagaagacagagcagcggcgccggcgccgagcacctgttcctggagaacgacgtggccgaggccctgctgcaggagagcgaggaggccagcgagctgaagcccgtggagctggacaccagcgagggcaacatcaccaagcagctggtgaagagactgaccagcgccgaggtgcccatggccaccgacagactgctgagcgagggcagcgtgggcggcgagagcgagggctgcagaagcttcctggacggcagcctggaggacgccttcaacggcctgctgctggccctggagccccacaaggagcagtacaaggagttccaggacctgaaccaggaggtgatgaacctggacgacatcctgaaggacgccaagcacctggacgaccagaagctgaacggcgccgccagctggaccgagatcaccgagggcgagtag

SEQ ID NO: 104812 - DNA, 1086 bp, Artificial Sequence
  derived and/or modified sequence
atggcaatcgacagacgtagagaggctgctggcggcggtccagggcggcagcccgctcctgcagaagaaaatggatctctaccgccaggagacgctgccgcaagtgcaccactgggaggacgggcaggtcctggaggcggagcagaaattcaaccattaccaccactccacccgggggggggaccgcacccatcttgttgttccgcagccgctgcccccagcctgcttctcttggactacgacgggtccgtcctccccttcctgggaggactgggaggagggtaccagaaaactctggttctgctaacatggatccccgcacttttcatcgggttctcccagttctctgattcgtttttactggatcagcctaatttttggtgtagaggcgctggaaaaggtaccgagttggccggggtcaccacaaccggacggggcggagacatgggcaactggactagtctgcccacaaccccattcgccactgctccatgggaggcagccggcaaccggagcaatagcagcggtgctgacgggggcgacacacccccacttccatcacctcccgataaaggcgataatgcctccaattgtgattgtagggcttgggattacggaattcgagccggcctcgtacagaacgtggtctcaaagtgggacctggtttgcgataatgcctggaaagtgcacattgccaaattttccttgctggttggtttaattttcggctatttgataacaggctgtatcgccgattgggttggcagacgaccagtgctgctgttctccatcatcttcatcctgatattcgggctgaccgtagctctgtccgtgaatgttactatgttcagcacccttaggttcttcgagggcttttgtcttgccggcataatcctaacgctatacgctctccgtatcgagctgtgcccacctgggaaacgtttcatgattactatggtggccagcttcgtagccatggcgggtcagttccttatgcccgggctggctgctttatgccgcgattggcaggtccttcaagccttaattatctgtccctttctcctgatgttactgtattggtcatag

SEQ ID NO: 104813 - DNA, 1086 bp, Artificial Sequence
  derived and/or modified sequence
atggccatcgacagaagaagagaagctgctgggggcggccctggccggcagcctgccccagcagaagaaaatggcagcctgcccccaggagatgctgctgccagcgcccccctgggcggccgggccggccctgggggcggcgctgagatccagcccctgccccccctgcaccctgggggcggcccccaccccagctgctgcagcgctgctgctgcccccagcctgctgctgctggactatgatggctctgtgctgcccttcctgggcggcctgggcggcggctaccagaagaccctggtgctgctgacctggatcccagccctcttcatcggcttcagccagttcagtgacagcttcctgctggaccagcccaacttctggtgcagaggagctggaaaaggaacagagctggccggcgtgaccaccaccggccggggcggggacatgggcaactggaccagcctgcccaccaccccatttgccacagccccctgggaggccgccggcaacagaagcaacagcagtggagcagatggaggagacaccccacccctgcccagccccccagacaagggggacaatgccagcaactgtgactgccgggcctgggactatggcatccgggccggcctggtgcagaatgtggtgtccaagtgggacctggtgtgtgacaatgcctggaaggtgcacatcgccaagttcagcctgctggtgggcctcatcttcggctacctgatcaccggctgcatcgctgactgggtgggccggcggcctgtgctgctcttcagcatcatcttcatcctgatcttcggcctgactgtggccctgtctgtgaatgtgaccatgttcagcaccctgcgcttctttgagggcttctgcctggccggcatcatcctgaccctgtatgccctgcgcatcgagctgtgccccccaggcaagcgcttcatgatcaccatggtggccagctttgtggccatggccggccagttcctgatgcctggcctggccgccctgtgccgggactggcaggtgctgcaggccctgatcatctgccccttcctgctgatgctgctgtactggagctag

SEQ ID NO: 104814 - DNA, 1086 bp, Artificial Sequence
  derived and/or modified sequence
atggccatcgaccggcggcgggaggccgccggcggcggccccggccgacaaccggcccccgcggaggagaacggatccctgccgccaggggacgctgcagcatctgctccattaggtgggcgagccggtccggggggaggtgcagagatccagccacttcctcctctgcacccaggaggaggaccacatccaagctgttgtagcgccgccgccgccccctcactgctgctcctggattacgacgggagtgtactgcccttcctgggtggtttggggggcgggtaccagaagactttagttcttcttacgtggatccctgcactgtttatcggtttctcccagtttagtgactcgttcttacttgatcagccgaacttctggtgtcggggggcagggaaaggaactgagctggccggcgtgactacaaccgggaggggaggggatatgggcaattggacttcactcccaacgacgcccttcgcaacggcaccatgggaagctgcgggaaatcgttctaattcgagcggagccgacggcggtgacaccccccccctaccttctcccccagacaaaggcgacaatgcttccaactgtgattgcagggcttgggactacggtataagagccggactcgttcaaaatgtagtctccaagtgggacctggtgtgtgacaatgcatggaaggttcacatcgcaaagttctctttgttagtgggcctgattttcgggtaccttatcactggctgcattgctgactgggtcggcaggagacctgtcttgctgttttctattatctttattttgatctttggactgaccgtggctctgagcgtgaatgtcaccatgttctcgacattgcgcttcttcgagggtttctgccttgctggcatcatcttgaccctttacgccttacggatagagctgtgccctccaggaaaacggttcatgattaccatggtcgctagttttgtcgccatggcaggccaatttctgatgcctggcctcgccgccctgtgtagggattggcaggtcctacaggctctgataatctgtcccttcctgttgatgctgctttactggagctag

SEQ ID NO: 104815 - DNA, 1086 bp, Artificial Sequence
  derived and/or modified sequence
atggccatcgatagaaggcgcgaggccgcaggaggcggacccggacgccagcctgcacccgctgaggaaaacggcagtctgccaccaggcgacgcagcagccagtgcacccctgggaggtagagccggacctggaggcggagcagaaatccagccactgcctccattgcatcctgggggtgggccacatcccagctgttgctccgcggctgctgctccatccctcctgctcctggactacgacggctccgtactgccgttcctgggtggcctgggagggggttaccaaaaaacactggtgctcctgacgtggatacccgctttgtttattggcttctcccagtttagtgattctttcttgctcgatcagcctaatttctggtgtagaggagcagggaagggcacagaactggccggagtcacaaccactggtcgaggcggagacatgggaaattggacttcactgccaactacaccatttgcgacagctccttgggaagctgcagggaatcgttcaaactctagcggcgctgatggcggtgacacaccacctctgccctctccaccggacaagggcgataatgccagtaactgtgattgtcgggcttgggattacggcattagagccggactggttcaaaacgtggtgtcaaagtgggaccttgtgtgcgataacgcatggaaggttcacattgctaagtttagcctgctggtaggtcttatctttgggtatctgattaccggatgcatcgcagactgggtgggtagaaggcctgttctgctttttagcatcatctttatactcatttttgggctgactgtagccctgtctgtgaacgtaacaatgttttctacactgcgtttctttgagggcttttgcctggcaggcattatcttgaccctctatgcgctccgcattgaactgtgccctccaggcaaacgtttcatgatcactatggtggcctcttttgtggcaatggcaggtcagttcctgatgccgggtctcgctgccctgtgtagagattggcaggtgctccaggcattgattatctgcccctttctcctaatgttgctgtattggtcatag

SEQ ID NO: 104816 - DNA, 1574 bp, Artificial Sequence
  derived and/or modified sequence
atggccatagaccggcggcgcgaggcggcgggcggcgggcctgggcggcagccggccccggccgaggagaacggctccctgccgcccggggacgcggcggcctcggcgcccctcgggggacgcgcgggccccggcggcggcgcggagatccagccgctgcccccactgcatcctggaggcggcccgcacccgagctgctgctccgcggctgcggccccgagcctcttgttgctggactatgacgggtcggtgctgcccttcctcgggggcctgggcgggggctatcagaagaccctcgtgctgctcacctggatcccggcgctgttcatcggcttcagccagttctcggactcgttcctcctggaccagcccaacttctggtgccgcggggccggcaaaggcaccgagctggcaggggtcaccaccacaggccggggcggggacatgggcaactggaccagcctccccaccacccccttcgccactgccccctgggaggctgcgggcaaccggagcaacagcagcggcgcggacggaggcgacacaccacccctgccatcccctccggacaagggggacaacgcctccaactgtgactgccgcgcatgggactacggcatccgcgccggcctcgtccagaacgtggtcagcaagtgggatcttgtgtgtgataatgcctggaaggtccatatcgctaagttctccttactggttggattaatctttggctacctaataactggatgcattgctgactgggtcggccggcggcctgtgctgctgttttccatcatcttcattctgatctttggactgactgtggcactgtcagtgaatgtgacaatgttcagcacactcaggttctttgaaggattttgcctggctggaatcattctcaccttgtatgctttacgaatagagctgtgcccccctggaaaacggttcatgattacgatggtggcgagcttcgtggccatggcgggccagttcctcatgcctgggctagccgccctgtgccgggattggcaggtgctgcaggccctcatcatctgccccttcctgctcatgctgctctactggtcgtgagtacactctgcacagcgccctgggctggtgcgactgcacatgcttcctgaaggcccggccccgggcaggacacacaatccccacacttcccactagttgcagcttgtggttctgtctgagaaggttttcctctctttttaaaaaattttattgtttaaactttctgtcttggaaaactgttcaaatatacacaaaaatagaagagtggaatgagcccatcacccagctccaaaaatctgcaaatgcactggccagtctggctcaccccttcttgctacccaccccacggggttattctgacatgaatttttatgaatggattgcagggaggtggaggtcttgtgttaggaggggggatttggagatattaaaggagtgatttacaaaagtccccctatctcttctaggcgaggggtgggcaaccttcagcctgtgggccacatcaggcccactgtctgtttttgtaaataaagttttattggaacaca

SEQ ID NO: 104817 - DNA, 1086 bp, Artificial Sequence
  derived and/or modified sequence
atggccatcgacagaagaagagaggccgccggcggcggccccggcagacagcccgcccccgccgaggagaacggcagcctgccccccggcgacgccgccgccagcgcccccctgggcggcagagccggccccggcggcggcgccgagatccagcccctgccccccctgcaccccggcggcggcccccaccccagctgctgcagcgccgccgccgcccccagcctgctgctgctggactacgacggcagcgtgctgcccttcctgggcggcctgggcggcggctaccagaagaccctggtgctgctgacctggatccccgccctgttcatcggcttcagccagttcagcgacagcttcctgctggaccagcccaacttctggtgcagaggcgccggcaagggcaccgagctggccggcgtgaccaccaccggcagaggcggcgacatgggcaactggaccagcctgcccaccacccccttcgccaccgccccctgggaggccgccggcaacagaagcaacagcagcggcgccgacggcggcgacaccccccccctgcccagcccccccgacaagggcgacaacgccagcaactgcgactgcagagcctgggactacggcatcagagccggcctggtgcagaacgtggtgagcaagtgggacctggtgtgcgacaacgcctggaaggtgcacatcgccaagttcagcctgctggtgggcctgatcttcggctacctgatcaccggctgcatcgccgactgggtgggcagaagacccgtgctgctgttcagcatcatcttcatcctgatcttcggcctgaccgtggccctgagcgtgaacgtgaccatgttcagcaccctgagattcttcgagggcttctgcctggccggcatcatcctgaccctgtacgccctgagaatcgagctgtgcccccccggcaagagattcatgatcaccatggtggccagcttcgtggccatggccggccagttcctgatgcccggcctggccgccctgtgcagagactggcaggtgctgcaggccctgatcatctgccccttcctgctgatgctgctgtactggagctag

SEQ ID NO: 104818 - protein, 1110 aa, Artificial Sequence
  derived and/or modified sequence
CSHSDVGERTSPIPQQRPLQSHAEMAGNHRLGLEAGDTDDPPRITQNPVINGNVALSDGHNTAEEDMEDDTSWRSEATFQFTVERFSRLSESVLSPPCFVRNLPWKIMVMPRFYPDRPHQKSVGFFLQCNAESDSTSWSCHAQAVLKIINYRDDEKSFSRRISHLFFHKENDWGFSNFMAWSEVTDPEKGFIDDDKVTFEVFVQADAPHGVAWDSKKHTGYVGLKNQGATCYMNSLLQTLFFTNQLRKAVYMMPTEGDDSSKSVPLALQRVFYELQHSDKPVGTKKLTKSFGWETLDSFMQHDVQELCRVLLDNVENKMKGTCVEGTIPKLFRGKMVSYIQCKEVDYRSDRREDYYDIQLSIKGKKNIFESFVDYVAVEQLDGDNKYDAGEHGLQEAEKGVKFLTLPPVLHLQLMRFMYDPQTDQNIKINDRFEFPEQLPLDEFLQKTDPKDPANYILHAVLVHSGDNHGGHYVVYLNPKGDGKWCKFDDDVVSRCTKEEAIEHNYGGHDDDLSVRHCTNAYMLVYIRESKLSEVLQAVTDHDIPQQLVERLQEEKRIEAQKRKERQEAHLYMQVQIVAEDQFCGHQGNDMYDEEKVKYTVFKVLKNSSLAEFVQSLSQTMGFPQDQIRLWPMQARSNGTKRPAMLDNEADGNKTMIELSDNENPWTIFLETVDPELAASGATLPKFDKDHDVMLFLKMYDPKTRSLNYCGHIYTPISCKIRDLLPVMCDRAGFIQDTSLILYEEVKPNLTERIQDYDVSLDKALDELMDGDIIVFQKDDPENDNSELPTAKEYFRDLYHRVDVIFCDKTIPNDPGFVVTLSNRMNYFQVAKTVAQRLNTDPMLLQFFKSQGYRDGPGNPLRHNYEGTLRDLLQFFKPRQPKKLYYQQLKMKITDFENRRSFKCIWLNSQFREEEITLYPDKHGCVRDLLEECKKAVELGEKASGKLRLLEIVSYKIIGVHQEDELLECLSPATSRTFRIEEIPLDQVDIDKENEMLVTVAHFHKEVFGTFGIPFLLRIHQGEHFREVMKRIQSLLDIQEKEFEKFKFAIVMMGRHQYINEDEYEVNLKDFEPQPGNMSHPRPWLGLDHFNKAPKRSRYTYLEKAIKIHN

SEQ ID NO: 104819 - DNA, 3333 bp, Artificial Sequence
  derived and/or modified sequence
tgcagccacagcgacgtgggcgagagaaccagccccatcccccagcagagacccctgcagagccacgccgagatggccggcaaccacagactgggcctggaggccggcgacaccgacgacccccccagaatcacccagaaccccgtgatcaacggcaacgtggccctgagcgacggccacaacaccgccgaggaggacatggaggacgacaccagctggagaagcgaggccaccttccagttcaccgtggagagattcagcagactgagcgagagcgtgctgagccccccctgcttcgtgagaaacctgccctggaagatcatggtgatgcccagattctaccccgacagaccccaccagaagagcgtgggcttcttcctgcagtgcaacgccgagagcgacagcaccagctggagctgccacgcccaggccgtgctgaagatcatcaactacagagacgacgagaagagcttcagcagaagaatcagccacctgttcttccacaaggagaacgactggggcttcagcaacttcatggcctggagcgaggtgaccgaccccgagaagggcttcatcgacgacgacaaggtgaccttcgaggtgttcgtgcaggccgacgccccccacggcgtggcctgggacagcaagaagcacaccggctacgtgggcctgaagaaccagggcgccacctgctacatgaacagcctgctgcagaccctgttcttcaccaaccagctgagaaaggccgtgtacatgatgcccaccgagggcgacgacagcagcaagagcgtgcccctggccctgcagagagtgttctacgagctgcagcacagcgacaagcccgtgggcaccaagaagctgaccaagagcttcggctgggagaccctggacagcttcatgcagcacgacgtgcaggagctgtgcagagtgctgctggacaacgtggagaacaagatgaagggcacctgcgtggagggcaccatccccaagctgttcagaggcaagatggtgagctacatccagtgcaaggaggtggactacagaagcgacagaagagaggactactacgacatccagctgagcatcaagggcaagaagaacatcttcgagagcttcgtggactacgtggccgtggagcagctggacggcgacaacaagtacgacgccggcgagcacggcctgcaggaggccgagaagggcgtgaagttcctgaccctgccccccgtgctgcacctgcagctgatgagattcatgtacgacccccagaccgaccagaacatcaagatcaacgacagattcgagttccccgagcagctgcccctggacgagttcctgcagaagaccgaccccaaggaccccgccaactacatcctgcacgccgtgctggtgcacagcggcgacaaccacggcggccactacgtggtgtacctgaaccccaagggcgacggcaagtggtgcaagttcgacgacgacgtggtgagcagatgcaccaaggaggaggccatcgagcacaactacggcggccacgacgacgacctgagcgtgagacactgcaccaacgcctacatgctggtgtacatcagagagagcaagctgagcgaggtgctgcaggccgtgaccgaccacgacatcccccagcagctggtggagagactgcaggaggagaagagaatcgaggcccagaagagaaaggagagacaggaggcccacctgtacatgcaggtgcagatcgtggccgaggaccagttctgcggccaccagggcaacgacatgtacgacgaggagaaggtgaagtacaccgtgttcaaggtgctgaagaacagcagcctggccgagttcgtgcagagcctgagccagaccatgggcttcccccaggaccagatcagactgtggcccatgcaggccagaagcaacggcaccaagagacccgccatgctggacaacgaggccgacggcaacaagaccatgatcgagctgagcgacaacgagaacccctggaccatcttcctggagaccgtggaccccgagctggccgccagcggcgccaccctgcccaagttcgacaaggaccacgacgtgatgctgttcctgaagatgtacgaccccaagaccagaagcctgaactactgcggccacatctacacccccatcagctgcaagatcagagacctgctgcccgtgatgtgcgacagagccggcttcatccaggacaccagcctgatcctgtacgaggaggtgaagcccaacctgaccgagagaatccaggactacgacgtgagcctggacaaggccctggacgagctgatggacggcgacatcatcgtgttccagaaggacgaccccgagaacgacaacagcgagctgcccaccgccaaggagtacttcagagacctgtaccacagagtggacgtgatcttctgcgacaagaccatccccaacgaccccggcttcgtggtgaccctgagcaacagaatgaactacttccaggtggccaagaccgtggcccagagactgaacaccgaccccatgctgctgcagttcttcaagagccagggctacagagacggccccggcaaccccctgagacacaactacgagggcaccctgagagacctgctgcagttcttcaagcccagacagcccaagaagctgtactaccagcagctgaagatgaagatcaccgacttcgagaacagaagaagcttcaagtgcatctggctgaacagccagttcagagaggaggagatcaccctgtaccccgacaagcacggctgcgtgagagacctgctggaggagtgcaagaaggccgtggagctgggcgagaaggccagcggcaagctgagactgctggagatcgtgagctacaagatcatcggcgtgcaccaggaggacgagctgctggagtgcctgagccccgccaccagcagaaccttcagaatcgaggagatccccctggaccaggtggacatcgacaaggagaacgagatgctggtgaccgtggcccacttccacaaggaggtgttcggcaccttcggcatccccttcctgctgagaatccaccagggcgagcacttcagagaggtgatgaagagaatccagagcctgctggacatccaggagaaggagttcgagaagttcaagttcgccatcgtgatgatgggcagacaccagtacatcaacgaggacgagtacgaggtgaacctgaaggacttcgagccccagcccggcaacatgagccaccccagaccctggctgggcctggaccacttcaacaaggcccccaagagaagcagatacacctacctggagaaggccatcaagatccacaactag

SEQ ID NO: 104820 - DNA, 3333 bp, Artificial Sequence
  derived and/or modified sequence
tgtagccactctgacgtcggcgaacgaacttctcctatccctcagcagcggccattacagagccacgccgagatggccggcaaccatagacttggtctggaggccggcgacacagacgaccctcctaggatcacccagaaccccgtaattaacggtaacgttgctctttctgacgggcacaacaccgccgaggaggacatggaggatgatacctcatggaggtcagaggctacatttcagtttacagtggaaagattttccagattgtcggaatcagtgctttctcctccctgtttcgtgcgcaatctgccttggaagattatggtcatgcctcgtttctaccccgaccggcctcaccaaaaaagcgttggtttcttcctccagtgtaacgctgaatccgactcaacatcctggagctgtcatgcccaggccgttttgaaaatcatcaactaccgggatgatgagaaaagcttcagccggcgaattagtcatctcttcttccacaaggaaaatgactgggggtttagtaactttatggcatggtccgaggtgaccgacccggagaaaggattcattgacgatgacaaagtcaccttcgaggtgtttgtgcaagccgacgctccccatggcgtagcttgggattccaaaaaacataccggctacgtgggcttgaagaaccagggcgctacttgttacatgaactccctcctgcaaaccctcttctttactaatcagctgagaaaagctgtgtacatgatgccgacagaaggcgatgacagctccaagtcagtgcccctggcactccaaagggtgttttacgagctgcagcactccgacaagccagttgggactaagaagcttacaaagtcatttggttgggagactctagattcttttatgcagcatgatgttcaggagttatgccgggtcctgctcgacaacgttgagaacaaaatgaaaggtacatgcgtagaggggaccatacccaaactgttcagggggaagatggtcagttatatacagtgcaaggaagtcgactaccgatcagaccgcagggaggattactacgacatccagctgagcatcaagggcaaaaaaaacattttcgaatcttttgtggactatgtggccgtggagcaactagacggagataataagtatgatgcgggtgagcatggcttgcaggaggctgaaaaaggggttaagttcctgacactccccccagtgctgcacctgcagctcatgagatttatgtacgaccctcagactgaccagaacatcaaaattaacgatcgtttcgaattccccgagcagctccctctggacgaattcctccagaagaccgaccctaaagatcctgctaattatatcttacatgccgtccttgtgcattcaggtgataaccacgggggtcattacgttgtgtacctcaacccaaagggcgatggcaagtggtgtaaattcgatgatgacgtggtctcaagatgtacaaaagaggaagctatagaacacaactacggaggccatgacgacgacctgtccgtccgccattgtacaaatgcatatatgctcgtttacataagggaatccaaactatccgaggtcctgcaggccgtgaccgaccatgatataccacaacagctcgttgaaaggttgcaagaagaaaaaaggatcgaagcccaaaagcggaaagaaaggcaggaggcccatctatatatgcaggttcagattgtggcggaagatcaattctgtggccaccaaggtaatgacatgtacgacgaggagaaggtgaagtacaccgtctttaaggttttgaagaattcatcccttgcagaattcgtgcaatccctgtcgcagacaatgggttttccacaagatcaaatcagactgtggcccatgcaggcccggtccaatggcactaaacgacccgctatgctggacaacgaagccgacgggaacaagactatgatcgaactatctgataatgagaacccctggacaatttttctggagaccgtggacccggaactcgcggcaagtggggcaacactaccaaagttcgataaggaccatgatgtgatgttgtttctgaagatgtacgatcctaagacccgatcgctcaattactgcggtcatatttatactcctatatcttgtaagatcagggaccttttacccgtgatgtgtgatcgcgccggatttatacaggatacttctctcattctgtacgaggaggtcaagcctaatctcacagagcgaatacaagactacgatgtgagtctggacaaagcccttgacgagctgatggatggggacattatcgtcttccagaaggacgatccagagaatgataattccgagctgcctaccgccaaagagtattttcgggacctgtatcacagagtagatgtcatcttctgcgacaagaccatccctaatgacccaggttttgtagttaccctctccaatcgcatgaactacttccaggtcgctaagaccgtggctcagaggctcaataccgaccccatgttactccaattctttaaatcccaggggtatcgtgacgggccagggaatccccttaggcataactacgagggcaccctgagggatctgctgcagtttttcaaaccacggcagcccaagaaattgtattatcagcagctgaaaatgaaaattaccgattttgaaaatcgtaggagcttcaagtgtatctggctcaattctcaatttcgtgaggaggagatcactctgtaccctgataagcatggctgcgtgcgggatctactggaagaatgcaagaaggcggttgagctgggggaaaaagcctccggcaagttgagactccttgaaatcgtatcatacaagattatcggtgtgcaccaagaggatgagctgttggagtgcctgtcaccggcaacatctcggaccttccggatagaggaaatccctttggaccaggtcgatattgataaagagaacgaaatgttggtgactgtcgcccacttccataaggaagtctttggaaccttcggcatccctttcctgttgcggattcaccagggcgaacacttccgggaggtgatgaaaaggatacagagtttgctggatattcaggagaaggaattcgagaaattcaagttcgccattgtcatgatgggcaggcatcagtatatcaacgaagacgaatatgaggttaaccttaaggatttcgaacctcaacccggcaacatgtcccacccacgcccgtggcttggactcgatcactttaacaaggctccaaagagatctcgctacacatatctggaaaaggccatcaaaattcataactag

SEQ ID NO: 104821 - DNA, 3333 bp, Artificial Sequence
  derived and/or modified sequence
tgcagccacagtgatgtgggggagaggaccagccccatcccccagcagaggcccctgcagagccatgctgagatggccggcaaccaccggctgggcctggaggccggggacacagatgatcctccccgcatcacccagaaccctgtgatcaatggaaatgtggccctgagtgatggccacaacacagctgaggaggacatggaggatgacacctcctggaggtctgaggccaccttccagttcaccgtggagcgcttcagccggctgtctgagagcgtgctgagccccccctgctttgtgaggaacctgccctggaagatcatggtgatgccccgcttctacccagaccggccccaccagaagtctgtgggcttcttcctgcagtgcaatgctgagagtgacagcacctcctggagctgccacgcccaggccgtgctgaagatcatcaactacagagatgatgagaagagcttcagccgccgcatcagccacctgttcttccacaaggaaaatgactggggcttcagcaacttcatggcctggagcgaggtgacagatcctgagaagggcttcattgatgatgacaaggtgacctttgaggtgtttgtgcaggctgatgcccctcatggagtggcctgggacagcaagaagcacacaggctacgtgggcctgaagaaccagggcgccacctgctacatgaacagcctgctgcagaccctcttcttcaccaaccagctgaggaaggctgtgtacatgatgcccacagaaggagatgacagcagcaagtctgtgcccctggccctgcagagggtcttctatgagctgcagcacagcgacaagcctgtgggcaccaagaagctgaccaagagctttggctgggagaccctggacagcttcatgcagcatgatgtgcaggagctgtgccgggtgctgctggacaacgtggagaacaagatgaagggcacctgtgtggagggcaccatccccaagctgttccggggcaagatggtgtcctacatccagtgcaaggaggtggactacagaagtgacagaagagaggactactatgacatccagctgagcatcaagggcaagaagaacatctttgagagctttgtggactatgtggccgtggagcagctggatggagacaacaagtatgatgctggggagcacggcctgcaggaggccgagaagggcgtgaagttcctgaccctgccccctgtgctgcacctgcagctgatgaggttcatgtatgacccccagacagaccagaacatcaagatcaatgacagatttgagttccctgagcagctgcccctggatgagttcctgcagaagacagaccccaaggaccctgccaactacatcctgcatgctgtgctggtgcacagcggggacaaccacggcggccactacgtggtgtacctgaaccccaagggagatggcaagtggtgcaagtttgatgatgatgtggtgagccgctgcaccaaggaggaggccatcgagcacaactacggcggccatgatgatgacctgtctgtgcgccactgcaccaatgcctacatgctggtgtacatccgggagagcaagctgtctgaggtgctgcaggccgtgacagaccatgacatcccccagcagctggtggagcggctgcaggaggagaagagaattgaggcccagaagaggaaggagcggcaggaggcccacctgtacatgcaggtgcagatcgtggccgaggaccagttctgtggccaccagggcaatgacatgtatgatgaggagaaggtgaagtacaccgtcttcaaggtgctgaagaacagcagcctggccgagtttgtgcagagcctgagccagaccatgggcttcccccaggaccagatccggctgtggcccatgcaggcccggagcaatggcaccaagaggcctgccatgctggacaatgaagcagatggcaacaagaccatgattgagctgagtgacaatgaaaacccctggaccatcttcctggagaccgtggaccctgagctggccgccagcggggccaccctgcccaagtttgacaaggaccatgatgtgatgctgttcctgaagatgtatgaccccaagaccaggagcctgaactactgcggccacatctacacccccatcagctgcaagatccgggacctgctgcctgtgatgtgtgaccgggccggcttcatccaggacaccagcctcatcctgtatgaggaggtgaagcccaacctgacagagcgcatccaggactatgatgtgtccctggacaaggccctggatgagctgatggatggagacatcatcgtgttccagaaggatgatcctgaaaatgacaacagcgagctgcccacagccaaggagtacttccgggacctgtaccaccgggtggatgtgatcttctgtgacaagaccatccccaatgaccccggctttgtggtgaccctgagcaacaggatgaactacttccaggtggccaagacagtggcccagaggctgaacacagaccccatgctgctgcagttcttcaagagccagggctacagagatggccctggcaaccccctgcggcacaactatgagggcaccctgcgggacctgctgcagttcttcaagccccggcagcccaagaagctgtactaccagcagctgaagatgaagatcacagactttgaaaatagaagaagcttcaagtgcatctggctgaacagccagttccgggaggaggagatcaccctgtacccagacaagcacggctgtgtgcgggacctgctggaggagtgcaagaaggctgtggagctgggggagaaggccagcggcaagctgcggctgctggagatcgtgtcctacaagatcatcggcgtgcaccaggaggatgagctgctggagtgcctgagccctgccaccagcaggaccttccgcatcgaggagatccccctggaccaggtggacatcgacaaggaaaatgagatgctggtgacagtggcccacttccacaaggaggtgtttggcaccttcggcatccccttcctgctgcgcatccaccagggcgagcacttccgggaggtgatgaagaggatccagagcctgctggacatccaggagaaggagtttgagaagttcaagtttgccatcgtgatgatgggccgccaccagtacatcaatgaagatgaatatgaggtgaacctgaaggactttgagccccagcccggcaacatgagccacccccggccctggctgggcctggaccacttcaacaaggcccccaagaggagccgctacacctacctggagaaggccatcaagatccacaactag

SEQ ID NO: 104822 - DNA, 3333 bp, Artificial Sequence
  derived and/or modified sequence
tgcagccacagcgacgtgggcgagcggaccagccccatcccccagcagagaccacttcagtcacatgcggagatggccggcaatcataggctggggctcgaagctggagacaccgacgacccccctcgaattactcagaaccctgtaattaacgggaatgtggctctgtccgatggtcataacaccgcagaagaggacatggaagacgatacatcctggcggtcagaggcaacatttcagtttacagtcgagagattttcaaggctgagcgagtctgtcctgagtcctccatgtttcgtcaggaatcttccatggaagataatggtcatgccccggttttaccccgacagaccgcatcagaagagcgtgggctttttcctgcagtgcaacgccgaatccgactctacgagttggtcttgtcatgcacaggccgtcctcaagatcataaattatcgcgatgatgagaagtcatttagcagacgaattagccacctattttttcacaaggagaacgactggggtttcagcaattttatggcgtggagcgaagtaacagatcctgaaaagggatttatcgacgacgacaaggtgacatttgaggtttttgtacaggccgacgcccctcatggtgttgcctgggactcgaaaaagcatacagggtatgtgggactgaaaaatcagggagccacctgttacatgaattcactacttcagactctgttctttactaaccagttacgtaaggccgtgtacatgatgcctaccgagggagacgacagttctaagagcgttccactggccctgcagcgtgtgttttacgagttgcagcactctgataagcccgtcggcacaaaaaagttgaccaaaagcttcgggtgggagaccctggacagcttcatgcaacatgacgtgcaggagctgtgtcgggtgttactggacaacgtggagaataaaatgaagggaacatgcgtggaaggaaccatacctaagctttttcgtggcaaaatggttagttacattcagtgcaaggaagttgattatagatctgacagacgggaggactactacgacatccaactgtccatcaagggcaaaaaaaatatcttcgagtccttcgtcgactacgtcgcagtagagcagttagatggcgacaataagtatgatgcaggggaacacggcttgcaggaggcagaaaaaggcgtcaaattccttactctgccaccagtgctgcacctgcagctcatgcggttcatgtacgatccgcagaccgaccaaaatataaaaataaacgatcgcttcgagtttcctgaacagcttcctctggacgaattcctgcagaaaactgatccaaaggaccccgctaactacatcctgcacgctgtgctggttcactctggagacaaccacggcggtcactacgtcgtatacctaaaccccaagggcgatggaaaatggtgtaaatttgatgatgacgttgtgtctcgctgcaccaaggaagaggccattgagcataactatggcggccatgacgacgatctctcagtgcgccactgcacaaatgcttacatgctggtatatatccgagagtcgaaactgtcggaggttttacaggcggttactgaccatgatatcccccagcagctggttgaacgattgcaggaagagaagcgcatcgaagctcagaagagaaaagagcgacaagaagcacacctctatatgcaggtgcagatagttgccgaggatcagttttgtggccatcaaggcaacgacatgtatgacgaggagaaggttaaatacacagtcttcaaggtcctgaaaaacagctcacttgcagagtttgtgcagagcctgagtcaaaccatgggatttccacaggatcaaatcagactttggcctatgcaggcccgatctaacggcacaaagcgacccgctatgctggacaacgaggcagatgggaacaagacaatgatcgaactttctgacaatgagaatccttggaccattttccttgaaaccgttgacccagaacttgcagcctccggcgccactctgcctaaattcgacaaggaccatgacgtcatgctattcctgaaaatgtacgaccctaaaactagaagtctcaactattgcgggcacatatatactcctataagctgcaagatccgggatctgcttcccgtcatgtgcgatagagccggctttattcaggataccagtctcattctgtacgaagaggtgaagccgaacttaacagaaaggattcaggactatgacgtgagccttgacaaagcccttgatgaactcatggatggcgatataatcgttttccagaaggacgatccagaaaacgacaatagcgaattgcctacagccaaagagtactttagggacctctatcacagagtagacgtgattttctgtgataaaactatacccaatgacccagggttcgtagtgactttgtccaatagaatgaactactttcaggtagcgaaaactgttgcccagagactgaacacagacccgatgctcctgcagttcttcaagagtcagggctaccgtgacggccctggcaatccactgcgtcacaactacgagggcacgcttcgtgatctcctccagttcttcaagccacggcagcccaaaaagctttactaccagcagctaaagatgaaaattaccgattttgaaaaccgtcgcagctttaaatgcatatggctgaacagtcaattcagagaagaggaaatcacactctaccctgataaacatggttgtgttagagacctgcttgaggaatgtaagaaagctgtagagcttggggagaaagccagtggaaagctccggcttctggagattgtgtcatataagatcatcggggtgcatcaggaggacgagctgctagagtgcttgtcacccgcgaccagtcgaacttttcggatagaggagatcccgctcgaccaagttgatattgataaggagaacgagatgctggtgaccgtggcacactttcataaggaagtgtttggcacattcggaatccccttcctgctgaggattcaccagggggagcactttcgtgaggtgatgaagaggattcagtccctgttagacatccaagagaaggagttcgaaaagtttaaattcgctatcgtgatgatgggtaggcatcagtacataaacgaggatgaatacgaagttaacttgaaagacttcgagcctcagcccggaaacatgtcacacccacggccttggttagggcttgatcattttaataaagctccgaaaagatcacgttatacctacctagaaaaagccattaagatccataactag

SEQ ID NO: 104823 - DNA, 3333 bp, Artificial Sequence
  derived and/or modified sequence
tgcagccattcagacgtcggcgagcgcacctcccctatcccacagcagcggcctctgcaatcccacgcggagatggccggaaatcacagactcggcctcgaggcaggcgatacagatgaccccccacggattacacagaatcccgtgatcaatggaaacgtggctttgtctgatggacacaataccgccgaggaggacatggaagacgacacctcatggcgtagcgaagctaccttccagttcaccgttgagaggttttcaaggctgagtgaatcagttctctctccgccttgttttgtgaggaacctgccctggaaaataatggtgatgccacgattctatcccgacaggcctcaccaaaagtccgttgggtttttcctgcagtgtaacgctgaatccgattctacaagctggtcttgccacgcccaggcggtcctgaaaatcatcaattacagggacgacgagaaatctttttccagaagaatctcccacttgttcttccataaagagaatgactggggtttctccaattttatggcatggtcagaggtgacagatccagagaagggcttcatcgatgacgataaggtgacattcgaggtctttgtccaggccgacgctcctcacggcgtggcatgggacagcaagaaacacacaggttatgtgggcctgaagaaccagggtgccacgtgctatatgaatagcctactgcaaacactcttctttaccaaccagctgagaaaggctgtgtatatgatgccgacagagggcgacgattcatccaaaagtgtacctcttgccctccagcgagtattttacgagttgcagcattccgataagcctgttggtaccaagaagctgaccaagtccttcgggtgggaaactctggacagcttcatgcagcacgacgttcaggagttgtgccgtgtcctgttagataatgtcgaaaacaagatgaagggaacctgcgtggaagggactattcctaaattattcaggggtaaaatggtgagctacatccagtgcaaggaggtggattatagaagcgaccgccgagaggactattatgacatccagctcagtatcaaaggaaaaaaaaatattttcgaatctttcgtggactatgtcgcggtcgaacagcttgacggcgataataagtatgacgccggtgaacacggcctgcaagaggccgagaagggtgtcaaatttctaacactgccccctgtgctgcatttgcagctaatgcgcttcatgtacgacccacagacagaccaaaatataaaaattaatgaccgcttcgagtttcccgaacaactcccgctggacgaatttctccagaagaccgaccctaaggatcccgctaactatatccttcacgccgtcctggtgcatagtggtgataatcatgggggacactatgtggtctacttaaacccaaagggcgatgggaagtggtgcaaatttgacgatgatgtggtgtcccgctgtaccaaggaggaggccattgaacacaattatggaggtcatgacgacgatctgagtgtaaggcactgtactaacgcatacatgctggtttacatccgggagtctaagttgtccgaagttctgcaagccgtcacagaccatgatattccccagcagctcgtagaaaggttgcaagaggaaaagcgcatcgaagcccagaagaggaaggaacgtcaagaggctcacctgtacatgcaggtgcaaattgtcgctgaggatcagttttgtgggcaccagggaaatgatatgtacgacgaggagaaagtcaagtacaccgtgtttaaggtgctgaaaaactcgtcccttgcagagttcgtccaatcgctgagccagaccatgggctttcctcaggaccagattagactgtggccgatgcaagcacggtccaacggaacgaagcgtcccgctatgctggataatgaagccgacggaaacaagacaatgatcgagttgagtgataacgaaaacccctggacaatcttcctcgagacagttgatcccgaactggccgcttcaggtgccactttaccgaaatttgataaagaccacgacgtgatgctgttcctgaagatgtatgatccgaagaccaggtcactgaactactgcggacatatctacactcccatttcttgcaagattcgtgatctcctccctgttatgtgtgatagggctggcttcatccaggatacatcccttatactgtacgaagaagtgaagccgaatctgactgaaagaattcaggactacgacgtctccctcgacaaggctttagatgagttgatggatggggatataattgtttttcaaaaggacgaccccgagaacgacaattctgagctgccaacggcaaaggagtacttccgggacctctaccatcgggtagatgtgatcttctgtgacaagacaatcccgaatgatcctggcttcgttgttacactcagcaatcggatgaactattttcaggtggcgaagaccgttgctcagagactgaataccgacccgatgctgttgcaattcttcaaatcccaggggtaccgagacggccctggtaatccattgcgccataattatgaaggtacactacgggatctgcttcagttcttcaaacctcggcagcccaagaagctctattaccagcagctgaagatgaaaattactgactttgagaatagacgcagcttcaagtgcatttggctcaattctcagtttagagaggaagagataacgctctacccagataaacatggatgcgtccgggaccttctcgaggagtgtaaaaaggcagtcgaactgggcgagaaggccagtggcaagctacgtttactcgagatcgtttcttacaagatcataggtgttcaccaggaggatgaactgctggaatgcttgtcccccgctacaagtcggactttccggattgaagaaatacccctggatcaggttgatatcgacaaggaaaatgaaatgttggtcacagttgctcactttcacaaggaagtttttggaacatttggtattccatttctattacgaattcatcagggcgaacattttagggaagttatgaaaaggatccagagcctgttggacatccaagaaaaagaatttgaaaaattcaaattcgccattgtgatgatgggccgacaccaatacatcaatgaagacgagtatgaggtcaacctaaaggatttcgagccacaaccaggcaatatgtcccacccccgtccctggttggggctggatcactttaataaggcccctaagcggtcaagatatacctatctggagaaggcaattaagatacacaattag

SEQ ID NO: 104824 - DNA, 3579 bp, Artificial Sequence
  derived and/or modified sequence
aaaaaataaaaaagaatgctgaggtagagctcctagagattctatgcagtcactctgatgtgggtgagagaacctcccccatcccccagcagaggccactgcagagccatgcagagatggctgggaaccacaggcttgggctggaagcgggagatacagatgacccaccaagaattactcagaaccctgtgatcaatgggaatgtggccctgagtgatggacacaacaccgcggaggaggacatggaggatgacaccagttggcgctccgaggcaacctttcagttcactgtggagcgcttcagcagactgagtgagtcggtccttagccctccgtgttttgtgcgaaatctgccatggaagattatggtgatgccacgcttttatccagacagaccacaccaaaaaagcgtaggattctttctccagtgcaatgctgaatctgattccacgtcatggtcttgccatgcacaagcagtgctgaagataataaattacagagatgatgaaaagtcgttcagtcgtcgtattagtcatttgttcttccataaagaaaatgattggggattttccaattttatggcctggagtgaagtgaccgatcctgagaaaggatttatagatgatgacaaagttacctttgaagtctttgtacaggcggatgctccccatggagttgcgtgggattcaaagaagcacacaggctacgtcggcttaaagaatcagggagcgacttgttacatgaacagcctgctacagacgttatttttcacgaatcagctacgaaaggctgtgtacatgatgccaaccgagggggatgattcgtctaaaagcgtccctttagcattacaaagagtgttctatgaattacagcatagtgataaacctgtaggaacaaaaaagttaacaaagtcatttgggtgggaaactttagatagcttcatgcaacatgatgttcaggagctttgtcgagtgttgctcgataatgtggaaaataagatgaaaggcacctgtgtagagggcaccatacccaaattattccgcggcaaaatggtgtcctatatccagtgtaaagaagtagactatcggtctgatagaagagaagattattatgatatccagctaagtatcaaaggaaagaaaaatatatttgaatcatttgtggattatgtggcagtagaacagctcgatggggacaataaatacgacgctggggaacatggcttacaggaagcagagaaaggtgtgaaattcctaacattgccaccagtgttacatctacaactgatgagatttatgtatgaccctcagacggaccaaaatatcaagatcaatgataggtttgaattcccagagcagttaccacttgatgaatttttgcaaaaaacagatcctaaggaccctgcaaattatattcttcatgcagtcctggttcatagtggagataatcatggtggacattatgtggtttatctaaaccccaaaggggatggcaaatggtgtaaatttgatgacgacgtggtgtcaaggtgtactaaagaggaagcaattgagcacaattatgggggtcacgatgacgacctgtctgttcgacactgcactaatgcttacatgttagtctacatcagggaatcaaaactgagtgaagttttacaggcggtcaccgaccatgatattcctcagcagttggtggagcgattacaagaagagaaaaggatcgaggctcagaagcggaaggagcggcaggaagcccatctctatatgcaagtgcagatagtcgcagaggaccagttttgtggccaccaagggaatgacatgtacgatgaagaaaaagtgaaatacactgtgttcaaagtattgaagaactcctcgcttgctgagtttgttcagagcctctctcagaccatgggatttccacaagatcaaattcgattgtggcccatgcaagcaaggagtaatggaacaaaacgaccagcaatgttagataatgaagccgacggcaataaaacaatgattgagctcagtgataatgaaaacccttggacaatattcctggaaacagttgatcccgagctggctgctagtggagcgaccttacccaagtttgataaagatcatgatgtaatgttatttttgaagatgtatgatcccaaaacgcggagcttgaattactgtgggcatatctacacaccaatatcctgtaaaatacgtgacttgctcccagttatgtgtgacagagcaggatttattcaagatactagccttatcctctatgaggaagttaaaccgaatttaacagagagaattcaggactatgacgtgtctcttgataaagcccttgatgaactaatggatggtgacatcatagtatttcagaaggatgaccctgaaaatgataacagtgaattacccaccgcaaaggagtatttccgagatctctaccaccgcgttgatgtcattttctgtgataaaacaatccctaatgatcctggatttgtggttacgttatcaaatagaatgaattattttcaggttgcaaagacagttgcacagaggctcaacacagatccaatgttgctgcagtttttcaagtctcaaggttatagggatggcccaggtaatcctcttagacataattatgaaggtactttaagagatcttctacagttcttcaagcctagacaacctaagaaactttactatcagcagcttaagatgaaaatcacagactttgagaacaggcgaagttttaaatgtatatggttaaacagccaatttagggaagaggaaataacactatatccagacaagcatgggtgtgtccgggacctgttagaagaatgtaaaaaggccgtggagcttggggagaaagcatcagggaaacttaggctgctagaaattgtaagctacaaaatcattggtgttcatcaagaagatgaactattagaatgtttatctcctgcaacgagccggacgtttcgaatagaggaaatccctttggaccaggtggacatagacaaagagaatgagatgcttgtcacagtggcgcatttccacaaagaggtcttcggaacgttcggaatcccgtttttgctgaggatacaccagggcgagcattttcgagaagtgatgaagcgaatccagagcctgctggacatccaggagaaggagtttgagaagtttaaatttgcaattgtaatgatgggccgacaccagtacataaatgaagacgagtatgaagtaaatttgaaagactttgagccacagcccggtaatatgtctcatcctcggccttggctagggctcgaccacttcaacaaagccccaaagaggagtcgctacacttaccttgaaaaggccattaaaatccataactgatttccaagctggtgtgttcaaggcgaggacggtgtgtgggtggccccttaacagcctagaactttggtgcacgtgccctctagccgaagtcttcagcaagaggattcgctgctggtgttaattttattttattgaggctgttcagtttggcttctctgtatctattgactgccctttttgagcaaaatgaagatgtttttat

SEQ ID NO: 104825 - protein, 243 aa, Artificial Sequence
  derived and/or modified sequence
MEDSFLQSFGRLSLQPQQQQQRQRPPRPPPRGTPPRRHSFRKHLYLLRGLPGSGKTTLARQLQHDFPRALIFSTDDFFFREDGAYEFNPDFLEEAHEWNQKRARKAMRNGISPIIIDNTNLHAWEMKPYAVMALENNYEVIFREPDTRWKFNVQELARRNIHGVSREKIHRMKERYEHDVTFHSVLHAEKPSRMNRNQDRNNALPSNNARYWNSYTEFPNRRAHGGFTNESSYHRRGGCHHGY

SEQ ID NO: 104826 - DNA, 732 bp, Artificial Sequence
  derived and/or modified sequence
atggaggacagcttcctgcagagcttcggcagactgagcctgcagccccagcagcagcagcagagacagagaccccccagacccccccccagaggcaccccccccagaagacacagcttcagaaagcacctgtacctgctgagaggcctgcccggcagcggcaagaccaccctggccagacagctgcagcacgacttccccagagccctgatcttcagcaccgacgacttcttcttcagagaggacggcgcctacgagttcaaccccgacttcctggaggaggcccacgagtggaaccagaagagagccagaaaggccatgagaaacggcatcagccccatcatcatcgacaacaccaacctgcacgcctgggagatgaagccctacgccgtgatggccctggagaacaactacgaggtgatcttcagagagcccgacaccagatggaagttcaacgtgcaggagctggccagaagaaacatccacggcgtgagcagagagaagatccacagaatgaaggagagatacgagcacgacgtgaccttccacagcgtgctgcacgccgagaagcccagcagaatgaacagaaaccaggacagaaacaacgccctgcccagcaacaacgccagatactggaacagctacaccgagttccccaacagaagagcccacggcggcttcaccaacgagagcagctaccacagaagaggcggctgccaccacggctactag

SEQ ID NO: 104827 - DNA, 732 bp, Artificial Sequence
  derived and/or modified sequence
atggaggactcctttctgcagtctttcggacgactttctttacaaccacagcagcagcagcagcgacagcgaccaccacgacccccaccccgagggaccccaccccgcagacactccttcagaaagcacttgtacctcctgcgaggcttgcccggctctggaaaaacaacgctggctcggcaattgcaacacgactttccgcgggccctaatattcagtaccgacgactttttcttccgggaagacggcgcatacgagttcaatcccgactttcttgaagaggcccatgagtggaatcaaaaacgcgcaagaaaggccatgcgaaacggcattagtccgatcataattgataacacaaatctgcatgcctgggagatgaaaccttacgcagtcatggcgttggagaacaactatgaggttatttttcgcgagcccgacacccgttggaagttcaacgttcaggagctggcacgccggaatattcacggagtgtctagggagaaaattcacagaatgaaggagaggtacgaacacgacgtcaccttccattccgtgctccatgcagagaagcccagtaggatgaatcgcaaccaggaccggaacaatgccctgccatctaataatgcccgatactggaactcctacaccgaattccccaaccgcagggctcacggaggcttcacaaatgagtccagctaccaccgacgtggcggttgtcaccatgggtattag

SEQ ID NO: 104828 - DNA, 732 bp, Artificial Sequence
  derived and/or modified sequence
atggaggacagcttcctgcagagctttggccgcctgagcctgcagccccagcagcagcagcagaggcagaggcctccccggcccccaccccggggcaccccaccccggcggcacagcttcaggaagcacctgtacctgctgcggggcctgcccggcagcggcaagaccaccctggcccggcagctgcagcacgacttcccccgggccctgatcttcagcacagatgacttcttcttcagagaagatggagcctatgagttcaacccagacttcctggaggaggcccacgagtggaaccagaagagggccaggaaggccatgagaaatggcatcagccccatcatcatcgacaacaccaacctgcacgcctgggagatgaagccctatgctgtgatggccctggagaacaactatgaggtgatcttccgggagccagacacccgctggaagttcaacgtgcaggagctggcccggaggaacatccacggcgtgtcccgggagaagatccacaggatgaaggagagatatgaacatgatgtgaccttccacagcgtgctgcacgccgagaagcccagcaggatgaacagaaaccaggacaggaacaatgccctgcccagcaacaatgcccgctactggaacagctacacagagttccccaacagaagagcccacggcggcttcaccaatgaaagcagctaccacagaagaggaggctgccaccacggctactag

SEQ ID NO: 104829 - DNA, 732 bp, Artificial Sequence
  derived and/or modified sequence
atggaggacagcttcctgcagagcttcggccggctgagcctgcagccccagcaacaacaacagcgtcagcgacccccccgtcccccgccacgcgggacaccgccgaggcgtcattcgttcagaaagcacctgtacctgcttcgcggtctgcccggcagcggtaagacaacactggcaaggcagcttcagcacgatttcccgagagcactgatcttcagcactgacgacttcttcttcagggaggatggcgcctatgagtttaaccccgattttttagaagaagcacacgaatggaatcagaagagagcccgaaaagcaatgcggaacgggattagccctatcatcatcgacaacactaacctccatgcctgggaaatgaagccttatgctgttatggcactggagaataactacgaagtgatctttagagaacccgacacgcgttggaagtttaatgttcaggagctggctcgaagaaacattcatggcgtcagtcgcgagaaaatccatagaatgaaagagcgctatgaacacgacgtgacattccatagcgtcctgcacgcggaaaagcctagccggatgaataggaaccaggaccggaacaatgcattgccgtcgaacaatgccagatactggaactcatatactgagtttccaaaccggagagcccatggcggattcacaaatgaaagtagctaccatcgacgtggcggttgtcaccacgggtactag

SEQ ID NO: 104830 - DNA, 3046 bp, Artificial Sequence
  derived and/or modified sequence
atcacatggccggagagtcacaaaaacaacagctttggccaagaccgtgacttcagtaaagggaacccggggctctcgcagccagccctcctgcccatggaggacagtttccttcaatcttttgggaggctgagcctccagccccagcagcagcagcagcggcagcggccgccccggccgcccccgcgggggacacctcctcgccgccacagctttaggaaacacctctacctcctgcgaggcctcccgggctccgggaaaactacactggccagacaattgcagcatgactttcccagggccctgattttcagcacggatgattttttcttcagggaagatggtgcctatgagttcaatcctgacttcctggaggaagctcatgaatggaaccaaaaaagagcaagaaaagcaatgaggaatggcatatcccccattattattgataataccaacctccacgcctgggaaatgaagccctatgcagtcatggcacttgaaaataactatgaagttatattccgagaacctgacactcgctggaaattcaacgttcaagagttagcaagaagaaacattcatggtgtctcaagagaaaaaatccaccgaatgaaagaacggtatgaacacgatgttacttttcacagtgtgcttcatgcagaaaagccaagcagaatgaacagaaaccaggacaggaataatgcattgccttccaacaatgccagatactggaattcctacacagagtttccaaaccggagggcccacggtggatttacaaatgagagctcctatcacagaaggggcggttgtcaccatggatattagaggcctatcttacagccaggcagaattttcctaagtcagtttctacttcagtttttgttattttttgttgcattttagtcagagctccaattccagtgtaaatagctgaactcaaaagtttctgagcaaagtcattatattcactttcttcaccaaaatttgttaaagtgcttctatatgcatggtctgatgctgggaattctgcagatttgagtaaacagtctctttctctagggtaagaatttgaaaccaaaacttgagaacacacccaagaatatatttacataggttcatagatgaaataaagtgtttatattatatataagcttcagtaccatttgctctgaagtgatctatttattttttcaggaaattcatctccatcggtaaagttgggaaggtggagagaagtggtgggggggcattgctacttatcaaagtgccattgctactttgataatctatgtatctaaaaatgtgagatgtgcgactcttatgatactgattttcctttaatgttaatatgccagaaagcatacatctaagggaacattgtccttcaaagtagacactttgggaagttatttctttattttaatgatgtatcattgttaaaaatgctgtcaaatccttaatagctacaggagctactgagggaaatcagtgtcattatttaaagtcacgccttgtgtttttactactttattcagcaggattaaacctgaataacttttggctgttgtgctaatagtgtaaataaaataagcctgccttcataaaacactaacttttaaaaggaataaacgacttctaaaattatgcctattaacatgtgtaattagtcggcagctcaaatgtttgggagtgcaagaaattaggcaccccaggatataggtcatacagggatatataaaagccatgctcattacaaaatgagcagttgatgttttatgtggcattaagacaatcaagtcctcacaactctggaatgtcttcttatactgatgctgaatttatgaatccaaattaatttccaacaggttggaatcagatttaatgtgagatcatgatagacaagaccacagaggacgtatgctctatttcttgttggccaacagcttctttctaatgttctgtgaaaaattattttaagtgtcttatataatggtgcttttatggttattaaaaattgtaaatggtatcacatttatatggatttgtcattggatctttttttggttcaacaataaaaaaatttaattacctaaatgccaagaaactcaacaatataccagtttttctgtatcacaggcttatttaccagtcttttttttaataaataggaatcgtaaaggtaatgacaaaagcagccttataatttagttgcttatatatttgatctgtgtacatgagactgttttaacgttatctgacactactgaaacctgctcgacatctccatgactaccaacaccatgtgtaatgttttcttcactaacattttaaaaactggtatctcctttgagtaagtttggctgacaatagtaaatcccaatgaatctaaggtgttatcagctttgctaacttctgtatctccaagcacaacataaaataatctcctaatgatctacttaataatgctcccattttccaggcccaggtagtcctgggtatcttggttgatagggtggtggcataaccagctcaatatggatggcttgactcgtctgggctggtagaggggagaaatgtcagagagctcaaagtggaaattaccatcctttgatttcacatgagcggttcaaaggaccagattcaagccctcctgacttggctggctccctgctttagggtttttggctcacttgggttaagtgagtgaccactatggagaagtggctctgggttacataacttttctagagctctaaagaatagtttcctggcctatttaatgtctcttctttccctagctgacccctgaaatatttggtttgtaaaccataaaaattgattaaatgccatcaactttatcccctgtagaagtgatctgtttttcaactcccatggcttctgatttgtgtaactctttgaacacccaatattgacttgtattgtgttcgctgtttgcatcattcatagaactggcaaatgctctttatgggcaatagggtctcattaaatgattgctgaataaataacacaaatttttaccatt

SEQ ID NO: 104831 - DNA, 732 bp, Artificial Sequence
  derived and/or modified sequence
atggaggactcttttctgcagagtttcggtcgtcttagtcttcagcctcagcagcagcaacagcgccagcgtccacctcgtccacctcccaggggtacccctccccgacggcattcttttaggaagcatctgtatttattacggggactgcccggtagtggaaaaacaactctggcccgacagttacagcacgacttccccagagccctgatctttagcacagacgacttcttctttagggaggatggcgcatacgaattcaaccccgattttctcgaggaagctcacgaatggaaccagaagcgtgctaggaaagctatgaggaatggcatctccccaatcatcatagataacactaaccttcacgcctgggagatgaaaccttacgcagtcatggcgctggagaacaactacgaggtgatctttcgagagccggacactcgctggaaatttaatgtccaggaattggcaaggaggaacatccacggcgtctccagagagaaaatacaccgaatgaaggagcgatacgagcacgacgtaacctttcacagtgttctgcacgcagaaaagccaagccggatgaatcggaatcaggataggaacaatgccctaccctcaaataatgcacgctattggaacagctacaccgagtttcctaatagacgtgctcacggaggcttcacaaacgagtcctcctaccaccgtcggggaggctgtcaccacggctattag

SEQ ID NO: 104832 - protein, 761 aa, Artificial Sequence
  derived and/or modified sequence
MSRFFTTGSDSESESSLSGEELVTKPVGGNYGKQPLLLSEDEEDTKRVVRSAKDKRFEELTNLIRTIRNAMKIRDVTKCLEEFELLGKAYGKAKSIVDKEGVPRFYIRILADLEDYLNELWEDKEGKKKHDRKSKRLDEEEEDNEGGEWERVRGGVPLVKEKPKMFAKGTEITHAVVIKKLNEILQARGKKGTDRAAQIELLQLLVQIAAENNLGEGVIVKIKFNIIASLYDYNPNLATYMKPEMWGKCLDCINELMDILFANPNIFVGENILEESENLHNADQPLRVRGCILTLVERMDEEFTKIMQNTDPHSQEYVEHLKDEAQVCAIIERVQRYLEEKGTTEEVCRIYLLRILHTYYKFDYKAHQRQLTPPEGSSKSEQDQAENEGEDSAVLMERLCKYIYAKDRTDRIRTCAILCHIYHHALHSRWYQARDLMLMSHLQDNIQHADPPVQILYNRTMVQLGICAFRQGLTKDAHNALLDIQSSGRAKELLGQGLLLRSLQERNQEQEKVERRRQVPFHLHINLELLECVYLVSAMLLEIPYMAAHESDARRRMISKQFHHQLRVGERQPLLGPPESMREHVVAASKAMKMGDWKTCHSFIINEKMNGKVWDLFPEADKVRTMLVRKIQEESLRTYLFTYSSVYDSISMETLSDMFELDLPTVHSIISKMIINEELMASLDQPTQTVVMHRTEPTAQQNLALQLAEKLGSLVENNERVFDHKQGTYGGYFRDQKDGYRKNEGYMRRGGYRQQQSQTAY

SEQ ID NO: 104833 - protein, 735 aa, Artificial Sequence
  derived and/or modified sequence
MSRFFTTGSDSESESSLSGEELVTKPVGGNYGKQPLLLSEDEEDTKRVVRSAKDKRFEELTNLIRTIRNAMKIRDVTKCLEEFELLGKAYGKAKSIVDKAKKKHDRKSKRLDEEEEDNEGGEWERVRGGVPLVKEKPKMFAKGTEITHAVVIKKLNEILQARGKKGTDRAAQIELLQLLVQIAAENNLGEGVIVKIKFNIIASLYDYNPNLATYMKPEMWGKCLDCINELMDILFANPNIFVGENILEESENLHNADQPLRVRGCILTLVERMDEEFTKIMQNTDPHSQEYVEHLKDEAQVCAIIERVQRYLEEKGTTEEVCRIYLLRILHTYYKFDYKAHQRQLTPPEGSSKSEQDQAENEGEDSAVLMERLCKYIYAKDRTDRIRTCAILCHIYHHALHSRWYQARDLMLMSHLQDNIQHADPPVQILYNRTMVQLGICAFRQGLTKDAHNALLDIQSSGRAKELLGQGLLLRSLQERNQEQEKVERRRQVPFHLHINLELLECVYLVSAMLLEIPYMAAHESDARRRMISKQFHHQLRVGERQPLLGPPESMREHVVAASKAMKMGDWKTCHSFIINEKMNGKVWDLFPEADKVRTMLVRKIQEESLRTYLFTYSSVYDSISMETLSDMFELDLPTVHSIISKMIINEELMASLDQPTQTVVMHRTEPTAQQNLALQLAEKLGSLVENNERVFDHKQGTYGGYFRDQKDGYRKNEGYMRRGGYRQQQSQTAY

SEQ ID NO: 104834 - DNA, 2393 bp, Artificial Sequence
  derived and/or modified sequence
tctctcggcgtttccgctgtcagggccctgcggtgtgactcgcgggctcagctggtccggccgtagcacctccgcgccgtcgccatgtcgcggtttttcaccaccggttcggacagcgagtccgagtcgtccttgtccggggaggagctcgtcaccaaacctgtcggaggcaactatggcaaacagccattgttgctgagcgaggatgaagaagataccaagagagttgtccgcagtgccaaggacaagaggtttgaggagctgaccaaccttatccggaccatccgtaatgccatgaagattcgtgatgtcaccaagtgcctggaagagtttgagctcctgggaaaagcatatgggaaggccaaaagcattgtggacaaagaaggtgtcccccggttctatatccgcatcctggctgacctagaggactatcttaatgagctttgggaagataaggaagggaagaagaagcacgacaggaaatccaagcgcctggatgaggaggaggaggacaatgaaggcggggagtgggaaagggtccggggcggagtgccgttggttaaggagaagccaaaaatgtttgccaagggaactgagatcacccatgctgttgttatcaagaaactgaatgagatcctacaggcacgaggcaagaagggaactgatcgtgctgcccagattgagctgctgcaactgctggttcagattgcagcggaaaacaacctgggagagggcgtcattgtcaagatcaagttcaatatcatcgcctctctctatgactacaaccccaacctggcaacctacatgaagccagagatgtgggggaagtgcctggactgcatcaatgagctgatggatatcctgtttgcaaatcccaacatttttgttggagagaatattctggaagagagtgagaacctgcacaacgctgaccagccactgcgtgtccgtggctgcatcctaactctggtggaacgaatggatgaagaatttaccaaaataatgcaaaatactgaccctcactcccaagagtacgtggagcacttgaaggatgaggcccaggtgtgtgccatcatcgagcgtgtgcagcgctacctggaggagaagggcactaccgaggaggtctgccgcatctacctgctgcgcatcctgcacacctactacaagtttgattacaaggcccatcagcgacagctgaccccgcctgagggctcctcaaagtctgagcaagaccaggcagaaaatgagggcgaggactcggctgtgttgatggagagactgtgcaagtacatctacgccaaggaccgcacagaccggatccgcacatgtgccatcctctgccacatctaccaccatgctctgcactcgcgctggtaccaggcccgcgacctcatgctcatgagccacttgcaggacaacattcagcatgcagacccgccagtgcagatcctttacaaccgcaccatggtgcagctgggcatctgtgccttccgccaaggcctgaccaaggacgcacacaacgccctgctggacatccagtcgagtggccgagccaaggagcttctgggccagggcctgctgctgcgcagcctgcaggagcgcaaccaggagcaggagaaggtggagcggcgccgtcaggtccccttccacctgcacatcaacctggagctgctggagtgtgtctacctggtgtctgccatgctcctggagatcccctacatggccgcccatgagagcgatgcccgccgacgcatgatcagcaagcagttccaccaccagctgcgcgtgggcgagcgacagcccctgctgggtccccctgagtccatgcgggaacatgtggtcgctgcctccaaggccatgaagatgggtgactggaagacctgtcacagttttatcatcaatgagaagatgaatgggaaagtgtgggaccttttccccgaggctgacaaagtccgcaccatgctggttaggaagatccaggaagagtcactgaggacctacctcttcacctacagcagtgtctatgactccatcagcatggagacgctgtcagacatgtttgagctggatctgcccactgtgcactccatcatcagcaaaatgatcattaatgaggagctgatggcctccctggaccagccaacacagacagtggtgatgcaccgcactgagcccactgcccagcagaacctggctctgcagctggccgagaagctgggcagcctggtggagaacaacgaacgggtgtttgaccacaagcagggcacctacgggggctacttccgagaccagaaggacggctaccgcaaaaacgagggctacatgcgccgcggtggctaccgccagcagcagtctcagacggcctactgagctctccactctgtttcccgcct

SEQ ID NO: 104835 - DNA, 2366 bp, Artificial Sequence
  derived and/or modified sequence
gtttccgctgtcagggccctgcggtgtgactcgcgggctcagctggtccggccgtagcacctccgcgccgtcgccatgtcgcggtttttcaccaccggttcggacagcgagtccgagtcgtccttgtccggggaggagctcgtcaccaaacctgtcggaggcaactatggcaaacagccattgttgctgagcgaggatgaagaagataccaagagagttgtccgcagtgccaaggacaagaggtttgaggagctgaccaaccttatccggaccatccgtaatgccatgaagattcgtgatgtcaccaagtgcctggaagagtttgagctcctgggaaaagcatatgggaaggccaaaagcattgtggacaaagctaagaagaagcacgacaggaaatccaagcgcctggatgaggaggaggaggacaatgaaggcggggagtgggaaagggtccggggcggagtgccgttggttaaggagaagccaaaaatgtttgccaagggaactgagatcacccatgctgttgttatcaagaaactgaatgagatcctacaggcacgaggcaagaagggaactgatcgtgctgcccagattgagctgctgcaactgctggttcagattgcagcggaaaacaacctgggagagggcgtcattgtcaagatcaagttcaatatcatcgcctctctctatgactacaaccccaacctggcaacctacatgaagccagagatgtgggggaagtgcctggactgcatcaatgagctgatggatatcctgtttgcaaatcccaacatttttgttggagagaatattctggaagagagtgagaacctgcacaacgctgaccagccactgcgtgtccgtggctgcatcctaactctggtggaacgaatggatgaagaatttaccaaaataatgcaaaatactgaccctcactcccaagagtacgtggagcacttgaaggatgaggcccaggtgtgtgccatcatcgagcgtgtgcagcgctacctggaggagaagggcactaccgaggaggtctgccgcatctacctgctgcgcatcctgcacacctactacaagtttgattacaaggcccatcagcgacagctgaccccgcctgagggctcctcaaagtctgagcaagaccaggcagaaaatgagggcgaggactcggctgtgttgatggagagactgtgcaagtacatctacgccaaggaccgcacagaccggatccgcacatgtgccatcctctgccacatctaccaccatgctctgcactcgcgctggtaccaggcccgcgacctcatgctcatgagccacttgcaggacaacattcagcatgcagacccgccagtgcagatcctttacaaccgcaccatggtgcagctgggcatctgtgccttccgccaaggcctgaccaaggacgcacacaacgccctgctggacatccagtcgagtggccgagccaaggagcttctgggccagggcctgctgctgcgcagcctgcaggagcgcaaccaggagcaggagaaggtggagcggcgccgtcaggtccccttccacctgcacatcaacctggagctgctggagtgtgtctacctggtgtctgccatgctcctggagatcccctacatggccgcccatgagagcgatgcccgccgacgcatgatcagcaagcagttccaccaccagctgcgcgtgggcgagcgacagcccctgctgggtccccctgagtccatgcgggaacatgtggtcgctgcctccaaggccatgaagatgggtgactggaagacctgtcacagttttatcatcaatgagaagatgaatgggaaagtgtgggaccttttccccgaggctgacaaagtccgcaccatgctggttaggaagatccaggaagagtcactgaggacctacctcttcacctacagcagtgtctatgactccatcagcatggagacgctgtcagacatgtttgagctggatctgcccactgtgcactccatcatcagcaaaatgatcattaatgaggagctgatggcctccctggaccagccaacacagacagtggtgatgcaccgcactgagcccactgcccagcagaacctggctctgcagctggccgagaagctgggcagcctggtggagaacaacgaacgggtgtttgaccacaagcagggcacctacgggggctacttccgagaccagaaggacggctaccgcaaaaacgagggctacatgcgccgcggtggctaccgccagcagcagtctcagacggcctactgagctctccactctgtttcccgcctgggccatccaaccttgaagtcctaaaccacacctcagtcactaaaggtctgtttaaagtt

SEQ ID NO: 104836 - DNA, 2286 bp, Artificial Sequence
  derived and/or modified sequence
atgagcaggttcttcaccactgggtctgactctgaaagcgagtcgtccttgagcggtgaagaactcgttactaaacccgttgggggcaattacggtaaacagcctctcctcctgagcgaagatgaagaggacactaaaagggtagtgcggagcgccaaggacaaacgttttgaagaactgacaaatctcattaggacaattcgaaacgcaatgaagatcagggatgttactaagtgcttagaggagttcgaattactcggaaaagcttacgggaaggctaaatcgatagtggacaaggagggcgtgccacgtttctatattagaattctggccgatctggaggattatctgaatgaactgtgggaggacaaggaggggaaaaaaaagcatgatagaaaaagtaagagattagacgaggaggaggaagataacgaggggggggagtgggagcgagtgagggggggcgtaccgctggtcaaagagaagcccaagatgtttgccaaaggaacagagatcacccacgccgttgttataaaaaaactcaatgagatactccaggccagaggaaagaaggggactgacagggccgctcagatagagctcctccagttgctggtacagatcgccgccgagaataacttaggtgagggcgtgattgtcaagatcaagttcaatatcattgcttccctctacgactacaaccctaacctagccacctatatgaagcctgagatgtgggggaagtgcttagactgtatcaatgagctgatggacatcctttttgctaatcctaatatattcgtgggcgagaacattctcgaggaaagtgagaacctccataacgcggatcaacccctcagagtgcggggctgtatcctaacactggtggaaagaatggacgaagagttcactaaaatcatgcagaataccgatccccacagtcaggaatacgtagagcacttgaaggatgaggcacaggtgtgtgctatcatcgagagggttcagcgctatcttgaagagaaggggacaacagaagaagtgtgtaggatttatctgcttcggatcctccacacttattacaagtttgactacaaggcccaccagagacagttgacacctcctgaaggtagcagcaaatccgagcaggatcaggcagagaacgaaggggaggacagcgctgtgttgatggaacggctttgcaaatacatatatgcgaaagatagaaccgatagaattagaacatgcgccatactgtgccacatctaccaccatgccttacatagcagatggtaccaggccagagatctgatgctgatgagccatttgcaagacaacatccagcatgcagatccgccagttcagatattgtataaccggacaatggtccagcttggaatatgcgcctttcgccagggactgacaaaagatgcccacaacgcacttttagacatacagtctagcgggcgggccaaagaactcctggggcagggtctgctcctgcgctccctgcaggagaggaatcaggagcaggagaaggtggaacggaggagacaagtcccattccatctgcacatcaacctggaactccttgagtgcgtctatttggtgtctgccatgcttctcgaaattccctacatggcagctcacgaatcggatgctaggcgaagaatgatctctaagcagttccaccatcagctcagggtgggggagagacagccacttctgggaccaccagaatctatgcgcgaacacgttgtggccgcctcaaaagccatgaaaatgggcgactggaagacctgccactcttttattattaatgaaaagatgaacggcaaagtgtgggatttattcccagaggcagataaagtgcgcacgatgctggtaagaaagattcaggaggaatctctccgtacctatctgtttacatattctagtgtttacgacagtatcagcatggagaccctttccgacatgtttgagttagatctgcctacggtgcactcaataatatcgaaaatgattatcaacgaggaactcatggcatcccttgatcaacccactcagacagttgtgatgcaccgaacagagcctacagcccagcagaatctcgccttgcagttggccgaaaaactgggctccttagtggaaaataacgagcgggtgtttgatcacaaacagggaacctacggaggatactttagagatcagaaagacggctacaggaagaacgagggatatatgcgtcgtggagggtatcgtcagcaacaatcccagaccgcctactag

SEQ ID NO: 104837 - DNA, 2208 bp, Artificial Sequence
  derived and/or modified sequence
atgagccgattcttcactaccgggtcagattcggaatctgagtcttctttgtccggtgaagagctggtcactaaaccagtcggcggaaactatggcaaacagccactgcttctgagcgaggatgaagaagacactaaaagggtggtgcggtccgccaaggacaagaggtttgaggagctgaccaaccttatccgaactattcgaaacgcgatgaagatccgcgacgtcactaaatgtttggaggagtttgagcttctgggaaaagcgtacgggaaggcgaaatcaatcgtggacaaagcaaagaagaagcatgatcgtaaatccaaacgcttggatgaagaagaggaagataacgaagggggagaatgggagagagtgcgtgggggcgtgcctctagtcaaggagaaacccaagatgttcgcgaaggggaccgaaattacccacgccgtcgtaattaagaaactaaacgaaatcctgcaggcaagaggcaaaaaggggaccgatcgggccgcgcagatagaattgctgcagcttctggtccagatagcggcggagaacaacctaggcgagggcgtcatcgtcaaaattaagttcaacattattgccagcttgtacgactacaacccaaacctcgccacctatatgaagccagagatgtgggggaagtgcttggactgtataaatgagctcatggacattttattcgcgaaccctaacatctttgtgggagagaacattttggaggagtctgaaaatctccacaatgccgatcagccactaagagtaagagggtgtatccttaccctcgtagagcgtatggatgaggagttcaccaaaatcatgcagaacacggatccccacagccaagaatacgtggagcatctaaaagacgaggcccaggtgtgtgcaattattgaacgggtgcagaggtatctcgaggagaagggcacaacggaggaagtgtgccgcatttacttgctcaggattctgcacacttactacaaatttgattacaaggcgcaccagagacagctgaccccgccagagggatctagcaagagcgaacaggatcaagcagagaacgagggggaggattccgcggttctaatggaacgactctgcaaatacatatacgccaaagaccgcactgatagaatcagaacctgtgccatcctgtgccatatctaccatcatgccttacacagccgctggtaccaggccagggacctgatgctgatgagccacctgcaggacaatattcagcacgccgatcctcctgtgcagatcttatacaatcgtaccatggtgcagctcggcatctgcgcatttaggcagggacttaccaaggatgctcataatgctcttctagacattcagagttctggtcgggctaaagagctgttaggccaggggctgctgttacgtagtctgcaggaacggaatcaggaacaggaaaaggtggaacggcgccggcaggtgccatttcacctgcacatcaatctggagctcctggagtgcgtatacctggtttcagctatgttacttgaaatcccatacatggctgcacatgagtctgatgcgcgccggaggatgataagcaaacagtttcatcatcagctgcgtgttggggaacgccagcccttgctggggccccccgagtctatgagagaacacgttgttgctgccagtaaagctatgaaaatgggtgactggaagacatgtcactcgttcattatcaacgagaagatgaacggtaaggtatgggacctctttcccgaggccgataaggtgagaaccatgctggttcgcaagatccaggaagaaagtcttagaacctacctgtttacgtatagtagcgtgtatgatagtatatcaatggagacactgtctgatatgtttgagctggacctgcctaccgttcactccataatctcaaagatgattattaacgaagaactcatggcctcccttgatcagcctacacagaccgtggtcatgcatcgtaccgagccgaccgcccagcagaatctcgccctccagttagccgaaaagctgggcagtttggtggaaaataacgagagagtctttgatcataagcaggggacctatggcggctatttcagagatcagaaggatgggtataggaaaaacgagggctacatgcggcgcggcggttacaggcaacagcagtcccaaacagcttactag

SEQ ID NO: 104838 - DNA, 2286 bp, Artificial Sequence
  derived and/or modified sequence
atgagccgcttcttcaccactggaagtgacagcgagagcgagagcagcctgagcggggaggagctggtgaccaagcctgtgggcggcaactacggcaagcagcccctgctgctgtctgaagatgaggaggacaccaagagggtggtgcgcagcgccaaggacaagagatttgaggagctgaccaacctgatccgcaccatcagaaatgccatgaagatcagagatgtgaccaagtgcctggaggagtttgagctgctgggcaaggcctacggcaaggccaagagcatcgtggacaaggagggcgtgccccgcttctacatccgcatcctggccgacctggaggactacctgaatgagctgtgggaggacaaggagggcaagaagaagcatgacaggaagagcaagaggctggatgaggaggaggaggacaatgaaggaggagagtgggagcgggtgcggggcggcgtgcccctggtgaaggagaagcccaagatgtttgccaagggcacagagatcacccatgctgtggtgatcaagaagctgaatgagatcctgcaggcccggggcaagaagggcacagaccgggccgcccagatcgagctgctgcagctgctggtgcagattgctgctgagaacaacctgggggagggcgtgattgtgaagatcaagttcaacatcatcgccagcctgtatgactacaaccccaacctggccacctacatgaagccagagatgtggggcaagtgcctggactgcatcaatgagctgatggacatcctgtttgccaaccccaacatctttgtgggggagaacatcctggaggagagcgagaacctgcacaatgctgaccagcccctgcgggtgcggggctgcatcctgaccctggtggagaggatggatgaggagttcaccaagatcatgcagaacacagacccccacagccaggagtatgtggagcacctgaaggatgaggcccaggtgtgtgccatcatcgagcgggtgcagcgctacctggaggagaagggcaccacagaggaggtgtgccgcatctacctgctgcgcatcctgcacacctactacaagtttgactacaaggcccaccagaggcagctgaccccacctgagggcagcagcaagtctgagcaggaccaggccgagaatgaaggagaggacagcgctgtgctgatggagcggctgtgcaagtacatctatgccaaggacagaacagaccgcatccgcacctgtgccatcctgtgccacatctaccaccacgccctgcacagccgctggtaccaggcccgggacctgatgctgatgagccacctgcaggacaacatccagcacgccgacccccctgtgcagatcctgtacaacagaaccatggtgcagctgggcatctgtgccttccggcagggcctgaccaaggatgcccacaatgccctgctggacatccagagcagcggccgggccaaggagctgctgggccagggcctgctgctgcggagcctgcaggagaggaaccaggagcaggagaaggtggagcggcggcggcaggtgcccttccacctgcacatcaacctggagctgctggagtgtgtgtacctggtgtctgccatgctgctggagatcccctacatggccgcccatgaaagtgatgcccggcggaggatgatcagcaagcagttccaccaccagctgcgggtgggggagcggcagcccctgctgggccccccagagagcatgagggagcacgtggtggccgccagcaaggccatgaagatgggagactggaagacctgccacagcttcatcatcaatgagaagatgaatggcaaggtgtgggacctcttccctgaggccgacaaggtgaggaccatgctggtgaggaagatccaggaggagagcctgcggacctacctgttcacctacagctctgtgtatgacagcatctccatggagaccctgagtgacatgtttgagctggacctgcccaccgtgcacagcatcatcagcaagatgatcatcaatgaggagctgatggccagcctggaccagcccacccagacagtggtgatgcacaggacagagcccacagcccagcagaacctggccctgcagctggccgagaagctgggcagcctggtggagaacaatgaaagagtgtttgaccacaagcagggcacctatggaggctacttccgggaccagaaggatggctacaggaagaatgaaggctacatgaggcggggcggctaccggcagcagcagagccagacagcctactag

SEQ ID NO: 104839 - DNA, 2208 bp, Artificial Sequence
  derived and/or modified sequence
atgagccgcttcttcaccactggaagtgacagcgagagcgagagcagcctgagcggggaggagctggtgaccaagcctgtgggcggcaactacggcaagcagcccctgctgctgtctgaagatgaggaggacaccaagagggtggtgcgcagcgccaaggacaagagatttgaggagctgaccaacctgatccgcaccatcagaaatgccatgaagatcagagatgtgaccaagtgcctggaggagtttgagctgctgggcaaggcctacggcaaggccaagagcatcgtggacaaggccaagaagaagcatgacaggaagagcaagaggctggatgaggaggaggaggacaatgaaggaggagagtgggagcgggtgcggggcggcgtgcccctggtgaaggagaagcccaagatgtttgccaagggcacagagatcacccatgctgtggtgatcaagaagctgaatgagatcctgcaggcccggggcaagaagggcacagaccgggccgcccagatcgagctgctgcagctgctggtgcagattgctgctgagaacaacctgggggagggcgtgattgtgaagatcaagttcaacatcatcgccagcctgtatgactacaaccccaacctggccacctacatgaagccagagatgtggggcaagtgcctggactgcatcaatgagctgatggacatcctgtttgccaaccccaacatctttgtgggggagaacatcctggaggagagcgagaacctgcacaatgctgaccagcccctgcgggtgcggggctgcatcctgaccctggtggagaggatggatgaggagttcaccaagatcatgcagaacacagacccccacagccaggagtatgtggagcacctgaaggatgaggcccaggtgtgtgccatcatcgagcgggtgcagcgctacctggaggagaagggcaccacagaggaggtgtgccgcatctacctgctgcgcatcctgcacacctactacaagtttgactacaaggcccaccagaggcagctgaccccacctgagggcagcagcaagtctgagcaggaccaggccgagaatgaaggagaggacagcgctgtgctgatggagcggctgtgcaagtacatctatgccaaggacagaacagaccgcatccgcacctgtgccatcctgtgccacatctaccaccacgccctgcacagccgctggtaccaggcccgggacctgatgctgatgagccacctgcaggacaacatccagcacgccgacccccctgtgcagatcctgtacaacagaaccatggtgcagctgggcatctgtgccttccggcagggcctgaccaaggatgcccacaatgccctgctggacatccagagcagcggccgggccaaggagctgctgggccagggcctgctgctgcggagcctgcaggagaggaaccaggagcaggagaaggtggagcggcggcggcaggtgcccttccacctgcacatcaacctggagctgctggagtgtgtgtacctggtgtctgccatgctgctggagatcccctacatggccgcccatgaaagtgatgcccggcggaggatgatcagcaagcagttccaccaccagctgcgggtgggggagcggcagcccctgctgggccccccagagagcatgagggagcacgtggtggccgccagcaaggccatgaagatgggagactggaagacctgccacagcttcatcatcaatgagaagatgaatggcaaggtgtgggacctcttccctgaggccgacaaggtgaggaccatgctggtgaggaagatccaggaggagagcctgcggacctacctgttcacctacagctctgtgtatgacagcatctccatggagaccctgagtgacatgtttgagctggacctgcccaccgtgcacagcatcatcagcaagatgatcatcaatgaggagctgatggccagcctggaccagcccacccagacagtggtgatgcacaggacagagcccacagcccagcagaacctggccctgcagctggccgagaagctgggcagcctggtggagaacaatgaaagagtgtttgaccacaagcagggcacctatggaggctacttccgggaccagaaggatggctacaggaagaatgaaggctacatgaggcggggcggctaccggcagcagcagagccagacagcctactag

SEQ ID NO: 104840 - DNA, 2286 bp, Artificial Sequence
  derived and/or modified sequence
atgagccggttcttcaccaccggcagcgacagcgagagcgagagcagcctgagtggtgaagagttagtcacgaaaccagttggtggaaactatggaaaacaacctcttctgctttccgaagatgaggaagatacaaaacgggtcgtcagatccgccaaagacaagaggtttgaggaattgactaatctcattcgaactatccggaatgcaatgaagatacgggatgttaccaaatgtctcgaggagttcgagctgctgggtaaggcgtacgggaaggcgaagagtatcgttgataaagagggagtgccccggttttacatacgtatcctcgcggatttggaggactacttgaacgaactgtgggaagacaaagagggaaagaaaaagcacgatcgtaagagtaaaagactggatgaggaagaggaggataacgagggaggggagtgggagcgcgtcagaggcggcgtcccactcgtgaaggaaaagcccaagatgttcgcaaaaggcaccgaaattacccacgccgtcgtcatcaaaaaattgaatgagattctccaggcgcgggggaagaaaggaaccgacagagcagcacagatagagctcctgcagcttctcgtgcaaatcgccgccgagaataacttgggggagggagtgattgtgaagattaagtttaacattatcgccagcctttacgattacaaccccaacctggcaacttacatgaagcctgaaatgtggggaaagtgcctcgattgtatcaatgaactaatggatatattatttgctaaccccaatatttttgtgggagaaaatattctcgaggaatccgaaaatctgcacaacgccgaccagccactgagagttagagggtgcatcctaacactggtagaacgcatggatgaggaattcacaaaaattatgcaaaacactgatcctcactctcaagaatatgtggagcatctgaaagatgaggcccaggtgtgcgctattatcgaaagggttcagagatacttagaggagaaagggaccaccgaggaggtttgccggatttaccttctgcggatcctgcatacatactataaattcgactataaagcccaccagcgccagctgacaccccccgagggaagctcaaaatccgagcaggaccaagctgagaatgaaggagaggactcagcagtcctgatggagcgtctctgtaaatacatttatgcgaaggatagaaccgatcgaatacgcacctgcgctatcctctgtcatatatatcaccacgcccttcattctaggtggtaccaggctcgcgacctcatgctgatgtcccatctgcaggacaacattcaacacgctgatccgcctgtgcaaatcctctataatcgaaccatggtccagctgggcatttgcgcatttagacagggccttaccaaggacgctcataatgctctgctggatatacagtcctctgggagagccaaggaactgttaggtcaaggactgctgctgagaagtctccaggagagaaaccaggaacaggaaaaggtggaaagacggcggcaggtgcccttccacctccatataaatcttgagttgttggagtgcgtctaccttgtgagtgcgatgttactcgagatcccctacatggcagcacacgaatctgatgctagaagacgcatgatcagtaagcagttccatcatcagcttcgagtaggggaacggcagcctcttctgggacctcctgaaagcatgagggaacatgtagtggccgccagtaaagccatgaagatgggggactggaagacttgtcactcctttataattaacgaaaagatgaacggcaaggtttgggacttgtttccagaagcagacaaagtgcggactatgctggtcaggaagatccaagaagagagtctcaggacctatttgtttacatacagcagcgtgtacgactccattagcatggagactctgtctgacatgtttgaactagatctccctaccgtccactcaattataagcaaaatgattatcaatgaggagctgatggcttctctggatcagcccacgcagaccgtggtcatgcatagaacagaaccaaccgctcagcagaatctggcactccagctggctgaaaaacttggatctctggtggagaacaacgaacgagttttcgatcacaagcagggaacctacggggggtattttagagaccaaaaggacgggtaccgtaagaacgaaggatacatgcgcaggggtggttacagacagcagcagtcccagacagcctattag

SEQ ID NO: 104841 - DNA, 2208 bp, Artificial Sequence
  derived and/or modified sequence
atgagccggttcttcaccaccggcagcgacagcgagagcgagagctccctctccggcgaagagctggttaccaagccagtaggcggaaattacggcaagcaaccacttctactgtctgaggatgaggaagatacgaaacgcgttgtgcgaagtgctaaggacaagcgttttgaagagctgactaatctgatcagaaccatccggaacgcgatgaaaataagagacgtaacaaagtgcctggaagagttcgagttgcttggaaaggcatatgggaaggccaagagcatcgtggacaaggctaagaagaagcacgatcgcaaatccaaaaggctggatgaagaggaagaagataatgaaggaggcgaatgggagagggtgaggggcggggtgcctcttgtgaaagaaaagcccaagatgttcgcaaaaggtaccgaaattacccacgccgtggtgatcaaaaaactcaacgaaattcttcaggctagaggtaaaaaaggtaccgatcgggcggctcaaattgagcttctgcagcttctggtgcagattgctgccgagaacaatctgggagagggggtgatcgtgaaaattaaatttaatatcatcgccagcttatatgattacaatcccaatttagccacttacatgaagccagagatgtggggcaagtgcctggattgtattaacgagctcatggatatcctttttgctaacccgaacatctttgtgggtgagaacatattggaagagagcgaaaatctccacaacgccgaccagccgttgagggttcgcgggtgtatcctgacccttgtggaaagaatggacgaagaattcacaaaaatcatgcagaatacagacccccattcacaggagtatgtggagcatctgaaagatgaagctcaagtttgcgccattatcgagcgcgtgcaaaggtatctggaggaaaagggcaccaccgaggaggtgtgtaggatctacctgctgcgaattctgcacacctactacaagtttgattataaggcccatcagcggcagctgactccaccagaagggagcagcaaaagcgagcaggatcaggccgaaaatgaaggggaggactccgccgtgttaatggagaggttgtgcaagtatatttacgcaaaggacaggaccgaccggatcaggacctgtgctatcttatgccatatttatcatcatgccctccacagccgctggtatcaagccagagacctgatgctgatgagtcacttgcaggacaacattcaacatgcggatcctcccgtccaaatactttataacaggacgatggtccaacttggaatctgcgctttccgccaggggctcacaaaagatgcccacaatgccctgttggatatacagtcctccggacgcgctaaggagctgctcgggcagggtctcttgttgcgctccctgcaggaaaggaaccaggagcaggagaaggtggagcggcgccggcaggtgcccttccatttacatatcaacttagagttattggagtgcgtctacttggtgtctgctatgctgctggagatcccctacatggcagcacacgaatctgatgcacgccggcgcatgatcagtaaacagtttcaccatcaactcagggtcggagagcgacagcctttattgggaccacccgaatccatgagggagcacgtagtggcagcttctaaggcaatgaaaatgggcgattggaagacatgccattccttcattatcaatgagaaaatgaacggtaaggtgtgggacctcttccccgaggcagataaggtgaggaccatgcttgtcagaaaaattcaagaagagtcactgaggacatatctatttacgtattcgagcgtctacgatagcatctctatggagacgctctctgatatgtttgagctggatcttcccacggttcatagcatcatctccaagatgattatcaacgaggagctgatggcttctctggaccagcccacacagaccgtcgtgatgcatcgtacggagcccacagcacaacagaatctggcactacaactagcggaaaaactgggatccctagtagagaacaacgagagagtatttgaccacaagcaagggacatatggaggctattttagggatcagaaagacgggtatagaaagaatgagggctatatgcgccgagggggataccgccaacagcagagtcagactgcgtattag

SEQ ID NO: 104842 - DNA, 2286 bp, Artificial Sequence
  derived and/or modified sequence
atgtcgagattcttcaccactggaagtgattctgagtcagaatcttctctctctggagaagagctggtcaccaaacccgttgggggaaattatggcaaacaacctttgctcctgtctgaagacgaagaggacacaaagcgcgtggttagatccgcgaaagacaagagatttgaggaactgactaatctaatcagaaccatccggaatgcaatgaagatcagagacgtgacaaaatgtctcgaggaatttgagctgctgggcaaggcctacggtaaagctaaaagtatcgtggataaagaaggggtgccccgattttatattcggatcctcgcggacttagaagactacctgaacgagctgtgggaagacaaggaaggcaagaagaaacacgatcggaagtccaagcgtctcgatgaggaggaggaggataacgagggcggagagtgggagagggtgcgcggaggcgtgccattggtgaaagagaagccaaaaatgtttgcaaaaggcaccgagatcactcatgctgtggtgataaagaaacttaacgagattctgcaggctcggggaaaaaaagggacggatcgtgccgctcagatcgaactgctccagttgctcgtccagatcgcagcagagaacaacttaggagaaggggtgattgtgaaaattaaattcaacattatcgcttcattatatgactacaacccaaatttggctacttatatgaaaccagagatgtggggcaaatgcctcgactgcatcaacgagctaatggacatccttttcgccaaccctaatatttttgtgggggagaatattctggaagagagcgaaaacctgcacaacgccgatcagcccctccgagttcggggttgtattctcactctggtggaacgcatggacgaggagttcaccaagattatgcagaatacagatccgcactctcaggagtacgtggagcatctgaaggatgaagcccaggtctgcgcgatcatcgaaagggtgcagaggtacttggaagaaaaaggcacaactgaggaggtttgccgcatttatctgttgaggatcttgcacacctattataaattcgattacaaggcacatcaacgccagctcactccacctgagggatcgtcgaagtccgagcaggaccaggccgaaaacgagggcgaagatagcgccgttctgatggagcggctgtgtaagtacatctatgctaaggaccggaccgaccggattcgcacgtgcgcaattctgtgtcatatctatcaccacgcccttcacagcagatggtaccaagcaagagatcttatgctgatgagtcacctccaggacaatatccagcacgccgacccacctgtacagattctatacaacaggaccatggtccagctcggcatctgtgccttcagacagggtttaactaaggatgctcataatgccctgctggatattcagagcagcggaagggccaaggagctactgggacaggggctgctgctgcggtctctgcaggagcgaaatcaagaacaggagaaagtcgagcgaaggcgccaggtaccattccacctccacatcaaccttgagttgctggaatgcgtgtacctggtgtcggcaatgttactggaaattccatacatggcggcacacgaaagtgatgcgagaaggaggatgattagcaagcagttccaccaccagctgcgggtcggggaaagacagcccctgctcggacccccagagagcatgagagagcatgtcgttgctgcttcaaaagcgatgaagatgggagattggaagacttgtcattcgttcattatcaatgagaagatgaacggcaaggtgtgggacctctttccagaggcggacaaggtgcggaccatgctcgtgcggaaaatacaggaggagagtctaaggacatatctgtttacctactcatctgtttatgatagtatttcgatggagacgctatccgatatgttcgagcttgacctgcccactgtacatagcatcatcagcaagatgataattaatgaggagcttatggcctccctcgaccagcccactcaaacggttgtaatgcatcggactgagcccacagcccaacagaacttggccctccagctcgcggaaaagctcgggtctctggtcgagaacaacgagcgcgtttttgaccataagcagggcacatacggaggctactttagagatcaaaaagatggataccgtaaaaacgagggctatatgagaagaggaggctaccggcagcagcagagccaaaccgcctactag

SEQ ID NO: 104843 - DNA, 2208 bp, Artificial Sequence
  derived and/or modified sequence
atgagtcggttctttactacagggtccgattccgaatccgagtcaagtcttagtggggaagaactggttaccaagcctgtggggggtaactatggaaagcagccactgcttctttcagaagatgaagaagatactaaacgtgtggtgaggagcgccaaggacaaacgattcgaagaattgacaaatctgatacgtacaattcgcaacgcaatgaaaattcgcgatgtgaccaagtgcttggaagagtttgagctgcttggaaaagcttatggaaaggccaagtccatagtggataaggcgaaaaagaagcatgacagaaaatctaagagactagatgaagaagaagaggacaatgagggtggtgagtgggaaagagtgcggggaggcgttcccctagtgaaggaaaagccaaagatgttcgccaagggtacagaaatcacccatgccgtggtgatcaagaagttgaacgaaatcctacaagccagaggcaagaaaggaaccgatcgggctgctcagatcgaattactgcagctgctggtgcaaattgcagccgagaacaacctaggcgagggcgtgatcgttaagataaagttcaacatcattgcaagcctctacgactacaaccctaatctggccacatatatgaagccagagatgtggggcaaatgcttagactgcataaatgagcttatggacattctattcgctaaccccaatatttttgtgggtgaaaacatactggaggagtccgaaaatcttcacaacgcagatcaacctctgcgagtgcgcggatgtattttgaccctggtggagcggatggacgaggagttcacaaagatcatgcagaacaccgatcctcactcccaggaatatgttgaacaccttaaggacgaggcgcaggtgtgcgctattattgagcgggtccaaagatacctggaagaaaagggcactacggaagaggtgtgtaggatttatctgctgagaatactgcatacatattacaagttcgactacaaggcacatcagcgacaactcacaccgccagagggctcctcgaagagtgagcaagaccaggctgaaaacgagggtgaggatagcgcagtacttatggagcgcttgtgcaagtacatctatgcaaaagaccgtacggacaggatccggacatgcgcaattctgtgtcacatataccatcatgctctgcacagcaggtggtatcaggcacgcgatctcatgttaatgtcccaccttcaggataatatccaacatgccgatccaccggtgcaaatactgtacaatcgtaccatggttcagctggggatctgtgctttcagacaaggattgaccaaggacgcccacaacgcccttctggacatacagtcatcagggagggctaaggaactactgggacaagggttgctcctgagaagtctgcaagaacggaaccaagagcaggagaaggtggagcgcaggcggcaagtccctttccatttgcacatcaacttggaacttcttgagtgcgtatacctggtatccgcaatgttgcttgagatcccatacatggcggctcacgagagcgatgcacgaaggagaatgatttctaaacagttccatcatcagttgcgcgtgggtgagcgccaaccacttctgggccctccggagtctatgcgagagcatgtggtggcagcatcaaaagccatgaaaatgggcgactggaagacctgtcattctttcataatcaatgaaaaaatgaatggaaaggtgtgggatctttttcccgaagccgataaagtgagaaccatgctggtgcgaaagattcaagaagagagtctcagaacatacctgttcacctacagctctgtgtatgactccatctccatggaaaccctatccgacatgttcgagttggacctgccaacagttcatagcatcatttctaagatgataatcaatgaggagctgatggcttcactggatcaacccacacagaccgtcgtaatgcatcgcactgagcctacagcacaacagaatctggcactccagttagcagagaaactaggatcactggtggagaacaatgaaagagtgtttgatcacaaacaggggacttacggcggttatttcagggatcaaaaagacggctaccgcaagaatgaagggtacatgcgcaggggcggttatcgacagcagcagtctcagacagcatactag

SEQ ID NO: 104844 - DNA, 2286 bp, Artificial Sequence
  derived and/or modified sequence
atgagcagattcttcaccaccggcagcgacagcgagagcgagagcagcctgagcggcgaggagctggtgaccaagcccgtgggcggcaactacggcaagcagcccctgctgctgagcgaggacgaggaggacaccaagagagtggtgagaagcgccaaggacaagagattcgaggagctgaccaacctgatcagaaccatcagaaacgccatgaagatcagagacgtgaccaagtgcctggaggagttcgagctgctgggcaaggcctacggcaaggccaagagcatcgtggacaaggagggcgtgcccagattctacatcagaatcctggccgacctggaggactacctgaacgagctgtgggaggacaaggagggcaagaagaagcacgacagaaagagcaagagactggacgaggaggaggaggacaacgagggcggcgagtgggagagagtgagaggcggcgtgcccctggtgaaggagaagcccaagatgttcgccaagggcaccgagatcacccacgccgtggtgatcaagaagctgaacgagatcctgcaggccagaggcaagaagggcaccgacagagccgcccagatcgagctgctgcagctgctggtgcagatcgccgccgagaacaacctgggcgagggcgtgatcgtgaagatcaagttcaacatcatcgccagcctgtacgactacaaccccaacctggccacctacatgaagcccgagatgtggggcaagtgcctggactgcatcaacgagctgatggacatcctgttcgccaaccccaacatcttcgtgggcgagaacatcctggaggagagcgagaacctgcacaacgccgaccagcccctgagagtgagaggctgcatcctgaccctggtggagagaatggacgaggagttcaccaagatcatgcagaacaccgacccccacagccaggagtacgtggagcacctgaaggacgaggcccaggtgtgcgccatcatcgagagagtgcagagatacctggaggagaagggcaccaccgaggaggtgtgcagaatctacctgctgagaatcctgcacacctactacaagttcgactacaaggcccaccagagacagctgaccccccccgagggcagcagcaagagcgagcaggaccaggccgagaacgagggcgaggacagcgccgtgctgatggagagactgtgcaagtacatctacgccaaggacagaaccgacagaatcagaacctgcgccatcctgtgccacatctaccaccacgccctgcacagcagatggtaccaggccagagacctgatgctgatgagccacctgcaggacaacatccagcacgccgacccccccgtgcagatcctgtacaacagaaccatggtgcagctgggcatctgcgccttcagacagggcctgaccaaggacgcccacaacgccctgctggacatccagagcagcggcagagccaaggagctgctgggccagggcctgctgctgagaagcctgcaggagagaaaccaggagcaggagaaggtggagagaagaagacaggtgcccttccacctgcacatcaacctggagctgctggagtgcgtgtacctggtgagcgccatgctgctggagatcccctacatggccgcccacgagagcgacgccagaagaagaatgatcagcaagcagttccaccaccagctgagagtgggcgagagacagcccctgctgggcccccccgagagcatgagagagcacgtggtggccgccagcaaggccatgaagatgggcgactggaagacctgccacagcttcatcatcaacgagaagatgaacggcaaggtgtgggacctgttccccgaggccgacaaggtgagaaccatgctggtgagaaagatccaggaggagagcctgagaacctacctgttcacctacagcagcgtgtacgacagcatcagcatggagaccctgagcgacatgttcgagctggacctgcccaccgtgcacagcatcatcagcaagatgatcatcaacgaggagctgatggccagcctggaccagcccacccagaccgtggtgatgcacagaaccgagcccaccgcccagcagaacctggccctgcagctggccgagaagctgggcagcctggtggagaacaacgagagagtgttcgaccacaagcagggcacctacggcggctacttcagagaccagaaggacggctacagaaagaacgagggctacatgagaagaggcggctacagacagcagcagagccagaccgcctactag

SEQ ID NO: 104845 - DNA, 2208 bp, Artificial Sequence
  derived and/or modified sequence
atgagcagattcttcaccaccggcagcgacagcgagagcgagagcagcctgagcggcgaggagctggtgaccaagcccgtgggcggcaactacggcaagcagcccctgctgctgagcgaggacgaggaggacaccaagagagtggtgagaagcgccaaggacaagagattcgaggagctgaccaacctgatcagaaccatcagaaacgccatgaagatcagagacgtgaccaagtgcctggaggagttcgagctgctgggcaaggcctacggcaaggccaagagcatcgtggacaaggccaagaagaagcacgacagaaagagcaagagactggacgaggaggaggaggacaacgagggcggcgagtgggagagagtgagaggcggcgtgcccctggtgaaggagaagcccaagatgttcgccaagggcaccgagatcacccacgccgtggtgatcaagaagctgaacgagatcctgcaggccagaggcaagaagggcaccgacagagccgcccagatcgagctgctgcagctgctggtgcagatcgccgccgagaacaacctgggcgagggcgtgatcgtgaagatcaagttcaacatcatcgccagcctgtacgactacaaccccaacctggccacctacatgaagcccgagatgtggggcaagtgcctggactgcatcaacgagctgatggacatcctgttcgccaaccccaacatcttcgtgggcgagaacatcctggaggagagcgagaacctgcacaacgccgaccagcccctgagagtgagaggctgcatcctgaccctggtggagagaatggacgaggagttcaccaagatcatgcagaacaccgacccccacagccaggagtacgtggagcacctgaaggacgaggcccaggtgtgcgccatcatcgagagagtgcagagatacctggaggagaagggcaccaccgaggaggtgtgcagaatctacctgctgagaatcctgcacacctactacaagttcgactacaaggcccaccagagacagctgaccccccccgagggcagcagcaagagcgagcaggaccaggccgagaacgagggcgaggacagcgccgtgctgatggagagactgtgcaagtacatctacgccaaggacagaaccgacagaatcagaacctgcgccatcctgtgccacatctaccaccacgccctgcacagcagatggtaccaggccagagacctgatgctgatgagccacctgcaggacaacatccagcacgccgacccccccgtgcagatcctgtacaacagaaccatggtgcagctgggcatctgcgccttcagacagggcctgaccaaggacgcccacaacgccctgctggacatccagagcagcggcagagccaaggagctgctgggccagggcctgctgctgagaagcctgcaggagagaaaccaggagcaggagaaggtggagagaagaagacaggtgcccttccacctgcacatcaacctggagctgctggagtgcgtgtacctggtgagcgccatgctgctggagatcccctacatggccgcccacgagagcgacgccagaagaagaatgatcagcaagcagttccaccaccagctgagagtgggcgagagacagcccctgctgggcccccccgagagcatgagagagcacgtggtggccgccagcaaggccatgaagatgggcgactggaagacctgccacagcttcatcatcaacgagaagatgaacggcaaggtgtgggacctgttccccgaggccgacaaggtgagaaccatgctggtgagaaagatccaggaggagagcctgagaacctacctgttcacctacagcagcgtgtacgacagcatcagcatggagaccctgagcgacatgttcgagctggacctgcccaccgtgcacagcatcatcagcaagatgatcatcaacgaggagctgatggccagcctggaccagcccacccagaccgtggtgatgcacagaaccgagcccaccgcccagcagaacctggccctgcagctggccgagaagctgggcagcctggtggagaacaacgagagagtgttcgaccacaagcagggcacctacggcggctacttcagagaccagaaggacggctacagaaagaacgagggctacatgagaagaggcggctacagacagcagcagagccagaccgcctactag

SEQ ID NO: 104846 - protein, 834 aa, Artificial Sequence
  derived and/or modified sequence
MDSSNLAVIFAPNLLQTSEGHEKMSSNTEKKLRLQAAVVQTLIDYASDIGRVPDFILEKIPAMLGIDGLCATPSLEGFEEGEYETPGEYKRKRRQSVGDFVSGALNKFKPNRTPSITPQEERIAQLSESPVILTPNAKRTLPVDSSHGFSSKKRKSIKHNFNFELLPSNLFNSSSTPVSVHIDTSSEGSSQSSLSPVLIGGNHLITAGVPRRSKRIAGKKVCRVESGKAGCFSPKISHKEKVRRSLRLKFNLGKNGREVNGCSGVNRYESVGWRLANQQSLKNRIESVKTGLLFSPDVDEKLPKKGSEKISKSEETLLTPERLVGTNYRMSWTGPNNSSFQEVDANEASSMVENLEVENSLEPDIMVEKSPATSCELTPSNLNNKHNSNITSSPLSGDENNMTKETLVKVQKAFSESGSNLHALMNQRQSSVTNVGKVKLTEPSYLEDSPEENLFETNDLTIVESKEKYEHHTGKGEKCFSERDFSPLQTQTFNRETTIKCYSTQMKMEHEKDIHSNMPKDYLSKQEFSSDEEIKKQQSPKDKLNNKLKENENMMEGNLPKCAAHSKDEARSSFSQQSTCVVTNLSKPRPMRIAKQQSLETCEKTVSESSQMTEHRKVSDHIQWFNKLSLNEPNRIKVKSPLKFQRTPVRQSVRRINSLLEYSRQPTGHKLASLGDTASPLVKSVSCDGALSSCIESASKDSSVSCIKSGPKEQKSMSCEESNIGAISKSSMELPSKSFLKMRKHPDSVNASLRSTTVYKQKILSDGQVKVPLDDLTNHDIVKPVVNNNMGISSGINNRVLRRPSERGRAWYKGSPKHPIGKTQLLPTSKPVDL

SEQ ID NO: 104847 - DNA, 2505 bp, Artificial Sequence
  derived and/or modified sequence
atggacagctctaacctggccgtaatatttgccccgaacctgttacaaacatctgaaggccacgagaagatgtccagtaataccgaaaagaagctgagactgcaggccgcggtggtgcagacactgatcgattacgcctccgacatcggccgtgtgcccgacttcatcttggagaaaattcctgccatgctcggaatagatggactgtgtgccacacccagccttgaaggttttgaggaaggtgagtacgagacccccggggagtacaagagaaagcggcgtcagagtgtcggagattttgtttcaggagctttgaacaaattcaagccaaatcggactccctctattactccccaagaggaaagaattgcccagctctcagagtccccagtaatcctgaccccgaacgcaaagaggacacttcccgttgatagcagccacggcttttcgagcaagaagaggaagtcaataaagcacaattttaacttcgaattgctcccatctaacttattcaattctagctctacccccgtctccgtgcacattgacacctcctctgaggggtcctcccagagctctctgtcccctgttttgataggcggcaaccacctcattaccgccggtgtgcctagaaggtccaagcgtatcgccggaaagaaagtgtgtagagttgagtccggaaaggcggggtgtttctcacctaaaatcagccataaggagaaggtccgacggagtttacgactcaaattcaatctcggcaaaaacggtagagaggtgaacggctgtagcggcgtgaatagatatgaaagtgttggttggagacttgccaaccagcagagtttgaagaatcgcatcgaatcagtgaagaccggtttactgtttagcccagatgttgatgagaagctaccaaagaaagggtctgagaagatttcaaagagtgaggaaaccctgctgacaccagagaggcttgttgggacgaattacagaatgtcatggacaggaccaaacaactcatcttttcaggaagtggatgctaatgaggcgtcatccatggtggagaatcttgaggtagaaaacagtttggagccggacatcatggtggagaagtcacccgcaacctcttgtgaattgacacccagcaacctgaacaataagcacaactctaatattacatcttcgccgctgtccggcgatgaaaacaatatgaccaaagaaactttggtaaaagtgcagaaggccttttcggagtccggctcaaatcttcacgctctcatgaatcagaggcagagctccgtcactaacgtcggcaaggtgaagctcactgaaccttcctatctggaagatagcccagaggagaatctcttcgagacaaacgacctaacgattgtggagagtaaggagaagtatgagcaccacacgggaaaaggtgaaaagtgctttagcgaacgtgacttctctcctcttcagacacagaccttcaaccgggaaacaacaataaaatgttattctactcaaatgaagatggagcatgagaaagacatccactctaacatgcccaaagactatttatccaagcaggaattttcttctgacgaagaaatcaaaaagcagcaatcacctaaagacaaactcaataataaattaaaggagaatgagaacatgatggaaggaaacctgccaaaatgtgctgcccatagcaaggatgaggcaagatcctccttctctcagcaaagtacctgcgttgtgaccaaccttagcaaacccagaccaatgagaattgccaaacagcaatccttagagacctgcgaaaagaccgtgagcgaatcgtctcagatgacagagcatcgcaaggtaagcgatcacattcagtggttcaacaaactgtccctgaatgagcctaatagaattaaggtgaaaagtccactgaagttccagaggactcccgtcagacaatctgtgagacgtatcaactctcttcttgaatatagtcgacagccaacagggcacaaactggcaagcctgggcgacaccgcctctcctcttgtgaagtcggtatcctgcgatggagccctatctagttgtattgaatctgcatctaaggattcttcggtatcgtgcattaaaagcgggccaaaggagcagaagagcatgtcctgtgaggagagtaacatcggggccatcagtaaaagcagcatggagttaccctctaagtcttttcttaagatgcggaagcatcccgattcagttaatgcctcattgagatcgaccacggtgtataaacagaagattttgagcgacgggcaggttaaggttccactggacgacctgaccaaccatgacatcgtcaagccagtagtaaataacaatatggggatcagcagtgggattaacaatagagtcctgcgacggccttcagaacgtggaagagcgtggtataagggttcaccgaagcaccctatcggaaagacacagctcctaccaaccagcaaaccagtggacctttag

SEQ ID NO: 104848 - DNA, 2505 bp, Artificial Sequence
  derived and/or modified sequence
atggacagcagcaacctggccgtcatctttgcccccaacctgctgcagaccagcgagggccacgagaagatgagcagcaacacagagaagaagctgcggctgcaggccgctgtggtgcagaccctgattgattatgccagtgacatcggccgggtgcctgacttcatcctggagaagatcccagccatgctgggcattgatggcctgtgtgccacccccagcctggagggctttgaggagggggagtatgagaccccaggagagtacaagaggaagaggcggcagagcgtgggggactttgtgtctggggccctgaacaagttcaagcccaacagaacacccagcatcaccccccaggaggagagaattgcccagctgtctgagagccctgtgatcctgaccccaaatgccaagaggaccctgcctgtggacagcagccacggcttcagcagcaagaagaggaagagcatcaagcacaacttcaactttgagctgctgcccagcaacctcttcaacagcagcagcacccctgtgtctgtgcacatcgacaccagcagcgagggcagcagccagagcagcctgagccctgtgctgattggaggcaaccacctgatcacagctggggtgcccaggaggagcaagagaattgctgggaagaaggtgtgccgggtggagagcggcaaggccggctgcttcagccccaagatcagccacaaggagaaggtgagaagaagcctgcggctgaagttcaacctgggcaagaatggccgggaggtgaatggctgcagcggcgtgaacagatatgagagcgtgggctggaggctggccaaccagcagagcctgaagaacagaattgaatctgtgaagacaggcctgctcttctccccagatgtggatgagaagctgcccaagaagggcagcgagaagatcagcaagtctgaggagaccctgctgaccccagagcggctggtgggcaccaactacaggatgtcctggacaggccccaacaacagcagcttccaggaggtggatgccaatgaggccagctccatggtggagaacctggaggtggagaacagcctggagccagacatcatggtggagaagagccctgccaccagctgtgagctgacccccagcaacctgaacaacaagcacaacagcaacatcaccagcagccccctgtctggagatgagaacaacatgaccaaggagaccctggtgaaggtgcagaaggccttcagcgagagcggcagcaacctgcacgccctgatgaaccagaggcagagctctgtgaccaacgtgggcaaggtgaagctgacagagcccagctacctggaggacagccctgaggagaacctgtttgagaccaatgacctgaccatcgtggagagcaaggagaagtatgagcaccacactggaaaaggagagaagtgcttcagcgagcgggacttcagccccctgcagacccagaccttcaaccgggagaccaccatcaagtgctacagcacccagatgaagatggagcacgagaaggacatccacagcaacatgcccaaggactacctgagcaagcaggagttcagcagtgatgaggagatcaagaagcagcagagccccaaggacaagctgaacaacaagctgaaggaaaatgaaaacatgatggagggcaacctgcccaagtgtgccgcccacagcaaggatgaggcccggagcagcttcagccagcagagcacctgtgtggtgaccaacctgagcaagccccggcccatgagaattgccaagcagcagagcctggagacctgtgagaagacagtgtctgagagcagccagatgacagagcacaggaaggtgtctgaccacatccagtggttcaacaagctgagcctgaatgagcccaaccgcatcaaggtgaagagccccctgaagttccagaggacccctgtgcggcagagcgtgcggcgcatcaacagcctgctggagtacagccggcagcccaccggccacaagctggccagcctgggggacacagccagccccctggtgaagtctgtgtcctgtgatggagccctgagcagctgcattgaaagtgccagcaaggacagctctgtgtcctgcatcaagagcggccccaaggagcagaagtccatgagctgtgaggagagcaacatcggggccatcagcaagagctccatggagctgcccagcaagagcttcctgaagatgaggaagcacccagacagcgtgaatgccagcctgcggagcaccaccgtgtacaagcagaagatcctgagtgatggccaggtgaaggtgcccctggatgacctgaccaaccacgacatcgtgaagcctgtggtgaacaacaacatgggcatcagcagcggcatcaacaacagagtgctgcggcggcccagcgagcggggccgggcctggtacaagggcagccccaagcaccccatcggcaagacccagctgctgcccaccagcaagcctgtggacctgtag

SEQ ID NO: 104849 - DNA, 2505 bp, Artificial Sequence
  derived and/or modified sequence
atggacagcagcaacctggccgtgatcttcgcccccaacctgctgcaaacctccgagggccatgagaagatgagcagcaacactgaaaagaaactgagattacaggcagccgtggtacagaccctgattgactacgccagcgatatagggcgagtgcctgactttatcctggagaagattcctgctatgctcggaatcgatggactgtgtgccaccccttcccttgaaggattcgaggagggggagtacgagaccccaggcgaatacaaacgcaaacgccgtcagtctgtgggagatttcgtcagcggcgccttgaataaatttaagcctaatcgtactccctcaatcacaccgcaggaagaacggattgcccagttgtccgaaagtcccgtcatcctgacacccaacgcaaagaggacactccccgttgattctagtcatggtttctctagtaaaaaacggaagtccatcaaacataactttaactttgagctgctgccgtctaatctatttaattcttcctcaacgcctgtaagtgtacacatcgacacgtctagcgaaggttcaagtcagtccagcctttctcccgttctgatcggaggaaaccatttgataacagcaggcgttcctaggagaagcaagcgtattgccggtaagaaggtttgtagagtcgaatcgggaaaggcgggctgctttagtccaaagatctctcacaaagaaaaggttagacgttcactgaggttgaagttcaaccttggtaagaacgggcgagaggtgaacggttgctcaggggtcaaccgatatgaatccgttggctggagactggccaaccaacagagccttaaaaatcggattgagagcgtaaagactggccttctgttctcacctgatgtggatgagaaattgcctaaaaagggtagcgagaaaatcagtaagtctgaagaaaccctgctgacacctgagagactggtgggtacaaactatcgaatgtcatggacgggcccgaacaacagcagtttccaggaagttgacgccaacgaagcctcatcaatggtggagaacttggaggtggagaatagcctagagccagacattatggtggaaaaatctcccgcaactagctgcgaactgaccccttcaaaccttaataataagcacaactccaatataacatcaagccctctgtccggcgatgagaataatatgacgaaggaaaccctggtaaaagtgcagaaggcattctccgagagtggatccaacttacatgcactcatgaaccagcgtcagtcgtctgtcaccaacgttgggaaggtgaagttgacagagcctagctacctcgaggatagtccagaggagaatctttttgagactaatgacttgactatagttgagagtaaggagaaatatgagcatcataccggaaagggcgagaagtgcttctctgaacgcgacttctccccgctgcagacccagacatttaacagggaaaccaccatcaaatgctactcaacccagatgaaaatggaacacgaaaaggacattcattcaaacatgccaaaagactatctcagcaagcaagagttcagcagcgacgaggagattaagaaacagcaatcccccaaggataagctgaataacaaacttaaagaaaatgagaacatgatggagggcaacctccccaaatgcgctgcccactccaaggatgaagcccggtcgtctttctcccagcagtctacctgcgtcgtgaccaacctctcaaagccaagacctatgaggatcgcaaagcagcagagtcttgagacctgcgagaagacagtttcagagagcagccagatgacggaacatcgcaaggtttcagatcatattcaatggtttaacaaactatccctgaatgagcccaacagaattaaagttaagtccccgttgaagttccaacgaacaccggtgagacagtcagttcggcgaattaatagcctgctggaatattctagacagcctaccggccacaagctggcttctttgggagatactgccagcccactcgtgaagagcgtgtcttgcgatggggcattgagctcctgcatcgagagcgcaagcaaggattcttccgtgtcctgcattaagtctggccccaaagagcagaagtccatgtcctgtgaggaatcaaacatcggggcaatttctaaaagctcaatggaactgccctctaagtcttttttgaaaatgaggaaacaccccgattcagtcaatgcttccctaagaagtacgactgtttacaagcagaaaatcttaagcgatggacaggtaaaagttccacttgacgacctgaccaaccacgatatcgtgaaacccgtcgtcaataataacatgggcatctcttccggaataaacaatcgcgtgttgagacggccatctgagagggggagagcctggtataagggcagccctaagcaccctattggcaaaacccagctgctccccaccagcaaacctgtcgacctgtag

SEQ ID NO: 104850 - DNA, 2505 bp, Artificial Sequence
  derived and/or modified sequence
atggacagctccaatttggcagtgattttcgctcccaacctcctgcagacctcagaaggccacgaaaagatgtcatccaacactgaaaagaagctgcgccttcaagctgcagtcgtccagacactgatcgattacgcaagcgacataggcagggtgcctgatttcatactggaaaagatcccagcgatgttgggaatcgatgggctttgtgcaaccccatctctggagggatttgaggagggcgagtacgaaacgccgggtgagtataagcgaaagcgcagacaatcagtgggagattttgtgtccggagctctgaataaattcaagcccaatagaactccctccataacaccacaggaagagagaatcgctcagctgtctgaatcacctgttatcctcactcccaacgccaagaggacactcccagtcgactcctcccatggctttagtagcaaaaagaggaaaagcatcaagcataacttcaactttgaacttctccccagcaacctgttcaactcttctagcaccccagtgtcagtgcatattgacacatcctccgagggatcctcgcagtcctcacttagtcctgtacttattggagggaatcatttgataacggccggtgtccctcgccgttcgaagcgcatcgccggtaagaaggtttgtcgggtggagtcagggaaggcaggatgctttagtcccaaaatctcccacaaggagaaggtgaggcggagcctgcgtttgaaattcaacctgggaaagaacgggagggaggtcaacgggtgcagtggcgttaacaggtatgaaagtgttggatggagactggctaatcagcagtctttaaagaataggatagaatccgtgaaaacgggattactctttagcccagatgtcgacgagaaactaccaaagaagggctccgaaaaaatctccaagagtgaagagaccttactgacacccgaaagattggttggtacaaattaccgcatgtcatggaccggacctaataatagcagctttcaggaggttgacgccaatgaagctagcagcatggtggagaatctcgaggtggaaaattccctagaacccgacatcatggtggagaagtcccctgccacctcgtgtgaattgacgccatccaacctaaataataaacacaattctaacataacctcctccccactttctggagatgaaaacaatatgacaaaagaaacacttgtaaaggtgcagaaggctttttccgagagcggctcgaacctccatgcccttatgaaccaaagacagtcttccgtcacaaacgtcggaaaagttaagctgaccgagccgtcttacctggaggatagccctgaggaaaacctctttgaaaccaatgacctgaccattgtagagtccaaagagaaatacgaacatcataccggaaaaggagaaaagtgcttcagcgagcgcgacttttcccccttacagacgcaaaccttcaatcgcgagacaactatcaagtgttattctacccaaatgaagatggagcacgagaaggacatccactcaaatatgcccaaggattacttgtccaaacaagagttcagcagtgacgaggaaattaagaagcagcaatctccaaaggacaaactgaacaataagttgaaggagaacgaaaacatgatggaggggaacctacccaagtgtgccgcacactcaaaagatgaggctagatcatccttttcgcagcagagtacatgcgtggtcactaacttgtctaagcccagaccgatgcggattgcaaaacaacagtcactcgagacctgcgaaaagaccgtatcggagtcttcgcagatgaccgaacaccgcaaggtcagtgaccatattcagtggtttaataaactgtccctgaatgagcctaatcgcattaaagtcaaaagccccctgaaatttcagcgcacccccgtccgtcagtcggtaaggagaataaacagtctgcttgaatactcacgacagcccacaggacataagctcgcgtcactgggggataccgccagccctttggtgaaatcagtcagctgcgatggagcactgagcagttgcattgagagtgccagcaaagacagcagtgtgagttgtatcaagtccggtcctaaagagcagaagtccatgagctgcgaagagtctaacatcggcgcaatcagcaagtcctccatggaactcccctcaaaatcattcctcaagatgaggaaacaccccgattcagtgaacgcgtctctccggagcacaaccgtttacaagcagaaaattctgagtgacggccaagttaaagtacccctggatgacctaaccaatcacgatatcgtcaagcctgtggtgaataataatatgggtatatcttcagggattaataatagagtgctacggcgtccgtctgagcgcggtagggcctggtataagggctctcccaagcatcctatcggcaagactcagctgctgccaactagcaaacccgtcgacttgtag

SEQ ID NO: 104851 - DNA, 2505 bp, Artificial Sequence
  derived and/or modified sequence
atggacagcagcaacctggccgtgatcttcgcccccaacctgctgcagaccagcgagggccacgagaagatgagcagcaacaccgagaagaagctgagactgcaggccgccgtggtgcagaccctgatcgactacgccagcgacatcggcagagtgcccgacttcatcctggagaagatccccgccatgctgggcatcgacggcctgtgcgccacccccagcctggagggcttcgaggagggcgagtacgagacccccggcgagtacaagagaaagagaagacagagcgtgggcgacttcgtgagcggcgccctgaacaagttcaagcccaacagaacccccagcatcaccccccaggaggagagaatcgcccagctgagcgagagccccgtgatcctgacccccaacgccaagagaaccctgcccgtggacagcagccacggcttcagcagcaagaagagaaagagcatcaagcacaacttcaacttcgagctgctgcccagcaacctgttcaacagcagcagcacccccgtgagcgtgcacatcgacaccagcagcgagggcagcagccagagcagcctgagccccgtgctgatcggcggcaaccacctgatcaccgccggcgtgcccagaagaagcaagagaatcgccggcaagaaggtgtgcagagtggagagcggcaaggccggctgcttcagccccaagatcagccacaaggagaaggtgagaagaagcctgagactgaagttcaacctgggcaagaacggcagagaggtgaacggctgcagcggcgtgaacagatacgagagcgtgggctggagactggccaaccagcagagcctgaagaacagaatcgagagcgtgaagaccggcctgctgttcagccccgacgtggacgagaagctgcccaagaagggcagcgagaagatcagcaagagcgaggagaccctgctgacccccgagagactggtgggcaccaactacagaatgagctggaccggccccaacaacagcagcttccaggaggtggacgccaacgaggccagcagcatggtggagaacctggaggtggagaacagcctggagcccgacatcatggtggagaagagccccgccaccagctgcgagctgacccccagcaacctgaacaacaagcacaacagcaacatcaccagcagccccctgagcggcgacgagaacaacatgaccaaggagaccctggtgaaggtgcagaaggccttcagcgagagcggcagcaacctgcacgccctgatgaaccagagacagagcagcgtgaccaacgtgggcaaggtgaagctgaccgagcccagctacctggaggacagccccgaggagaacctgttcgagaccaacgacctgaccatcgtggagagcaaggagaagtacgagcaccacaccggcaagggcgagaagtgcttcagcgagagagacttcagccccctgcagacccagaccttcaacagagagaccaccatcaagtgctacagcacccagatgaagatggagcacgagaaggacatccacagcaacatgcccaaggactacctgagcaagcaggagttcagcagcgacgaggagatcaagaagcagcagagccccaaggacaagctgaacaacaagctgaaggagaacgagaacatgatggagggcaacctgcccaagtgcgccgcccacagcaaggacgaggccagaagcagcttcagccagcagagcacctgcgtggtgaccaacctgagcaagcccagacccatgagaatcgccaagcagcagagcctggagacctgcgagaagaccgtgagcgagagcagccagatgaccgagcacagaaaggtgagcgaccacatccagtggttcaacaagctgagcctgaacgagcccaacagaatcaaggtgaagagccccctgaagttccagagaacccccgtgagacagagcgtgagaagaatcaacagcctgctggagtacagcagacagcccaccggccacaagctggccagcctgggcgacaccgccagccccctggtgaagagcgtgagctgcgacggcgccctgagcagctgcatcgagagcgccagcaaggacagcagcgtgagctgcatcaagagcggccccaaggagcagaagagcatgagctgcgaggagagcaacatcggcgccatcagcaagagcagcatggagctgcccagcaagagcttcctgaagatgagaaagcaccccgacagcgtgaacgccagcctgagaagcaccaccgtgtacaagcagaagatcctgagcgacggccaggtgaaggtgcccctggacgacctgaccaaccacgacatcgtgaagcccgtggtgaacaacaacatgggcatcagcagcggcatcaacaacagagtgctgagaagacccagcgagagaggcagagcctggtacaagggcagccccaagcaccccatcggcaagacccagctgctgcccaccagcaagcccgtggacctgtag

SEQ ID NO: 104852 - protein, 494 aa, Artificial Sequence
  derived and/or modified sequence
MAHSDTVVDGEPCDLSLNITWYLKSADCYNEIYNFKAEEVELYLEKLKEKRGLSGKYQTSSKLFQNCSELFKTQTFSGDFMHRLPLLGEKQEAKENGTNLTFIGDKTAMHEPLQTWQDAPYIFIVHIGISSSKESSKENSLSNLFTMTVEVKGPYEYLTLEDYPLMIFFMVMCIVYVLFGVLWLAWSACYWRDLLRIQFWIGAVIFLGMLEKAVFYAEFQNIRYKGESVQGALILAELLSAVKRSLARTLVIIVSLGYGIVKPRLGVTLHKVVVAGALYLLFSGMEGVLRVTGAQTDLASLAFIPLAFLDTALCWWIFISLTQTMKLLKLRRNIVKLSLYRHFTNTLILAVAASIVFIIWTTMKFRIVTCQSDWRELWVDDAIWRLLFSMILFVIMVLWRPSANNQRFAFSPLSEEEEEDEQKEPMLKESFEGMKMRSTKQEPNGNSKVNKAQEDDLKWVEENVPSSVTDVALPALLDSDEERMITHFERSKME

SEQ ID NO: 104853 - DNA, 1485 bp, Artificial Sequence
  derived and/or modified sequence
atggcccacagcgacaccgtggtggacggcgagccctgcgacctgagcctgaacatcacctggtacctgaagagcgccgactgctacaacgagatctacaacttcaaggccgaggaggtggagctgtacctggagaagctgaaggagaagagaggcctgagcggcaagtaccagaccagcagcaagctgttccagaactgcagcgagctgttcaagacccagaccttcagcggcgacttcatgcacagactgcccctgctgggcgagaagcaggaggccaaggagaacggcaccaacctgaccttcatcggcgacaagaccgccatgcacgagcccctgcagacctggcaggacgccccctacatcttcatcgtgcacatcggcatcagcagcagcaaggagagcagcaaggagaacagcctgagcaacctgttcaccatgaccgtggaggtgaagggcccctacgagtacctgaccctggaggactaccccctgatgatcttcttcatggtgatgtgcatcgtgtacgtgctgttcggcgtgctgtggctggcctggagcgcctgctactggagagacctgctgagaatccagttctggatcggcgccgtgatcttcctgggcatgctggagaaggccgtgttctacgccgagttccagaacatcagatacaagggcgagagcgtgcagggcgccctgatcctggccgagctgctgagcgccgtgaagagaagcctggccagaaccctggtgatcatcgtgagcctgggctacggcatcgtgaagcccagactgggcgtgaccctgcacaaggtggtggtggccggcgccctgtacctgctgttcagcggcatggagggcgtgctgagagtgaccggcgcccagaccgacctggccagcctggccttcatccccctggccttcctggacaccgccctgtgctggtggatcttcatcagcctgacccagaccatgaagctgctgaagctgagaagaaacatcgtgaagctgagcctgtacagacacttcaccaacaccctgatcctggccgtggccgccagcatcgtgttcatcatctggaccaccatgaagttcagaatcgtgacctgccagagcgactggagagagctgtgggtggacgacgccatctggagactgctgttcagcatgatcctgttcgtgatcatggtgctgtggagacccagcgccaacaaccagagattcgccttcagccccctgagcgaggaggaggaggaggacgagcagaaggagcccatgctgaaggagagcttcgagggcatgaagatgagaagcaccaagcaggagcccaacggcaacagcaaggtgaacaaggcccaggaggacgacctgaagtgggtggaggagaacgtgcccagcagcgtgaccgacgtggccctgcccgccctgctggacagcgacgaggagagaatgatcacccacttcgagagaagcaagatggagtag

SEQ ID NO: 104854 - DNA, 1485 bp, Artificial Sequence
  derived and/or modified sequence
atggcacacagtgatactgtcgtcgatggcgagccttgcgacctaagtctgaacatcacttggtacctgaagagtgcagactgttataacgaaatttacaattttaaggcagaggaagtggagctctatctagagaaactcaaggaaaaaagagggttgagtgggaaataccagacttcctcgaagctcttccagaattgttccgagctgttcaagacacagaccttttccggagattttatgcatcggctgcccttgctgggagagaagcaggaggctaaagagaatgggacgaatctcacctttattggcgacaagactgccatgcacgaacccttacaaacatggcaggacgccccgtacattttcattgtgcatattggtatcagttcatctaaagaaagttcgaaggaaaactctctcagtaacctgttcaccatgactgtcgaggttaaaggaccctatgaatacttgaccctggaagattacccactgatgatttttttcatggtgatgtgcattgtctacgtgctgttcggcgtgctctggctagcttggtcagcgtgctactggagagatctactccgcatacaattttggattggcgcagtcattttcctcgggatgctcgagaaagcagtgttctacgctgaattccagaatatccgctacaagggcgagagtgtgcagggcgctctaatactggcagagcttctgtccgccgtgaaaagatcactggcacgcacacttgttatcatagtgagcctgggctacgggatagtcaagccgcgcctcggcgtgactttacataaagtggtggtggccggagcgctctacctgctcttctcagggatggagggtgtgctacgggtgacaggcgcccagactgacctggccagcctagctttcatccccctagcctttttggacaccgcactgtgctggtggatcttcatatcactaacacagacaatgaagctgctcaaactgcggcggaatattgtgaagttatccctgtaccgccacttcacaaacactcttatactggcagtagccgcgtccatagttttcattatctggacaaccatgaaatttcgcattgtgacatgtcagtcagactggcgggaactgtgggttgacgacgcaatctggcgcctgttgtttagcatgattctgttcgtcatcatggtgctgtggaggccctctgccaataaccagcgattcgcgttctcccccctgtccgaagaagaggaagaagatgagcagaaagagcccatgctgaaagaaagcttcgaaggaatgaagatgcggtccactaagcaggaacccaatggcaacagcaaggtcaataaagcacaggaggatgacctgaaatgggtggaggagaacgtcccttcgtccgtgacagacgtcgccctccctgcattattggactccgatgaggagcggatgattacccacttcgaaaggagtaaaatggagtag

SEQ ID NO: 104855 - DNA, 1485 bp, Artificial Sequence
  derived and/or modified sequence
atggcccacagcgacacagtggtggatggagagccctgtgacctgagcctgaacatcacctggtacctgaagtctgctgactgctacaatgagatctacaacttcaaggccgaggaggtggagctgtacctggagaagctgaaggagaagaggggcctgagcggcaagtaccagaccagcagcaagctgttccagaactgcagcgagctgttcaagacccagaccttcagcggggacttcatgcaccggctgcccctgctgggggagaagcaggaggccaaggaaaatggcaccaacctgaccttcatcggggacaagacagccatgcatgagcccctgcagacctggcaggatgccccctacatcttcatcgtgcacatcggcatcagcagcagcaaggagagcagcaaggagaacagcctgagcaacctcttcaccatgacagtggaggtgaagggcccctatgagtacctgaccctggaggactaccccctgatgatcttcttcatggtgatgtgcatcgtgtatgtgctgtttggagtgctgtggctggcctggagcgcctgctactggagggacctgctgcgcatccagttctggattggagctgtgatcttcctgggcatgctggagaaggctgtgttctatgcagagttccagaacatccgctacaagggggagagcgtgcagggcgccctgatcctggccgagctgctgtctgctgtgaagaggagcctggcccggaccctggtgatcatcgtgtccctgggctacggcatcgtgaagccccggctgggcgtgaccctgcacaaggtggtggtggccggggccctgtacctgctcttcagcggcatggagggcgtgctgcgggtgactggagcccagacagacctggccagcctggccttcatccccctggccttcctggacacagccctgtgctggtggatcttcatcagcctgacccagaccatgaagctgctgaagctgcggaggaacatcgtgaagctgagcctgtaccgccacttcaccaacaccctcatcctggccgtggccgccagcatcgtgttcatcatctggaccaccatgaagttcagaattgtgacctgccagagcgactggagggagctgtgggtggatgatgccatctggaggctgctcttctccatgatcctgtttgtgatcatggtgctgtggaggcccagcgccaacaaccagagatttgccttcagccccctgtctgaggaggaggaggaggatgagcagaaggagcccatgctgaaggagagctttgagggcatgaagatgaggagcaccaagcaggagcccaacggcaacagcaaggtgaacaaggcccaggaggatgacctgaagtgggtggaggagaatgtgcccagctctgtgacagatgtggccctgcctgccctgctggacagtgatgaggagaggatgatcacccactttgagaggagcaagatggagtag

SEQ ID NO: 104856 - DNA, 1485 bp, Artificial Sequence
  derived and/or modified sequence
atggcccacagcgacaccgtggtggacggcgagccctgcgacctgtccctgaatattacatggtaccttaaaagtgccgattgctacaatgagatttacaattttaaagctgaggaggtagaactgtatctggaaaagctgaaagagaagagggggctttctggcaaatatcagacaagctctaagctgtttcagaattgcagtgagctattcaaaacgcaaaccttttcaggagactttatgcatcgtctcccactcctcggcgagaagcaggaagcaaaggagaacgggacgaatctaacttttattggcgacaaaacagcaatgcatgaacctttacaaacatggcaggatgccccttacatctttatcgtgcatataggcatcagtagctccaaagaatcttcgaaagagaatagcctgagcaatcttttcactatgaccgttgaagtgaaaggaccctatgaatatctgactcttgaggactaccccttgatgattttctttatggtgatgtgcatcgtttatgtgctcttcggtgtgctttggcttgcctggagcgcgtgctattggagagatctcctccgaatccagttctggattggtgccgtgattttcctgggcatgcttgaaaaagctgtattctacgctgaattccaaaacataaggtataaaggagagagtgtgcaaggggcactgatacttgccgaactgctgtctgctgtaaagcgttctctcgcccgcactctggtcattattgttagcctgggatacggtatagtgaaaccacggttgggcgtgacgctacacaaggtcgtcgtagcgggagcactgtaccttttgttctcaggaatggaaggcgtgctccgagtgaccggggctcagactgacctcgcctcactggcttttatcccactggcattcctggatacagcactgtgctggtggatatttattagcttgactcaaaccatgaagctgcttaaattgcggcgtaacatcgtgaagctttccctatatcggcattttactaatacgctcattctggccgttgcagcttctattgtctttattatctggaccaccatgaagtttcggatcgtgacctgtcagtctgactggagagagctctgggtggacgatgccatttggaggctgctttttagcatgatccttttcgtcattatggtcctttggagaccctctgccaataatcagaggttcgcctttagtcctctcagcgaagaggaggaagaggacgagcagaaggagcctatgctcaaagagagtttcgaaggtatgaagatgcggtctactaaacaagagcctaatggcaattctaaagtgaacaaggcccaggaggatgacctgaaatgggtcgaggagaacgttccaagcagcgtcaccgatgttgccctgcccgccctgctcgactctgacgaggagcggatgatcacccatttcgagcgttctaagatggaatag

SEQ ID NO: 104857 - DNA, 1485 bp, Artificial Sequence
  derived and/or modified sequence
atggctcatagcgataccgtcgtggacggggaaccatgcgacttatctcttaacattacctggtatttgaaatcagctgactgttacaatgagatctataattttaaggcggaagaagtggaactgtacctcgagaagttaaaggaaaagaggggactctctgggaaataccagacctcgtccaagctttttcaaaattgctcagagctttttaagacccagacgttttctggcgacttcatgcatcgactgcccctactcggtgagaaacaggaggctaaagagaatggcactaatctgaccttcatcggagacaagacggccatgcacgaaccgttacaaacctggcaggatgcaccctacatcttcatcgtacacattggaatctcctcctccaaggagtctagcaaagagaacagcttgtccaatctcttcaccatgacagttgaggtcaaaggcccatacgaatacctcacactggaagactaccctctgatgattttttttatggtgatgtgtatagtgtacgtcctttttggcgtactctggttagcctggagtgcctgttactggcgtgatttactgagaatccagttctggatcggggcagtcattttcttaggaatgctggagaaagctgtgttctatgcagagtttcaaaacatccggtacaaaggcgagtctgtacagggcgctcttattctcgctgagctcctgtcagccgtcaaacgttccctggccagaactcttgtgatcatcgttagtctgggttacgggattgtgaagcccaggctgggagtaacactgcacaaggtggtggttgctggagcattgtacctcctgtttagcggtatggaaggtgtgctaagagtgactggcgcacaaactgacttagcctcgctggcgttcataccactggcttttctggacactgccctgtgttggtggatcttcatctctctgacccagaccatgaagctgttgaagctccgacgcaacattgtcaagctgagcctctaccgacactttaccaacacactgatcttagcagtagccgctagcatcgtgtttatcatctggaccaccatgaagtttcggatcgtgacatgtcagtccgactggagagaactgtgggttgatgatgccatttggcgcctgttgttctccatgattctgttcgttatcatggttctttggaggccttctgccaataatcagcgttttgccttttcccccctgagcgaagaggaggaggaagatgagcaaaaggaacctatgcttaaagagtccttcgaagggatgaaaatgaggtctactaagcaggaaccaaatggaaatagtaaagtaaataaggctcaggaggacgacctcaaatgggttgaggaaaatgttccgagcagtgttaccgacgttgccttgcctgccctcctggattctgacgaagaaagaatgatcacacatttcgaaagatcaaaaatggaatag

SEQ ID NO: 104858 - DNA, 2200 bp, Artificial Sequence
  derived and/or modified sequence
agagggtgaaatgctttcggtaggcactccacggctgtgaagatggcggcggctgcgtggcttcaggtgttgcctgtcattcttctgcttctgggagctcacccgtcaccactgtcgtttttcagtgcgggaccggcaaccgtagctgctgccgaccggtccaaatggcacattccgataccgtcgttgatggagaaccttgtgacctgtctttgaatataacctggtatctgaaaagcgctgattgttacaatgaaatctataacttcaaggcagaagaagtagagttgtatttggaaaaacttaaggaaaaaagaggcttgtctgggaaatatcaaacatcatcaaaattgttccagaactgcagtgaactctttaaaacacagaccttttctggagattttatgcatcgactgcctcttttaggagaaaaacaggaggctaaggagaatggaacaaaccttacctttattggagacaaaaccgcaatgcatgaaccattgcaaacttggcaagatgcaccatacatttttattgtacatattggcatttcatcctcaaaggaatcatcaaaagaaaattcactgagtaatctttttaccatgactgttgaagtgaagggtccctatgaatacctcacacttgaagactatcccttgatgatttttttcatggtgatgtgtattgtatatgtcctgtttggtgttctgtggctggcatggtctgcctgctactggagagatctcctgagaattcagttttggattggtgctgtcatcttcctgggaatgcttgagaaagctgtcttctatgcggaatttcagaatatccgatacaaaggagaatctgtccagggtgctttgatccttgcagagctgctttcagcagtgaaacgctcactggctcgaaccctggtcatcatagtcagtctgggatatggcatcgtcaagccacgccttggagtcactcttcataaggttgtagtagcaggagccctctatcttttgttctctggcatggaaggggtcctcagagttactggggcccagactgatcttgcttccttggcctttatccccttggctttcctagacactgccttgtgctggtggatatttattagcctgactcaaacaatgaagctattaaaacttcggaggaacattgtaaaactctctttgtatcggcatttcaccaacacgcttattttggcagtggcagcatccattgtgtttatcatctggacaaccatgaagttcagaatagtgacatgtcagtcggactggcgggagctgtgggtagacgatgccatctggcgcttgctgttctccatgatcctctttgtcatcatggttctctggcgaccatctgcaaacaaccagaggtttgccttttcaccattgtctgaggaagaggaggaggatgaacaaaaggagcctatgctgaaagaaagctttgaaggaatgaaaatgagaagtaccaaacaagaacccaatggaaatagtaaagttaacaaagcacaggaagatgatttgaagtgggtagaagagaatgttccttcttctgtgacagatgtagcacttccagcccttctggattcagatgaggaacgaatgatcacacactttgaaaggtccaaaatggagtaaggaatgggaagatttgcagttaaagatggctaccatcagggaagagatcagcatctgtgtcagtcttctgtacggctccatgggattaaaggaagcaatgacatcctgatctgttccttgatctttgggcattggagttggcgagaggtgtcagaacaaagagaacatcttactgaaaacaagttcataagatgagaaaaatctacgagcttcttatttacaacactgctgccccctttcctcccagactctgacatggatgttcatgcaacttaagtgtgttgttcctgaactttctgtaatgtttcattttttaaatctgacaaactaaaaagtttaacgtcttctaaaagattgtcatcaacaccataatatgtaatctccaggagcaactgcctgtaatttttatttatttagggagttacataggtgatgggggaaattgttaactacctttcattttcctgggaagtcaaggttacatcttgcagaggttgttttgagaaaaaagggcccttctgagttaaggagccatagttctatcaatgatc

SEQ ID NO: 104859 - protein, 414 aa, Artificial Sequence
  derived and/or modified sequence
MCFRVKFYPADPAALKEEITRYLVFLQIKRDLYHGRLLCKTSDAALLAAYILQAEIGDYDSGKHPEGYSSKFQFFPKHSEKLERKIAEIHKTELSGQTPATSELNFLRKAQTLETYGVDPHPCKDVSGNAAFLAFTPFGFVVLQGNKRVHFIKWNEVTKLKFEGKTFYLYEKKIILTYFAPTPEACKHLWKCGIENQAFYKLEKSSQVRTVSSSNLFFKGSRFRYSGRVAKEVMESSAKIKREPPEIHRAGMVPSRSCPSITHGPRLSSVPRTRRRAVHISIMEGLESLRDSAHSTPVRSTSHGDTFLPHVRSSRTDSNERVAVIADEAYSPADSVLPTPVAEHSLELMLLSRQINGATCSIEEEKESEASTPTATEVEALGGELRALCQGHSGPEEEQAMVCLQNPLSGEPAH

SEQ ID NO: 104860 - DNA, 1245 bp, Artificial Sequence
  derived and/or modified sequence
atgtgcttcagagtgaagttctaccccgccgaccccgccgccctgaaggaggagatcaccagatacctggtgttcctgcagatcaagagagacctgtaccacggcagactgctgtgcaagaccagcgacgccgccctgctggccgcctacatcctgcaggccgagatcggcgactacgacagcggcaagcaccccgagggctacagcagcaagttccagttcttccccaagcacagcgagaagctggagagaaagatcgccgagatccacaagaccgagctgagcggccagacccccgccaccagcgagctgaacttcctgagaaaggcccagaccctggagacctacggcgtggacccccacccctgcaaggacgtgagcggcaacgccgccttcctggccttcacccccttcggcttcgtggtgctgcagggcaacaagagagtgcacttcatcaagtggaacgaggtgaccaagctgaagttcgagggcaagaccttctacctgtacgagaagaagatcatcctgacctacttcgcccccacccccgaggcctgcaagcacctgtggaagtgcggcatcgagaaccaggccttctacaagctggagaagagcagccaggtgagaaccgtgagcagcagcaacctgttcttcaagggcagcagattcagatacagcggcagagtggccaaggaggtgatggagagcagcgccaagatcaagagagagccccccgagatccacagagccggcatggtgcccagcagaagctgccccagcatcacccacggccccagactgagcagcgtgcccagaaccagaagaagagccgtgcacatcagcatcatggagggcctggagagcctgagagacagcgcccacagcacccccgtgagaagcaccagccacggcgacaccttcctgccccacgtgagaagcagcagaaccgacagcaacgagagagtggccgtgatcgccgacgaggcctacagccccgccgacagcgtgctgcccacccccgtggccgagcacagcctggagctgatgctgctgagcagacagatcaacggcgccacctgcagcatcgaggaggagaaggagagcgaggccagcacccccaccgccaccgaggtggaggccctgggcggcgagctgagagccctgtgccagggccacagcggccccgaggaggagcaggccatggtgtgcctgcagaaccccctgagcggcgagcccgcccactag

SEQ ID NO: 104861 - DNA, 1245 bp, Artificial Sequence
  derived and/or modified sequence
atgtgctttcgcgtgaaattctaccctgccgatccagccgcgctcaaggaagaaattaccaggtacctggtattcctgcagattaagcgggatctgtaccacggtcgcttactgtgtaagacctccgacgccgctctgttagcagcgtacatcctgcaggcggaaataggcgattacgattcgggtaagcaccccgagggctacagcagcaagttccagttctttccaaaacacagtgaaaaattggaaaggaaaatcgcagagattcacaagaccgagctttcaggtcagacacctgccacatctgagctgaactttcttaggaaagctcagactctggagacttatggcgtcgatcctcacccgtgcaaggatgtgagcggtaacgccgcatttctggccttcactccattcggatttgtggtgctccagggcaataaacgcgtacacttcataaaatggaacgaggttacaaagctcaaatttgaaggaaaaactttctacttgtacgaaaaaaagattattttgacctacttcgcgccaaccccagaagcttgtaagcatctctggaagtgtgggattgaaaaccaggcgttttataagctggagaaatcctcacaggttaggaccgtttcaagttcaaatttattctttaagggcagcaggtttaggtattccggacgggtggcgaaggaggtgatggagagtagcgcaaaaatcaaacgcgagccgccggaaatccatagagccggaatggtgcccagccggagctgtccatcaatcacacatggtcctaggttatcctctgtgcctcgcacccgtcgaagggctgtgcacatctctataatggaaggcctggagtccttgagggactccgcccactctacacccgtgagatcaacctcccatggagatacatttctgccacacgtccgtagcagtagaaccgattctaacgagagggtagccgttatcgcagacgaagcctatagtcccgcggactctgttttgcctaccccagtggctgagcatagcctggagctcatgcttctatcacgccagatcaatggcgccacctgcagtatcgaggaagaaaaagaatccgaggcatctaccccaaccgcaactgaagttgaggctctggggggagaactgcgggccctgtgccagggacattcggggcctgaggaagagcaggcaatggtttgcttacagaatccgcttagcggagaacctgcacattag

SEQ ID NO: 104862 - DNA, 1245 bp, Artificial Sequence
  derived and/or modified sequence
atgtgcttccgggtgaagttctacccagctgaccctgctgccctgaaggaggagatcacccgctacctggtgttcctgcagatcaagagggacctgtaccacggccgcctgctgtgcaagaccagtgatgctgccctgctggccgcctacatcctgcaggccgagatcggggactatgattctgggaagcaccctgagggctacagcagcaagttccagttcttccccaagcacagcgagaagctggagaggaagattgctgagatccacaagacagagctgagcggccagaccccagccaccagcgagctgaacttcctgaggaaggcccagaccctggagacctacggcgtggacccccacccctgcaaggatgtgtctggaaatgctgccttcctggccttcacccccttcggctttgtggtgctgcagggcaacaagagggtgcacttcatcaagtggaatgaggtgaccaagctgaagtttgagggcaagaccttctacctgtatgagaagaagatcatcctgacctactttgcccccaccccagaggcctgcaagcacctgtggaagtgtggcatcgagaaccaggccttctacaagctggagaagagcagccaggtgaggacagtgagcagcagcaacctcttcttcaagggcagccgcttccgctacagcggccgggtggccaaggaggtgatggagagcagcgccaagatcaagcgggagcccccagagatccaccgggccggcatggtgcccagccgcagctgccccagcatcacccacggcccccggctgagctctgtgcccaggaccaggagaagagctgtgcacatcagcatcatggagggcctggagagcctgcgggacagcgcccacagcacccctgtgcgcagcaccagccatggagacaccttcctgccccacgtgcgcagcagcaggacagacagcaatgaaagagtggccgtgattgctgatgaggcctacagccctgctgacagcgtgctgcccacccctgtggccgagcacagcctggagctgatgctgctgagccggcagatcaacggggccacctgcagcattgaggaggagaaggagagcgaggccagcacccccacagccacagaggtggaggccctgggcggggagctgcgggccctgtgccagggccacagcggccctgaggaggagcaggccatggtgtgcctgcagaaccccctgtctggagagcccgcccactag

SEQ ID NO: 104863 - DNA, 1245 bp, Artificial Sequence
  derived and/or modified sequence
atgtgcttccgggtgaagttctaccccgccgaccccgccgccctgaaagaggagattactcgataccttgtttttcttcaaattaaaagggacctctatcatggacggctgctttgcaaaacatcagatgctgccctgctggccgcctacatactgcaggctgagatcggagattatgactcaggcaagcacccagaggggtattcttccaaatttcagttctttcccaaacactcagaaaagctagagcgtaagattgccgaaattcataagacagaactgtccgggcaaacgccagccacatctgagctgaatttcctgcggaaggctcagactcttgagacttacggggtagatcctcatccttgtaaggatgtcagcggcaacgctgcctttctagcgttcactccatttggcttcgtggtcctccagggcaacaaacgtgtccactttatcaagtggaacgaggttaccaaactgaaattcgaaggtaaaactttttacctctacgagaaaaaaattatacttacctacttcgcacctaccccagaggcctgcaagcatctgtggaagtgcgggattgaaaaccaagctttctacaagcttgagaaaagctcgcaagtgagaacggtcagctcgtctaatctcttttttaagggctcaagattccggtactccgggcgagtcgccaaagaagtgatggaatccagtgccaagataaaaagggagcccccggagatccatcgggccggtatggttccttcccgaagttgcccaagcattactcatgggccacggctgtctagtgtcccccgcaccaggaggcgcgcagtgcacatttctatcatggagggtctagagtcactcagagactctgcccacagcacccctgttaggtcaacatcccacggcgacaccttcttacctcatgtcagaagttcccgcacagattctaacgagcgcgttgctgtgattgccgatgaggcgtactctccagcagacagcgtgttgccaacacccgtggcagaacacagtttggaactcatgctcctcagtcgacagattaatggcgcaacgtgttccattgaggaagagaaggagagcgaagcatccacccctaccgccacagaggtagaagcccttggaggggagctgagagcattatgccaaggccatagtggaccggaagaggagcaggctatggtgtgcctgcagaatcctctgtcaggggaaccagcccattag

SEQ ID NO: 104864 - DNA, 1245 bp, Artificial Sequence
  derived and/or modified sequence
atgtgcttcagggtgaagttttacccagcggacccggctgccttgaaagaggagatcacccggtatctggtttttcttcagattaagcgtgacctatatcacgggaggttactttgtaagactagtgacgccgctctgctggctgcctatattctgcaggctgaaatcggagactacgattctggcaaacaccccgaagggtacagcagcaaatttcagttctttccaaagcactctgaaaagctagaaagaaagatcgccgaaattcacaagacagaacttagtggacagactcctgccacctccgaactgaattttcttaggaaggcgcagacgctggaaacatacggtgtagacccgcacccctgcaaggatgtcagcggtaacgcggctttcctggctttcactcccttcggattcgtggtgctgcaaggcaataagcgggtgcactttatcaagtggaatgaggttaccaaacttaagttcgagggaaagacattttacctttacgaaaagaagatcatcctcacatactttgccccaactcctgaggcttgcaagcacctctggaagtgtggtattgaaaaccaggccttttacaagctggaaaagagttcccaggtccggacagtcagcagctccaacctgttttttaaaggctctcgttttcgatatagtggccgtgtggctaaggaagtgatggaatccagtgctaaaataaagcgcgagccacctgaaatccaccgcgcaggcatggtgccttcacgtagttgtccttccatcacgcacggcccaagattgagctctgtcccgcgtaccagacgcagagccgtacatattagcatcatggaagggctggaatctctgcgagatagtgctcactccacaccggtccgctccacatcccacggggacacctttttaccacatgtgcgcagctcacgcaccgattccaacgagcgcgtcgctgtcatagccgacgaggcatattcaccggctgactccgtgctgcccacacctgtggccgagcactcgctggagctgatgttgctatctcggcagataaatggcgcaacctgctccattgaagaagagaaagaatcagaggcttccacccccaccgcaacggaggtggaggccttaggcggagagctgagggccctttgccagggccattccggccctgaagaagagcaagccatggtctgcttgcagaacccgctctcgggcgaacctgcgcattag

SEQ ID NO: 104865 - protein, 1083 aa, Artificial Sequence
  derived and/or modified sequence
MVFSGNKGLHREDTLDEYFEYDAEEFLVSLALLITEGRTPECSVKGRTESFHCPPAQSCYPVTTKHECSDKLAQCRQARRTRSEVTLLWKNNLPIMVEMMLLPDCCYSDDGPTTEGIDLNDPAIKQDALLLERWILEPVPRQNGDRFIEEKTLLLAVRSFVFFSQLSAWLSVSHGAIPRNILYRISAADVDLQWNFSQTPIEHVFPVPNVSHNVALKVSVQSLPRQSNYPVLTCSIHTNIGLYEKRIQQHKLKTHQHHNPNEAEQCGTNSSQRLCSKQTWTMAPESVLHAKSGPSPEYTAAVKNIKLYPGTGSKSDHGTSQANILGFSGIGDIKSQETSVRTLKSFSMVDSSISNRQSFWQSAGETNPLIGSLIQERQEIIARIAQHLIHCDPSTSHVSGRPFNTQESSSLHSKLFRVSQENENVGKGKEAFSMTFGSPEFSSPEDTNEGKIRLKPETPRSETCISNDFYSHMPVGETNPLIGSLLQERQDVIARIAQHLEHIDPTASHIPRQSFNMHDSSSVASKVFRSSYEDKNLLKKNKDESSVSISHTKCSLLGDISDGKNLVPNKCFTSFKNNSKEKCSLKHQTRNQCQNNPSEIIQSTYQETQNKSSSLSTSSILSQHKENNLDLTSRFKEQEMSNGIDKQYSNCTTIDKQICTNKYKEKIINENYNPKFFGNLQSDDSKKNDSKIKVTVLEMSEYLNKYESMSSNKDSKRPKTCEQNTQLNSIENYLNKDNEGFKCKKSDQLKNEQDKQEDPTNEKSQNYSQRRSIKDCLSTCEQPKNTEVLRTTLKHSNVWRKHNFHSLDGTSTRAFHPQTGLPLLSSPVPQRKTQSGCFDLDSSLLHLKSFSSRSPRPCLNIEDDPDIHEKPFLSSSAPPITSLSLLGNFEESVLNYRFDPLGIVDGFTAEVGASGAFCPTHLTLPVEVSFYSVSDDNAPSPYMGVITLESLGKRGYRVPPSGTIQVTLFNPNKTVVKMFVVIYDLRDMPANHQTFLRQRTFSVPVKQEVKRSVNKENIRHTEERLLRYLIHLRFQSSKSGKIYLHRDVRLLFSRKSMEVDSGAAYELKSYTESPTNPQFSPRC

SEQ ID NO: 104866 - DNA, 3252 bp, Artificial Sequence
  derived and/or modified sequence
atggtgttcagcggcaacaagggcctgcacagagaggacaccctggacgagtacttcgagtacgacgccgaggagttcctggtgagcctggccctgctgatcaccgagggcagaacccccgagtgcagcgtgaagggcagaaccgagagcttccactgcccccccgcccagagctgctaccccgtgaccaccaagcacgagtgcagcgacaagctggcccagtgcagacaggccagaagaaccagaagcgaggtgaccctgctgtggaagaacaacctgcccatcatggtggagatgatgctgctgcccgactgctgctacagcgacgacggccccaccaccgagggcatcgacctgaacgaccccgccatcaagcaggacgccctgctgctggagagatggatcctggagcccgtgcccagacagaacggcgacagattcatcgaggagaagaccctgctgctggccgtgagaagcttcgtgttcttcagccagctgagcgcctggctgagcgtgagccacggcgccatccccagaaacatcctgtacagaatcagcgccgccgacgtggacctgcagtggaacttcagccagacccccatcgagcacgtgttccccgtgcccaacgtgagccacaacgtggccctgaaggtgagcgtgcagagcctgcccagacagagcaactaccccgtgctgacctgcagcatccacaccaacatcggcctgtacgagaagagaatccagcagcacaagctgaagacccaccagcaccacaaccccaacgaggccgagcagtgcggcaccaacagcagccagagactgtgcagcaagcagacctggaccatggcccccgagagcgtgctgcacgccaagagcggccccagccccgagtacaccgccgccgtgaagaacatcaagctgtaccccggcaccggcagcaagagcgaccacggcaccagccaggccaacatcctgggcttcagcggcatcggcgacatcaagagccaggagaccagcgtgagaaccctgaagagcttcagcatggtggacagcagcatcagcaacagacagagcttctggcagagcgccggcgagaccaaccccctgatcggcagcctgatccaggagagacaggagatcatcgccagaatcgcccagcacctgatccactgcgaccccagcaccagccacgtgagcggcagacccttcaacacccaggagagcagcagcctgcacagcaagctgttcagagtgagccaggagaacgagaacgtgggcaagggcaaggaggccttcagcatgaccttcggcagccccgagttcagcagccccgaggacaccaacgagggcaagatcagactgaagcccgagacccccagaagcgagacctgcatcagcaacgacttctacagccacatgcccgtgggcgagaccaaccccctgatcggcagcctgctgcaggagagacaggacgtgatcgccagaatcgcccagcacctggagcacatcgaccccaccgccagccacatccccagacagagcttcaacatgcacgacagcagcagcgtggccagcaaggtgttcagaagcagctacgaggacaagaacctgctgaagaagaacaaggacgagagcagcgtgagcatcagccacaccaagtgcagcctgctgggcgacatcagcgacggcaagaacctggtgcccaacaagtgcttcaccagcttcaagaacaacagcaaggagaagtgcagcctgaagcaccagaccagaaaccagtgccagaacaaccccagcgagatcatccagagcacctaccaggagacccagaacaagagcagcagcctgagcaccagcagcatcctgagccagcacaaggagaacaacctggacctgaccagcagattcaaggagcaggagatgagcaacggcatcgacaagcagtacagcaactgcaccaccatcgacaagcagatctgcaccaacaagtacaaggagaagatcatcaacgagaactacaaccccaagttcttcggcaacctgcagagcgacgacagcaagaagaacgacagcaagatcaaggtgaccgtgctggagatgagcgagtacctgaacaagtacgagagcatgagcagcaacaaggacagcaagagacccaagacctgcgagcagaacacccagctgaacagcatcgagaactacctgaacaaggacaacgagggcttcaagtgcaagaagagcgaccagctgaagaacgagcaggacaagcaggaggaccccaccaacgagaagagccagaactacagccagagaagaagcatcaaggactgcctgagcacctgcgagcagcccaagaacaccgaggtgctgagaaccaccctgaagcacagcaacgtgtggagaaagcacaacttccacagcctggacggcaccagcaccagagccttccacccccagaccggcctgcccctgctgagcagccccgtgccccagagaaagacccagagcggctgcttcgacctggacagcagcctgctgcacctgaagagcttcagcagcagaagccccagaccctgcctgaacatcgaggacgaccccgacatccacgagaagcccttcctgagcagcagcgccccccccatcaccagcctgagcctgctgggcaacttcgaggagagcgtgctgaactacagattcgaccccctgggcatcgtggacggcttcaccgccgaggtgggcgccagcggcgccttctgccccacccacctgaccctgcccgtggaggtgagcttctacagcgtgagcgacgacaacgcccccagcccctacatgggcgtgatcaccctggagagcctgggcaagagaggctacagagtgccccccagcggcaccatccaggtgaccctgttcaaccccaacaagaccgtggtgaagatgttcgtggtgatctacgacctgagagacatgcccgccaaccaccagaccttcctgagacagagaaccttcagcgtgcccgtgaagcaggaggtgaagagaagcgtgaacaaggagaacatcagacacaccgaggagagactgctgagatacctgatccacctgagattccagagcagcaagagcggcaagatctacctgcacagagacgtgagactgctgttcagcagaaagagcatggaggtggacagcggcgccgcctacgagctgaagagctacaccgagagccccaccaacccccagttcagccccagatgctag

SEQ ID NO: 104867 - DNA, 3252 bp, Artificial Sequence
  derived and/or modified sequence
atggtgttttccggtaacaagggtcttcaccgggaggacacgctggatgagtatttcgagtacgatgcagaggaattcctagttagcctcgccctgctcatcaccgaaggcaggacacccgaatgttcggtaaaggggcggaccgagtcgtttcactgtcctcccgcgcagtcctgctacccagttaccaccaagcacgaatgctccgacaagcttgctcagtgccggcaggccagaaggacccggagtgaggttacacttctgtggaagaacaatcttcccatcatggtggagatgatgctgcttccggattgctgttactctgatgatggacctaccacagagggcattgacctaaatgacccggctatcaagcaagacgctcttttgctggagcgctggatccttgaacctgtgccccgccagaatggggacaggtttatcgaggaaaagactttgcttctcgcagtaaggagttttgtctttttctctcagcttagtgcatggctctcagtatcccatggagcgatacctcggaatatcttgtaccggatttcagctgcagacgtcgacctccagtggaatttcagccagaccccgattgaacacgtcttccccgttccaaatgtgagccacaacgtcgcgctgaaggtttcagtgcagagtctgccgcgccaatctaattacccagtcctcacctgctccattcacacgaacatcgggttgtacgagaaacggattcagcagcacaagcttaagacccaccagcatcacaatccaaatgaggccgagcagtgtggcacaaactcatctcagcgcctgtgctcaaagcaaacatggaccatggccccagaatctgtcctccatgccaagtcgggcccaagccccgaatacactgccgccgtgaagaatattaagctgtacccgggaaccggatcgaaatccgaccacgggaccagccaggcaaatatcctggggttcagtgggatcggagatattaagagtcaggagaccagcgttcgcaccctgaaatcgttctctatggttgacagttccatttccaatcggcagtcgttctggcagtctgccggtgagaccaatcccctgattggcagtctgattcaagaaagacaggaaatcatcgcccgcatagcacaacatctcatccattgcgatccgagtacttctcatgtttcgggcaggccattcaatacccaggaatcttcttcgcttcatagtaaacttttccgggtgtctcaggagaacgaaaatgtcgggaaaggaaaggaggcgttttctatgacttttggcagcccagagttttctagtcccgaagacacaaacgaaggaaagatcagattaaaacccgagacccccaggtctgagacatgcatcagtaatgatttctatagccacatgcccgtgggtgagacaaacccactcatcgggagtctgctccaggaacgccaagacgttatcgcccgtattgcccaacacctcgagcacatcgatcctaccgcatcccatatcccacgacaaagcttcaatatgcatgattcttcctcggtcgcatccaaagtgtttaggagttcttatgaagataaaaacctgctcaaaaagaataaggatgagtctagcgtgtctatctctcacactaagtgttctcttttgggggacatctctgacgggaaaaacttggtgccaaacaaatgtttcacttcttttaaaaacaattccaaagagaaatgcagtctcaaacaccaaaccaggaatcagtgccagaacaacccttctgaaattatacagagtacctaccaagagacccagaataaatcctcgagtctctccaccagcagcattctctctcagcacaaggaaaataatctagacctgacgtcccgctttaaagaacaggaaatgagcaatgggatagataagcagtactcaaactgtacaaccattgataaacagatatgcacaaataagtacaaagaaaaaataatcaatgaaaactacaatcctaaatttttcgggaacctccagtctgatgactcaaaaaagaacgacagtaaaatcaaggtgactgtattggaaatgtcagaatacctcaacaaatatgaaagcatgtcatctaataaggactctaagcgccccaaaacctgtgaacagaacacgcagttaaattccatagagaactacctgaacaaagacaatgagggtttcaaatgcaaaaagagcgaccaactgaaaaacgagcaggataaacaagaagaccccaccaacgagaagtcccaaaactactcacagaggcggtccattaaggattgcctgtcgacatgcgaacagccaaaaaacacagaggtcctgagaacgacccttaaacatagcaacgtctggaggaaacataactttcactccctagatggcactagcacccgtgctttccacccccagaccggcctgccactcctgtcgagcccagtgccccaacgtaagacccagtcagggtgtttcgatctggattcttcgctcctgcatctcaaaagcttttctagtaggagtccaaggccgtgcttaaatatcgaggacgacccggacatacacgaaaaacccttcctgtcctcaagcgcacctccaattacttcattaagccttctgggcaatttcgaggaatccgtgctaaactatagattcgacccgttagggatcgtggacgggtttaccgcagaggtgggtgcatccggggcattttgtccaacccatcttacccttcctgtggaggtttctttctattccgttagtgatgacaatgctccctctccatacatgggcgtgattacactggaatcactcgggaaacggggttaccgagtgcccccaagtggaactatccaggtcacattgtttaatcctaacaagaccgttgttaaaatgttcgtagtaatctatgatctgagagacatgcctgcgaaccaccagacctttctcagacagcggactttcagcgttcctgtgaaacaagaagtcaagaggtccgtcaataaagagaatataagacataccgaggagcgcctcctgcggtatctaattcatctgagatttcagtcgagcaagagtgggaagatatatctgcatcgagacgtcaggttactgtttagtaggaagtcaatggaggttgactccggagccgcttacgagctgaagtcttataccgagagcccaactaacccccagttctctccgaggtgttag

SEQ ID NO: 104868 - DNA, 3687 bp, Artificial Sequence
  derived and/or modified sequence
acacggagggaagcgggatcagcacccaacgctgaacatttgttttaaccgctgcagacatctggatccctcagttactgatagtatagctattgatagccagaaggcaacttcctttatacaaggattccagtatggttttcagtggaaacaaagggcttcacagagaagatactctggatgaatattttgaatatgatgcagaggagttcttggtctctttggccttgctgataacagaaggacgaacacctgaatgttctgtaaaaggtcgaacagaaagctttcattgccctccagcacagtcttgttacccagtaactaccaaacatgaatgtagtgacaagctggcccagtgccgccaagccagacgaactaggtctgaggtcacattgttgtggaagaataaccttccaatcatggtggaaatgatgctactaccagactgctgctacagcgatgatgggcccaccacagagggaattgatctaaatgatcctgcgattaagcaagatgcattattattagaaagatggatcttggagccagttcctcgacagaatggtgaccgatttattgaagagaagacgcttctgttggctgtccgctcatttgtgtttttttctcagttaagtgcatggctgagtgtttctcatggtgctattccacgaaatattctctacagaatcagtgctgctgatgtagacctacagtggaatttttcacagactccaattgagcatgtgtttcctgttcccaatgtttctcacaatgttgccttgaaagtcagtgttcagtccttgcccagacaatctaattatccagttttgacgtgcagtattcacactaatattggcctttatgagaaaagaattcaacaacataaacttaaaactcatcagcaccataacccaaatgaagcagaacaatgtggtacaaacagttcacagcgtctgtgtagcaaacaaacttggaccatggcacctgaaagtgtgttacatgcaaaaagtggcccaagtccagaatatactgcagctgtcaaaaatatcaaactatatccaggcactggcagtaaatctgaccatgggacatctcaagccaatattctaggctttagtggtataggtgatataaaatcacaagaaacatcagtgagaactttaaaatcattttcaatggttgattccagtatctctaaccgccagagtttctggcagtcagctggtgagactaaccctttaataggctctttaattcaggagcggcaagaaatcattgcaagaattgcccaacatttgattcattgtgatccaagcacttcacatgtttctggacgtccatttaatactcaagagtctagttcactccattcaaaacttttccgggtttcacaagaaaatgagaacgtgggaaaaggtaaagaagctttctccatgacttttggtagtccagagtttagttccccagaagacaccaatgaggggaaaattcgactaaaaccagaaactcctcgaagtgaaacttgtatttctaatgacttttattctcatatgcctgttggagagactaatcctttgataggctctttactccaggagcggcaagatgttattgcaaggattgctcaacacttggagcacattgatccaacagcatcacatatcccccggcagtcattcaacatgcatgactccagttcggttgcatctaaagtgtttaggagttcatatgaagacaaaaatttgttgaagaaaaataaggatgagtcctcagtttccatttctcacacaaaatgttccttgttaggagacatcagtgatgggaaaaacttagtacctaataaatgttttacttcttttaaaaataatagtaaagaaaagtgttctttgaaacatcaaacaagaaatcagtgtcagaacaatcctagtgaaatcatccaaagtacgtatcaggagacacagaacaaaagttctagtttatcaacttcctcaattttgtctcagcacaaagaaaataacttagatttgacaagcagattcaaggagcaagaaatgagcaatggaattgataaacagtattcaaattgcaccactattgacaaacagatttgtacaaataagtataaggaaaaaataataaatgagaactataatccaaaattctttggcaatcttcagtctgatgattccaaaaaaaatgactcaaaaataaaagttactgtgttggaaatgtctgaatatttgaacaaatatgaaagcatgtcctcaaataaagactcaaaaaggcctaagacatgtgagcaaaatactcaacttaatagcatagagaattatctcaataaagataatgaaggtttcaaatgtaaaaagtcagaccaattaaaaaatgaacaagataagcaagaagatccaactaatgaaaaatcccaaaactattctcagagaagaagtataaaagactgtttgtctacatgtgagcaaccaaaaaatacagaggtattgaggactacactgaaacattcaaatgtgtggcgaaaacataattttcattccttggatggaacttcaaccagagcctttcatcctcaaactggattgcctcttctttcaagccctgttcctcaaagaaaaacacaatcaggttgctttgatctggattcttcattactacatctgaaaagcttctcatctagaagtcctcgaccatgtttaaacattgaagatgatccagatattcatgaaaaaccatttttgagttctagtgctccacctataacaagtcttagtctcctaggaaattttgaggaatctgtcttgaactatcgtttcgatcctctcggcattgttgatggttttactgccgaggtaggggcaagtggtgctttctgccccacacatttgactcttccagttgaagtgtcattctacagtgtttcagatgacaatgctccctctccttatatgggtgtgattactttagagtcccttggtaaaaggggttatcgagtacctccttcaggaacaatacaagtgaccttatttaatcctaataagactgtggtgaagatgtttgttgtgatatatgatttacgagatatgccagccaatcatcagacattcctacgacaaagaactttttctgtacctgttaaacaagaagtgaagagaagtgttaataaagagaacatccgacacacagaagaacggttattacgctacctcatacatctgaggttccagagttctaaatctggaaagatctacctccatagagacgtacggctcctgttctctagaaagtcaatggaggttgatagcggtgctgcatatgaactcaaatcttacactgaatcaccaacaaaccctcagttttcaccaagatgttgataaggagtgatgatttaaagtatttactcagtacccaagtttgcaagtaaaaattagcatagaatggagtgtaccaaattaacaatcaggagagtggattctctcctgttatcctggaccagtttttatgaaaggattcctgaaatgaaatccatatattccatgtagactggaaaaactcatgtcctaatcctttttgtactgttgaaaccacttcattggacatgttgcaatagcaaaacccccagttagattagtgtttacacattttctcagttatttaatatttaatgttttcctt

SEQ ID NO: 104869 - DNA, 3252 bp, Artificial Sequence
  derived and/or modified sequence
atggtgttcagcggcaacaagggcctgcaccgggaggacaccctggatgagtactttgaatatgatgctgaggagttcctggtgtccctggccctgctgatcacagagggccgcaccccagaatgttctgtgaagggccgcacagagagcttccactgccccccagcccagagctgctaccctgtgaccaccaagcatgaatgtagtgacaagctggcccagtgccggcaggcccggaggaccaggtctgaggtgaccctgctgtggaagaacaacctgcccatcatggtggagatgatgctgctgcctgactgctgctacagtgatgatggccccaccacagagggcatcgacctgaatgaccctgccatcaagcaggatgccctgctgctggagcgctggatcctggagcctgtgccccggcagaatggagaccgcttcatcgaggagaagaccctgctgctggccgtgcgcagctttgtgttcttcagccagctgagcgcctggctgtctgtgagccacggggccatccccaggaacatcctgtaccgcatctctgctgctgatgtggacctgcagtggaacttcagccagacccccattgaacatgtgtttcctgtgcccaacgtgagccacaacgtggccctgaaggtgtctgtgcagagcctgccccggcagagcaactaccctgtgctgacctgcagcatccacaccaacatcggcctgtatgagaagaggatccagcagcacaagctgaagacccaccagcaccacaaccccaatgaagctgagcagtgtggcaccaacagcagccagaggctgtgcagcaagcagacctggaccatggcccctgagagcgtgctgcacgccaagagcggccccagccctgagtacacagctgctgtgaagaacatcaagctgtacccaggcaccggcagcaagagtgaccacggcaccagccaggccaacatcctgggcttcagcggcatcggggacatcaagagccaggagacctctgtgaggaccctgaagagcttctccatggtggacagcagcatcagcaaccggcagagcttctggcagagcgctggggagaccaaccccctcatcggcagcctcatccaggagcggcaggagatcatcgcccgcatcgcccagcacctgatccactgtgaccccagcaccagccacgtgtctggccggcccttcaacacccaggagagcagcagcctgcacagcaagctgttccgggtgtcccaggagaatgaaaatgtgggcaagggcaaggaggccttctccatgaccttcggcagccctgagttcagcagccctgaggacaccaatgaaggcaagatccggctgaagccagagacccccaggtctgagacctgcatcagcaatgacttctacagccacatgcctgtgggggagaccaaccccctcatcggcagcctgctgcaggagcggcaggatgtgattgcccgcatcgcccagcacctggagcacatcgaccccacagccagccacatcccccggcagagcttcaacatgcatgacagcagctctgtggccagcaaggtgttccgcagcagctatgaggacaagaacctgctgaagaagaacaaggatgagagctctgtgtccatcagccacaccaagtgcagcctgctgggggacatcagtgatggcaagaacctggtgcccaacaagtgcttcaccagcttcaagaacaacagcaaggagaagtgcagcctgaagcaccagaccaggaaccagtgccagaacaaccccagcgagatcatccagagcacctaccaggagacccagaacaagagcagcagcctgagcaccagcagcatcctgagccagcacaaggagaacaacctggacctgaccagccgcttcaaggagcaggagatgagcaatggcatcgacaagcagtacagcaactgcaccaccatcgacaagcagatctgcaccaacaagtacaaggagaagatcatcaatgaaaactacaaccccaagttctttggaaacctgcagagtgatgacagcaagaagaatgacagcaagatcaaggtgacagtgctggagatgtctgagtacctgaacaagtatgagagcatgagcagcaacaaggacagcaagaggcccaagacctgtgagcagaacacccagctgaacagcattgagaactacctgaacaaggacaatgaaggcttcaagtgcaagaagagtgaccagctgaagaatgagcaggacaagcaggaggaccccaccaatgagaagagccagaactacagccagaggaggagcatcaaggactgcctgagcacctgtgagcagcccaagaacacagaggtgctgcggaccaccctgaagcacagcaatgtgtggaggaagcacaacttccacagcctggatggcaccagcacccgggccttccacccccagacaggcctgcccctgctgagcagccctgtgccccagaggaagacccagagcggctgctttgacctggacagcagcctgctgcacctgaagagcttcagcagccgcagcccccggccctgcctgaacattgaagatgatcctgacatccacgagaagcccttcctgagcagcagcgccccacccatcaccagcctgagcctgctgggcaactttgaggagagcgtgctgaactacagatttgaccccctgggcatcgtggatggcttcaccgctgaggtgggcgccagcggggccttctgccccacccacctgaccctgcctgtggaggtgtccttctacagcgtgtctgatgacaatgcccccagcccctacatgggcgtcatcaccctggagagcctgggcaagaggggctacagagtgcccccatctggcaccatccaggtgaccctcttcaaccccaacaagacagtggtgaagatgtttgtggtgatctatgacctgcgggacatgcctgccaaccaccagaccttcctgcggcagaggaccttctctgtgcctgtgaagcaggaggtgaagaggtctgtgaacaaggagaacatccgccacacagaggagcggctgctgcgctacctgatccacctgcgcttccagagcagcaagagcggcaagatctacctgcacagagatgtgcggctgctcttcagcaggaagtccatggaggtggacagcggggccgcctatgagctgaagagctacacagagagccccaccaacccccagttcagcccccgctgctag

SEQ ID NO: 104870 - DNA, 3252 bp, Artificial Sequence
  derived and/or modified sequence
atggtgttcagcggcaacaagggcctgcaccgggaggacaccctggatgagtattttgagtatgatgctgaggagtttttagtgtcgcttgctttgttgattacagagggtcgcacgcccgaatgctcagtaaaggggcgtactgagagtttccattgtccgccggcccagtcctgttaccctgtgactaccaagcacgagtgtagtgacaaactggcccagtgtagacaggctagacgtaccaggagtgaggtgacgctcctctggaagaataacctacctatcatggtggagatgatgttgctgcctgattgttgctatagcgacgacggacctacaactgagggtatcgatctgaatgatccagctatcaagcaggacgccttgctcctggagaggtggatcctggagccagtgcctaggcagaacggcgatcgttttatcgaggagaaaaccctgctcctagccgtcagatctttcgtgtttttttctcaactgagtgcgtggctgagtgtgagtcatggtgcaatcccaaggaacattttgtaccgaatcagcgccgccgatgttgatttgcaatggaatttctctcagacccccattgaacacgtgttccccgtcccaaacgtttcccacaacgtcgccctcaaagtgagtgtacagagcctgccaaggcagagtaattatcccgtgctgacctgcagcatccatactaatattggactgtacgagaagcggattcaacagcacaagcttaaaactcaccagcaccataacccaaacgaagccgaacagtgcggtaccaattccagccagcgtctctgcagcaaacagacctggacgatggcacccgagagcgtgctgcatgccaagagtgggcccagccctgaatacaccgccgcagtcaaaaacataaagctttaccctggcactgggagcaaaagtgaccacggcaccagtcaggcaaatatcctgggtttctcaggcatcggcgacataaaatcacaggagacaagcgtgcgcacactgaagtcattttccatggttgactcttcaatctccaatcggcagtcattttggcagtcagccggtgagacaaaccccctgattggtagcttgatacaagagagacaggaaatcatcgccagaattgcccagcacttaattcactgtgatccaagcacctcacacgtctccggcagaccctttaacacccaggagagctctagcctgcactccaaactatttcgcgtttcccaggagaacgagaacgtgggcaagggtaaggaggctttttccatgaccttcggcagccccgagttctccagcccagaggacaccaatgagggaaaaattcgactcaagccagaaaccccaagaagtgagacctgcatttctaacgacttctactcccatatgcctgttggagagactaaccccttgattggctccctactgcaggagcggcaggacgtaatcgcacgaatcgcacagcatttagagcatatcgaccccacggccagtcatatccctcgccaatcattcaatatgcatgacagcagctcagtggccagtaaggtgtttcggagttcctacgaagataaaaacttgctgaagaaaaataaggatgagagttctgttagcatatctcacacaaagtgtagcctgctgggagatatcagcgacggcaaaaatttagttcctaataagtgtttcacaagttttaaaaacaacagcaaagagaaatgttccctcaagcaccagacaagaaaccaatgccagaacaaccctagtgaaattattcagagcacctatcaagaaacccaaaacaaatcttctagcttatcaacgagcagtatcctttcccaacataaagagaacaacctggacctcacctcaaggtttaaggagcaggagatgtcaaacgggattgataagcagtatagtaattgtacaacgattgacaagcaaatatgcactaataaatataaggaaaaaataattaacgaaaattataaccccaagttcttcgggaatctccaaagcgacgattccaagaagaatgactctaagattaaggtgaccgttctcgaaatgtcggaatacctgaacaagtatgaatcaatgagctcaaacaaggactccaaacgtccaaagacatgtgagcagaatactcagctaaattcgatcgaaaactacctgaataaagataacgaagggtttaagtgtaaaaaatcagaccagttgaagaatgaacaagacaagcaggaagatcctactaatgagaagagtcagaactattcccagaggaggtccatcaaggattgcttatcgacatgcgagcagccaaagaacacagaggtgttgagaaccacacttaaacacagtaacgtttggagaaaacacaattttcatagtttagatggtacctccactcgcgctttccacccacagacaggattgcccctgctttcttcccccgtgccccagcgaaagacacagtctggctgctttgatctcgatagcagtttgctgcatttaaaatctttcagctccagatcccctcggccctgcctgaacatcgaagatgaccctgatattcacgagaaaccattcctgagttcatccgcgccaccaatcacctccctgagtctcctgggaaattttgaggaatccgtcctgaattacaggtttgatcccttagggattgtcgatggttttaccgcagaggtaggggcttccggggcgttttgcccgactcaccttacactgcccgtcgaagttagcttttatagtgtaagtgacgacaacgccccaagcccatacatgggagttattacattagaaagcctcggaaaacgaggctacagagtcccacccagtggaactattcaggtcactttgttcaatccaaataaaaccgtggtgaagatgtttgtggtgatctatgacctgcgggacatgcctgccaatcaccaaaccttcctgaggcagcgcactttcagcgtgcccgtgaaacaggaggttaagcgctctgttaacaaggagaatatcagacatacggaggagcggctgcttagatacctcattcacctcaggtttcagtccagcaaatctgggaaaatctacctgcatcgtgatgtgcggctgctgtttagcaggaagtctatggaagtcgactccggtgcagcttacgaattaaaatcctacactgagtccccaactaacccccagttttctcctcggtgttag

SEQ ID NO: 104871 - DNA, 3252 bp, Artificial Sequence
  derived and/or modified sequence
atggtcttctcaggaaataaggggttgcatcgcgaggacactctggacgaatatttcgaatatgatgctgaagagttcttagttagtttagctttattgattaccgagggtaggacccctgaatgtagtgtgaaaggacgcacggaatcatttcactgccctcctgctcagagctgctatccagtgacgacgaaacacgagtgcagtgacaagctggcccagtgtcggcaggccagaagaacccgatccgaggtgacactgctttggaagaataacctacccattatggtggaaatgatgctcctccccgactgctgttacagcgatgacggtccaaccactgagggcatcgatctcaacgatcccgcaatcaaacaggatgccttgctgctcgagaggtggatcttagaacccgtccctagacagaacggagacaggttcatcgaagagaagaccctgctgttggcagtaaggtcttttgtatttttctctcagctgagtgcatggctgagcgtgtctcatggcgctatcccgcgtaacatactgtaccgaatcagcgccgcagatgttgacttacagtggaactttagccagacccctattgagcacgtatttcccgtgccaaacgtgtcacataatgtggccctgaaggtttccgtccagagtctgcccagacagtcaaactaccctgtcctcacttgctccattcataccaacataggcctctacgaaaaaaggattcagcaacacaagcttaagacacaccagcatcataaccctaacgaggccgagcagtgtggaacaaactcctcccaacggctgtgtagcaagcagacttggaccatggcaccggagtctgtgctgcatgctaagtcaggaccttccccagagtacaccgccgctgtgaaaaatataaagctatatcccggtacaggctccaagtcagatcacgggacttcccaggccaatatattaggattttcaggcattggagacattaagagccaagaaaccagcgtgcgcactcttaagagcttttctatggtcgatagtagtatctcaaaccggcagagcttctggcaaagcgctggtgagactaatcctctgattggaagcctgatccaggaacgccaggagattatcgctcggattgcacagcatttgatccactgtgatccatccaccagccatgtttcagggcgtccgttcaatacacaggagtccagctctcttcactctaaactgttcagggttagccaagaaaatgagaacgtggggaagggaaaggaagccttcagtatgacttttggttcacctgaattctcatcacctgaagacaccaacgaaggaaaaatccgcctgaagcccgagactccaaggtcagagacctgtatcagcaacgacttctactcacacatgccagtgggcgaaacgaatcccctcatcggatccttgctgcaagaacgacaggatgtgatcgcgcgaatagcacaacatttggagcacattgaccctacagcctcccacatcccacgccaatctttcaacatgcacgacagcagttcggtcgcctctaaggtgttcaggtcaagttatgaagacaagaatctgcttaagaagaataaagacgagtcttcagtttccatctcccatacgaagtgctctcttctgggcgatatcagtgacgggaaaaatttagtgccaaacaagtgctttacatctttcaagaacaatagcaaagagaagtgctcactgaaacaccaaacccggaatcagtgtcaaaacaatccatccgagattattcagagtacataccaagagacacaaaacaaatcctcatcactgtctacctccagtatactcagtcagcataaggaaaataatctcgacttaactagcagattcaaggaacaggagatgtcaaatggcattgacaagcagtactcgaattgcacgaccattgataaacagatctgcaccaataaatataaggagaaaattataaatgagaactacaatccaaaatttttcgggaacctgcaaagcgatgattccaagaaaaatgactccaaaataaaggtgaccgtgcttgaaatgagtgaatatcttaacaagtatgagagcatgtctagcaacaaagacagcaagcggcctaaaacatgcgaacaaaatacccaactcaactccattgaaaactatcttaataaagacaacgaaggcttcaagtgcaagaagagtgatcagttgaagaatgaacaggataaacaggaagatcccaccaatgagaagagccaaaactattcacagcggaggagcattaaagactgcttgtcaacctgtgagcagccaaagaacaccgaggtgcttcggactacattgaagcattccaacgtgtggagaaagcacaattttcactccttggatggtacgagtacacgcgcatttcatcctcagacagggctacctctcttatcctccccggtgcctcagaggaagacacagagtggctgtttcgatttggacagtagcctcctgcatcttaagtcattttcgtcaagatcccccaggccctgtctgaacattgaggacgacccggatattcatgagaaaccattcctttcgtccagcgcaccacccatcacctcactttccctgctagggaactttgaggagagcgtgttgaactatcgtttcgaccccctgggaatagttgacggattcacagcagaagttggagcatctggggctttctgccccacacacttaaccctccccgtagaagtgagtttctactctgtctccgacgataatgcgccatccccctatatgggcgttatcaccttagaaagcctagggaagcgcggatacagagttcccccttcaggaactatacaggtcaccctcttcaacccaaacaaaactgtggtcaaaatgttcgtggtgatctacgacctgcgcgatatgcccgctaatcaccagacttttcttagacaaagaactttctctgtaccggttaagcaggaggtcaagagaagcgtgaacaaagagaacatcagacacactgaagagagactgctgcggtatcttattcacctccggtttcagtctagcaaatccgggaaaatatacctgcatcgcgatgtgagattactgttcagccggaagtctatggaggtagattcaggtgcggcttatgagctgaagtcctacacggagagccccactaatccacagttttcccccaggtgttag

SEQ ID NO: 104872 - protein, 707 aa, Artificial Sequence
  derived and/or modified sequence
MLSGIEAAAGEYEDSELRCRVAVEELSPGGQPRRRQALRTAELSLGRNERRELMLRLQAPGPAGRPRCFPLRAARLFTRFAEAGRSTLRLPAHDTPGAGAVQLLLSDCPPDRLRRFLRTLRLKLAAAPGPGPASARAQLLGPRPRDFVTISPVQPEERRLRAATRVPDTTLVKRPVEPQAGAEPSTEAPRWPLPVKRLSLPSTKPQLSEEQAAVLRAVLKGQSIFFTGSAGTGKSYLLKRILGSLPPTGTVATASTGVAACHIGGTTLHAFAGIGSGQAPLAQCVALAQRPGVRQGWLNCQRLVIDEISMVEADLFDKLEAVARAVRQQNKPFGGIQLIICGDFLQLPPVTKGSQPPRFCFQSKSWKRCVPVTLELTKVWRQADQTFISLLQAVRLGRCSDEVTRQLQATASHKVGRDGIVATRLCTHQDDVALTNERRLQELPGKVHRFEAMDSNPELASTLDAQCPVSQLLQLKLGAQVMLVKNLSVSRGLVNGARGVVVGFEAEGRGLPQVRFLCGVTEVIHADRWTVQATGGQLLSRQQLPLQLAWAMSIHKSQGMTLDCVEISLGRVFASGQAYVALSRARSLQGLRVLDFDPMAVRCDPRVLHFYATLRRGRSLSLAAEGRGNEDRCSGSSIRALGGDWWGLRLGAASKQRTELRCVSTARPSLAQPRTNTLQSLTKEHKLQNVHPYFKLLFQGINSVWGH

SEQ ID NO: 104873 - protein, 266 aa, Artificial Sequence
  derived and/or modified sequence
MLSGIEAAAGEYEDSELRCRVAVEELSPGGQPRRRQALRTAELSLGRNERRELMLRLQAPGPAGRPRCFPLRAARLFTRFAEAGRSTLRLPAHDTPGAGAVQLLLSDCPPDRLRRFLRTLRLKLAAAPGPGPASARAQLLGPRPRDFVTISPVQPEERRLRAATRVPDTTLVKRPVEPQAGAEPSTEAPRWPLPVKRLSLPSTKPQLSEEQAAVLRAVLKGQSIFFTGSAGSGGREEVGGQWWGGIEEQGDLSNFAPVQEQGSHIC

SEQ ID NO: 104874 - DNA, 2124 bp, Artificial Sequence
  derived and/or modified sequence
atgctgagcggcatcgaggccgccgccggcgagtacgaggacagcgagctgagatgcagagtggccgtggaggagctgagccccggcggccagcccagaagaagacaggccctgagaaccgccgagctgagcctgggcagaaacgagagaagagagctgatgctgagactgcaggcccccggccccgccggcagacccagatgcttccccctgagagccgccagactgttcaccagattcgccgaggccggcagaagcaccctgagactgcccgcccacgacacccccggcgccggcgccgtgcagctgctgctgagcgactgcccccccgacagactgagaagattcctgagaaccctgagactgaagctggccgccgcccccggccccggccccgccagcgccagagcccagctgctgggccccagacccagagacttcgtgaccatcagccccgtgcagcccgaggagagaagactgagagccgccaccagagtgcccgacaccaccctggtgaagagacccgtggagccccaggccggcgccgagcccagcaccgaggcccccagatggcccctgcccgtgaagagactgagcctgcccagcaccaagccccagctgagcgaggagcaggccgccgtgctgagagccgtgctgaagggccagagcatcttcttcaccggcagcgccggcaccggcaagagctacctgctgaagagaatcctgggcagcctgccccccaccggcaccgtggccaccgccagcaccggcgtggccgcctgccacatcggcggcaccaccctgcacgccttcgccggcatcggcagcggccaggcccccctggcccagtgcgtggccctggcccagagacccggcgtgagacagggctggctgaactgccagagactggtgatcgacgagatcagcatggtggaggccgacctgttcgacaagctggaggccgtggccagagccgtgagacagcagaacaagcccttcggcggcatccagctgatcatctgcggcgacttcctgcagctgccccccgtgaccaagggcagccagccccccagattctgcttccagagcaagagctggaagagatgcgtgcccgtgaccctggagctgaccaaggtgtggagacaggccgaccagaccttcatcagcctgctgcaggccgtgagactgggcagatgcagcgacgaggtgaccagacagctgcaggccaccgccagccacaaggtgggcagagacggcatcgtggccaccagactgtgcacccaccaggacgacgtggccctgaccaacgagagaagactgcaggagctgcccggcaaggtgcacagattcgaggccatggacagcaaccccgagctggccagcaccctggacgcccagtgccccgtgagccagctgctgcagctgaagctgggcgcccaggtgatgctggtgaagaacctgagcgtgagcagaggcctggtgaacggcgccagaggcgtggtggtgggcttcgaggccgagggcagaggcctgccccaggtgagattcctgtgcggcgtgaccgaggtgatccacgccgacagatggaccgtgcaggccaccggcggccagctgctgagcagacagcagctgcccctgcagctggcctgggccatgagcatccacaagagccagggcatgaccctggactgcgtggagatcagcctgggcagagtgttcgccagcggccaggcctacgtggccctgagcagagccagaagcctgcagggcctgagagtgctggacttcgaccccatggccgtgagatgcgaccccagagtgctgcacttctacgccaccctgagaagaggcagaagcctgagcctggccgccgagggcagaggcaacgaggacagatgcagcggcagcagcatcagagccctgggcggcgactggtggggcctgagactgggcgccgccagcaagcagagaaccgagctgagatgcgtgagcaccgccagacccagcctggcccagcccagaaccaacaccctgcagagcctgaccaaggagcacaagctgcagaacgtgcacccctacttcaagctgctgttccagggcatcaacagcgtgtggggccactag

SEQ ID NO: 104875 - DNA, 2124 bp, Artificial Sequence
  derived and/or modified sequence
atgttgagcggtatcgaggccgcggccggggagtatgaggattcagagctccgctgtcgggtggctgtagaagagctctctcccggcggccagcccagaagacgtcaggccctacgtactgctgagctgtctctgggccgcaacgagcgcagggagctaatgcttcggttgcaggctcctggaccagcaggaagacccaggtgcttcccgttaagggcggcccgccttttcacccggtttgccgaggccggcaggagtacactcagacttcccgcacatgacacacccggagctggggccgtgcagctgctgctctccgattgtcctcccgatagactgaggagattcctaagaaccttgagattgaaacttgccgccgctccaggcccaggacctgcaagtgcccgcgctcagttattggggcccaggccccgcgattttgtgactattagccccgtccagccagaggagcgcaggctgagagcagccacaagggtgccagatactacattggtgaaaagacctgtcgaaccccaggccggcgccgagccttctactgaagccccaaggtggccactacccgtgaagcggctgagcctcccctctacgaaacctcaactatccgaagaacaggcagcagttctgcgcgcagtgctcaaagggcagagtatcttttttaccggttccgcgggaaccggcaagagctacctcctcaagagaatcctcggaagtctgcctcctactggcacagtggctaccgcgtcaaccggggtggctgcatgtcatatcggaggtacgacactgcacgctttcgctggaatagggtctggccaagcgcctctggctcagtgtgtggctctagctcaaagaccgggcgttaggcagggctggctgaattgtcagagattggtaatcgatgaaattagcatggttgaggccgacctatttgacaaactggaagctgtggcacgcgcagtaaggcagcagaataaaccctttggagggattcagctaatcatctgcggggacttcctccagctcccacctgtcactaagggatcccagccacctcggttctgctttcaatctaaatcctggaagcgctgtgtgccagtcactctcgagctaaccaaagtttggaggcaagccgatcaaacattcatttccctgctacaggccgtgcgactgggccgctgcagcgacgaggtgactagacaactgcaagctaccgcctcccacaaggtcggacgtgatgggattgttgcaactagactgtgcactcatcaggacgacgtcgcattgaccaacgagaggagactgcaggagctacctgggaaggtgcacagatttgaagccatggacagcaaccctgagttagctagtacactagacgcacagtgcccggtttcccaattgctgcagctgaagctcggggcccaggtgatgctggtgaagaacctaagtgtgtccagagggttggtgaatggtgccagaggggttgtggttgggtttgaggccgagggacgaggcctgccgcaggtgagattcctatgcggtgtcaccgaggtcatccacgccgaccggtggactgtccaggctacggggggccaactgctgtcccgccagcagttaccgctgcagctggcatgggccatgtccattcacaagagtcaaggcatgacactcgactgcgtagagatttcgctgggccgagttttcgcgtccggacaagcttatgtagctctttcacgagctcgctccttacagggactgagagtgttggacttcgacccaatggccgtgcggtgcgacccgagagtgcttcatttttatgccacactacggcgtggtcgcagcctgtctctggcggctgaggggcgcgggaacgaggacaggtgcagcggtagctccatacgagcccttggaggggattggtggggattgagactcggggctgctagcaagcagaggaccgaattgaggtgtgtctcaaccgccagaccttctctggcgcagcccagaactaacactctccagtccctgacaaaggaacacaagctgcagaatgtccacccttattttaaactactctttcaggggataaactctgtctggggtcactag

SEQ ID NO: 104876 - DNA, 2124 bp, Artificial Sequence
  derived and/or modified sequence
atgctgtctggaattgaagctgctgctggggagtatgaagattctgagctgcgctgccgggtggccgtggaggagctgagccctgggggccagccccggcggcggcaggccctgaggacagctgagctgagcctgggcagaaatgaaagaagagagctgatgctgcggctgcaggcccctggccctgctggccggccccgctgcttccccctgcgggccgcccggctcttcaccaggtttgctgaggccggccgcagcaccctgcggctgcctgcccatgacacccctggggccggggctgtgcagctgctgctgagtgactgccccccagaccggctgcggcgcttcctgcggaccctgcggctgaagctggccgccgcccctggccctggccctgccagcgcccgggcccagctgctgggcccccggccccgggactttgtgaccatcagccctgtgcagcctgaggagcggcggctgcgggccgccaccagggtgcctgacaccaccctggtgaagaggcctgtggagccccaggccggggctgagcccagcacagaggccccccgctggcccctgcctgtgaagaggctgagcctgcccagcaccaagccccagctgtctgaggagcaggccgctgtgctgcgggctgtgctgaagggccagagcatcttcttcaccggcagcgctggcaccgggaagagctacctgctgaagaggatcctgggcagcctgccccccaccggcaccgtggccacagccagcactggagtggccgcctgccacatcggcggcaccaccctgcacgcctttgctggcatcggcagcggccaggcccccctggcccagtgtgtggccctggcccagaggcctggggtgcggcagggctggctgaactgccagaggctggtgattgatgagatctccatggtggaggccgacctgtttgacaagctggaggccgtggcccgggctgtgcggcagcagaacaagccctttggaggcatccagctgatcatctgtggggacttcctgcagctgccccctgtgaccaagggcagccagcccccacgcttctgcttccagagcaagtcctggaagagatgtgtgcctgtgaccctggagctgaccaaggtgtggaggcaggccgaccagaccttcatcagcctgctgcaggccgtgcggctgggccgctgcagtgatgaggtgacccggcagctgcaggccacagccagccacaaggtgggcagagatggcatcgtggccacccggctgtgcacccaccaggatgatgtggccctgaccaatgaaagaaggctgcaggagctgcccgggaaggtgcacagatttgaggccatggacagcaaccctgagctggccagcaccctggatgcccagtgccctgtgtcccagctgctgcagctgaagctgggcgcccaggtgatgctggtgaagaacctgtctgtgtcccggggcctggtgaatggagcccggggcgtggtggtgggctttgaggccgagggccggggcctgccccaggtgcgcttcctgtgtggggtgacagaggtgattcatgctgaccgctggacagtgcaggccaccggcggccagctgctgagccggcagcagctgcccctgcagctggcctgggccatgagcatccacaagagccagggcatgaccctggactgtgtggagatcagcctgggccgggtgtttgccagcggccaggcctacgtggccctgagccgggcccggagcctgcagggcctgcgggtgctggactttgaccccatggctgtgcgctgtgacccccgggtgctgcacttctacgccaccctgcggcggggccgcagcctgagcctggccgctgagggcagaggaaatgaagatcgctgcagcggcagcagcatccgggccctgggcggggactggtggggcctgcggctgggcgccgccagcaagcagaggacagagctgcgctgtgtgtccacagcccggcccagcctggcccagcccaggaccaacaccctgcagagcctgaccaaggagcacaagctgcagaatgtgcacccctacttcaagctgctcttccagggcatcaacagcgtgtggggccactag

SEQ ID NO: 104877 - DNA, 2124 bp, Artificial Sequence
  derived and/or modified sequence
atgctgagcggcatcgaggccgccgccggcgagtacgaggacagcgaactgcgctgtagagtggccgtggaagagctgtctcctgggggtcaaccgcgacggaggcaggctttgaggacagccgagctaagcctgggcagaaacgaaaggcgagagctcatgctgagactccaagccccaggccccgctggacgaccacgctgttttccgttacgcgccgcaaggctgttcacccgtttcgctgaggccggtaggtctactctccggttacccgctcacgatacccccggtgccggcgctgttcaactactgctgtcagactgtcctcctgacaggctccggaggtttctgaggactcttcggctgaaactggctgcagctccaggaccaggccctgcaagcgccagggcacagcttcttggaccacgacccagggattttgtgacaatctcacccgtccaacccgaggagagaaggctgcgggccgctacccgtgtacctgatactacgctcgttaaaaggccggtagaaccacaagctggtgccgagccatccaccgaggctccgaggtggcccctcccagttaaacgattgtctctgcctagcaccaagccacagctgagcgaagaacaagctgccgtcttacgggccgtgttgaagggccaatcaattttctttaccgggagcgccggcacaggcaaatcttacctcctgaaacgcatcctaggctccttgccaccaactggtaccgttgccactgccagcacaggagtcgccgcgtgtcacatcggaggcacgactctgcatgcctttgctgggattggatctgggcaggccccactggcgcagtgtgtcgcgctggcccaacggcccggcgtccgccagggatggctgaattgtcagaggctggtgatagatgaaattagcatggtggaagcggatctgtttgataaactagaggccgttgccagggccgtgcgccaacaaaacaagccattcggagggatacagcttattatttgtggcgactttctgcagctaccgcccgtgacgaaaggtagccagcctccacggttttgctttcagtctaaatcttggaaacgatgcgtcccggtgacattagagctgaccaaggtttggcggcaggccgatcagaccttcatttctttactgcaggcagtgaggctcggacggtgtagtgacgaggtgacacggcagttacaagctactgctagccacaaggtaggacgagacggcatagtcgctacccgactttgcacccaccaggacgacgtggccctgacgaacgagcgcagactgcaggaattgcccgggaaagtgcacaggttcgaagccatggactccaatccggaactggcctctacactagacgcccaatgccccgtgagccaactgctccagctcaagctgggcgcccaggtgatgctcgtgaaaaacctgagcgtgtctcggggcctcgtgaacggcgccaggggtgtggtagtcggtttcgaagctgaaggaagaggactgccacaggttcggttcttgtgcggcgtcaccgaagtgatccacgccgaccggtggaccgtgcaggcgacaggtggacaactgctctcacgtcaacagctacccctacaactcgcttgggccatgagtatacataagtcccagggcatgacccttgactgtgttgaaatttctcttggaagagttttcgcgtccggtcaggcttacgtggcacttagtagagctaggtcgttgcaggggctgagggtgctggattttgatcctatggccgtgcgttgcgaccccagggtcctgcatttctatgccaccctccgccgaggcagaagcctctccctggccgccgaagggcgaggtaatgaagataggtgttccggtagtagcatcagagccctggggggcgattggtgggggctccggctcggcgccgccagtaaacagcggaccgagctgcgatgtgttagtactgctaggccaagcttggcacaaccaagaacaaacactctccagtcgttaaccaaggaacataagcttcaaaacgtacatccttatttcaagctgctgttccagggtatcaattctgtctgggggcactag

SEQ ID NO: 104878 - DNA, 2124 bp, Artificial Sequence
  derived and/or modified sequence
atgctgtccgggattgaagctgctgccggtgagtacgaagactccgagctgcgatgtcgggtggccgttgaggaattgtcccctggcggacaacctcgtcggcgacaggccctgaggacagccgaactgagtctaggccgtaatgagaggcgcgagttaatgctaaggctgcaggctcccggtcctgccggaaggcctaggtgtttccctctgagagctgcacggctgtttacccgattcgcagaggccggtagaagcaccctgagattgccagcgcatgatactcccggagcaggcgctgtgcagttgctgctaagtgattgtccaccagacaggctgcggagattcttacggacactgcgcctcaaattagcagctgcacctggacccggaccagctagtgccagagcccagctcctgggtccgaggccaagggacttcgtgacgatctctcccgtgcagccagaggaacgcaggctcagggcagcgactagagtccctgataccacgcttgtcaagaggcccgtagagccgcaggccggagctgagccaagtacagaagcacctcgatggcctctccctgtcaagaggttgtccctaccctctaccaaaccccagctgagtgaggaacaggccgctgtgctgagagccgtgcttaagggccagagcatctttttcaccggaagtgccggaactggcaagtcatatctcttaaaaagaatcctcggttccttaccccctacaggcaccgtcgctactgccagtacgggagtggccgcatgccatattggcggaacaacgttgcatgccttcgctgggatcgggtccggtcaggctccactggcccaatgcgtcgcactagcccaacgcccaggcgtccgccaagggtggctgaattgccagcggctcgtgatagacgaaatttcgatggttgaagctgatctgttcgataaactggaagctgttgcacgagctgtgagacagcaaaataaaccgttcggcggtatccagctgatcatctgcggtgacttcttacagttgccgccagttaccaagggcagtcagccccctcggttttgttttcagtccaaaagttggaaaaggtgcgtgcctgttacgcttgagttgactaaagtatggcggcaagctgaccagaccttcattagcctgctgcaggccgtaagacttggccgttgtagtgacgaggtgacacgccaacttcaggccacagcaagtcacaaggtgggtcgggatggaatcgtagctacccggttatgcactcaccaggacgatgttgccctcacgaacgaacgcagactgcaggagctcccgggaaaggtacacagattcgaggcgatggacagcaacccagagctagcttccacactggatgctcagtgcccagtctcacagctcctccagctcaagctgggcgcacaggtaatgctggttaagaatctctccgtgagtcgcggattggtgaacggcgctcggggagtagtcgtgggtttcgaggccgaggggaggggtttgccgcaggtcagattcctgtgtggagtgaccgaggtcattcacgctgacaggtggactgtccaagctaccggaggccaactcttgtccagacaacaactgcccctgcagctggcatgggctatgtcaatccacaaaagccagggaatgactttagactgtgtggagatctccttgggccgtgtcttcgcctctggacaggcctacgtggcgctttctagggcaagatctttgcagggcctccgggtgctggacttcgaccccatggccgtgcgctgtgacccacgagtccttcatttctacgctactctacgaagaggaagatccctctcgctggccgctgaagggaggggtaacgaggaccggtgcagcggttctagtattcgtgccttgggcggtgactggtgggggctgcggcttggggctgcttcaaagcagcgaaccgagttgagatgtgtgagtacagcccgtccatccttagcgcagcctagaacgaacacactgcagagcctgacaaaggaacacaagcttcagaatgtgcacccgtactttaaactcctgtttcagggaattaactcagtgtggggccattag

SEQ ID NO: 104879 - DNA, 2278 bp, Artificial Sequence
  derived and/or modified sequence
atttgaaaaatttctagtttcggagcttagccacaggccggctacgatctgcttgttcatctgagtgtcggcacaaaccagcagaggcggtgacgatgctctcgggcatagaggcggcggcaggggaatatgaggactcggagctgcggtgccgcgtggctgtggaggagctgagcccgggcgggcagccgcgaaggcgccaggccctgcgcaccgcggagctgagcctgggtcgcaacgagcgccgcgagttgatgctgcggctgcaagcgccagggcccgcggggcggccgcgctgctttcctctgcgcgccgcgcgcctcttcacgcgtttcgccgaggccgggcgcagcaccctgcggctccccgcccacgacacccccggggccggcgcagtgcagctgctgctctcggactgccccccagaccgcctgcgccgcttcctgcgcacattgcgcctcaagctggctgcggccccgggtcccgggccggcctccgcccgagcgcagctgctgggcccgcggccccgcgacttcgtcaccatcagccctgtgcagcccgaggagcggcggctcagggcggccacccgggttccggacactacgctggtgaagcggcctgtggagccccaggctggggccgagcctagcacagaagccccaaggtggcccctgcctgtgaagaggctgagcttgccctccaccaagccacagctttctgaggaacaggctgctgtgctgagggccgtcctgaaaggccagagcatcttcttcactgggagtgcaggaacagggaagtcatatctgctaaagcgaatcctgggctcactgccccccacaggcactgtggccactgccagcactggggtggcagcctgccacatcgggggcaccaccctccatgcctttgcaggcatcggctcaggccaggctcctctagcccagtgtgtggccctggcccaaaggccaggcgtgcggcagggctggctgaactgccagcggttggtcattgacgagatctcaatggtggaggcagacctgtttgacaaactggaggccgtggccagagctgtccggcagcagaacaagccattcggagggatccagctcatcatctgtggggactttctgcagctgccacctgtgaccaagggctcccagcccccacggttctgcttccagtccaagagctggaagaggtgtgtgccagtgaccctggagctgaccaaggtgtggaggcaggcagaccagaccttcatctctctactgcaggccgtgaggctaggcaggtgttcagatgaggtgacccgccagctccaggccacagcttcccacaaggtggggcgagatgggattgtggccacgaggctctgcacccaccaggatgatgtggccctcaccaacgagaggcggcttcaggagctgccaggtaaggtacacagatttgaggctatggacagcaaccctgagctggccagtaccctggatgcccagtgtcctgttagccagctccttcaactaaagctgggggcccaggtgatgctggtgaaaaacttatcggtgtctcggggcctggtgaatggtgcccgaggggtggtagttgggttcgaggcagaagggagagggctaccccaggtgcggttcctgtgtggagtcactgaggtcatccacgctgaccgctggacggtgcaggccaccgggggccagctcctcagtcggcagcagctgcccctccagctggcctgggcgatgtccatccacaagagccaaggcatgaccctggattgtgtggagatttctctgggccgtgtgtttgccagtggccaggcctatgtggccctttctcgggcccgcagcctgcagggcctacgtgtgctggactttgaccccatggcggttcgctgtgacccccgtgtgctgcacttctatgccaccctgcggcggggcaggagcctcagtctggctgcagaagggagaggcaatgaagacaggtgctccggaagcagcatcagggctcttggaggggactggtggggactcaggctgggtgcagcctccaaacagagaacggaacttaggtgtgtctctacagctaggcccagcctagcccagcccagaacaaacacccttcagagcctaaccaaagaacataagctgcaaaatgtgcacccatattttaagctgctttttcaggggataaatagtgtttggggacattgaaatggatgttctcaggttgtatttatttcggacaaataaactagagaattgtgtaaaaa

SEQ ID NO: 104880 - DNA, 1707 bp, Artificial Sequence
  derived and/or modified sequence
agtgcgcctgcgcgcttgtggagctggtggcggcgctccgcaggggctcggctgttttccgcgcggcaggcgcggccatggcgcagctgggaaagctgctcaaggagcagaagtacgaccggcagctgaggtattggttcgtttacaattattgatggaaatcaggtcagcggagaagatgctggaaacaatttcttccttcaaagaagcagtatcggcaagaaccgagctgaagctgccatggaattcttacaagaattaaatagcgatgtctctggaagttttgtggaagagagtccagaaaaccttctagacaatgatccctcatttttctgtaggtttactgttgtagttgcaactcagcttcctgaaagcacttcactacgcttagcagatgtcctctggaattcccagattcctcttttgatctgtaggacatatggactagttggttatatgaggatcattataaaagaacatccagtaatagaatctcatccagataatgcattagaggatctacgactagataagccatttcctgaactgagagaacattttcagtcctatgatttggatcatatggaaaaaaaggaccacagtcatactccatggattgtgatcatagctaaatatttagcacagtggtatagtgaaacaaatggacgaatacctaaaacgtataaagaaaaagaggacttcagagatttgattagacaaggaattctaaaaaatgaaaatggggctccagaagatgaagagaattttgaagaagctattaaaaatgtgaacacagcactaaatacaactcagatcccaagcagtattgaagatatatttaatgatgatcgctgcataaatatcaccaaacagactccatcattttggattttagctcgtgccttaaaggaatttgtggccaaagagggtcaaggaaatttacctgttcgaggcacaattcctgatatgattgcagattcaggcaaatatataaaactgcaaaacgtttaccgtgaaaaagcaaagaaagatgctgccgctgtgggtaatcatgttgccaaattgctgcagtccattggccaggcaccagagtccatttcagagaaagaattaaaattactctgcagcaattctgcatttcttcgagtggtaagatgtcgatccttagctgaagaatatggtttggatacaattaacaaggatgaaattatttctagcatggacaatccagataatgaaatagtgttgtacttaatgttacgggctgttgatagatttcataaacaacagggtagatatccaggagtatctaactatcaagttgaagaagatataggaaagttgaagtcttgtctcactggcttccttcaggaatatggtttatctgtaatggtgaaagatgattatgtccacgaattttgccgatatggagctgctgagccacataccattgctgcattcttggggggagctgctgctcaagaggtcatcaaaataatcaccaaacaatttgtaatttttaataatacttacatttacagtggcatgtcacaaacttcagcaactttccagttgtagagtaagcaagcaccttaagtagtgtgttaatgattgaaactgtaattgccttcgggttgtgctttagtctgtaaaattctaaaggagagctgctaaattgttttcttaataaacatttttctcatttgt

SEQ ID NO: 104881 - DNA, 2737 bp, Artificial Sequence
  derived and/or modified sequence
gttcagcgccggcgccggtgtgcgagccgcggcagagtgaggcaggcaacccgaggtgcggagcgacctgcggaggctgagccccgctttctcccagggtttcttatcagccagccgccgctgtccccgggggagtaggaggctcctgacaggccgcggctgtctgtgtgtccttctgagtgtcagaggaacggccagaccccgcgggccggagcagaacgcggccagggcagaaagcggcggcaggagaagcaggcagggggccggaggacgcagaccgagacccgaggcggaggcggaccgcgagccggccatgtcggtggtggggttggacgtgggctcgcagagctgctacatcgcggtagcccgggccgggggcatcgagaccatcgccaatgagttcagcgaccggtgcaccccgtcagtcatatcatttggatcaaaaaatagaacaatcggagttgcagccaaaaatcagcaaatcactcatgcaaacaatacggtgtctaacttcaaaagatttcatggccgagcattcaatgaccccttcattcaaaaggagaaggaaaacttgagttacgatttggttccattgaaaaatggtggagttggaataaaggtaatgtacatgggtgaagaacatctatttagtgtggagcagataacagccatgttgttgactaagctgaaggaaactgctgaaaacagcctcaagaaaccagtaacagattgtgttatttcagtcccctccttctttacagatgctgagaggcgatctgtgttagatgctgcacagattgttggcctaaactgtttaagacttatgaatgacatgacagctgttgctttgaattacggaatttataagcaggatctcccaagcctggatgagaaacctcggatagtggtttttgttgatatgggacattcagcttttcaagtgtctgcttgtgcttttaacaagggaaaattgaaggtactgggaacagcttttgatcctttcttaggaggaaaaaacttcgatgaaaagttagtggaacatttttgtgcagaatttaaaactaagtacaagttggatgcaaaatccaaaatacgagcactcctacgtctgtatcaggaatgtgaaaaactgaaaaagctaatgagctctaacagcacagaccttccactgaatatcgaatgctttatgaatgataaagatgtttccggaaagatgaacaggtcacaatttgaagaactctgtgctgaacttctgcaaaagatagaagtacccctttattcactgttggaacaaactcatctcaaagtagaagatgtgagtgcagttgagattgttggaggcgctacacgaattccagctgtgaaggaaagaattgccaaattctttggaaaagatattagcacaacactcaatgcagatgaagcagtagccagaggatgtgcattacagtgtgcaatactttccccggcatttaaagttagagaattttccgtcacagatgcagttccttttccaatatctctgatctggaaccatgattcagaagatactgaaggtgttcatgaagtctttagtcgaaaccatgctgctcctttctccaaagttctcacctttctgagaagggggccttttgagctagaagctttctattctgatccccaaggagttccatatccagaagcaaaaataggccgctttgtagttcagaatgtttctgcacagaaagatggagaaaaatctagagtaaaagtcaaagtgcgagtcaacacccatggcattttcaccatctctacggcatctatggtggagaaagtcccaactgaggagaatgaaatgtcttctgaagctgacatggagtgtctgaatcagagaccaccagaaaacccagacactgatgcaaatgaaaaaaaagttgaccagcctccagaagctaaaaagcccaaaataaaggtggtgaatgttgagctgcctattgaagccaacttggtctggcagttagggaaagaccttcttaacatgtatattgagacagagggtaagatgataatgcaagataaattggaaaaagaaaggaatgatgctaaaaatgcagttgaggaatatgtgtatgagttcagagacaagctgtgtggaccatatgaaaaatttatatgtgagcaggatcatcaaaattttttgagactcctcacagaaactgaagactggctgtatgaagaaggagaggaccaagctaaacaagcatatgttgacaagttggaagaattaatgaaaattggcactccagttaaagttcggtttcaggaagctgaagaacggccaaaaatgtttgaagaactaggacagaggctgcagcattatgccaagatagcagctgacttcagaaataaggatgagaaatacaaccatattgatgagtctgaaatgaaaaaagtggagaagtctgttaatgaagtgatggaatggatgaataatgtcatgaatgctcaggctaaaaagagtcttgatcaggatccagttgtacgtgctcaggaaattaaaacaaaaatcaaggaattgaacaacacatgtgaacccgttgtaacacaaccgaaaccaaaaattgaatcacccaaactggaaagaactccaaatggcccaaatattgataaaaaggaagaagatttagaagacaaaaacaattttggtgctgaacctccacatcagaatgattcctgtggaattgtgaattcatactaa

SEQ ID NO: 104882 - protein, 860 aa, Artificial Sequence
  derived and/or modified sequence
MATAAVLRGPAAHWVESFQKAREEGSGSGTWRGRWRRRSVISFGSKNRTIGVAAKNQQITHANNTVSNFKRFHGRAFNDPFIQKEKENLSYDLVPLKNGGVGIKVMYMGEEHLFSVEQITAMLLTKLKETAENSLKKPVTDCVISVPSFFTDAERRSVLDAAQIVGLNCLRLMNDMTAVALNYGIYKQDLPSLDEKPRIVVFVDMGHSAFQVSACAFNKGKLKVLGTAFDPFLGGKNFDEKLVEHFCAEFKTKYKLDAKSKIRALLRLYQECEKLKKLMSSNSTDLPLNIECFMNDKDVSGKMNRSQFEELCAELLQKIEVPLYSLLEQTHLKVEDVSAVEIVGGATRIPAVKERIAKFFGKDISTTLNADEAVARGCALQCAILSPAFKVREFSVTDAVPFPISLIWNHDSEDTEGVHEVFSRNHAAPFSKVLTFLRRGPFELEAFYSDPQGVPYPEAKIGRFVVQNVSAQKDGEKSRVKVKVRVNTHGIFTISTASMVEKVPTEENEMSSEADMECLNQRPPENPDTDKNVQQDNSEAGTQPQVQTDAQQTSQSPPSPELTSEENKIPDADKANEKKVDQPPEAKKPKIKVVNVELPIEANLVWQLGKDLLNMYIETEGKMIMQDKLEKERNDAKNAVEEYVYEFRDKLCGPYEKFICEQDHQNFLRLLTETEDWLYEEGEDQAKQAYVDKLEELMKIGTPVKVRFQEAEERPKMFEELGQRLQHYAKIAADFRNKDEKYNHIDESEMKKVEKSVNEVMEWMNNVMNAQAKKSLDQDPVVRAQEIKTKIKELNNTCEPVVTQPKPKIESPKLERTPNGPNIDKKEEDLEDKNNFGAEPPHQNGECYPNEKNSVNMDLD

SEQ ID NO: 104883 - DNA, 2583 bp, Artificial Sequence
  derived and/or modified sequence
atggccacggctgccgtccttcgaggccctgccgcacactgggttgagagctttcagaaggctcgggaggaaggttccggtagcggcacttggagagggcggtggcgaaggagatccgtgatttcttttggaagtaagaacagaaccatcggggttgccgcaaaaaatcagcagatcacccatgcaaacaacactgtctcaaattttaagcggtttcatgggcgcgccttcaatgatccctttattcagaaggagaaggagaatctgtcctatgatttggtgcctctcaagaatgggggggtcggtattaaagttatgtatatgggagaggagcacctgttctctgtggagcagattacggcaatgctgttaacaaagcttaaagagaccgctgagaactctctaaagaaacccgtgacggactgcgtaatcagcgtcccatccttcttcactgacgctgagcgacgatccgtcctggacgccgctcagatcgttggcctcaactgtcttaggctgatgaatgatatgacagcggttgccctgaactatggaatctacaagcaagacctgcccagccttgatgaaaaacctcgcattgtggtgttcgtggacatgggtcacagtgccttccaggtatccgcttgcgcattcaacaagggcaagctcaaagtcctcgggacagctttcgatccgtttctgggggggaagaattttgacgagaagctcgttgagcatttttgcgccgaatttaagacaaaatataaattggacgctaaatcgaagatcagggccctgctccggctataccaggagtgcgaaaaactgaaaaaactgatgtcaagcaactcgactgacttacccttgaatatcgaatgtttcatgaatgataaagatgtgagtgggaagatgaatagaagccaattcgaggagctttgtgccgagctgttgcaaaaaatcgaggtccccctgtactcactcctggagcagacccacctgaaggtcgaagacgtcagcgcagtggagatcgtgggcggggctacccgaattcccgctgtgaaagagcgcatagcaaagttctttggcaaggatatttcaactaccctaaatgccgacgaggcagtcgcccggggatgcgccctccagtgcgcgatcctgagtccagcttttaaagtgagggaattctctgtaaccgatgcagtgccctttcccatctcccttatatggaaccatgattccgaggacaccgaaggagttcatgaagtgttttcaaggaaccacgccgcccccttttctaaggtcctgaccttcctgcgccgcggacctttcgaactggaggctttttactctgatccccagggagtgccataccccgaagcaaagattggcaggttcgtcgttcagaacgtatccgcccaaaaagacggcgaaaagagcagagtaaaggttaaagtccgggtcaacacacatgggatttttacaatctcaactgcttcaatggtggagaaagtccctacagaagaaaatgagatgtcaagtgaggccgacatggagtgtctgaaccagcgccctcctgaaaatcctgatactgacaagaacgttcagcaagacaacagcgaagccggcacacagccacaagttcaaacggatgctcagcagacaagtcaatcaccgccctctcccgaactcaccagcgaggaaaacaagataccagatgccgacaaggctaacgagaagaaggtcgaccagcctcccgaggcaaaaaaacccaagattaaagtagtaaatgtagaacttccaattgaagcaaacctggtgtggcagctggggaaggatctgctgaacatgtatatagagacagaggggaaaatgatcatgcaggacaagttggagaaggagagaaacgatgctaaaaatgccgtggaggagtacgtgtacgaattccgagacaaactttgtggaccttatgaaaaatttatctgcgaacaggatcaccagaacttcctgcgtttgctaaccgagaccgaagactggctttatgaagagggggaggaccaggctaaacaggcgtacgtggataagctagaagagctcatgaagataggcaccccagtcaaggtgagatttcaggaggctgaagaacggcccaaaatgttcgaggaactgggtcagcggctgcagcactacgctaagatcgctgcagatttcaggaataaagacgagaaatataaccatattgatgaatccgagatgaagaaggtggaaaagtctgttaatgaggtgatggaatggatgaacaatgtgatgaatgctcaagccaagaagagcctggatcaggaccctgttgttagagcccaagagataaagaccaaaatcaaagagctaaacaacacctgtgagccagtggtgacacaaccaaagcccaaaatagagagtcctaagttggagcgaacacctaacggcccgaacattgacaagaaagaggaggatttggaggataaaaataattttggggccgagccccctcaccagaacggcgaatgctacccaaatgagaagaacagcgtgaacatggacctggactag

SEQ ID NO: 104884 - DNA, 3274 bp, Artificial Sequence
  derived and/or modified sequence
acacttctcccagcgggactacgattcccaacatgctctccggacagctggccggcctccccaccatcccggtgtctggggtctctgcaaaaatggggtctgtctccgcccgcccagcctccctttagcgttaaggatcggacaccacctcccggtagtaaattgtgactattccgagttttggagtcattcttcgttgcctgttttattagggcagcaaaacgcctgtggctagggcgggagtgggcggaggcaggtttgagccaatggcacgggagcggccctgtcgctgccatggcaacggcggccgttctccggggaccggctgcccattgggtagaatctttccagaaggctcgagaagaaggaagcggaagtggcacgtggaggggccggtggaggcgccggtcagtcatatcatttggatcaaaaaatagaacaatcggagttgcagccaaaaatcagcaaatcactcatgcaaacaatacggtgtctaacttcaaaagatttcatggccgagcattcaatgaccccttcattcaaaaggagaaggaaaacttgagttacgatttggttccattgaaaaatggtggagttggaataaaggtaatgtacatgggtgaagaacatctatttagtgtggagcagataacagccatgttgttgactaagctgaaggaaactgctgaaaacagcctcaagaaaccagtaacagattgtgttatttcagtcccctccttctttacagatgctgagaggcgatctgtgttagatgctgcacagattgttggcctaaactgtttaagacttatgaatgacatgacagctgttgctttgaattacggaatttataagcaggatctcccaagcctggatgagaaacctcggatagtggtttttgttgatatgggacattcagcttttcaagtgtctgcttgtgcttttaacaagggaaaattgaaggtactgggaacagcttttgatcctttcttaggaggaaaaaacttcgatgaaaagttagtggaacatttttgtgcagaatttaaaactaagtacaagttggatgcaaaatccaaaatacgagcactcctacgtctgtatcaggaatgtgaaaaactgaaaaagctaatgagctctaacagcacagaccttccactgaatatcgaatgctttatgaatgataaagatgtttccggaaagatgaacaggtcacaatttgaagaactctgtgctgaacttctgcaaaagatagaagtacccctttattcactgttggaacaaactcatctcaaagtagaagatgtgagtgcagttgagattgttggaggcgctacacgaattccagctgtgaaggaaagaattgccaaattctttggaaaagatattagcacaacactcaatgcagatgaagcagtagccagaggatgtgcattacagtgtgcaatactttccccggcatttaaagttagagaattttccgtcacagatgcagttccttttccaatatctctgatctggaaccatgattcagaagatactgaaggtgttcatgaagtctttagtcgaaaccatgctgctcctttctccaaagttctcacctttctgagaagggggccttttgagctagaagctttctattctgatccccaaggagttccatatccagaagcaaaaataggccgctttgtagttcagaatgtttctgcacagaaagatggagaaaaatctagagtaaaagtcaaagtgcgagtcaacacccatggcattttcaccatctctacggcatctatggtggagaaagtcccaactgaggagaatgaaatgtcttctgaagctgacatggagtgtctgaatcagagaccaccagaaaacccagacactgataaaaatgtccagcaagacaacagtgaagctggaacacagccccaggtacaaactgatgctcaacaaacctcacagtctcccccttcacctgaacttacctcagaagaaaacaaaatcccagatgctgacaaagcaaatgaaaaaaaagttgaccagcctccagaagctaaaaagcccaaaataaaggtggtgaatgttgagctgcctattgaagccaacttggtctggcagttagggaaagaccttcttaacatgtatattgagacagagggtaagatgataatgcaagataaattggaaaaagaaaggaatgatgctaaaaatgcagttgaggaatatgtgtatgagttcagagacaagctgtgtggaccatatgaaaaatttatatgtgagcaggatcatcaaaattttttgagactcctcacagaaactgaagactggctgtatgaagaaggagaggaccaagctaaacaagcatatgttgacaagttggaagaattaatgaaaattggcactccagttaaagttcggtttcaggaagctgaagaacggccaaaaatgtttgaagaactaggacagaggctgcagcattatgccaagatagcagctgacttcagaaataaggatgagaaatacaaccatattgatgagtctgaaatgaaaaaagtggagaagtctgttaatgaagtgatggaatggatgaataatgtcatgaatgctcaggctaaaaagagtcttgatcaggatccagttgtacgtgctcaggaaattaaaacaaaaatcaaggaattgaacaacacatgtgaacccgttgtaacacaaccgaaaccaaaaattgaatcacccaaactggaaagaactccaaatggcccaaatattgataaaaaggaagaagatttagaagacaaaaacaattttggtgctgaacctccacatcagaatggtgaatgttaccctaatgagaaaaattctgttaatatggacttggactagataaccttaaattggcctattccttcaattaataaaatatttttgccatagtatgtgactctacataacatactgaaactatttatattttcttttttaaggatatttagaaattttgtgtattatatggaaaaagaaaaaaagcttaagtctgtagtctttatgatcctaaaagggaaaattgccttggtaactttcagattcctgtggaattgtgaattcatactaagctttctgtgcagtctcaccatttgcatcactgaggatgaaactgacttttgtcttttggagaaaaaaaactgtactgcttgttcaagagggctgtgattaaaatctttaagcatttgttcctgccaaggtagttttcttgcattttgctctccattcagcatgtgtg

SEQ ID NO: 104885 - DNA, 2583 bp, Artificial Sequence
  derived and/or modified sequence
atggccacagctgctgtgctgcggggccctgctgcccactgggtggagagcttccagaaggcccgggaggagggcagcggcagcggcacctggaggggccgctggaggagaagaagtgtcatcagctttggcagcaagaacagaaccatcggcgtggccgccaagaaccagcagatcacccacgccaacaacacagtgagcaacttcaagcgcttccacggccgggccttcaatgaccccttcatccagaaggagaaggagaacctgtcctatgacctggtgcccctgaagaatggaggagtgggcatcaaggtgatgtacatgggagaggagcacctgttctctgtggagcagatcacagccatgctgctgaccaagctgaaggagacagctgagaacagcctgaagaagcctgtgacagactgtgtgatctctgtgcccagcttcttcacagatgctgagaggagatctgtgctggatgctgcccagatcgtgggcctgaactgcctgcggctgatgaatgacatgacagctgtggccctgaactacggcatctacaagcaggacctgcccagcctggatgagaagcccagaattgtggtgtttgtggacatgggccacagcgccttccaggtgtctgcctgtgccttcaacaagggcaagctgaaggtgctgggcacagcctttgaccccttcctgggcggcaagaactttgatgagaagctggtggagcacttctgtgccgagttcaagaccaagtacaagctggatgccaagagcaagatccgggccctgctgcggctgtaccaggagtgtgagaagctgaagaagctgatgagcagcaacagcacagacctgcccctgaacatcgagtgcttcatgaatgacaaggatgtgtctgggaagatgaacagaagccagtttgaggagctgtgtgccgagctgctgcagaagattgaggtgcccctgtacagcctgctggagcagacccacctgaaggtggaggatgtgtctgctgtggagatcgtgggcggggccacccgcatcccagctgtgaaggagcgcatcgccaagttcttcggcaaggacatcagcaccaccctgaatgctgatgaagctgtggcccggggctgtgccctgcagtgtgccatcctgagccctgccttcaaggtgcgggagttctctgtgacagatgctgtgcccttccccatcagcctcatctggaaccacgacagcgaggacacagaaggagtgcatgaggtgttcagcaggaaccacgccgcccccttcagcaaggtgctgaccttcctgcggcggggcccctttgagctggaggccttctacagcgacccccagggcgtgccctacccagaggccaagattggccgctttgtggtgcagaatgtgtctgcccagaaggatggagagaagagccgggtgaaggtgaaggtgcgggtgaacacccacggcatcttcaccatcagcacagcctccatggtggagaaggtgcccacagaagaaaatgagatgagcagcgaggccgacatggagtgcctgaaccagaggcccccagaaaatccagacacagacaagaatgtgcagcaggacaacagcgaggccggcacccagccccaggtgcagacagatgcccagcagaccagccagagcccccccagccctgagctgaccagcgaggagaacaagatcccagatgctgacaaggccaatgagaagaaggtggaccagcccccagaggccaagaagcccaagatcaaggtggtgaatgtggagctgcccatcgaggccaacctggtgtggcagctgggcaaggacctgctgaacatgtacattgaaacagagggcaagatgatcatgcaggacaagctggagaaggagagaaatgatgccaagaatgctgtggaggagtatgtgtatgagttccgggacaagctgtgtggcccctatgagaagttcatctgtgagcaggaccaccagaacttcctgcggctgctgacagaaacagaggactggctgtatgaggagggggaggaccaggccaagcaggcctacgtggacaagctggaggagctgatgaagattggcacccctgtgaaggtgcgcttccaggaggccgaggagcggcccaagatgtttgaggagctgggccagaggctgcagcactacgccaagattgctgctgacttcaggaacaaggatgagaagtacaaccacattgatgagagcgagatgaagaaggtggagaagtctgtgaatgaggtgatggagtggatgaacaacgtgatgaatgcccaggccaagaagagcctggaccaggaccctgtggtgcgggcccaggagatcaagaccaagatcaaggagctgaacaacacctgtgagcctgtggtgacccagcccaagcccaagattgagagccccaagctggagaggaccccaaatggccccaacatcgacaagaaggaggaggacctggaggacaagaacaactttggagctgagcccccccaccagaatggagagtgctacccaaatgagaagaacagcgtgaacatggacctggactag

SEQ ID NO: 104886 - DNA, 2583 bp, Artificial Sequence
  derived and/or modified sequence
atggccaccgccgccgtgctgcggggccccgccgcccactgggtggaatcatttcagaaggcgagggaggaagggagcggcagtggtacctggagggggaggtggcgccgaagatctgtgatttcgtttggttcgaaaaatcgcacgatcggcgtggcagccaagaatcagcagataactcacgccaacaacacggtttccaattttaaaagattccacggtagggccttcaacgatccattcatccagaaggaaaaagaaaatttgtcctacgacttggtgccactgaagaatggcggggtgggtattaaggtgatgtatatgggagaggaacacctgttctcagtcgagcagatcaccgcgatgctgctcaccaaattgaaagaaaccgctgagaactcacttaagaaacccgtaacggactgcgtgatcagtgtgccttcgttctttactgatgccgagcgacgcagcgtccttgatgctgctcagatcgtagggctcaattgtcttcgcctgatgaatgatatgacggctgtggcactgaattacggtatctacaagcaggacctgccaagcctggatgagaagcccaggatcgttgtgtttgtggatatgggccattccgcgtttcaggtaagcgcctgtgcgttcaacaagggcaaactaaaagttctggggacggcctttgatcccttcttgggaggcaaaaactttgacgagaaattagtggaacacttttgcgccgaattcaagacgaagtacaagctcgatgctaagagcaagattcgcgcgctcttgcgcttgtatcaggagtgtgagaagctaaaaaagcttatgtcctccaactcaacagaccttccgctcaatatcgaatgtttcatgaatgataaggacgtgtctgggaagatgaacaggtcacaattcgaggaactgtgcgctgaactgcttcagaagatagaggtgccgctttatagcctgctagagcagactcatctgaaggtggaagatgtgtctgccgtcgagatcgtcggcggcgccaccagaatccccgcggtaaaagagaggattgccaagttttttggcaaggatatttcaaccacactgaacgctgacgaggccgtagctcgcgggtgcgcgctgcaatgcgccattctctccccggccttcaaagtgcgagaatttagtgtgacagacgcagtgccctttccaatcagcctgatttggaaccacgattcagaggatactgaaggggtgcacgaagtctttagccgcaaccacgctgctcctttcagtaaggtgttaacgttcctgagaaggggcccttttgagctggaagcattttacagtgacccccaaggggtgccatatccggaggctaagattggtcggtttgtcgttcagaatgtgagcgcccagaaggatggagagaagagcagagtgaaggtgaaggtaagagtgaatacgcatggcatttttaccattagcacagcctcaatggtggagaaggtgcctacggaggaaaacgagatgtcatccgaggccgacatggagtgcctgaaccagcgcccccctgagaaccccgataccgataagaacgtccagcaggacaattccgaagctggaacccagccgcaagtgcagaccgacgcgcaacagacatctcagtcacctccatcccccgagttaacttctgaggagaataaaatacctgatgcagacaaagcgaatgagaagaaggtggaccagccacccgaggccaaaaagcctaaaatcaaggtcgtgaatgtggaactccccatcgaagcaaacttggtatggcagctgggtaaagacctcttgaatatgtacatcgagaccgaggggaaaatgattatgcaggacaaactggagaaggaaagaaatgatgctaaaaatgcggtagaagaatatgtgtacgagtttagggacaaactgtgcgggccctacgagaaatttatctgcgagcaggaccaccaaaactttttaaggctgctgacagaaactgaggattggctctatgaagagggcgaggaccaagccaagcaggcctacgtggacaaactggaagaactgatgaagattggtactccggttaaagtgaggttccaggaggctgaggagcggcctaagatgtttgaggaactggggcagcggctgcagcactatgctaagattgccgccgacttccgcaacaaagacgagaaatataaccatatcgacgaaagcgaaatgaagaaggtcgagaagagcgtcaacgaggtgatggaatggatgaataacgtgatgaacgctcaggccaagaagagcttggaccaggaccctgtggtcagggctcaagaaatcaagaccaagatcaaagagctcaacaatacctgcgagcccgtggttacccagcccaaacccaagatcgagtcacccaagctcgaacgcacacctaatgggcctaatattgacaagaaggaagaggacctagaagacaaaaataactttggtgcagagccaccccaccagaatggggaatgctatcctaacgagaagaactcagtaaatatggatctggactag

SEQ ID NO: 104887 - DNA, 2583 bp, Artificial Sequence
  derived and/or modified sequence
atggctaccgccgctgtccttagggggccagcagcccattgggtcgaatcgttccagaaagccagagaggaggggagtggctcaggcacctggaggggtcggtggcgacgcaggtctgtgatctcttttggcagcaagaaccgcacaattggtgtcgcagctaagaaccagcagataacccatgctaataacactgtttctaactttaagagattccacggtcgggcattcaatgacccctttatccaaaaggagaaagagaatctaagctatgatttggtgccactaaagaacggcggagtgggcatcaaggtgatgtatatgggtgaggagcacctcttcagcgttgagcagattaccgccatgctcctcactaaactcaaggagaccgcagagaactcactcaagaagcccgtgaccgattgcgtgatctccgtgcccagcttttttacagatgctgaaaggcgatcagtactggatgctgcgcagatcgtggggctcaattgcctgcgtttgatgaacgatatgaccgcagtggcactgaattatggcatatataaacaggatttaccttccctcgacgagaagccacggattgtggtctttgtggatatgggtcacagtgccttccaagtctcggcatgcgccttcaataaggggaaactcaaagttttgggcaccgcattcgatccatttctcggcggaaagaactttgacgagaagctggtggagcacttctgtgccgagttcaagactaagtataaactcgacgccaagtctaaaatccgggctttactgcgactctaccaggaatgtgagaagctcaagaaacttatgtcttcgaacagcacagacctgccacttaacatcgagtgcttcatgaacgacaaggacgtctctggcaaaatgaataggtctcagttcgaagaactctgcgccgagctgctgcagaaaatcgaggtgccactgtattcgctcctggaacagacacaccttaaagttgaagacgtcagcgcagtggaaattgtgggcggagcgacccgcatccctgctgtcaaggaacgaattgccaaattttttggaaaagacatctcgaccaccttgaatgcagatgaggccgttgcccgaggttgtgcacttcaatgcgcgatcctgagccctgcctttaaggtgagggagttctctgtgaccgatgccgtcccctttcctataagcctgatctggaaccacgactccgaggacacagaaggcgtgcatgaggtattttctagaaatcatgctgcccctttctctaaagttttgaccttcctgcggcgaggaccgtttgagctggaagcattctacagtgacccacaaggggtcccgtaccccgaggcaaaaatcggaagattcgtggtgcaaaatgtttcagcgcaaaaagacggcgagaaaagtcgggtgaaagtgaaagtgagagtgaatacccacgggatttttactatttccacagcctcgatggttgagaaggtcccgactgaggagaacgaaatgtcgtctgaagctgacatggaatgtctgaaccagcgaccgccagagaaccctgatacggataaaaatgtgcaacaggacaattccgaagcgggtacccagccccaggtgcagacagacgctcaacagacgagccagtctccccctagtcccgagcttacttcagaggagaacaagatccccgatgccgacaaagccaacgaaaagaaggtagaccaaccacccgaggctaaaaagccaaaaattaaagtggttaatgtggagcttcctatcgaggcaaacctggtctggcagttaggcaaggacctgttaaatatgtacattgagacagaggggaagatgataatgcaggacaagctggaaaaagagcgcaacgacgccaaaaacgccgtggaggaatacgtctatgaattcagagacaaactgtgcggcccatacgaaaagttcatttgtgagcaggaccaccaaaacttcctcaggttgctgaccgaaaccgaggactggctgtacgaagagggggaggaccaagcgaagcaggcctacgtggacaagcttgaggaactgatgaaaattggtaccccggttaaagtacgatttcaggaagctgaggagagaccaaagatgtttgaagagcttggacagagactccagcactatgctaaaatcgcagctgacttcagaaacaaagacgaaaagtataaccatatcgatgagtcagagatgaagaaggtggagaaatctgtaaatgaagtcatggaatggatgaacaacgtgatgaacgcccaggcaaaaaaatctctggaccaggatccagtcgtccgggcacaggaaattaaaacaaagatcaaagagctgaataacacttgtgaacccgttgtgacacagcctaaacccaaaattgaatcgcctaaactagagaggacaccaaacgggcctaacattgataagaaggaggaggacctggaggataagaataacttcggagccgaacccccacaccagaacggggagtgttaccccaacgagaaaaacagtgtcaatatggatcttgattag

SEQ ID NO: 104888 - DNA, 2583 bp, Artificial Sequence
  derived and/or modified sequence
atggccaccgccgccgtgctgagaggccccgccgcccactgggtggagagcttccagaaggccagagaggagggcagcggcagcggcacctggagaggcagatggagaagaagaagcgtgatcagcttcggcagcaagaacagaaccatcggcgtggccgccaagaaccagcagatcacccacgccaacaacaccgtgagcaacttcaagagattccacggcagagccttcaacgaccccttcatccagaaggagaaggagaacctgagctacgacctggtgcccctgaagaacggcggcgtgggcatcaaggtgatgtacatgggcgaggagcacctgttcagcgtggagcagatcaccgccatgctgctgaccaagctgaaggagaccgccgagaacagcctgaagaagcccgtgaccgactgcgtgatcagcgtgcccagcttcttcaccgacgccgagagaagaagcgtgctggacgccgcccagatcgtgggcctgaactgcctgagactgatgaacgacatgaccgccgtggccctgaactacggcatctacaagcaggacctgcccagcctggacgagaagcccagaatcgtggtgttcgtggacatgggccacagcgccttccaggtgagcgcctgcgccttcaacaagggcaagctgaaggtgctgggcaccgccttcgaccccttcctgggcggcaagaacttcgacgagaagctggtggagcacttctgcgccgagttcaagaccaagtacaagctggacgccaagagcaagatcagagccctgctgagactgtaccaggagtgcgagaagctgaagaagctgatgagcagcaacagcaccgacctgcccctgaacatcgagtgcttcatgaacgacaaggacgtgagcggcaagatgaacagaagccagttcgaggagctgtgcgccgagctgctgcagaagatcgaggtgcccctgtacagcctgctggagcagacccacctgaaggtggaggacgtgagcgccgtggagatcgtgggcggcgccaccagaatccccgccgtgaaggagagaatcgccaagttcttcggcaaggacatcagcaccaccctgaacgccgacgaggccgtggccagaggctgcgccctgcagtgcgccatcctgagccccgccttcaaggtgagagagttcagcgtgaccgacgccgtgcccttccccatcagcctgatctggaaccacgacagcgaggacaccgagggcgtgcacgaggtgttcagcagaaaccacgccgcccccttcagcaaggtgctgaccttcctgagaagaggccccttcgagctggaggccttctacagcgacccccagggcgtgccctaccccgaggccaagatcggcagattcgtggtgcagaacgtgagcgcccagaaggacggcgagaagagcagagtgaaggtgaaggtgagagtgaacacccacggcatcttcaccatcagcaccgccagcatggtggagaaggtgcccaccgaggagaacgagatgagcagcgaggccgacatggagtgcctgaaccagagaccccccgagaaccccgacaccgacaagaacgtgcagcaggacaacagcgaggccggcacccagccccaggtgcagaccgacgcccagcagaccagccagagcccccccagccccgagctgaccagcgaggagaacaagatccccgacgccgacaaggccaacgagaagaaggtggaccagccccccgaggccaagaagcccaagatcaaggtggtgaacgtggagctgcccatcgaggccaacctggtgtggcagctgggcaaggacctgctgaacatgtacatcgagaccgagggcaagatgatcatgcaggacaagctggagaaggagagaaacgacgccaagaacgccgtggaggagtacgtgtacgagttcagagacaagctgtgcggcccctacgagaagttcatctgcgagcaggaccaccagaacttcctgagactgctgaccgagaccgaggactggctgtacgaggagggcgaggaccaggccaagcaggcctacgtggacaagctggaggagctgatgaagatcggcacccccgtgaaggtgagattccaggaggccgaggagagacccaagatgttcgaggagctgggccagagactgcagcactacgccaagatcgccgccgacttcagaaacaaggacgagaagtacaaccacatcgacgagagcgagatgaagaaggtggagaagagcgtgaacgaggtgatggagtggatgaacaacgtgatgaacgcccaggccaagaagagcctggaccaggaccccgtggtgagagcccaggagatcaagaccaagatcaaggagctgaacaacacctgcgagcccgtggtgacccagcccaagcccaagatcgagagccccaagctggagagaacccccaacggccccaacatcgacaagaaggaggaggacctggaggacaagaacaacttcggcgccgagcccccccaccagaacggcgagtgctaccccaacgagaagaacagcgtgaacatggacctggactag

SEQ ID NO: 104889 - protein, 677 aa, Artificial Sequence
  derived and/or modified sequence
MYMGEEHLFSVEQITAMLLTKLKETAENSLKKPVTDCVISVLGTAFDPFLGGKNFDEKLVEHFCAEFKTKYKLDAKSKIRALLRLYQECEKLKKLMSSNSTDLPLNIECFMNDKDVSGKMNRSQFEELCAELLQKIEVPLYSLLEQTHLKVEDVSAVEIVGGATRIPAVKERIAKFFGKDISTTLNADEAVARGCALQCAILSPAFKVREFSVTDAVPFPISLIWNHDSEDTEGVHEVFSRNHAAPFSKVLTFLRRGPFELEAFYSDPQGVPYPEAKIGRFVVQNVSAQKDGEKSRVKVKVRVNTHGIFTISTASMVEKVPTEENEMSSEADMECLNQRPPENPDTDKNVQQDNSEAGTQPQVQTDAQQTSQSPPSPELTSEENKIPDADKANEKKVDQPPEAKKPKIKVVNVELPIEANLVWQLGKDLLNMYIETEGKMIMQDKLEKERNDAKNAVEEYVYEFRDKLCGPYEKFICEQDHQNFLRLLTETEDWLYEEGEDQAKQAYVDKLEELMKIGTPVKVRFQEAEERPKMFEELGQRLQHYAKIAADFRNKDEKYNHIDESEMKKVEKSVNEVMEWMNNVMNAQAKKSLDQDPVVRAQEIKTKIKELNNTCEPVVTQPKPKIESPKLERTPNGPNIDKKEEDLEDKNNFGAEPPHQNGECYPNEKNSVNMDLD

SEQ ID NO: 104890 - DNA, 2034 bp, Artificial Sequence
  derived and/or modified sequence
atgtacatgggggaggagcacctgttttcggtcgagcagataactgccatgctcctgacaaagctgaaggaaaccgccgagaactctctgaagaagccggtaaccgattgcgtgatctccgttctgggaactgcctttgacccttttctgggaggtaaaaacttcgatgagaaactagtggaacatttttgtgctgaatttaaaactaagtataagctcgacgccaagtccaagatcagagctctccttaggctctaccaggagtgtgagaagctaaagaagctaatgtcgagcaacagtactgacctgccgcttaacattgaatgtttcatgaatgacaaggacgtgtccgggaagatgaacaggtcgcaatttgaggaactgtgcgccgaactgctccagaaaattgaagttcctctgtactccctgctggaacagacccacctgaaggtggaggacgtgagcgccgtcgagatcgtgggaggcgcaactagaattcccgcagtcaaagagcgtattgccaagttctttggtaaagacatatcaaccactttgaacgccgacgaggcggtggcacgggggtgtgcattgcagtgcgccatcctcagtccagcctttaaggttcgggagtttagtgtgactgatgctgttcccttccccatctctctgatctggaaccacgattccgaggacacagagggggtgcatgaggtcttcagtagaaaccatgccgcccccttcagtaaagtgctcacttttttaaggcgggggcccttcgagctcgaggccttctattctgacccgcagggagtcccatatccagaagctaagatcggacgctttgtggttcagaacgtttcagcccagaaggatggcgaaaaatctagggtgaaggtcaaggtccgcgttaacacccacgggattttcacaatcagtacagcgagcatggtggaaaaggtccccacagaagagaatgaaatgtcctccgaagccgacatggagtgtctgaatcagaggccccccgagaatcctgacacagacaaaaatgttcaacaggataacagcgaggctggtacccagccacaggtgcagacggatgcccaacagaccagtcaatcacctccatctcccgagctgacatccgaagaaaacaagattcctgacgcagataaagcaaacgagaagaaggtcgatcaaccccccgaagccaagaaacctaaaataaaggtcgttaacgtggaacttcctatcgaggcaaaccttgtgtggcagctcgggaaagacctccttaatatgtatatcgaaactgagggaaaaatgattatgcaggacaagttagaaaaagaaagaaacgacgctaagaacgcggtggaagaatacgtgtatgaattccgggacaagctctgtggaccctatgagaaatttatctgtgaacaggaccaccagaactttttgcgtctgcttacagagaccgaagactggctgtatgaggagggtgaagatcaggcgaaacaggcctacgtggacaagctcgaggaactcatgaaaatcggcactccagtgaaagtgcggttccaggaagctgaggagaggccaaagatgtttgaagagctcggacagagactgcagcattacgccaaaatcgcggctgattttcgcaataaggatgaaaaatataaccacattgatgaatcagagatgaagaaagtggaaaagagtgttaatgaggtgatggaatggatgaataacgtgatgaacgcccaggcaaagaaatctctggaccaggacccagtggtaagagctcaagagatcaagactaagataaaggagctgaataacacttgcgaaccggtggtgacccagcctaagccaaaaatcgagtcacccaagcttgaaagaacccccaatggccctaacattgacaaaaaagaggaggacctggaagataaaaataactttggcgccgagccaccacatcagaacggtgaatgctacccgaacgaaaaaaatagcgttaacatggacttggattag

SEQ ID NO: 104891 - DNA, 2346 bp, Artificial Sequence
  derived and/or modified sequence
agaaggctcgagaagaaggaagcggaagtggcacgtggaggggccggtggaggcgccggtcagtcatatcatttggatcaaaaaatagaacaatcggagttgcagccaaaaatcagcaaatcactcatgcaaacaatacggtgtctaacttcaaaagatttcatggccgagcattcaatgaccccttcattcaaaaggagaaggaaaacttgagttacgatttggttccattgaaaaatggtggagttggaataaaggtaatgtacatgggtgaagaacatctatttagtgtggagcagataacagccatgttgttgactaagctgaaggaaactgctgaaaacagcctcaagaaaccagtaacagattgtgttatttcagtactgggaacagcttttgatcctttcttaggaggaaaaaacttcgatgaaaagttagtggaacatttttgtgcagaatttaaaactaagtacaagttggatgcaaaatccaaaatacgagcactcctacgtctgtatcaggaatgtgaaaaactgaaaaagctaatgagctctaacagcacagaccttccactgaatatcgaatgctttatgaatgataaagatgtttccggaaagatgaacaggtcacaatttgaagaactctgtgctgaacttctgcaaaagatagaagtacccctttattcactgttggaacaaactcatctcaaagtagaagatgtgagtgcagttgagattgttggaggcgctacacgaattccagctgtgaaggaaagaattgccaaattctttggaaaagatattagcacaacactcaatgcagatgaagcagtagccagaggatgtgcattacagtgtgcaatactttccccggcatttaaagttagagaattttccgtcacagatgcagttccttttccaatatctctgatctggaaccatgattcagaagatactgaaggtgttcatgaagtctttagtcgaaaccatgctgctcctttctccaaagttctcacctttctgagaagggggccttttgagctagaagctttctattctgatccccaaggagttccatatccagaagcaaaaataggccgctttgtagttcagaatgtttctgcacagaaagatggagaaaaatctagagtaaaagtcaaagtgcgagtcaacacccatggcattttcaccatctctacggcatctatggtggagaaagtcccaactgaggagaatgaaatgtcttctgaagctgacatggagtgtctgaatcagagaccaccagaaaacccagacactgataaaaatgtccagcaagacaacagtgaagctggaacacagccccaggtacaaactgatgctcaacaaacctcacagtctcccccttcacctgaacttacctcagaagaaaacaaaatcccagatgctgacaaagcaaatgaaaaaaaagttgaccagcctccagaagctaaaaagcccaaaataaaggtggtgaatgttgagctgcctattgaagccaacttggtctggcagttagggaaagaccttcttaacatgtatattgagacagagggtaagatgataatgcaagataaattggaaaaagaaaggaatgatgctaaaaatgcagttgaggaatatgtgtatgagttcagagacaagctgtgtggaccatatgaaaaatttatatgtgagcaggatcatcaaaattttttgagactcctcacagaaactgaagactggctgtatgaagaaggagaggaccaagctaaacaagcatatgttgacaagttggaagaattaatgaaaattggcactccagttaaagttcggtttcaggaagctgaagaacggccaaaaatgtttgaagaactaggacagaggctgcagcattatgccaagatagcagctgacttcagaaataaggatgagaaatacaaccatattgatgagtctgaaatgaaaaaagtggagaagtctgttaatgaagtgatggaatggatgaataatgtcatgaatgctcaggctaaaaagagtcttgatcaggatccagttgtacgtgctcaggaaattaaaacaaaaatcaaggaattgaacaacacatgtgaacccgttgtaacacaaccgaaaccaaaaattgaatcacccaaactggaaagaactccaaatggcccaaatattgataaaaaggaagaagatttagaagacaaaaacaattttggtgctgaacctccacatcagaatggtgaatgttaccctaatgagaaaaattctgttaatatggacttggactagataaccttaaattggcctattccttcaattaataaaatatttttgccatagt

SEQ ID NO: 104892 - DNA, 2034 bp, Artificial Sequence
  derived and/or modified sequence
atgtacatgggagaggagcacctgttctctgtggagcagatcacagccatgctgctgaccaagctgaaggagacagctgagaacagcctgaagaagcctgtgacagactgtgtgatctctgtgctgggcacagcctttgaccccttcctgggcggcaagaactttgatgagaagctggtggagcacttctgtgccgagttcaagaccaagtacaagctggatgccaagagcaagatccgggccctgctgcggctgtaccaggagtgtgagaagctgaagaagctgatgagcagcaacagcacagacctgcccctgaacatcgagtgcttcatgaatgacaaggatgtgtctgggaagatgaacagaagccagtttgaggagctgtgtgccgagctgctgcagaagattgaggtgcccctgtacagcctgctggagcagacccacctgaaggtggaggatgtgtctgctgtggagatcgtgggcggggccacccgcatcccagctgtgaaggagagaattgccaagttcttcggcaaggacatcagcaccaccctgaatgctgatgaggccgtggcccggggctgtgccctgcagtgtgccatcctgagccctgccttcaaggtgcgggagttctctgtgacagatgctgtgcccttccccatcagcctcatctggaaccatgattctgaggacacagagggcgtgcatgaggtgttcagcagaaatcatgctgcccccttcagcaaggtgctgaccttcctgcggcggggcccctttgagctggaggccttctacagcgacccccagggcgtgccctacccagaggccaagattggccgctttgtggtgcagaatgtgtctgcccagaaggatggagagaagagccgggtgaaggtgaaggtgcgggtgaacacccacggcatcttcaccatcagcacagcctccatggtggagaaggtgcccacagaggagaatgagatgagcagcgaggccgacatggagtgcctgaaccagaggcctcctgagaacccagacacagacaagaatgtgcagcaggacaacagcgaggccggcacccagccccaggtgcagacagatgcccagcagaccagccagagcccccccagccctgagctgaccagcgaggagaacaagatcccagatgctgacaaggccaatgagaagaaggtggaccagcccccagaggccaagaagcccaagatcaaggtggtgaatgtggagctgcccatcgaggccaacctggtgtggcagctgggcaaggacctgctgaacatgtacatcgagacagagggcaagatgatcatgcaggacaagctggagaaggagagaaatgatgccaagaatgctgtggaggagtatgtgtatgagttccgggacaagctgtgtggcccctatgagaagttcatctgtgagcaggaccaccagaacttcctgcggctgctgacagaaacagaggactggctgtatgaggagggggaggaccaggccaagcaggcctacgtggacaagctggaggagctgatgaagattggcacccctgtgaaggtgcgcttccaggaggccgaggagcggcccaagatgtttgaggagctgggccagaggctgcagcactacgccaagattgctgctgacttcaggaacaaggatgagaagtacaaccacattgatgaaagtgagatgaagaaggtggagaagtctgtgaatgaggtgatggagtggatgaacaacgtgatgaatgcccaggccaagaagagcctggaccaggaccctgtggtgcgggcccaggagatcaagaccaagatcaaggagctgaacaacacctgtgagcctgtggtgacccagcccaagcccaagattgagagccccaagctggagaggacccccaacggccccaacatcgacaagaaggaggaggacctggaggacaagaacaactttggagctgagcccccccaccagaatggagagtgctacccaaatgagaagaacagcgtgaacatggacctggactag

SEQ ID NO: 104893 - DNA, 2034 bp, Artificial Sequence
  derived and/or modified sequence
atgtacatgggcgaggagcacctgttcagcgtggagcagatcaccgcgatgctactcactaaactcaaagaaactgccgagaatagcttgaagaagccggtgacagactgcgtaatctcagtcctcggcacagcatttgatccttttctgggaggaaaaaattttgacgagaagctggtagaacacttctgtgcagaatttaaaaccaagtataagctcgacgccaaatcaaagatccgtgctctcttaaggctgtaccaggagtgcgagaagttgaaaaagttaatgagctcaaacagcacagacctgccattaaacattgagtgcttcatgaatgacaaagacgtttctggaaagatgaatcgctctcagtttgaggagttgtgtgccgagctgctgcagaaaatcgaggtccccctgtacagcttgctggagcagactcatctgaaagtggaggatgtcagtgctgtagagatagtgggaggggctacaaggatacccgcagtgaaagagcgcatcgccaaattctttggcaaagacatcagcaccacactcaatgccgatgaggcggtggcacgggggtgcgcactgcagtgcgccatccttagccctgccttcaaggtccgggagttctcagtgaccgacgcagtgcccttcccaatctcgttgatctggaatcacgactccgaggatactgagggcgtccacgaggttttcagcagaaaccatgccgcacccttttcgaaggtactgacgttcctccgaagggggcctttcgagctggaagccttctatagcgatccccagggcgtgccatacccagaagctaagataggcaggttcgttgtgcagaatgtgtccgctcagaaagacggcgagaaatcacgggtcaaggtaaaggtgcgagtgaatacccatgggatttttactatctcaaccgccagcatggtggaaaaggtcccgacagaggagaatgaaatgtcctccgaagcggacatggaatgccttaatcagaggccacccgagaaccccgatacagacaagaatgtccaacaagacaattccgaagcaggaacacaaccgcaggttcagactgacgcccagcagacatcgcagagcccaccgagtccagagttaacgtccgaagaaaataaaattccagatgcagataaggcgaacgaaaagaaggtcgatcagcccccggaggccaaaaagcctaagatcaaagttgtgaatgtggagctgcccatagaggcaaacctggtgtggcagctcggcaaggacctgctcaatatgtacatcgagacagaggggaaaatgatcatgcaagacaagttagaaaaggaaaggaatgatgctaagaacgctgtggaggagtatgtgtatgagttccgggataaattgtgtggcccatacgagaagttcatttgcgaacaggaccaccagaattttctccggctcctgacagaaacagaggactggttgtatgaagagggagaagaccaggctaagcaggcatatgttgataaactggaggagcttatgaaaatcggaacgcccgtcaaagtccgcttccaggaagccgaagaaaggccaaaaatgtttgaagagctcggccaacgtctgcagcactacgctaaaatcgcggctgattttcggaacaaggacgagaagtacaaccacatcgacgagagcgaaatgaaaaaggtcgagaagtcagtgaacgaagtcatggagtggatgaacaatgttatgaatgcccaagccaagaagagtctggatcaggatccagtggttagggcacaggaaatcaaaactaaaatcaaggaactaaacaacacctgcgaacccgttgtcactcagcccaagccaaagatcgagtctcccaagctggagcggaccccgaatgggccaaatatcgacaagaaggaggaagacctggaggacaagaacaacttcggcgcagaacccccccatcaaaacggcgagtgttacccaaacgagaaaaatagcgttaatatggatctggactag

SEQ ID NO: 104894 - DNA, 2034 bp, Artificial Sequence
  derived and/or modified sequence
atgtacatgggcgaagagcatctgttcagcgtggaacagatcaccgccatgctgctcacaaagctgaaagagacggccgaaaatagcctcaagaaacccgtcacagactgtgtcatttcagtgctcgggaccgcctttgacccctttctggggggaaaaaatttcgacgagaagttggtcgagcacttttgcgcagaattcaaaacgaaatacaaactggatgccaagtcaaagataagagccttgctcagactttaccaagagtgcgagaagttgaaaaaacttatgagctccaattccactgacttgccactcaatatcgagtgcttcatgaacgacaaggacgtttctggcaagatgaaccggagtcaattcgaagagctgtgtgcagagctgttgcagaagatcgaggtacccctgtacagtttactggagcaaacgcacttgaaggtcgaagatgtcagcgcagttgagatcgtcggcggagccactaggatacctgcagtaaaagagaggattgctaaattctttgggaaggatatttcaactaccctcaacgcggatgaggccgttgcaagaggttgtgctcttcagtgcgccatcctctctcctgcttttaaagtgcgggaattcagtgtgacagacgcggtacccttcccaatatcactgatttggaaccacgattccgaggacacagaaggagtccacgaggtgttcagcaggaatcatgctgcccctttctccaaagtccttacctttctccggaggggcccttttgagctggaggctttttactccgatccacagggtgtgccttacccagaagccaagatcgggcgatttgtggtacagaatgtgtcagcacagaaggacggtgagaaatcacgagtaaaggttaaggttcgcgtgaacactcacggaatcttcactatctcgaccgcgtctatggtggagaaagtaccaaccgaggaaaatgagatgagcagtgaggccgacatggaatgcctcaatcaacgtccccctgagaatcccgacactgataaaaacgtccagcaggacaactctgaagcagggacgcaaccccaggtgcagaccgacgcccaacaaacctctcagtctccccctagcccggagctaaccagtgaagagaacaaaattcccgatgctgacaaagcgaacgaaaaaaaagttgaccagcctcccgaggccaagaaacccaaaataaaggtagtcaatgtggagctcccaattgaggccaaccttgtgtggcagctcggaaaggacctgttgaacatgtatatcgagacagagggtaagatgatcatgcaggacaagctcgagaaggagcggaatgatgccaagaacgccgttgaagagtatgtctatgagttcagggacaagctgtgcgggccatatgaaaagttcatttgtgaacaagatcaccagaacttcctgcgtttgcttacagagaccgaggactggctgtatgaggagggagaggaccaggcgaaacaagcatacgtagataagctggaggagctgatgaagatcggcacaccggttaaggtgcgatttcaagaggccgaggaaagaccaaagatgttcgaggaactcggccagcgcctgcagcattacgcgaagatcgctgcagatttcaggaataaagacgagaagtacaaccatatagatgagtcggagatgaaaaaggtggagaagtctgtcaacgaggtgatggagtggatgaataacgttatgaatgcccaagccaagaaatctctggaccaggatccagtggtgcgcgctcaggaaattaagaccaagattaaagaactgaacaacacttgcgagcccgtcgtcacgcaaccaaagcccaagatagaaagtccgaagctggagcgaactcccaatggccctaacattgacaagaaggaagaggatctggaagacaaaaacaatttcggtgctgagccacctcatcaaaatggtgagtgttatcctaacgagaaaaatagcgtgaatatggatctggactag

SEQ ID NO: 104895 - DNA, 2034 bp, Artificial Sequence
  derived and/or modified sequence
atgtacatgggcgaggagcacctgttcagcgtggagcagatcaccgccatgctgctgaccaagctgaaggagaccgccgagaacagcctgaagaagcccgtgaccgactgcgtgatcagcgtgctgggcaccgccttcgaccccttcctgggcggcaagaacttcgacgagaagctggtggagcacttctgcgccgagttcaagaccaagtacaagctggacgccaagagcaagatcagagccctgctgagactgtaccaggagtgcgagaagctgaagaagctgatgagcagcaacagcaccgacctgcccctgaacatcgagtgcttcatgaacgacaaggacgtgagcggcaagatgaacagaagccagttcgaggagctgtgcgccgagctgctgcagaagatcgaggtgcccctgtacagcctgctggagcagacccacctgaaggtggaggacgtgagcgccgtggagatcgtgggcggcgccaccagaatccccgccgtgaaggagagaatcgccaagttcttcggcaaggacatcagcaccaccctgaacgccgacgaggccgtggccagaggctgcgccctgcagtgcgccatcctgagccccgccttcaaggtgagagagttcagcgtgaccgacgccgtgcccttccccatcagcctgatctggaaccacgacagcgaggacaccgagggcgtgcacgaggtgttcagcagaaaccacgccgcccccttcagcaaggtgctgaccttcctgagaagaggccccttcgagctggaggccttctacagcgacccccagggcgtgccctaccccgaggccaagatcggcagattcgtggtgcagaacgtgagcgcccagaaggacggcgagaagagcagagtgaaggtgaaggtgagagtgaacacccacggcatcttcaccatcagcaccgccagcatggtggagaaggtgcccaccgaggagaacgagatgagcagcgaggccgacatggagtgcctgaaccagagaccccccgagaaccccgacaccgacaagaacgtgcagcaggacaacagcgaggccggcacccagccccaggtgcagaccgacgcccagcagaccagccagagcccccccagccccgagctgaccagcgaggagaacaagatccccgacgccgacaaggccaacgagaagaaggtggaccagccccccgaggccaagaagcccaagatcaaggtggtgaacgtggagctgcccatcgaggccaacctggtgtggcagctgggcaaggacctgctgaacatgtacatcgagaccgagggcaagatgatcatgcaggacaagctggagaaggagagaaacgacgccaagaacgccgtggaggagtacgtgtacgagttcagagacaagctgtgcggcccctacgagaagttcatctgcgagcaggaccaccagaacttcctgagactgctgaccgagaccgaggactggctgtacgaggagggcgaggaccaggccaagcaggcctacgtggacaagctggaggagctgatgaagatcggcacccccgtgaaggtgagattccaggaggccgaggagagacccaagatgttcgaggagctgggccagagactgcagcactacgccaagatcgccgccgacttcagaaacaaggacgagaagtacaaccacatcgacgagagcgagatgaagaaggtggagaagagcgtgaacgaggtgatggagtggatgaacaacgtgatgaacgcccaggccaagaagagcctggaccaggaccccgtggtgagagcccaggagatcaagaccaagatcaaggagctgaacaacacctgcgagcccgtggtgacccagcccaagcccaagatcgagagccccaagctggagagaacccccaacggccccaacatcgacaagaaggaggaggacctggaggacaagaacaacttcggcgccgagcccccccaccagaacggcgagtgctaccccaacgagaagaacagcgtgaacatggacctggactag

SEQ ID NO: 104896 - protein, 339 aa, Artificial Sequence
  derived and/or modified sequence
MLLAMPALWYLATSWCSTSGGRTTWRPVSYLTWGVLQERVMTRSYGATATSPGERFTDSQFLVLMNRVLALIVAGLSCVLCKQPRHGAPMYRYSFASLSNVLSSWCQYEALKFVSFPTQVLAKASKVIPVMLMGKLVSRRSYEHWEYLTATLISIGVSMFLLSSGPEPRSSPATTLSGLILLAGYIAFDSFTSNWQDALFAYKMSSVQMMFGVNFFSCLFTVGSLLEQGALLEGTRFMGRHSEFAAHALLLSICSACGQLFIFYTIGQFGAAVFTIIMTLRQAFAILLSCLLYGHTVTVVGGLGVAVVFAALLLRVYARGRLKQRGKKAVPVESPVQKV

SEQ ID NO: 104897 - DNA, 1020 bp, Artificial Sequence
  derived and/or modified sequence
atgctgctggccatgcccgcattgtggtacctggctacttcctggtgcagcacatccggcgggaggaccacatggcgccccgtctcctatctgacttggggagtgttacaggaaagggtcatgacaagatcttatggggccacagcaaccagcccaggcgagcggtttaccgattcccagtttctcgtgctgatgaaccgcgtcctggcactgatcgtggctggcttgagctgtgtgctgtgtaagcagccccgtcacggggccccgatgtatcggtacagttttgcctcactgtctaatgtgctgtcttcttggtgtcagtatgaagcacttaagttcgtctcttttcctactcaggttctggcaaaagcctccaaggtaatcccagtaatgctcatggggaagctggtaagccgaaggtcctatgagcactgggaatacttgaccgctactctcattagtattggggtgtctatgttcttgttaagtagcggtcccgaacctcgaagctcaccagcgacaactctcagtggccttatactgttggccgggtatatagctttcgactccttcacttccaattggcaggatgcattattcgcatataagatgagtagcgtgcagatgatgtttggagtgaatttttttagctgtctcttcactgtcggctcactgctcgaacaaggcgccttgctggagggcaccaggtttatggggagacattccgagttcgctgcccacgctctgctccttagcatctgtagtgcttgcggccaattgtttattttctacacaatcggacaatttggagccgccgtcttcactattatcatgaccttgcgccaagcctttgccatcctgctttcctgtcttttatacgggcacaccgtgacggttgtgggggggctgggcgtcgcagtggtgttcgccgctctgctgctgcgggtatacgcgcgaggacgactcaaacaacgcggcaagaaggccgttcccgtggagtcgcccgtgcaaaaggtgtag

SEQ ID NO: 104898 - DNA, 1020 bp, Artificial Sequence
  derived and/or modified sequence
atgctgctggccatgcctgccctgtggtacctggccacctcctggtgcagcaccagcggcggccgcaccacctggaggcctgtgtcctacctgacctggggcgtgctgcaggagcgggtgatgaccaggagctatggagccacagccaccagccctggagagcgcttcacagacagccagttcctggtgctgatgaacagagtgctggccctgattgtggccggcctgagctgtgtgctgtgcaagcagcccaggcatggagcccccatgtaccgctacagctttgccagcctgagcaatgtgctgagctcctggtgccagtatgaggccctgaagtttgtgtccttccccacccaggtgctggccaaggccagcaaggtgattcctgtgatgctgatgggcaagctggtgtccagaagaagctatgagcactgggagtacctgacagccaccctcatcagcattggagtgtccatgttcctgctgagcagcggccctgagcccaggagcagccctgccaccaccctgagcggcctcatcctgctggccggctacatcgcctttgacagcttcaccagcaactggcaggatgccctgtttgcctacaagatgagctctgtgcagatgatgtttggagtgaacttcttcagctgcctcttcaccgtgggcagcctgctggagcagggcgccctgctggagggcacccgcttcatgggccgccacagcgagtttgctgcccacgccctgctgctgagcatctgcagcgcctgtggccagctgttcatcttctacaccatcggccagtttggagctgctgtgttcaccatcatcatgaccctgcggcaggcctttgccatcctgctgagctgcctgctgtatggccacacagtgacagtggtgggcggcctgggcgtggccgtggtgtttgctgccctgctgctgcgggtgtatgcccggggccgcctgaagcagaggggcaagaaggctgtgcctgtggagagccctgtgcagaaggtgtag

SEQ ID NO: 104899 - DNA, 1020 bp, Artificial Sequence
  derived and/or modified sequence
atgctgctggccatgcccgccctgtggtacctggccaccagctggtgcagcaccagcggcggacgcactacctggcggccagtctcctacctcacctggggagtactacaggaacgggtgatgaccaggtcctatggagctacagctacaagcccgggagagagattcacagactcccagttcctcgtcctgatgaatagagtgcttgcattgatcgtcgccggcctgagttgtgtcctgtgcaaacagccaagacatggcgcacctatgtaccgatactccttcgcttctctgtctaacgttctttccagctggtgtcagtatgaagcactgaaatttgtgtcttttcccacacaggtgctggctaaagcttctaaggtcatccctgtgatgctgatgggaaagctggtatcccggaggtcatatgaacactgggaatacctcactgctaccttgatctcaataggtgtcagtatgtttctcctctctagcggccccgaaccacgcagctcccctgccacaaccctgtccggactgattctcctggccggatacattgcatttgatagttttacctcaaactggcaagatgctctgtttgcatacaaaatgtccagcgtccagatgatgttcggagtgaacttcttcagctgtctgtttacagtggggtcccttctggaacagggggccttgctggagggaactcgctttatgggtagacacagcgagttcgcggcccacgcattattgctttctatttgcagcgcctgtggccagctttttattttctatacaataggccaatttggggctgcggtttttactatcatcatgaccctgcgccaggcatttgctattctgttatcttgcctgctttacgggcacactgtcaccgtcgtcgggggccttggggtagccgtggtgttcgcggctttgctcttacgagtctacgcccgcggacggctgaagcagcggggcaaaaaagccgtccccgttgaatctccagtgcagaaagtgtag

SEQ ID NO: 104900 - DNA, 1020 bp, Artificial Sequence
  derived and/or modified sequence
atgctcctggccatgcctgcgctgtggtacctcgcgacttcctggtgttctacttcaggcggaagaaccacttggcgtcccgtctcctaccttacttggggcgttctgcaggaacgcgtcatgactcgctcctacggtgctactgccacaagccctggggaacgtttcacagatagtcagtttctagtcctgatgaacagggttctcgccctgattgttgcagggctgagctgtgtgctgtgcaaacagcctaggcacggtgcccctatgtaccgttacagtttcgccagcctctctaatgttttaagcagctggtgtcagtatgaagctctgaagtttgtctcttttcctacgcaagtactggccaaagcttccaaagttatacctgtgatgctgatgggaaaactggtgagtcgtcggagctacgaacattgggagtacctcaccgcaacactgatttcaattggcgttagtatgttcttattgtcttccggaccagaaccacggtccagccctgctaccacacttagcgggctcatactgttggcaggatatattgcattcgactcatttacgtcaaactggcaagacgcgctcttcgcctacaagatgagtagcgtacagatgatgtttggcgttaactttttcagttgtctgttcaccgtcgggagtctgctcgaacagggtgccctcctagaggggaccaggttcatgggacggcactccgagtttgccgctcatgcgctgctcctgagcatctgctcagcatgcgggcagctgttcatcttttacacaatagggcagttcggagccgcagtgtttacgatcattatgaccctgcgtcaggcgttcgcaatcttgttgtcatgtttgctgtacggccatactgtgacagtcgtcggcggactgggggtggccgtggtgtttgctgctctgctgctccgggtttatgcccgaggccgtctgaaacagagggggaaaaaggctgtgcccgtggaatccccagttcagaaagtatag

SEQ ID NO: 104901 - DNA, 1498 bp, Artificial Sequence
  derived and/or modified sequence
acttccgctggccgctggctcgctggccgctcctggaggcggcggcgggagcgcagggggcgcgcggcccggggactcgcattccccggttccccctccaccccacgcggcctggaccatggacgccagatggtgggcagtggtggtgctggctgcgttcccctccctaggggcaggtggggagactcccgaagcccctccggagtcatggacccagctatggttcttccgatttgtggtgaatgctgctggctatgccagctttatggtacctggctacctcctggtgcagtacttcaggcggaagaactacctggagaccggtgtcttatctgacttggggtgtgctgcaggaaagagtgatgacccgcagctatggggccacagccacatcaccgggtgagcgctttacggactcgcagttcctggtgctaatgaaccgagtgctggcactgattgtggctggcctctcctgtgttctctgcaagcagccccggcatggggcacccatgtaccggtactcctttgccagcctgtccaatgtgcttagcagctggtgccaatacgaagctcttaagttcgtcagcttccccacccaggtgctggccaaggcctctaaggtgatccctgtcatgctgatgggaaagcttgtgtctcggcgcagctacgaacactgggagtacctgacagccaccctcatctccattggggtcagcatgtttctgctatccagcggaccagagccccgcagctccccagccaccacactctcaggcctcatcttactggcaggttatattgcttttgacagcttcacctcaaactggcaggatgccctgtttgcctataagatgtcatcggtgcagatgatgtttggggtcaatttcttctcctgcctcttcacagtgggctcactgctagaacagggggccctactggagggaacccgcttcatggggcgacacagtgagtttgctgcccatgccctgctactctccatctgctccgcatgtggccagctcttcatcttttacaccattgggcagtttggggctgccgtcttcaccatcatcatgaccctccgccaggcctttgccatccttctttcctgccttctctatggccacactgtcactgtggtgggagggctgggggtggctgtggtctttgctgccctcctgctcagagtctacgcgcggggccgtctaaagcaacggggaaagaaggctgtgcctgttgagtctcctgtgcagaaggtttgagggtggaaagggcctgaggggtgaagtgaaataggaccctcccaccatccccttctgctgtaacctctgagggagctggctgaaagggcaaaatgcaggtgttttctcagtatcacagaccagctctgcagcaggggattggggagcccaggaggcagccttcccttttgccttaagtcacccatcttccagtaagcagtttattctgagccccgggggtagacagtcctcagtga

SEQ ID NO: 104902 - DNA, 1020 bp, Artificial Sequence
  derived and/or modified sequence
atgctgctggccatgcccgccctgtggtacctggccaccagctggtgcagcaccagcggcggcagaaccacctggagacccgtgagctacctgacctggggcgtgctgcaggagagagtgatgaccagaagctacggcgccaccgccaccagccccggcgagagattcaccgacagccagttcctggtgctgatgaacagagtgctggccctgatcgtggccggcctgagctgcgtgctgtgcaagcagcccagacacggcgcccccatgtacagatacagcttcgccagcctgagcaacgtgctgagcagctggtgccagtacgaggccctgaagttcgtgagcttccccacccaggtgctggccaaggccagcaaggtgatccccgtgatgctgatgggcaagctggtgagcagaagaagctacgagcactgggagtacctgaccgccaccctgatcagcatcggcgtgagcatgttcctgctgagcagcggccccgagcccagaagcagccccgccaccaccctgagcggcctgatcctgctggccggctacatcgccttcgacagcttcaccagcaactggcaggacgccctgttcgcctacaagatgagcagcgtgcagatgatgttcggcgtgaacttcttcagctgcctgttcaccgtgggcagcctgctggagcagggcgccctgctggagggcaccagattcatgggcagacacagcgagttcgccgcccacgccctgctgctgagcatctgcagcgcctgcggccagctgttcatcttctacaccatcggccagttcggcgccgccgtgttcaccatcatcatgaccctgagacaggccttcgccatcctgctgagctgcctgctgtacggccacaccgtgaccgtggtgggcggcctgggcgtggccgtggtgttcgccgccctgctgctgagagtgtacgccagaggcagactgaagcagagaggcaagaaggccgtgcccgtggagagccccgtgcagaaggtgtag

SEQ ID NO: 104903 - protein, 125 aa, Artificial Sequence
  derived and/or modified sequence
MDSLEEPQKKVFKARKTMRVSDRQQLEAVYKVKEELLKTDVKLLNGNHENGDLDPTSPLENMDYIKDKEEVNGIEEICFDPEGSKAEWKETPCILSVNVKNKQDDDLNCEPLSPHNITPEPVSKL

SEQ ID NO: 104904 - protein, 152 aa, Artificial Sequence
  derived and/or modified sequence
MDSLEEPQKKVFKARKTMRVSDRQQLEAVYKVKEELLKTDVKLLNGNHENGDLDPTSPLENMDYIKDKEEVNGIEEICFDPEGSKAEWKETPCILSVNVKNKQDDDLNCEPLSPHNITPEPVSKLPAEPVSGDPAPGDLDAGDPASGVLASG

SEQ ID NO: 104905 - protein, 103 aa, Artificial Sequence
  derived and/or modified sequence
MDSLEEPQKKVFKARKTMRVSDRQQLEAVYKVKEELLKTDVKLLNGNHENGDLDPTSPLENMDYIKDKEEVNGIEEICFDPEGSKAEWKETPCILSVNVKNKQ

SEQ ID NO: 104906 - protein, 177 aa, Artificial Sequence
  derived and/or modified sequence
MDSLEEPQKKVFKARKTMRVSDRQQLEAVYKVKEELLKTDVKLLNGNHENGDLDPTSPLENMDYIKDKEEVNGIEEICFDPEGSKAEWKETPCILSVNVKNKQDDDLNCEPLSPHNITPEPVSKLPAEPVSGDPAPGDLDAGDPASGVLASGDSTSGDPTSSEPSSSDAASGDATSG

SEQ ID NO: 104907 - protein, 169 aa, Artificial Sequence
  derived and/or modified sequence
MDSLEEPQKKVFKARKTMRVSDRQQLEAVYKVKEELLKTDVKLLNGNHENGDLDPTSPLENMDYIKDKEEVNGIEEICFDPEGSKAEWKETPCILSVNVKNKQDDDLNCEPLSPHNITPEPVSKLPAEPVSGDPAPGDLDAGDPASGVLASGDSTSGDPTSSEPSSSDA

SEQ ID NO: 104908 - protein, 132 aa, Artificial Sequence
  derived and/or modified sequence
MDSLEEPQKKVFKARKTMRVSDRQQLEAVYKVKEELLKTDVKLLNGNHENGDLDPTSPLENMDYIKDKEEVNGIEEICFDPEGSKAEWKETPCILSVNVKNKQDDDLNCEPLSPHNITPEPVSKLPAEPVSG

SEQ ID NO: 104909 - protein, 59 aa, Artificial Sequence
  derived and/or modified sequence
MDSLEEPQKKVFKARKTMRVSDRQQLEAVYKVKEELLKTDVKLLNGNHENGDLDPTSPL

SEQ ID NO: 104910 - protein, 1105 aa, Artificial Sequence
  derived and/or modified sequence
MDSLEEPQKKVFKARKTMRVSDRQQLEAVYKVKEELLKTDVKLLNGNHENGDLDPTSPLENMDYIKDKEEVNGIEEICFDPEGSKAEWKETPCILSVNVKNKQDDDLNCEPLSPHNITPEPVSKLPAEPVSGDPAPGDLDAGDPASGVLASGDSTSGDPTSSEPSSSDAASGDATSGDAPSGDVSPGDATSGDATADDLSSGDPTSSDPIPGEPVPVEPISGDCAADDIASSEITSVDLASGAPASTDPASDDLASGDLSSSELASDDLATGELASDELTSESTFDRTFEPKSVPVCEPVPEIDNIEPSSNKDDDFLEKNGADEKLEQIQSKDSLDEKNKADNNIDANEETLETDDTTICSDRPPENEKKVEEDIITELALGEDAISSSMEIDQGEKNEDETSADLVETINENVIEDNKSENILENTDSMETDEIIPILEKLAPSEDELTCFSKTSLLPIDETNPDLEEKMESSFGSPSKQESSESLPKEAFLVLSDEEDISGEKDESEVISQNETCSPEVESNEKDNKPEEEEQVIHEDDERPSEKNEFSRRKRSKSEDMDNVQSKRRRYMEEEYEAEFQVKITAKGDINQKLQKVIQWLLEEKLCALQCAVFDKTLAELKTRVEKIECNKRHKTVLTELQAKIARLTKRFEAAKEDLKKRHEHPPNPPVSPGKTVNDVNSNNNMSYRNAGTVRQMLESKRNVSESAPPSFQTPVNTVSSTNLVTPPAVVSSQPKLQTPVTSGSLTATSVLPAPNTATVVATTQVPSGNPQPTISLQPLPVILHVPVAVSSQPQLLQSHPGTLVTNQPSGNVEFISVQSPPTVSGLTKNPVSLPSLPNPTKPNNVPSVPSPSIQRNPTASAAPLGTTLAVQAVPTAHSIVQATRTSLPTVGPSGLYSPSTNRGPIQMKIPISAFSTSSAAEQNSNTTPRIENQTNKTIDASVSKKAADSTSQCGKATGSDSSGVIDLTMDDEESGASQDPKKLNHTPVSTMSSSQPVSRPLQPIQPAPPLQPSGVPTSGPSQTTIHLLPTAPTTVNVTHRPVTQVTTRLPVPRAPANHQVVYTTLPAPPAQAPLRGTVMQAPAVRQVNPQNSKRFFLYMAPRYM

SEQ ID NO: 104911 - DNA, 3318 bp, Artificial Sequence
  derived and/or modified sequence
atggatagcttggaggagccacagaaaaaggtcttcaaggccaggaagactatgcgggtcagcgatcggcaacagttggaagccgtgtacaaggtgaaggaagagttgctgaagaccgacgttaagttgctgaacggaaaccatgaaaacggagacctagaccccacctcacctctggagaacatggattacatcaaagataaagaagaagtgaacggaatcgaggagatctgctttgatcctgagggcagcaaggccgaatggaaagaaactccctgcatcctatctgttaatgttaaaaacaaacaggacgacgacctgaattgtgaacccctgtccccacacaatatcacacctgagcccgtctctaagctgccagccgaacctgtgtcgggagaccctgctcccggggacctcgacgccggcgacccagcatctggagtcctggcgagtggtgacagcacctctggcgacccgacttccagcgagccttccagcagtgatgcagcaagcggagacgctacctctggcgacgccccaagtggggacgtatcgcccggcgatgccacatcaggggatgctactgccgatgacctgagctctggagaccccacttctagtgaccctatcccaggggaaccagtgccagtagagccaattagtggggattgcgcagccgatgacattgcatcttctgagatcacttcagtagacttagcttccggggcacctgcatcaaccgatccagcaagtgacgatctggcgtccggtgatctgtcatcatcagaactggcatcagatgatctggccacgggggagcttgcctccgatgagctaaccagcgagagcaccttcgatagaacgttcgagccgaaatccgttcccgtgtgtgaacccgtacctgaaatcgacaacatagagccatcgtcgaacaaagacgatgatttcctcgaaaaaaatggcgcagatgaaaaactggagcagatccagtctaaagattccctggacgagaagaataaagccgataataacatagacgccaatgaggaaacgctggaaactgatgacaccaccatttgttcagataggcctccagagaatgagaagaaggttgaggaggacatcatcacggaactggccttgggagaagatgccatcagtagctccatggaaatcgatcagggggagaaaaacgaggatgagacaagcgctgatctggtagagactatcaacgagaatgttatcgaggacaacaagtctgagaatatcctggaaaacactgacagtatggaaactgacgagatcatcccaattttagaaaaactcgcaccctccgaggacgagctaacatgtttctccaaaacctctttactgcctatcgatgagaccaatccagacctagaggaaaagatggaaagtagctttggatcaccatctaagcaggagtcttccgagtccctccctaaggaggctttcctggtcctgagcgacgaagaagacatctccggagagaaggatgaaagtgaggtgattagccagaatgaaacatgctctccggaggtcgaatccaacgaaaaagataataagccagaagaggaagagcaggtgattcatgaggacgatgaacggccttcggaaaagaacgagtttagccgtaggaaacgctctaaatctgaagatatggacaatgtgcaatccaagaggagacgttacatggaggaggagtatgaggccgagttccaagtcaagattactgcaaaaggcgatataaatcagaaattacaaaaagtgatccaatggctgctcgaggaaaaactttgcgctcttcagtgtgccgtgttcgataagacactggcagaactcaagacacgggtggagaagatcgagtgcaacaagaggcacaagaccgttcttaccgagttacaggctaagattgctagactaacaaagcgttttgaggctgccaaagaagatttaaagaaaaggcacgaacaccctccgaatccacccgttagtccaggcaagactgtgaacgacgtcaactctaacaataacatgtcctacaggaacgccggtaccgtgaggcaaatgctggagtctaaaagaaatgtgagtgaatccgcccctccttccttccaaacccccgtgaataccgtcagctcaacaaacttggttaccccccccgcggtggtcagcagtcagcctaagcttcagactccagtgacctcgggctccctgactgctacctcagttctgccagcacccaatacagccacagtagtcgccactactcaagtgccgtcgggcaatcctcagcccaccatttctctgcaacccttacccgttatcctgcacgtgcccgtcgctgtcagcagccagcctcaactgctgcagtcacaccctgggaccctcgtgaccaatcagccatcaggaaatgtggagttcatttctgtgcagagtccccctaccgtctcagggctgacaaagaaccctgtgtccctgccatctctgccgaacccgaccaagcctaataacgtaccctccgtgccgagcccatccattcagcggaaccccacggcatccgccgccccactgggcacaacactggcagtgcaggcagtgccgacagcccactccatagtgcaggctacacggacgagcttgcccaccgtagggccgtccgggctgtattcacccagcacgaaccggggccctatccagatgaagatccctatttccgccttcagtacttccagcgctgccgaacaaaatagcaacactaccccgcgaatagagaatcagaccaacaagaccatcgatgcctcggtatccaagaaggctgcggacagcacctctcagtgtggtaaggctaccggaagcgacagtagtggggtgatcgacctgaccatggacgatgaggagtctggcgcgtcccaagacccaaaaaagctgaaccacactcctgtgagtaccatgagttcatcccagccagtttcgagacccctgcaaccgatccagccagcacctcctctgcagccatcaggcgtgcccacttccggtccttcacagacgactatccacctccttcccactgcccccactacggttaatgtgactcatcggcctgtgacccaggtgacaactcggctccccgtacctcgggctcctgctaaccaccaggtggtgtatacgaccctacctgctcctccagcccaagccccactcaggggaactgtcatgcaagccccagcagtgcgccaggttaaccctcagaatagcaagcggttcttcttgtacatggctccacggtatatgtag

SEQ ID NO: 104912 - DNA, 3318 bp, Artificial Sequence
  derived and/or modified sequence
atggacagcctggaggagccccagaagaaggtgttcaaggccaggaagaccatgagggtgtctgaccggcagcagctggaggccgtgtacaaggtgaaggaggagctgctgaagacagatgtgaagctgctgaatggaaatcatgaaaatggagacctggaccccaccagccccctggagaacatggactacatcaaggacaaggaggaggtgaatggcatcgaggagatctgctttgatcctgagggcagcaaggccgagtggaaggagaccccctgcatcctgtctgtgaatgtgaagaacaagcaggatgatgacctgaactgtgagcccctgagcccccacaacatcaccccagagcctgtgtccaagctgcctgctgagcctgtgtctggggaccctgcccctggggacctggatgctggggaccctgccagcggcgtgctggccagcggggacagcaccagcggggaccccaccagcagcgagcccagcagcagtgatgctgccagcggagatgccaccagcggagatgcccccagcggagatgtgtccccaggagatgccaccagcggagatgccacagcagatgacctgagcagcggggaccccaccagcagtgaccccatccctggagagcctgtgcctgtggagcccatcagcggggactgtgccgcagatgacatcgccagcagcgagatcacctctgtggacctggccagcggggccccagccagcacagatcctgccagtgatgacctggccagcggggacctgagcagcagcgagctggccagtgatgacctggccactggagagctggccagtgatgagctgaccagcgagagcacctttgacaggacctttgagcccaagtctgtgcctgtgtgtgagcctgtgcctgagattgacaacatcgagcccagcagcaacaaggatgatgacttcctggagaagaatggagcagatgagaagctggagcagatccagagcaaggacagcctggatgagaagaacaaggctgacaacaacattgatgccaatgaggagaccctggagacagatgacaccaccatctgcagcgaccggcccccagaaaatgagaagaaggtggaggaggacatcatcacagagctggccctgggagaagatgccatcagcagctccatggagattgaccagggcgagaagaatgaagatgagaccagcgctgacctggtggagaccatcaatgaaaatgtgattgaggacaacaagtctgagaacatcctggagaacacagacagcatggagacagatgagatcatccccatcctggagaagctggcccccagtgaagatgagctgacctgcttcagcaagaccagcctgctgcccattgatgagaccaacccagacctggaggagaagatggagagcagctttggcagccccagcaagcaggagagcagcgagagcctgcccaaggaggccttcctggtgctgagtgatgaggaggacatcagcggggagaaggatgagagcgaggtgatcagccagaatgagacctgcagccctgaggtggagagcaatgagaaggacaacaagccagaggaggaggagcaggtgattcatgaagatgatgagcggcccagcgagaagaatgagttcagcaggaggaagaggagcaagtctgaggacatggacaacgtgcagagcaagagaagacgctacatggaggaggagtatgaggccgagttccaggtgaagatcacagccaagggggacatcaaccagaagctgcagaaggtgatccagtggctgctggaggagaagctgtgtgccctgcagtgtgctgtgtttgacaagaccctggccgagctgaagaccagggtggagaagattgagtgcaacaagaggcacaagacagtgctgacagagctgcaggccaagatcgcccggctgaccaagagatttgaggccgccaaggaggacctgaagaagagacatgagcacccccccaacccccctgtgtccccaggcaagacagtgaatgatgtgaacagcaacaacaacatgagctacagaaatgccggcaccgtgcggcagatgctggagagcaagagaaatgtgtctgagagcgcccctccttccttccagacccctgtgaacacagtgagcagcaccaacctggtgaccccacctgctgtggtgagcagccagcccaagctgcagacccctgtgaccagcggcagcctgacagccacctctgtgctgcctgcccccaacacagccaccgtggtggccaccacccaggtgcccagcggcaacccccagcccaccatcagcctgcagcccctgcctgtgatcctgcacgtgcctgtggccgtgagcagccagccccagctgctgcagagccaccctggcaccctggtgaccaaccagcccagcggaaatgtggagttcatctctgtgcagagccccccaacagtgtctggcctgaccaagaaccctgtgtccctgcccagcctgcccaaccccaccaagcccaacaacgtgcccagcgtgcccagccccagcatccagaggaaccccacagccagcgctgcccccctgggcaccaccctggccgtgcaggccgtgcccacagcccacagcatcgtgcaggccaccaggaccagcctgcccaccgtgggccccagcggcctgtacagccccagcaccaacagaggccccatccagatgaagatccccatcagcgccttcagcaccagcagcgctgctgagcagaacagcaacaccaccccaagaattgagaaccagaccaacaagaccattgatgcctctgtgtccaagaaggctgctgacagcaccagccagtgtgggaaggccaccggcagtgacagcagtggagtcatcgacctgaccatggatgatgaggagagcggggccagccaggaccccaagaagctgaaccacacccctgtgtccaccatgagcagcagccagcctgtgtcccggcccctgcagcccatccagcctgccccacccctgcagcccagcggcgtgcccaccagcggccccagccagaccaccatccacctgctgcccacagcccccaccaccgtgaatgtgacccacaggcctgtgacccaggtgaccacccggctgcctgtgccccgggccccagccaaccaccaggtggtgtacaccaccctgcctgcccccccagcccaggcccccctgcggggcaccgtgatgcaggccccagctgtgcggcaggtgaacccccagaacagcaagcgcttcttcctgtacatggccccccgctacatgtag

SEQ ID NO: 104913 - DNA, 3318 bp, Artificial Sequence
  derived and/or modified sequence
atggacagcctggaggagccccagaagaaggtgttcaaggcccggaaaaccatgcgcgtatccgacagacagcagctcgaggccgtatataaggtgaaggaggagttactgaagacagacgtcaaactcctcaatggcaaccatgaaaatggtgatctggaccccacaagccccctagaaaacatggattacatcaaagacaaagaggaagtgaacgggattgaagaaatttgttttgatcccgaagggagcaaggccgagtggaaggagacaccgtgtattctctcggtgaatgtgaagaataagcaggacgatgatctcaattgtgagcctctgtctccccacaacattacccctgaacccgtctcaaaattgccggccgaacccgtgagcggcgaccctgcgcccggggatcttgacgcgggcgacccagcctcaggcgtgttggcttccggcgattccaccagcggggaccctacatcaagtgaaccttccagttccgacgccgcatctggagacgcaacctctggcgatgccccttccggagatgtttcgcccggggacgcaacctcaggggacgctactgctgacgatctgtcatccggagatcccacctccagcgatccgattcctggggaacctgtaccagtggaacctatttccggcgattgtgcagcggacgatattgcctcgtctgaaataaccagcgtcgatttggctagtggtgccccagcttctactgatccagcatctgacgacctggcttcaggcgatctgtcctccagcgagttggcttctgacgacctggctacgggggagttggccagcgacgaactgactagtgagagtacgttcgacagaacctttgaacctaaaagtgtacccgtctgcgagcccgtgccagagatcgacaatatcgagccaagttcaaataaagacgacgattttctcgaaaagaacggggcagacgaaaaattggagcagatccagtcaaaagactccctagacgagaagaacaaagccgataacaatatcgacgccaatgaggagacgctggaaacagacgacaccaccatttgttccgaccggcccccggaaaatgagaaaaaagtggaggaagatattattactgagctcgctctgggggaagacgccatctcatcatctatggaaatcgaccagggtgaaaagaatgaggacgaaactagtgcagatctcgtggagacaattaatgaaaatgttatcgaagacaacaagtcagagaacattttggaaaatacagacagcatggaaactgacgagatcatacctattctggaaaagttagctcctagtgaggatgagctcacctgcttttctaagacatctcttctccctatagatgagacaaaccctgacctcgaggagaaaatggagagttccttcggctctccaagcaaacaagagagtagcgagagcctccctaaggaggcatttctggtccttagcgacgaagaggatataagcggagaaaaagacgagtctgaggtgattagccagaacgaaacctgctcacctgaagttgagtccaacgagaaggacaataagcccgaagaggaggagcaggtgattcatgaggacgacgagcgcccttcagaaaagaatgagttttcccgcaggaagcgctcaaagagcgaggacatggacaatgtccagtcaaagcgccgacggtatatggaggaggagtacgaagccgaatttcaagtgaaaatcacagcaaagggcgatatcaatcagaaattgcagaaagttatccagtggctgcttgaagaaaaactttgtgccctgcagtgcgctgtgttcgataaaaccctggctgagctgaagacaagagttgaaaaaattgaatgcaacaaacgccataaaactgtactgacggaattgcaggcaaaaatcgctaggctgaccaagaggttcgaggccgccaaggaggatctcaaaaagcgccacgaacaccctccgaatcctcccgttagtcctgggaaaactgtcaacgacgtgaatagtaacaacaacatgtcttatcggaatgccggaaccgtgcggcagatgttagagtccaagcggaatgtgagcgaaagtgccccaccctcttttcagacgccagttaatacagtcagctctactaatcttgtgacaccaccggctgtggtctcctcccaacccaagcttcagacgcccgtgacgagcggatcactgacagccacgagcgtcctgccagcacccaacaccgccactgtggtcgccaccacccaagtgccatcaggcaatccccagccaactatcagcctgcagccattgccagttatacttcacgtgcccgttgccgtgagcagccagccccaattactgcaatctcatccaggaacattggtgacaaaccagccctctgggaacgtcgagttcatttctgtgcagtctccccccacagtgtcgggactgactaaaaatccagtcagtctgccttccttgcccaaccccactaaacctaacaatgtgccctccgttcctagccctagcatccagaggaatcctaccgcttctgctgctccgctgggtactacattggccgtgcaagccgttcctactgcccattctattgtgcaggctacccgcacctcattacccaccgtcgggccgtctggactctacagtcctagtactaatcgtggtcccatacagatgaaaattccgatatctgcattttcaacttcctccgctgccgagcagaacagcaatactactccacgcatcgaaaatcagactaacaaaaccattgatgcatcagtctctaaaaaagctgccgatagcactagccagtgcggcaaagcgacaggctctgattcctcaggagtcattgacttaacaatggatgacgaagaatcaggagcgtcacaggatccaaagaagctgaatcacaccccagtgtccaccatgagttcctctcagcccgttagtcggcctctgcagccgatccagcccgctcctccgctccaacccagcggcgttccaacatccggtccttctcagaccacaattcatctgctgccaacggcacctacgactgtgaacgtcacgcatcggcctgtgacacaggtgaccacaagactgccagtgcctcgggccccagctaatcatcaggtggtttatacaactctgccagctcctcccgcccaggcccctctgaggggtacagttatgcaggcccctgcggtgaggcaggtcaacccccagaatagcaaacgtttttttctgtacatggcccccagatacatgtag

SEQ ID NO: 104914 - DNA, 3318 bp, Artificial Sequence
  derived and/or modified sequence
atggacagcctggaggaaccacagaaaaaggtgttcaaagcaagaaaaactatgagggtatccgaccgccaacagttggaagctgtctataaagtaaaagaagagctgctaaagaccgacgtcaagcttctgaatgggaatcacgaaaatggcgatcttgacccaacgtccccactcgagaacatggactacattaaggataaggaagaggttaatggcattgaagagatttgtttcgatcctgaagggtccaaagcggaatggaaggagacaccctgcatactttccgtcaacgtcaagaataagcaggatgatgatcttaactgtgagcctctgtcccctcataatatcacaccagaacctgtttccaaacttccggctgaacccgtgagcggcgacccagcgccaggcgacctggacgcaggcgaccccgcatctggggttctcgcaagtggagacagtacctccggggacccaacttcttcggaaccaagctctagtgatgcggcatcaggcgatgccacctccggcgacgcaccttctggagatgtaagcccaggcgacgccacctccggggacgcaacagcagacgatctctccagtggtgaccctacgtcatcggatcccattccaggcgagccagtccccgtggaaccgatcagtggtgattgtgctgccgatgacatcgcctcctccgagattacatcagttgatctggcttcaggtgcaccagcaagcaccgacccggcttctgacgatttagcatccggtgacctgtcctccagtgaattggccagcgacgatttggccactggagagctcgcttccgatgagctcacttccgaatccacttttgaccgcacatttgagcctaagagtgtgccggtgtgtgagccagttccagagattgataatatcgagccatcgtctaacaaagacgacgatttcctggagaaaaacggagcagacgagaaacttgagcagatccaaagcaaagattctctggacgagaagaataaggctgataacaacattgacgctaatgaagagacgctggagaccgacgacactaccatttgttccgacaggcccccagagaatgagaaaaaggtagaagaggacatcattaccgagctggctttaggtgaggatgccatttcatcctcgatggaaattgaccagggagaaaaaaacgaggacgagaccagcgccgacctggtcgagacgatcaatgaaaatgttatagaagataacaagagcgagaacatactcgagaataccgatagtatggagaccgatgagataatacctatcttagagaagttggcccctagtgaggatgagcttacctgtttctctaaaacgtctttgctacctatcgatgagaccaacccagatctggaagaaaagatggagagtagctttgggagtccctctaagcaagaaagcagcgagtctctgcctaaagaagcttttctggtgctttcagatgaagaggacatttccggcgagaaagacgagtccgaagtcatcagtcaaaatgaaacctgcagtcctgaggtggagtcaaatgaaaaggacaataaaccggaagaggaggaacaagttatacatgaagacgatgaaaggccgtccgagaagaatgaattctctcgtagaaaacgatccaagtccgaggatatggacaacgtgcaatctaagcggaggagatacatggaggaagagtacgaagctgagttccaggtgaaaatcaccgcaaagggcgacatcaaccagaagttacagaaagttatccagtggttgctggaggaaaagttatgtgccctgcaatgtgcagtgttcgacaagaccctggctgaactgaagacacgggtcgagaaaatcgaatgtaataagagacataaaaccgtcctgaccgaacttcaggctaagatcgcgcgactgactaagcggttcgaagctgctaaggaagacttgaagaagcgccacgagcatccgcctaacccgcctgttagtccagggaagacagtcaatgacgtgaattcaaataacaatatgtcctatagaaatgctggcacagtccgccagatgctcgagtctaaacggaacgtgtcagagagcgcaccccctagcttccaaacacctgttaacacagtaagctcaacaaatctcgttactcctccggcagtcgtgtcctcacaaccgaagctccagacgcctgtgactagcgggagtctgactgctacttccgtcctcccggcaccgaatacagcgactgtggttgctacaactcaagtgccatctgggaatcctcagccaactatctcactgcagcctctccctgttatcctccatgtgcctgtggccgtatcatcgcagcctcagttgctccagagccatccaggcactctggtgacaaaccagccaagcggcaatgtggaatttatcagcgtccagtcccctccaaccgtatcggggctgaccaaaaacccagtgagtctgcctagcttacctaatcccaccaaacccaacaacgtgccttccgtcccttcccctagtatccagaggaacccgaccgcttctgctgccccacttgggaccactctcgcagtacaagccgtgcccactgctcactctatcgtccaggcaacccggacctctcttcccacggtggggccttcaggcctgtattctccgagtacaaacaggggacctatccagatgaaaattccaatatctgcctttagtacttcttcagccgcagagcagaatagtaatactaccccacggattgaaaaccagacaaacaagacaatcgacgccagcgtgtccaaaaaggccgctgacagtacaagccagtgtggcaaggccacaggttcggattcctccggagtgattgatctgaccatggacgacgaagagtctggagcatctcaggacccaaagaagttaaatcacactcctgtcagtacaatgagttcaagccagcctgtgtcccggccactccagcccattcagccagcgccaccacttcaaccaagtggagtcccaacgagtggaccttcacagaccacaatccaccttctccccacggcccctaccacagttaacgtaacccataggcctgtcacccaagtaacgactcggctacccgtcccacgagcccctgctaaccatcaagttgtctacacaactctaccggctcccccagcccaagcgcctctgcggggtactgttatgcaggctcctgcggttagacaagttaatccgcagaacagcaagcggtttttcctctacatggctcctcggtacatgtag

SEQ ID NO: 104915 - DNA, 3318 bp, Artificial Sequence
  derived and/or modified sequence
atggacagcctggaggagccccagaagaaggtgttcaaggccagaaagaccatgagagtgagcgacagacagcagctggaggccgtgtacaaggtgaaggaggagctgctgaagaccgacgtgaagctgctgaacggcaaccacgagaacggcgacctggaccccaccagccccctggagaacatggactacatcaaggacaaggaggaggtgaacggcatcgaggagatctgcttcgaccccgagggcagcaaggccgagtggaaggagaccccctgcatcctgagcgtgaacgtgaagaacaagcaggacgacgacctgaactgcgagcccctgagcccccacaacatcacccccgagcccgtgagcaagctgcccgccgagcccgtgagcggcgaccccgcccccggcgacctggacgccggcgaccccgccagcggcgtgctggccagcggcgacagcaccagcggcgaccccaccagcagcgagcccagcagcagcgacgccgccagcggcgacgccaccagcggcgacgcccccagcggcgacgtgagccccggcgacgccaccagcggcgacgccaccgccgacgacctgagcagcggcgaccccaccagcagcgaccccatccccggcgagcccgtgcccgtggagcccatcagcggcgactgcgccgccgacgacatcgccagcagcgagatcaccagcgtggacctggccagcggcgcccccgccagcaccgaccccgccagcgacgacctggccagcggcgacctgagcagcagcgagctggccagcgacgacctggccaccggcgagctggccagcgacgagctgaccagcgagagcaccttcgacagaaccttcgagcccaagagcgtgcccgtgtgcgagcccgtgcccgagatcgacaacatcgagcccagcagcaacaaggacgacgacttcctggagaagaacggcgccgacgagaagctggagcagatccagagcaaggacagcctggacgagaagaacaaggccgacaacaacatcgacgccaacgaggagaccctggagaccgacgacaccaccatctgcagcgacagaccccccgagaacgagaagaaggtggaggaggacatcatcaccgagctggccctgggcgaggacgccatcagcagcagcatggagatcgaccagggcgagaagaacgaggacgagaccagcgccgacctggtggagaccatcaacgagaacgtgatcgaggacaacaagagcgagaacatcctggagaacaccgacagcatggagaccgacgagatcatccccatcctggagaagctggcccccagcgaggacgagctgacctgcttcagcaagaccagcctgctgcccatcgacgagaccaaccccgacctggaggagaagatggagagcagcttcggcagccccagcaagcaggagagcagcgagagcctgcccaaggaggccttcctggtgctgagcgacgaggaggacatcagcggcgagaaggacgagagcgaggtgatcagccagaacgagacctgcagccccgaggtggagagcaacgagaaggacaacaagcccgaggaggaggagcaggtgatccacgaggacgacgagagacccagcgagaagaacgagttcagcagaagaaagagaagcaagagcgaggacatggacaacgtgcagagcaagagaagaagatacatggaggaggagtacgaggccgagttccaggtgaagatcaccgccaagggcgacatcaaccagaagctgcagaaggtgatccagtggctgctggaggagaagctgtgcgccctgcagtgcgccgtgttcgacaagaccctggccgagctgaagaccagagtggagaagatcgagtgcaacaagagacacaagaccgtgctgaccgagctgcaggccaagatcgccagactgaccaagagattcgaggccgccaaggaggacctgaagaagagacacgagcacccccccaacccccccgtgagccccggcaagaccgtgaacgacgtgaacagcaacaacaacatgagctacagaaacgccggcaccgtgagacagatgctggagagcaagagaaacgtgagcgagagcgccccccccagcttccagacccccgtgaacaccgtgagcagcaccaacctggtgaccccccccgccgtggtgagcagccagcccaagctgcagacccccgtgaccagcggcagcctgaccgccaccagcgtgctgcccgcccccaacaccgccaccgtggtggccaccacccaggtgcccagcggcaacccccagcccaccatcagcctgcagcccctgcccgtgatcctgcacgtgcccgtggccgtgagcagccagccccagctgctgcagagccaccccggcaccctggtgaccaaccagcccagcggcaacgtggagttcatcagcgtgcagagcccccccaccgtgagcggcctgaccaagaaccccgtgagcctgcccagcctgcccaaccccaccaagcccaacaacgtgcccagcgtgcccagccccagcatccagagaaaccccaccgccagcgccgcccccctgggcaccaccctggccgtgcaggccgtgcccaccgcccacagcatcgtgcaggccaccagaaccagcctgcccaccgtgggccccagcggcctgtacagccccagcaccaacagaggccccatccagatgaagatccccatcagcgccttcagcaccagcagcgccgccgagcagaacagcaacaccacccccagaatcgagaaccagaccaacaagaccatcgacgccagcgtgagcaagaaggccgccgacagcaccagccagtgcggcaaggccaccggcagcgacagcagcggcgtgatcgacctgaccatggacgacgaggagagcggcgccagccaggaccccaagaagctgaaccacacccccgtgagcaccatgagcagcagccagcccgtgagcagacccctgcagcccatccagcccgccccccccctgcagcccagcggcgtgcccaccagcggccccagccagaccaccatccacctgctgcccaccgcccccaccaccgtgaacgtgacccacagacccgtgacccaggtgaccaccagactgcccgtgcccagagcccccgccaaccaccaggtggtgtacaccaccctgcccgccccccccgcccaggcccccctgagaggcaccgtgatgcaggcccccgccgtgagacaggtgaacccccagaacagcaagagattcttcctgtacatggcccccagatacatgtag

SEQ ID NO: 104916 - DNA, 4324 bp, Artificial Sequence
  derived and/or modified sequence
ggcggcggcggtggcagcggcggcgcggcgactgaagcgcgcgaaaagctgaggcggcaacgtcggggacggctgcgcgggacggctctgtaggaaggaacttggttccccctccctcagcttccgccccaaaagattcagaatggacagtttagaagaacctcagaaaaaagtctttaaggctcgaaaaacgatgagagtgagtgatcgtcagcaacttgaagcagtgtacaaggtcaaagaagaactgttgaaaactgatgtcaagctgttaaatggcaaccatgaaaatggagatttggacccaacctcacctttggaaaacatggattacattaaagacaaggaagaggtgaatggcattgaagagatttgttttgatcctgaaggaagtaaagcagaatggaaggaaacaccctgtatcctaagtgttaatgtaaaaaacaagcaggatgatgatttaaattgtgaacctttgtctccccataatataactccagaaccagtctctaaactgcctgctgaaccagtttctggtgatccagcccctggtgatctggatgccggagatccagcctccggagtactggcctctggtgattccacctctggtgatcccacctctagcgagccctcctctagtgatgctgcctctggtgatgcaacctctggtgatgccccttctggtgatgtgtcccctggtgatgccacctctggtgatgccactgctgatgatctctcctctggtgatcccacctctagtgatcccatcccaggtgaaccggtccctgttgaacccatttctggtgattgtgccgctgatgatatagcctctagtgaaataacttctgttgatctggcttctggagcaccagcttccactgatccagcctctgatgatctggcctctggtgatctatcctctagtgaactggcctctgatgatctggccactggtgaactggcctctgatgagctgacttctgaatcaacctttgatcgtacctttgaaccaaagtctgtaccagtttgtgaaccagttcctgaaattgacaatatagaaccaagtagcaataaagatgatgattttcttgaaaaaaatggagctgatgaaaaattagagcaaattcagagtaaagactcattggatgagaaaaataaagctgataataatattgatgctaatgaagaaactctagaaacagatgatacaactatttgttcagatcgacctcctgaaaatgaaaagaaggtagaggaagatattatcacagagcttgctcttggagaagatgctatatctagcagtatggaaattgaccaaggtgaaaagaatgaagatgaaacttctgcagatcttgtagaaacgattaatgaaaatgttattgaagataacaaaagtgagaatatcttagaaaatacagactctatggagacagatgaaatcattcctattttggaaaagcttgcaccttctgaggatgaacttacttgcttttctaaaacatctctccttccaatcgatgagacaaatccagatttggaagagaaaatggaaagttcttttggttcaccatctaaacaagaaagtagtgagagtttgccaaaagaagcctttctggtcctctctgatgaagaggatatttcgggtgaaaaagatgagtctgaagttatatcgcaaaatgaaacgtgctctccagaagtagaaagtaatgaaaaggacaacaaacctgaggaagaagagcaagtaatacatgaagatgatgaaagaccttctgagaaaaatgaattttctagacgaaaacgttctaaatcagaagacatggacaatgtacagtctaaacgtcgtcgatatatggaagaagaatatgaggcagaatttcaagtaaagattacagccaaaggagacattaaccagaaacttcaaaaggttatacagtggttgctggaagaaaaattgtgtgcgctgcagtgtgctgtatttgataagactttggcagaattgaaaacacgagtggaaaagattgaatgtaacaagaggcataaaacagttctcactgaactacaggccaagatagccaggttaaccaaacgctttgaagcagccaaagaagatcttaagaaaagacatgaacatccacccaacccaccagtatcaccaggaaaaactgtaaatgatgtcaacagcaataataacatgtcttacagaaatgcaggcacagtgagacagatgctggagtccaaaagaaatgtaagcgagagtgcaccaccatcctttcaaactcctgtgaatacagtatcttcaaccaatcttgtcactcctccagcagttgtcagtagtcaacctaaattgcagactccagtgacttcgggttccctcacagcaacgtcagttcttcctgcacccaatacagctactgtagttgctactactcaggtgcctagtggaaatccccagcctacaatctctttacagcctttgccagtgattttgcatgtacctgttgcagtatcctcccagcctcagcttctacagagccatccagggactttggtgactaatcaaccatctggcaatgttgaattcatttctgtgcaaagcccacctacagtgagtggtcttaccaaaaatccagtatccttgccatccttgccaaatcccactaaaccaaacaacgttccttctgtgcccagtcctagtattcaaaggaaccctactgccagtgctgcaccattgggaacaacacttgctgtgcaggctgttccaacagcacactctattgtacaagccacaaggacttctttacccacagtgggcccatcaggactctatagtccatcaactaatcgaggtcctatacagatgaaaattccaatttctgcatttagtacttcgtctgctgcagaacagaacagcaataccaccccaagaattgaaaaccagacaaacaaaacaatagatgcttctgtcagtaagaaagcagctgatagcacatcacagtgtggaaaagccactggcagtgattcaagtggtgtcattgatctcacaatggatgatgaagagagtggagcttcacaagaccccaaaaaactaaatcacactcctgtatcaaccatgagttcttctcagcctgtgtcacgaccattgcaacccatacaaccagcaccgcctcttcaaccatctggggtgccaacaagtggaccatctcagaccaccatacacttactacctacagctccaactaccgtgaatgtaacacatcgtccagtaactcaggtgaccacaagactccctgtaccaagagctcctgcaaaccaccaggtggtttatacaactcttcctgcaccaccagctcaggctcccttgcgaggaactgttatgcaggctcctgctgttcggcaggtcaatccccaaaatagtaagagatttttcttgtatatggccccaagatacatgtagttctcttcagcatttagttggaatggcatataataatgttaaattttgcaaaaatttcttataatgtcatattaaaagtattgttataagttcaagagatctgtactacaacatagaaactatagtatagttaaaatcaatgtagtatattcttgaaaatagctgatagagcagattttaagtattgtcaccacacacaaaaaaggtaagtatgtgagatcatgcatatgtcagctagatttagccattctgcagtgtatgcatatttcaaacatgttgtataccataaatatatataatttttgtcaattaaaaaatagttttcaaaaaagaaatggcagtataaccaaaactaatctattattatttttcttcccttaggagagttaaacagagaaaattgttgatgtatactagttgatttgtgctctgagtgttgtctttaatttaactttatttatggcctgtattagtatagtacacaatttgatattggtatattctctactctattaagaaacaccttacctagttagagtgggaatggtcaattgtgatttaccccagatgatggaaatcatggtaaaggatagccttcaatgagagtcttaaagatatggaaagtggctgagaaaagaagggaaaatgttaaagaaagcttgtagtttcttgtatatatcatatattagttacatacatatgttacatgcatgttacatatgtagatgacattttaaaattatatattaaccacatgtatataagcagtagtagaatatatcacataaacacaagcttatataaaaggtatatttaaactttaaagtaaagaaaaataataaaatgaactacgtatgaactctt

SEQ ID NO: 104917 - protein, 300 aa, Artificial Sequence
  derived and/or modified sequence
MAEPQAERPRLCVFPDLLRPPSAADIETWCQPYRKIFGEFSSSSFGDFQTVFDQPQEYFMELTFNQAAKGVNKEFTVNIMDTCERCNGKGNEPGTKVQHCHYCGGSGMETINTGPFVMRSTCRRCGGRGSIIISPCVVCRGAGQAKQKKRVMIPVPAGVEDGQTVRMPVGKREIFITFRVQKSPVFRRDGADIHSDLFISIAQALLGGTARAQGLYETINVTIPPGTQTDQKIRMGGKGIPRINSYGYGDHYIHIKIRVPKRLTSRQQSLILSYAEDETDVEGTVNGVTLTSSGKRSTGN

SEQ ID NO: 104918 - DNA, 903 bp, Artificial Sequence
  derived and/or modified sequence
atggccgagccccaggcggagaggcctcggctgtgcgtttttcctgacctgctgcgccctcctagcgcagccgacatagaaacatggtgccaaccgtatcgcaagattttcggggagttttcgagtagctcgttcggtgattttcagacagtctttgatcagccacaggagtattttatggagttgacctttaatcaggctgcaaagggagttaataaggaatttaccgtgaatatcatggatacatgtgagcggtgtaacggcaaaggaaacgaacccggtacaaaagttcaacactgccactattgcggcggttcaggcatggagacaatcaacactgggccttttgtcatgcggtcaacctgccggagatgcggcgggagggggtcaatcattataagtccgtgtgtcgtgtgtcgaggcgccggccaagccaaacagaaaaaaagagtaatgattcccgtgccagctggagtagaggacggccagaccgttcgtatgccggtcggaaagcgtgaaatttttatcacgtttcgcgtccagaaaagcccagttttcagacgcgatggcgcagacatacactctgacctctttattagtatcgctcaggctcttctcggtgggaccgctcgggcacaagggttatatgaaacgattaatgtgactattccacctgggactcagacagaccagaaaattagaatgggaggcaagggaatcccccgaattaactcctatgggtatggcgatcactacatacatatcaagatccgggtccctaaacggctaacaagccgccagcaatcactgatccttagctacgccgaggatgaaactgacgttgagggaactgtaaatggagtgaccttgactagctctgggaagagaagcacaggaaactag

SEQ ID NO: 104919 - DNA, 903 bp, Artificial Sequence
  derived and/or modified sequence
atggccgagccccaggccgagcggccccggctgtgtgtgtttcctgacctgctgcggccccccagcgctgctgacatcgagacctggtgccagccctacaggaagatctttggagagttcagcagcagcagctttggagacttccagacagtgtttgaccagccccaggagtacttcatggagctgaccttcaaccaggccgccaagggcgtgaacaaggagttcaccgtgaacatcatggacacctgtgagcgctgcaatggaaaaggaaatgaacctggcaccaaggtgcagcactgccactactgcggcggcagcggcatggagaccatcaacacaggcccctttgtgatgaggagcacctgcagaagatgtggcggccggggcagcatcatcatcagcccctgtgtggtgtgccgcggggccggccaggccaagcagaagaagagggtgatgatccctgtgcctgctggggtggaggatggccagacagtgaggatgcctgtgggcaagcgggagatcttcatcaccttccgggtgcagaagagccctgtgttcagaagagatggagctgacatccacagcgacctcttcatcagcatcgcccaggccctgctgggcggcacagcccgggcccagggcctgtatgagaccatcaacgtgaccatccccccaggcacccagacagaccagaagatccgcatgggcggcaagggcatcccccgcatcaacagctatggctacggggaccactacatccacatcaagatccgggtgcccaagaggctgaccagccggcagcagagcctcatcctgtcctatgcagaagatgaaacagatgtggagggcaccgtgaatggagtgaccctgaccagcagcggcaagaggagcacaggcaactag

SEQ ID NO: 104920 - DNA, 903 bp, Artificial Sequence
  derived and/or modified sequence
atggccgagccccaggccgagcggccccggctgtgcgtgttccccgacttattgcggcctccctcagccgccgatatcgagacttggtgtcagccttaccgcaaaattttcggagagttttcatccagttcttttggcgatttccagaccgtatttgatcaaccacaggagtatttcatggagttaacctttaatcaagcggccaagggcgtcaataaagagtttacagttaacataatggatacttgcgaaagatgcaacggcaagggaaacgaacctgggacgaaggtgcagcactgtcactactgtggcgggtcaggtatggagaccattaatacgggccctttcgttatgaggagcacttgccgccgatgtggcggccgcggatcgattatcatttcaccatgcgtggtgtgccggggggcaggccaggcgaaacagaagaaacgcgtgatgatccccgtccctgccggcgttgaggacgggcagaccgtacgcatgcccgtcggcaagcgggagattttcatcaccttccgtgtgcagaagagccctgttttccgtcgcgacggagccgatatccattctgacctgtttataagtatcgcccaggccctgctggggggcacagcccgcgcacaaggactttatgagacaattaatgtcacgatccccccagggacgcagactgaccagaaaatcagaatggggggcaagggcataccccgaatcaattcctacggctacggcgatcattatatccacatcaagattcgggtgccaaagaggttgacatctaggcaacagtctttgatcctgtcatacgcagaagacgagacggatgtagaggggactgtcaacggcgtgacattgacaagcagtggcaaaagatccacaggcaattag

SEQ ID NO: 104921 - DNA, 903 bp, Artificial Sequence
  derived and/or modified sequence
atggcagaaccccaggcggaacggcctaggctctgtgtctttcccgacctgctgagacccccttccgctgccgatatcgaaacctggtgtcaaccatacagaaaaatcttcggagaattttcttccagcagtttcggcgatttccaaactgtctttgaccagccacaggaatacttcatggagctgacgtttaatcaagctgccaagggagtcaataaagagttcaccgtgaatatcatggatacctgtgagaggtgcaatggcaagggcaacgaacctggcaccaaggtgcagcactgccactattgtggtgggtccggcatggagaccattaataccggaccattcgtaatgcggagtacatgtaggcgctgcggtggcaggggaagcatcattatctcgccttgtgtcgtatgcaggggtgctggccaggccaaacagaaaaaaagagtcatgattccagtcccagcaggtgtagaagatggccagaccgtccggatgcccgttgggaaaagagaaattttcatcactttccgggtccagaagtctccggttttccgccgagacggcgctgacatacactccgatttatttatatcaatcgctcaggctctcctgggcggaacggccagggcccagggactgtatgaaacaatcaacgttaccatcccccctgggacccaaacagatcagaaaataagaatgggcggtaaggggatacctagaatcaattcatacggatacggcgatcattacatccatatcaagatacgggtgccaaagcggcttacctccagacagcagtccctgatcctgtcttacgcggaggatgaaacagatgtagaaggtacagtgaacggggtcacgctcacaagttccggcaagagatccacaggcaattag

SEQ ID NO: 104922 - DNA, 903 bp, Artificial Sequence
  derived and/or modified sequence
atggccgagccccaggccgagagacccagactgtgcgtgttccccgacctgctgagaccccccagcgccgccgacatcgagacctggtgccagccctacagaaagatcttcggcgagttcagcagcagcagcttcggcgacttccagaccgtgttcgaccagccccaggagtacttcatggagctgaccttcaaccaggccgccaagggcgtgaacaaggagttcaccgtgaacatcatggacacctgcgagagatgcaacggcaagggcaacgagcccggcaccaaggtgcagcactgccactactgcggcggcagcggcatggagaccatcaacaccggccccttcgtgatgagaagcacctgcagaagatgcggcggcagaggcagcatcatcatcagcccctgcgtggtgtgcagaggcgccggccaggccaagcagaagaagagagtgatgatccccgtgcccgccggcgtggaggacggccagaccgtgagaatgcccgtgggcaagagagagatcttcatcaccttcagagtgcagaagagccccgtgttcagaagagacggcgccgacatccacagcgacctgttcatcagcatcgcccaggccctgctgggcggcaccgccagagcccagggcctgtacgagaccatcaacgtgaccatcccccccggcacccagaccgaccagaagatcagaatgggcggcaagggcatccccagaatcaacagctacggctacggcgaccactacatccacatcaagatcagagtgcccaagagactgaccagcagacagcagagcctgatcctgagctacgccgaggacgagaccgacgtggagggcaccgtgaacggcgtgaccctgaccagcagcggcaagagaagcaccggcaactag

SEQ ID NO: 104923 - DNA, 1413 bp, Artificial Sequence
  derived and/or modified sequence
agagtccccgggccaagatggctgcgcggtgctccacacgctggttgctggtggttgtggggaccccgcggctgccggctatatcgggtagaggggcccggccgcccagggagggcgtggtgggggcatggctgagccgcaagctgagcgtccccgcctttgcgtcttccctgacctcttgcggcccccgagcgctgctgacattgagacctggtgtcagccttacaggaagatctttggcgagttctcatcctcttcatttggagatttccagaccgtgtttgatcagcctcaggaatacttcatggagttgacattcaatcaagctgcaaagggggtcaacaaggagttcaccgtgaacatcatggacacgtgtgagcgctgcaacggcaaggggaacgagcccggcaccaaggtgcagcattgccactactgtggcggctccggcatggaaaccatcaacacaggcccttttgtgatgcgttccacgtgtaggagatgtggtggccgcggctccatcatcatatcgccctgtgtggtctgcaggggagcaggacaagccaagcagaaaaagcgagtgatgatccctgtgcctgcaggagtcgaggatggccagaccgtgaggatgcctgtgggaaaaagggaaattttcattacgttcagggtgcagaaaagccctgtgttccggagggacggcgcagacatccactccgacctctttatttctatagctcaggctcttcttgggggtacagccagagcccagggcctgtacgagacgatcaacgtgacgatcccccctgggactcagacagaccagaagattcggatgggtgggaaaggcatcccccggattaacagctacggctacggagaccactacatccacatcaagatacgagttccaaagaggctaacgagccggcagcagagcctgatcctgagctacgccgaggacgagacagatgtggaggggacggtgaacggcgtcaccctcaccagctctggaaaaagatccactggaaactaggccgggaagcagcagcccctccaagggccagggcacctgggagacgggaggattccagaacagcagcactgagctcccacccgcagagcctctggacggccttggcaacagcaaaatcatgggacaacacctctctccacggaaaggtcacagtggacagcccgggcagtaggatgcagccccagaggctggtggcagtttcctgtccattggtaggtgacggcccctggctcaggcagagggagatggttagactcttgcagggctaaaactctaatttggaattgaatattgtggatatcttagttaaaggccatgcttacagcttagaaatgaagccttaagctgcatcaagttacgaagtgattaatttccttctcagc

SEQ ID NO: 104924 - DNA, 1434 bp, Artificial Sequence
  derived and/or modified sequence
agagcgcggcacttccgctggccgctggctcgctggccgctcctggaggcggcggcgggagcgcagggggcgcgcggcccggggactcgcattccccggttccccctccaccccacgcggcctggaccatggacgccaggtgtcttatctgacttggggtgtgctgcaggaaagagtgatgacccgcagctatggggccacagccacatcaccgggtgagcgctttacggactcgcagttcctggtgctaatgaaccgagtgctggcactgattgtggctggcctctcctgtgttctctgcaagcagccccggcatggggcacccatgtaccggtactcctttgccagcctgtccaatgtgcttagcagctggtgccaatacgaagctcttaagttcgtcagcttccccacccaggtgctggccaaggcctctaaggtgatccctgtcatgctgatgggaaagcttgtgtctcggcgcagctacgaacactgggagtacctgacagccaccctcatctccattggggtcagcatgtttctgctatccagcggaccagagccccgcagctccccagccaccacactctcaggcctcatcttactggcaggttatattgcttttgacagcttcacctcaaactggcaggatgccctgtttgcctataagatgtcatcggtgcagatgatgtttggggtcaatttcttctcctgcctcttcacagtgggctcactgctagaacagggggccctactggagggaacccgcttcatggggcgacacagtgagtttgctgcccatgccctgctactctccatctgctccgcatgtggccagctcttcatcttttacaccattgggcagtttggggctgccgtcttcaccatcatcatgaccctccgccaggcctttgccatccttctttcctgccttctctatggccacactgtcactgtggtgggagggctgggggtggctgtggtctttgctgccctcctgctcagagtctacgcgcggggccgtctaaagcaacggggaaagaaggctgtgcctgttgagtctcctgtgcagaaggtttgagggtggaaagggcctgaggggtgaagtgaaataggaccctcccaccatccccttctgctgtaacctctgagggagctggctgaaagggcaaaatgcaggtgttttctcagtatcacagaccagctctgcagcaggggattggggagcccaggaggcagccttcccttttgccttaagtcacccatcttccagtaagcagtttattctgagccccgggggtagacagtcctcagtgaggggttttggggagtttggggtcaagagagcataggtaggttccagttactcttcccacaagttcccttaagtcttgccctagctgtgctctgccaccttccagactcactcccctctgc

SEQ ID NO: 104925 - protein, 299 aa, Artificial Sequence
  derived and/or modified sequence
MTRSYGATATSPGERFTDSQFLVLMNRVLALIVAGLSCVLCKQPRHGAPMYRYSFASLSNVLSSWCQYEALKFVSFPTQVLAKASKVIPVMLMGKLVSRRSYEHWEYLTATLISIGVSMFLLSSGPEPRSSPATTLSGLILLAGYIAFDSFTSNWQDALFAYKMSSVQMMFGVNFFSCLFTVGSLLEQGALLEGTRFMGRHSEFAAHALLLSICSACGQLFIFYTIGQFGAAVFTIIMTLRQAFAILLSCLLYGHTVTVVGGLGVAVVFAALLLRVYARGRLKQRGKKAVPVESPVQKV

SEQ ID NO: 104926 - DNA, 900 bp, Artificial Sequence
  derived and/or modified sequence
atgactagaagctacggagccacagccactagccccggagagcggtttacggattcccagttcctcgtactcatgaacagggttctggcactaatcgtggccggtctgtcatgcgtcttgtgcaagcagcctcgccacggggcaccaatgtacaggtactcctttgctagtctgtccaatgtgctctcttcgtggtgtcagtatgaggccctgaagttcgtgtctttccccacacaggtactggctaaagcctccaaagtcattccagttatgctgatgggcaagcttgtgtctcggcgatcttatgaacattgggagtatctgaccgccaccctgatttctatcggcgtcagtatgtttcttttgagctcgggccctgaaccccgttccagcccagctacgacactgtccggcctgattttgctggcaggatacatcgccttcgattcatttaccagtaactggcaggatgccttgtttgcgtacaagatgagctcagttcaaatgatgtttggagtcaattttttttcttgtctgttcactgtcggtagcctcttggaacagggggccctgttggaaggcacccggttcatgggcagacatagtgagtttgccgcgcacgcattactgttaagcatctgttcagcctgtggccagctcttcatcttttataccattggtcaattcggcgccgccgtcttcactatcatcatgacactccggcaggcatttgctatcctgttgagttgtctgctgtacggccataccgtgaccgtggttggtggattgggcgtggcggtggttttcgccgcccttctgctcagagtctatgcgagaggaaggctcaagcagcgcggcaaaaaagcggtgcctgtggagagcccagtgcagaaagtgtag

SEQ ID NO: 104927 - DNA, 900 bp, Artificial Sequence
  derived and/or modified sequence
atgaccaggagctatggagccacagccaccagccctggagagcgcttcacagacagccagttcctggtgctgatgaacagagtgctggccctgattgtggccggcctgagctgtgtgctgtgcaagcagcccaggcatggagcccccatgtaccgctacagctttgccagcctgagcaatgtgctgagctcctggtgccagtatgaggccctgaagtttgtgtccttccccacccaggtgctggccaaggccagcaaggtgattcctgtgatgctgatgggcaagctggtgtccagaagaagctatgagcactgggagtacctgacagccaccctcatcagcattggagtgtccatgttcctgctgagcagcggccctgagcccaggagcagccctgccaccaccctgagcggcctcatcctgctggccggctacatcgcctttgacagcttcaccagcaactggcaggatgccctgtttgcctacaagatgagctctgtgcagatgatgtttggagtgaacttcttcagctgcctcttcaccgtgggcagcctgctggagcagggcgccctgctggagggcacccgcttcatgggccgccacagcgagtttgctgcccacgccctgctgctgagcatctgcagcgcctgtggccagctgttcatcttctacaccatcggccagtttggagctgctgtgttcaccatcatcatgaccctgcggcaggcctttgccatcctgctgagctgcctgctgtatggccacacagtgacagtggtgggcggcctgggcgtggccgtggtgtttgctgccctgctgctgcgggtgtatgcccggggccgcctgaagcagaggggcaagaaggctgtgcctgtggagagccctgtgcagaaggtgtag

SEQ ID NO: 104928 - DNA, 900 bp, Artificial Sequence
  derived and/or modified sequence
atgacccggagctacggcgccaccgccaccagccccggcgagcggttcaccgactcccaatttctggtcctaatgaatcgggtcctggccttgatagttgcaggactctcctgtgtgctatgtaagcaaccacgccacggcgccccgatgtaccggtattcattcgctagcttatccaacgtgctttcttcctggtgtcaatacgaagccctgaagttcgtgtctttcccaacacaagttctggcgaaagccagcaaggtgattcctgttatgctcatggggaagctggtatcacggcggtcctacgagcactgggagtacttgacagctacactgatttctatcggagtgagcatgtttctgctgtcctctggacctgagccccgatcaagccctgctactacactctcaggtttaattttgctggccggttacattgcctttgatagttttacatctaactggcaggatgcattgtttgcatacaaaatgtcctcagttcagatgatgtttggcgtgaacttcttcagctgtctcttcactgtggggtcactcctggaacagggagctttgctcgaaggcactagatttatgggaaggcacagtgagttcgctgcccacgcccttctcctgagcatctgttccgcctgcggtcagctgtttatcttctatactataggccaatttggcgccgctgtgttcaccattataatgacactgcggcaggccttcgccattcttctcagctgcttattgtacgggcacaccgtcacagttgtggggggactcggcgtggctgttgtatttgccgccctactactgcgggtgtacgccagaggaaggttgaaacagagggggaagaaggctgtaccggttgagtcccccgtgcagaaagtatag

SEQ ID NO: 104929 - DNA, 900 bp, Artificial Sequence
  derived and/or modified sequence
atgacgcggtcctatggggcaacagcgaccagcccaggtgaaagattcaccgactctcagttcctggtgctaatgaaccgcgtgctcgcactgatcgtcgccggattatcatgcgtattatgcaaacaacccagacacggggcacccatgtaccgctattcctttgctagcttatcaaacgtactgtcctcctggtgtcagtatgaggcactgaaattcgtctcctttccaactcaggttcttgcaaaggcgagcaaggtgatccctgtcatgctgatgggcaagttggttagtaggagatcttacgagcattgggagtaccttaccgccaccctcatctcaattggtgtgtccatgttcttgctctcctctggccctgaacctcgtagctctccagcaactacgctcagcggcctgatactgctagcgggatatatcgcgttcgactcttttacatctaactggcaggacgcactttttgcctataaaatgtcaagcgtccaaatgatgttcggcgtgaattttttttcatgtctgttcactgtgggttcgctgctggaacagggggctcttctggaaggaacccgcttcatgggaaggcattcggaatttgccgctcacgccttgctcctcagcatctgtagcgcttgcggccaactcttcatcttttatacaataggccagtttggagccgctgtgtttacaattataatgacactccgacaggcatttgccatcttgttgtcatgcctcctgtacggccatacggtgaccgtggttgggggattaggcgttgctgtggtgtttgcggctttgttactgcgcgtttacgccagaggcaggctcaaacaaagaggcaagaaggccgtacctgtagagtctcccgtgcaaaaggtttag

SEQ ID NO: 104930 - DNA, 900 bp, Artificial Sequence
  derived and/or modified sequence
atgaccagaagctacggcgccaccgccaccagccccggcgagagattcaccgacagccagttcctggtgctgatgaacagagtgctggccctgatcgtggccggcctgagctgcgtgctgtgcaagcagcccagacacggcgcccccatgtacagatacagcttcgccagcctgagcaacgtgctgagcagctggtgccagtacgaggccctgaagttcgtgagcttccccacccaggtgctggccaaggccagcaaggtgatccccgtgatgctgatgggcaagctggtgagcagaagaagctacgagcactgggagtacctgaccgccaccctgatcagcatcggcgtgagcatgttcctgctgagcagcggccccgagcccagaagcagccccgccaccaccctgagcggcctgatcctgctggccggctacatcgccttcgacagcttcaccagcaactggcaggacgccctgttcgcctacaagatgagcagcgtgcagatgatgttcggcgtgaacttcttcagctgcctgttcaccgtgggcagcctgctggagcagggcgccctgctggagggcaccagattcatgggcagacacagcgagttcgccgcccacgccctgctgctgagcatctgcagcgcctgcggccagctgttcatcttctacaccatcggccagttcggcgccgccgtgttcaccatcatcatgaccctgagacaggccttcgccatcctgctgagctgcctgctgtacggccacaccgtgaccgtggtgggcggcctgggcgtggccgtggtgttcgccgccctgctgctgagagtgtacgccagaggcagactgaagcagagaggcaagaaggccgtgcccgtggagagccccgtgcagaaggtgtag

SEQ ID NO: 104931 - DNA, 618 bp, Artificial Sequence
  derived and/or modified sequence
atgttgaaacggaagcccagcaatgtgtcagagaaggagaagcaccagaagccaaaaaaaggggatattattgatatcatttgcaaaaccccgatgggcatgtggacaggtatgctgaataacaaggtggggaatttcaagtttatttacgtcgacgtcattagcgaagaagaagccgcccccaagaagatcaaagctaaccggagaagtaatagcaagaagagtaaaaccctgcaggagttcctggagcgcattcacttgcaagagtatacatcaacactgctccttaatggttatgaaaccctggaggacctcaaagacattaaggaaagtcaccttattgagctgaacatagagaatcctgatgaccggcggcggttgttaagcgcggcagaaaatttcctggaagaagagattattcaggaacaggagaatgagccagagcctctgtcattgagcagcgacatcagcttgaacaagtcacagctcgatgactgcccacgcgactccggatgttatattagctcaggtaacagcgacaatggtaaggaagacctggaaagcgagaacctgtctgacatggtgcataaaattataatcaccgaaccctccgattag

SEQ ID NO: 104932 - DNA, 618 bp, Artificial Sequence
  derived and/or modified sequence
atgctgaagaggaagcccagcaatgtgtctgagaaggagaagcaccagaagcccaagaagggggacatcatcgacatcatctgcaagacccccatgggcatgtggacaggcatgctgaacaacaaggtgggcaacttcaagttcatctacgtggatgtgatcagcgaggaggaggccgcccccaagaagatcaaggccaacagaagaagcaacagcaagaagagcaagaccctgcaggagttcctggagcgcatccacctgcaggagtacaccagcaccctgctgctgaatggctatgagaccctggaggacctgaaggacatcaaggagagccacctgattgagctgaacattgaaaatccagatgacagaagaaggctgctgtctgctgctgagaacttcctggaggaggagatcatccaggagcaggagaatgaacctgagcccctgagcctgagcagtgacatcagcctgaacaagagccagctggatgactgcccccgggacagcggctgctacatcagcagcggcaacagcgacaatggcaaggaggacctggagagcgagaacctgagtgacatggtgcacaagatcatcatcacagagcccagcgactag

SEQ ID NO: 104933 - DNA, 618 bp, Artificial Sequence
  derived and/or modified sequence
atgctgaagcggaagcccagcaacgtgagcgagaaggagaagcaccagaaacccaaaaagggggacatcattgatattatctgcaagaccccaatgggcatgtggaccgggatgcttaataacaaggtaggcaatttcaagtttatatacgtggacgtgatttcagaggaagaagctgcgcctaaaaagatcaaggcgaacaggagatccaatagtaagaaatccaagaccttgcaggagtttctcgaacggattcacctgcaggagtacacttcgaccctgctcctgaacggttatgagactttggaagacctcaaagatatcaaagagtcacatctcattgagcttaacattgagaatcctgacgaccgaagacggctcctctctgccgccgaaaatttcctcgaagaggaaatcattcaggaacaggagaacgaaccagaaccactgtctctctccagcgatatctctctgaataaaagccagctggacgattgcccaagggatagcggatgttacatttccagtggtaactctgacaacggtaaagaggaccttgaatcagaaaatctgagcgatatggtccacaaaataatcataacggaaccaagcgactag

SEQ ID NO: 104934 - DNA, 618 bp, Artificial Sequence
  derived and/or modified sequence
atgttaaagagaaaaccttctaatgtgagcgagaaagagaaacaccagaagcccaagaaaggagatattatcgacattatttgcaagacccccatgggaatgtggaccgggatgctgaataataaagtggggaacttcaagttcatctatgtggacgttatctccgaagaggaggcggctcccaaaaagattaaggctaatagacggtctaacagcaagaagagcaaaaccctgcaggaattcctggagcggattcaccttcaagaatacaccagtactctccttctgaacggctacgaaactctggaagatttgaaagatattaaagaaagtcatctcatcgaactgaacattgagaacccagatgatcgcaggagactcctttccgccgcagagaatttcctcgaggaagagatcatccaggagcaggaaaatgagcctgagccactcagtctcagctctgacatctccctgaacaaatcccaactcgatgactgtcccagggacagtgggtgctacattagcagtgggaattcagataacggaaaagaagacctggaatccgagaatttatccgatatggtccacaaaattatcattactgagccctcagattag

SEQ ID NO: 104935 - DNA, 1382 bp, Artificial Sequence
  derived and/or modified sequence
tagacagcacactgctgactgttttcagttgtttctgtaacagcagaaagtgcactcactaggagtagtcagaattcaaaatgctcaagagaaagccatccaatgtttcagagaaggagaaacatcaaaaaccaaagaaaggagacatcatagacattatttgcaaaacaccaatggggatgtggacaggaatgttgaacaataaagtgggaaacttcaaattcatttatgtggatgtcatctcagaagaggaagcagcccccaagaaaataaaggcaaaccgaaggagtaacagcaaaaaatccaagactctgcaggagttcctagagaggattcatctgcaggaatacacctcaacacttttgctcaatggttatgagactctagaagatttaaaagatataaaagagagtcacctcattgaattaaatattgaaaacccagatgacagaagaaggttactatcagctgctgaaaacttccttgaagaagaaattattcaagagcaagaaaatgaacctgagcccctatccttgagctcagacatctccttaaataagtcacagttagatgactgcccaagggactctggttgctatatctcatcaggaaattcagataatggcaaagaggatctggagtctgaaaatctgtctgacatggtacataagattattatcacagagccaagtgactgaacacgcattcccaactatatatctacagatgcattccattttaactcttcttgagctaaaacgtcaaataggagaggaagataagataaatatttgtaaataaaacctaaagtttaaatgttttaatctgaataattgtacataaaattttgtatctctaacattccaaattactgtcaataaaatatatatttattattttaaatgctatgtgttaatatttcacttgcttgtattagaaaggcaaaatgtaagactttggtatgtgtgacatatgctttatttggctttattttacaagtacagtatctgcaaaaaacaaagtaaccttttttcatacctgccagttttgaatttatatatgttattgaacaaatagtaatagaggattcgctgttgaaacaagttgtccaagcaatgttatattcatttttatacttattgggaaagtgtgagttaatattggacacattttatcctgatccacagtggagttttagtaattatattttgttgatttcttcattttgttttctggtataaaagtagagataatgtgtagtcacttctgatttagtgaaaccaattgtaataattgtggaaatgttttgtctttaagtgtaaatattttaaaatttgacataccctaatgttaataataaaaagaactatttgcatattgca

SEQ ID NO: 104936 - DNA, 618 bp, Artificial Sequence
  derived and/or modified sequence
atgctgaagagaaagcccagcaacgtgagcgagaaggagaagcaccagaagcccaagaagggcgacatcatcgacatcatctgcaagacccccatgggcatgtggaccggcatgctgaacaacaaggtgggcaacttcaagttcatctacgtggacgtgatcagcgaggaggaggccgcccccaagaagatcaaggccaacagaagaagcaacagcaagaagagcaagaccctgcaggagttcctggagagaatccacctgcaggagtacaccagcaccctgctgctgaacggctacgagaccctggaggacctgaaggacatcaaggagagccacctgatcgagctgaacatcgagaaccccgacgacagaagaagactgctgagcgccgccgagaacttcctggaggaggagatcatccaggagcaggagaacgagcccgagcccctgagcctgagcagcgacatcagcctgaacaagagccagctggacgactgccccagagacagcggctgctacatcagcagcggcaacagcgacaacggcaaggaggacctggagagcgagaacctgagcgacatggtgcacaagatcatcatcaccgagcccagcgactag

SEQ ID NO: 104937 - protein, 103 aa, Artificial Sequence
  derived and/or modified sequence
MALSTIVSQRKQIKRKAPRGFLKRVFKRKKPQLRLEKSGDLLVRFHPFSGWEWGTGEVHLNCLLFVHRLAEESRTNACASKCRVINKEHVLAAAKVILKKSRG

SEQ ID NO: 104938 - DNA, 312 bp, Artificial Sequence
  derived and/or modified sequence
atggcattatcgacaattgtcagccaaagaaagcagataaaacgaaaggccccacgtggattcctgaagcgggtttttaaaagaaaaaagcctcagctgcgcctggagaagagtggggacctgctcgtcaggttccacccctttagcggatgggagtggggcacaggtgaagtgcatctgaattgcctcctgtttgtgcaccgcttggcagaggagagccggactaacgcctgcgcctctaagtgcagagtgattaacaaagaacacgtcctcgctgccgctaaggttatcctgaagaaatctcgtggctag

SEQ ID NO: 104939 - DNA, 312 bp, Artificial Sequence
  derived and/or modified sequence
atggccctgagcaccatcgtgtcccagaggaagcagatcaagaggaaggccccccggggcttcctgaagagggtcttcaagaggaagaagccccagctgcggctggagaagagcggggacctgctggtgcgcttccaccccttcagcggctgggagtggggcactggagaggtgcacctgaactgcctgctgtttgtgcaccggctggccgaggagagcaggaccaatgcctgtgccagcaaatgtagagtcatcaacaaggagcacgtgctggccgccgccaaggtgatcctgaagaagagccggggctag

SEQ ID NO: 104940 - DNA, 312 bp, Artificial Sequence
  derived and/or modified sequence
atggccctgagcaccatcgtgagccagcggaagcagatcaagcggaaggctccgcggggcttcctgaagcgggtcttcaaaaggaaaaaacctcagctgaggctggagaaatctggcgatctgctcgttcggtttcaccctttcagtggatgggagtgggggacaggcgaggtgcatttgaattgcctgctgttcgtgcaccgcctcgccgaggagtcgcggacaaatgcctgcgccagcaagtgcagagtgatcaataaggagcatgtacttgcagcagcaaaagtcattctaaaaaaaagcagaggttag

SEQ ID NO: 104941 - DNA, 312 bp, Artificial Sequence
  derived and/or modified sequence
atggccctatccacgatcgtgtcccaacggaagcagatcaaaaggaaagcacctagaggatttttgaaaagagtgttcaagcgcaaaaaaccccagctgaggctcgagaaaagcggggatctgttggtgagattccacccattcagtggctgggagtggggaactggcgaggtgcaccttaattgtcttctctttgttcatcgcctggccgaagagtcacgaaccaacgcatgcgctagcaaatgtagagtgatcaataaagaacacgtgttggctgccgcaaaagtcattctgaaaaaatcaagaggctag

SEQ ID NO: 104942 - DNA, 528 bp, Artificial Sequence
  derived and/or modified sequence
atacggaccggattgttttcgctggcccagtgtccccggagcttgtgtgcgatacagagagcacctcggaagctgaggcagctggtacttgacagagaggatggcgctgtcgaccatagtctcccagaggaagcagataaagcggaaggctccccgtggctttctaaagcgagtcttcaagcgaaagaagcctcaacttcgtctggagaaaagtggtgacttattggtgagattccatcccttctcgggctgggaatggggcacgggagaggtccatctgaactgtttactgtttgttcatcgattagcagaagagtccaggacaaacgcttgtgcgagtaaatgtagagtcattaacaaggagcatgtactggccgcagcaaaggtaattctaaagaagagcagaggttagaagtcaaagaacatattcttgaaagttatgatgcattcttttgggtggtaacagatcataaagacattttttacacatcagttaatatgggattattaaatattggctataagtga

SEQ ID NO: 104943 - DNA, 312 bp, Artificial Sequence
  derived and/or modified sequence
atggccctgagcaccatcgtgagccagagaaagcagatcaagagaaaggcccccagaggcttcctgaagagagtgttcaagagaaagaagccccagctgagactggagaagagcggcgacctgctggtgagattccaccccttcagcggctgggagtggggcaccggcgaggtgcacctgaactgcctgctgttcgtgcacagactggccgaggagagcagaaccaacgcctgcgccagcaagtgcagagtgatcaacaaggagcacgtgctggccgccgccaaggtgatcctgaagaagagcagaggctag

SEQ ID NO: 104944 - protein, 67 aa, Artificial Sequence
  derived and/or modified sequence
MALSTIVSQRKQIKRKAPRGFLKRVFKRKKPQLRLEKSGDLLKSPGQTLVRVNVESLTRSMYWPQQR

SEQ ID NO: 104945 - DNA, 204 bp, Artificial Sequence
  derived and/or modified sequence
atggccctcagtactatagtgagtcagaggaaacagatcaaaaggaaagctccgaggggctttctgaaacgggtgtttaaacgcaaaaaacctcaattgaggctggaaaagtcaggagatctcctcaagtcaccaggacaaactttggtccgcgtgaacgttgagtcgttgacaagaagtatgtactggcctcagcagagatag

SEQ ID NO: 104946 - DNA, 204 bp, Artificial Sequence
  derived and/or modified sequence
atggccctgagcaccatcgtgtcccagaggaagcagatcaagaggaaggccccccggggcttcctgaagagggtcttcaagaggaagaagccccagctgcggctggagaagagcggggacctgctgaagagccctggccagaccctggtgcgggtgaatgtggagagcctgaccaggtccatgtactggccccagcagaggtag

SEQ ID NO: 104947 - DNA, 204 bp, Artificial Sequence
  derived and/or modified sequence
atggccctgagcaccatcgtgagccagcggaagcagatcaagcggaaggccccaagagggttcctgaagcgggtgttcaaacggaaaaagcctcagctccgactcgaaaagtcaggcgaccttctgaagtcacccggacagactcttgtgcgggtcaacgtggagtccctgacccgctctatgtactggccacaacagcgttag

SEQ ID NO: 104948 - DNA, 204 bp, Artificial Sequence
  derived and/or modified sequence
atggcactgtctacaatcgtgagccaaaggaagcagataaagcggaaggctcctcgcggtttccttaagagagtcttcaagcgcaagaagcctcagctgaggttggagaagagcggggacctgctgaaaagtccgggtcagactcttgttagggttaatgtcgaaagcctcactaggtcaatgtactggcctcaacagcgctag

SEQ ID NO: 104949 - DNA, 443 bp, Artificial Sequence
  derived and/or modified sequence
atacggaccggattgttttcgctggcccagtgtccccggagcttgtgtgcgatacagagagcacctcggaagctgaggcagctggtacttgacagagaggatggcgctgtcgaccatagtctcccagaggaagcagataaagcggaaggctccccgtggctttctaaagcgagtcttcaagcgaaagaagcctcaacttcgtctggagaaaagtggtgacttattgaagagtccaggacaaacgcttgtgcgagtaaatgtagagtcattaacaaggagcatgtactggccgcagcaaaggtaattctaaagaagagcagaggttagaagtcaaagaacatattcttgaaagttatgatgcattcttttgggtggtaacagatcataaagacattttttacacatcagttaatatgggattattaaatattggctataagtga

SEQ ID NO: 104950 - DNA, 204 bp, Artificial Sequence
  derived and/or modified sequence
atggccctgagcaccatcgtgagccagagaaagcagatcaagagaaaggcccccagaggcttcctgaagagagtgttcaagagaaagaagccccagctgagactggagaagagcggcgacctgctgaagagccccggccagaccctggtgagagtgaacgtggagagcctgaccagaagcatgtactggccccagcagagatag

SEQ ID NO: 104951 - protein, 242 aa, Artificial Sequence
  derived and/or modified sequence
MAGRTVRAETRSRAKDDIKKVMATIEKVRRWEKRWVTVGDTSLRIFKWVPVVDPQEEERRRAGGGAERSRGRERRGRGASPRGGGPLILLDLNDENSNQSFHSEGSLQKGTEPSPGGTPQPSRPVSPAGPPEGVPEEAQPPRLGQERDPGGITAGSTDEPPMLTKEEPVPELLEAEDSGVRMTRRALHEKGLKTEPLRRLLPRRGLRTNVRPSSMAVPDTRAPGGGSKAPRAPRTIPQGKGR

SEQ ID NO: 104952 - DNA, 729 bp, Artificial Sequence
  derived and/or modified sequence
atggcagggcggacggtaagagccgaaacacgcagccgcgctaaggatgatattaaaaaggtcatggccactatcgagaaagtacgcagatgggaaaagcggtgggtgacagtaggagacacttctctgcgcatctttaaatgggtgccagtcgtagaccctcaggaggaggaaaggcggagagcaggcgggggggctgaaagatccagaggtcgggagcgcaggggtcgcggagcctcaccaagaggagggggccccctcatccttctcgacctaaacgacgaaaacagtaatcagagcttccattcagaaggctcactccaaaagggaacggagccctcaccggggggtacaccccagcccagccgcccagttagcccggctgggccccccgagggagtgcctgaggaagctcagcctcctaggctgggccaagaacgcgaccccggtgggatcactgctgggagcactgatgagcccccaatgctgacaaaggaagaaccggttcccgagcttctggaggccgaggactcaggggtgaggatgacacgtagggccctccacgagaagggcctgaaaaccgagccattgcggcgcctactcccgaggagaggcctcaggaccaatgtccggcccagcagtatggctgtccccgacactcgcgccccaggtggcggatcaaaggcccctagggccccgaggaccattccccagggtaagggaagatag

SEQ ID NO: 104953 - DNA, 729 bp, Artificial Sequence
  derived and/or modified sequence
atggccggccgcacagtgcgggcagagaccaggagccgggccaaggatgacatcaagaaggtgatggccaccatcgagaaggtgcggcgctgggagaagcgctgggtgacagtgggggacaccagcctgcgcatcttcaagtgggtgcctgtggtggacccccaggaggaggagcggcggcgggccggcggcggcgctgagaggagccggggccgggagcggcggggccgcggggccagcccccggggcggcggccccctcatcctgctggacctgaatgatgagaacagcaaccagagcttccacagcgagggcagcctgcagaagggcacagagcccagccctgggggcaccccccagcccagcaggcctgtgtccccagctggccccccagagggcgtgcctgaggaggcccagcccccccggctgggccaggagcgggaccccggcggcatcacagctggcagcacagatgagccccccatgctgaccaaggaggagcctgtgcctgagctgctggaggccgaggacagcggcgtgaggatgacccggcgggccctgcacgagaagggcctgaagacagagcccctgcggcggctgctgccccggcggggcctgcggaccaacgtgcggcccagctccatggctgtgcctgacacccgggcccctgggggcggcagcaaggccccccgggcccccaggaccatcccccagggcaagggccgctag

SEQ ID NO: 104954 - DNA, 729 bp, Artificial Sequence
  derived and/or modified sequence
atggccggccggaccgtgcgggccgagacccggagccgggccaaggatgatattaaaaaagttatggcaacaatcgagaaggttaggcgctgggaaaagcgctgggtgacagtgggcgatactagcctgagaatctttaaatgggttcccgttgtggatccccaggaggaagagcgccggcgggctgggggcggtgcggagagaagccgtggccgggaaaggaggggacggggcgcttcacccagggggggcgggcccttaatactcctagacctgaatgatgagaactccaaccaaagctttcattctgaaggatcacttcagaaggggaccgaacccagccctggggggacgcctcaaccctcccggccagtgagtcctgctggaccaccagaaggtgtgcctgaggaagcccagcctcccaggctcggtcaggagagagatccagggggcatcactgctggttctaccgacgagcctcccatgctaacgaaagaggagccagttcccgagcttctggaggccgaggacagcggggtgcgcatgacacggagagctctccacgaaaaaggcctgaagaccgaacctctgaggagattactccctagaagaggtctacgtaccaatgtccgccccagctccatggcggtgcccgacactagggcacctgggggagggtctaaagccccgcgggctccaaggactattcctcagggcaaggggagatag

SEQ ID NO: 104955 - DNA, 729 bp, Artificial Sequence
  derived and/or modified sequence
atggccggacgtacggtcagagcagagacaaggagtagagccaaagacgacattaaaaaggttatggccacgatcgaaaaagtacgcagatgggagaagcgctgggttactgttggcgacactagcctgaggatctttaagtgggtgcccgtggtggacccgcaggaggaagagcggagaagagccggagggggagcggagcgttctagaggaagagaacgcaggggcaggggagcttccccccgaggaggaggaccccttatcttgctggatctgaacgacgagaactccaatcaatcctttcactcggagggcagtctccaaaagggaacggagccttctcctgggggtacacctcagcccagtcgtccggtgtcacccgcagggccacctgaaggggtgcctgaagaggctcagcccccaagacttggtcaggagcgcgacccaggcggtattacggcgggatcaactgatgagcctcctatgctcacaaaggaagagccagtcccagaacttctagaggctgaggactctggtgtgcgaatgactaggagagccttgcacgaaaaagggctaaagactgaacccctgagaagactccttccacggcgaggcctccgaaccaacgttcgcccatcaagcatggcggtcccggatactcgcgcaccaggcggaggtagcaaagccccacgggctccaaggactataccacaggggaagggacgttag

SEQ ID NO: 104956 - DNA, 1983 bp, Artificial Sequence
  derived and/or modified sequence
tccgtccccaactcgcgcgtccgtccccaactcccgctctcggcggcgggcagggggcgctgagcgtccaggcgctccaagggggcgggcccgggtcggggcggggccggccgggcttccaggcctgggctctggccgcccgcgccaccgggccgctccggggacaggccggggcggggcgcggcggcaggaaacggggcggggacttgcggaggcgttggggacgagagagggcgcggccaactccaggggggacggcaggccgagagcgcggcgcccgggcctggcgcggagcctgagcccgccggacgggaggcggccccgccgcgggctcggccccggccccagccccgccagcatggccggccggactgtacgggccgagacccggagccgggccaaggatgacatcaagaaggtgatggcgaccatcgagaaggtccggagatgggagaagcgatgggtgactgtgggcgacacttcccttcgtatcttcaagtgggtgccagtggtggatccccaggaggaggagcgaaggcgggcaggtggcggggcagagagatcccgtggccgggaacgtcggggcaggggcgccagtccccgagggggtggccctctcatcctgctggatcttaatgatgagaacagcaaccagagtttccattcggaaggttccctgcaaaagggcacagagcccagtcctgggggcaccccccagcccagccgccctgtgtcacctgccggacccccagaaggggtccctgaggaggctcagcccccacggctgggccaagagagagatcccgggggcataactgctggcagcaccgacgaacccccaatgctgaccaaggaggagcctgttccagaactgctggaagctgaggattcgggagtgagaatgacgaggagagcccttcacgagaaggggctgaagacagagcccctcaggaggctcctgcccaggaggggcctccggacaaatgtccggcccagttccatggcggtgccggacaccagagctcccgggggaggcagcaaggccccgagggcacccagaacaatcccccagggtaaggggaggtgagtgggctccccaagcaagccaagacccctaaagcctcccttggctgccccaagatccagccactacctgtgccccgagggcggaaagagcttcccagctcacccaccgcggtaacatcggagggcgagcggccccacacctgcccgaacctaaggccacagcacccatctggctcgccactggcgcccgaatgcatgggaagggcttagggcagaactcggaccacatccagtgcctgaggccgccttgctagaggcctaggggaggggtgcactgggctgcctcgcccacctcctcacgcacccatgcggccaccctcccagcggtctgagtgtgccatgcgaggcgcctgccaccccgggagaggcgccgagtcccgagtcctgccggcactgagcctccgggtccacagcgggcaagggccgtggcggggacaagcgcaggggacccgccggcctcccgccttctgcagcaccacgagatgcccacgtggcacctggacgtccatgcatatgttgaggcccgtgcacgcgcagagaccccagcgcagaagccgccccgcacgccagggcttatgtatgccagcgctgggagacctccagcgcccgaggacatacggcaagtggttccaccagggtgtcagcctagcaggccaacctgggaacccatgtggacaagcggcctttcagcccaggcgcccgcctcgggtggaggcgtggagacttctggcgcagccctgagctggtggcctaacctacctggaaaatcctagcccgagaagcagcgcgagtgagccttttgggtggttccaaggcccttcaccaagctctcacttcctgacttcaccgttgggtctgttgtactaggaaataataacgcctcccatttatcaaggg

SEQ ID NO: 104957 - DNA, 729 bp, Artificial Sequence
  derived and/or modified sequence
atggccggcagaaccgtgagagccgagaccagaagcagagccaaggacgacatcaagaaggtgatggccaccatcgagaaggtgagaagatgggagaagagatgggtgaccgtgggcgacaccagcctgagaatcttcaagtgggtgcccgtggtggacccccaggaggaggagagaagaagagccggcggcggcgccgagagaagcagaggcagagagagaagaggcagaggcgccagccccagaggcggcggccccctgatcctgctggacctgaacgacgagaacagcaaccagagcttccacagcgagggcagcctgcagaagggcaccgagcccagccccggcggcaccccccagcccagcagacccgtgagccccgccggcccccccgagggcgtgcccgaggaggcccagccccccagactgggccaggagagagaccccggcggcatcaccgccggcagcaccgacgagccccccatgctgaccaaggaggagcccgtgcccgagctgctggaggccgaggacagcggcgtgagaatgaccagaagagccctgcacgagaagggcctgaagaccgagcccctgagaagactgctgcccagaagaggcctgagaaccaacgtgagacccagcagcatggccgtgcccgacaccagagcccccggcggcggcagcaaggcccccagagcccccagaaccatcccccagggcaagggcagatag

SEQ ID NO: 104958 - protein, 975 aa, Artificial Sequence
  derived and/or modified sequence
MVEGRVSEFLKKLGFSGGGRQYQALEKDEEEALIDEQSELKAIEKEKKVTALPPKEACKCQKEDLARAFCVDLHTGLSEFSVTQRRLAHGWNEFVADNSEPVWKKYLDQFKNPLILLLLGSALVSVLTKEYEDAVSIATAVLVVVTVAFIQEYRSEKSLEELTKMVPPECNCLREGKLQHLLARELVPGDVVSLSIGDRIPADIRLTEVTDLLVDESSFTGEAEPCSKTDSPLTGGGDLTTLSNIVFMGTLVQYGRGQGVVIGTGESSQFGEVFKMMQAEETPKTPLQKSMDRLGKQLTLFSFGIIGLIMLIGWSQGKQLLSMFTIGVSLAVAAIPEGLPIVVMVTLVLGVLRMAKKRVIVKKLPIVETLGCCSVLCSDKTGTLTANEMTVTQLVTSDGLRAEVSGVGYDGQGTVCLLPSKEVIKEFSNVSVGKLVEAGCVANNAVIRKNAVMGQPTEGALMALAMKMDLSDIKNSYIRKKEIPFSSEQKWMAVKCSLKTEDQEDIYFMKGALEEVIRYCTMYNNGGIPLPLTPQQRSFCLQEEKRMGSLGLRVLALASGPELGRLTFLGLVGIIDPPRVGVKEAVQVLSESGVSVKMITGDALETALAIGRNIGLCNGKLQAMSGEEVDSVEKGELADRVGKVSVFFRTSPKHKLKIIKALQESGAIVAMTGDGVNDAVALKSADIGIAMGQTGTDVSKEAANMILVDDDFSAIMNAVEEGKGIFYNIKNFVRFQLSTSISALSLITLSTVFNLPSPLNAMQILWINIIMDGPPAQRSSQKTEVCCTAVRLGVEGRGESTWAGRAGLGVEPVDKDAFRQPPRSVRDTILSRALILKILMSAAIIISGTLFIFWKEMPEDRASTPRTTTMTFTCFVFFDLFNALTCRSQTKLIFEIGFLRNHMFLYSVLGSILGQLAVIYIPPLQRVFQTENLGALDLLFLTGLASSVFILSELLKLCEKYCCSPKRVQMHPEDV

SEQ ID NO: 104959 - DNA, 2928 bp, Artificial Sequence
  derived and/or modified sequence
atggttgaggggagggtgagtgaattcctaaagaagctgggcttttccggaggaggaagacagtaccaggctttagaaaaggacgaagaggaagctcttattgacgagcagagtgagctcaaagccattgagaaggagaagaaagtcaccgccttacctcccaaggaggcgtgcaagtgtcagaaggaggatctggctcgcgccttttgcgtggacctgcacaccggcctctcagagttttccgtcacccagcgacgtttggcccacggatggaacgagtttgtcgctgataatagtgaaccggtatggaaaaagtatctcgatcaattcaagaatccactcatcctgctcctcctcggctctgcccttgtctccgtgctcaccaaagagtatgaggatgccgtttccatcgcgactgcagtgctggtggtggtcacggtggcctttatccaagaataccggtcagaaaagagtctggaagagttaaccaagatggtgcctcccgagtgcaattgcctgcgggagggtaagttacagcacctgctggcaagagaattagtcccgggagacgtggtgagcctctccataggagacaggatcccggcagacatccgcttgaccgaggttacagaccttctcgtcgacgaatcctctttcaccggggaggcggagccctgctcgaaaactgactccccactaacaggggggggtgaccttacaaccctgagtaacattgtcttcatgggcacgctggtccagtacggtagaggccagggggttgtgatcggaaccggagaatcctcccagtttggggaggttttcaaaatgatgcaagcggaggagacaccgaagactcctctgcaaaagtctatggatagactgggcaagcagctgacgctgttcagttttggcatcattggccttataatgctgattggctggtctcaaggaaaacaactgttgagtatgttcacgatcggcgtgtctctcgcagtggctgcgatccccgaagggctgcccatcgtggtgatggtgacattggtgttaggagtgctgaggatggccaaaaagcgtgttatagtgaaaaagctcccaattgtggagactcttggttgttgcagcgtgctctgctctgataagacaggcactcttacagccaatgaaatgacagtgacacaactggtcacatctgacggcctgcgggctgaagtgtccggggtaggttatgacggccagggtacggtgtgtctgctgccaagtaaggaagtgatcaaagaattcagcaatgtgtcggtgggaaagcttgttgaagccgggtgcgtcgccaataatgctgtgatccgcaaaaacgccgtaatggggcagcccactgagggtgctctaatggctctggctatgaagatggatctgtctgacatcaagaactcctatatacgaaagaaggagatcccattctcatctgaacagaagtggatggcggtcaagtgttcactgaaaaccgaggatcaggaggacatctattttatgaagggggccctggaggaggtaataagatattgtactatgtacaacaatgggggcatacctctgcctttgacacctcagcagagatcattctgcctgcaggaggaaaagaggatgggaagcttgggcttgagggtgttggcattagctagcggtccagaacttggacgcctcacttttctggggctggtcgggatcatcgatcccccgagagtgggcgtaaaagaggcggtacaggttctgtcagagagcggggtctccgtgaaaatgatcactggtgacgcgttggagaccgccctcgcaattggccgaaacataggattgtgcaacggaaagttacaggccatgagtggagaggaggttgactctgtggaaaagggagagctcgcagaccgtgtgggaaaagtgtctgtattcttccgtacctcccctaagcataagctgaagatcattaaggccttgcaggagtccggagctatcgttgccatgaccggcgacggagtgaatgatgccgtggcacttaagtcagccgacatcggaatcgccatgggacagacaggcacagacgtgtccaaggaagccgccaatatgattctggtagatgatgatttctcagcgatcatgaatgccgtggaagagggtaagggcatcttctacaatattaaaaactttgtaagatttcagctctccacatccatttcagctctcagcctgataacattaagcaccgttttcaatctgcccagtcctctcaacgcaatgcagatcctgtggatcaatattatcatggatgggccgcccgcacaacgctcgtcgcagaaaactgaggtgtgctgtacggccgttagacttggagtggaggggaggggggaatccacttgggctggacgggcaggtctgggtgttgaacccgtggataaagacgcatttcgccagcccccccggagcgtcagagacaccatcttgtccagagcactgatcttgaaaatcctgatgagcgctgcaattatcatatctgggacactgtttattttttggaaggaaatgcccgaagacagggcttccactccacgaactacgaccatgacctttacatgtttcgtcttttttgacctcttcaatgcattgacatgcaggagccagaccaagcttatttttgaaattgggttcttgaggaatcatatgttcctatattctgtcctggggtcaattctgggacagttggccgttatctacatccctcccctgcagagagtcttccaaaccgagaatctgggcgccctggatcttcttttcctgacaggcctagctagtagtgtctttatattgagcgagttacttaagttatgcgagaaatattgctgctcacctaagcgggtgcagatgcaccctgaggatgtatag

SEQ ID NO: 104960 - DNA, 2928 bp, Artificial Sequence
  derived and/or modified sequence
atggtggagggccgggtgtctgagttcctgaagaagctgggcttcagcggcggcggccggcagtaccaggccctggagaaggatgaggaggaggccctgattgatgagcagagcgagctgaaggccatcgagaaggagaagaaggtgacagccctgccccccaaggaggcctgcaagtgccagaaggaggacctggcccgggccttctgtgtggacctgcacacaggcctgtctgagttctctgtgacccagaggcggctggcccacggctggaatgaatttgtggccgacaacagcgagcctgtgtggaagaagtacctggaccagttcaagaaccccctcatcctgctgctgctgggcagcgccctggtgtctgtgctgaccaaggagtatgaagatgctgtgtccatcgccacagctgtgctggtggtggtgacagtggccttcatccaggagtacagaagtgagaagagcctggaggagctgaccaagatggtgcccccagagtgcaactgcctgcgggagggcaagctgcagcacctgctggcccgggagctggtgcctggagatgtggtgtccctgagcatcggggaccgcatcccagctgacatccggctgacagaggtgacagacctgctggtggatgagagcagcttcaccggggaggccgagccctgcagcaagacagacagccccctgaccggcggcggggacctgaccaccctgagcaacatcgtgttcatgggcaccctggtgcagtatggccggggccagggcgtggtgattggcaccggggagagcagccagtttggagaggtgttcaagatgatgcaggccgaggagacccccaagacccccctgcagaagtccatggaccggctgggcaagcagctgaccctcttctcctttggcatcatcggcctcatcatgctgattggctggagccagggcaagcagctgctgtccatgttcaccatcggcgtgtccctggccgtggccgccatccctgagggcctgcccatcgtggtgatggtgaccctggtgctgggcgtgctgaggatggccaagaagagggtcatcgtgaagaagctgcccatcgtggagaccctgggctgctgcagcgtgctgtgcagcgacaagacaggcaccctgacagccaatgagatgacagtgacccagctggtgaccagtgatggcctgcgggcagaggtgtctggagtgggctatgatggccagggcaccgtgtgcctgctgcccagcaaggaggtgatcaaggagttcagcaatgtgtctgtgggcaagctggtggaggccggctgtgtggccaacaatgctgtgatcaggaagaatgctgtgatgggccagcccacagaaggagccctgatggccctggccatgaagatggacctgagtgacatcaagaacagctacatcaggaagaaggagatccccttcagcagcgagcagaagtggatggctgtgaagtgcagcctgaagacagaggaccaggaggacatctacttcatgaagggggccctggaggaggtgatccgctactgcaccatgtacaacaatggaggcatccccctgcccctgaccccccagcagaggagcttctgcctgcaggaggagaagaggatgggcagcctgggcctgcgggtgctggccctggccagcggccctgagctgggccgcctgaccttcctgggcctggtgggcatcattgatcctccccgggtgggcgtgaaggaggccgtgcaggtgctgtctgagagcggcgtgtctgtgaagatgatcactggagatgccctggagacagccctggccatcggcaggaacatcggcctgtgcaatggcaagctgcaggccatgtctggagaggaggtggacagcgtggagaagggggagctggccgacagagtgggcaaggtgtctgtgttcttccgcaccagccccaagcacaagctgaagatcatcaaggccctgcaggagagcggggccatcgtggccatgactggagatggagtgaatgatgctgtggccctgaagtctgctgacattggaattgccatgggccagacaggaacagatgtgtccaaggaggccgccaacatgatcctggtggatgatgacttcagcgccatcatgaatgctgtggaggagggcaagggcatcttctacaacatcaagaactttgtgcgcttccagctgagcaccagcatcagcgccctgagcctcatcaccctgagcacagtgttcaacctgcccagccccctgaatgccatgcagatcctgtggatcaacatcatcatggatggccccccagcccagaggagcagccagaagacagaggtgtgctgcacagctgtgcggctgggcgtggagggccgcggggagagcacctgggccggccgggccggcctgggcgtggagcctgtggacaaggatgccttccggcagcccccaagatctgtgcgggacaccatcctgagccgggccctgatcctgaagatcctgatgtctgctgccatcatcatcagcggcaccctcttcatcttctggaaggagatgccagaagatcgggccagcacccccaggaccaccaccatgaccttcacctgctttgtgttctttgacctcttcaatgccctgacctgccgcagccagaccaagctgatctttgagatcggcttcctgaggaaccacatgttcctgtacagcgtgctgggcagcatcctgggccagctggccgtcatctacatcccccccctgcagagggtcttccagacagagaacctgggcgccctggacctgctcttcctgaccggcctggccagctctgtgttcatcctgtctgagctgctgaagctgtgtgagaagtactgctgcagccccaagagggtgcagatgcacccagaagatgtgtag

SEQ ID NO: 104961 - DNA, 2928 bp, Artificial Sequence
  derived and/or modified sequence
atggtggagggccgggtgagcgagttcctgaagaagctgggcttcagcggagggggacggcagtatcaggccctcgaaaaggatgaggaagaggcactcatagacgaacagtccgagctaaaggcaatagaaaaagagaagaaggtgactgcactcccacccaaggaagcgtgtaaatgccagaaggaggacctcgctcgtgctttctgcgtggacctccataccggcctgagtgagttctccgttacacagcggaggttggcccacggctggaacgagtttgtcgcagacaatagcgagccggtgtggaagaaatatcttgatcagtttaagaaccctctcattctgctgctcctgggcagcgccctggtgtctgtcctcaccaaggagtatgaagatgcagtctccattgctacagccgtgctcgtggtggtgaccgtagcctttatacaagaatatcgttcagaaaagtcactggaggaattgaccaagatggtcccccccgaatgcaactgtctgcgggagggaaagttgcaacacctactggcacgcgaactcgtccctggtgacgtagtttctctctccattggcgatcgcatccctgctgacattcgcctcacagaagttaccgatctccttgtggatgagtcatcttttactggcgaggcagaaccttgctcgaaaacagattcccctcttacaggaggaggcgacctaacgaccctgagcaatattgtctttatgggcacactcgtgcaatacgggagaggccagggtgtggtgatcgggactggtgagagttctcagttcggcgaggtattcaaaatgatgcaagccgaagagacccccaaaaccccacttcagaagtctatggacagactggggaagcagctgacccttttttcatttgggatcattggcctcataatgctgatagggtggtcacagggaaaacagttattatcaatgttcacgattggggtgtccctcgccgtcgccgccatacccgaagggctccccattgttgtcatggtcacacttgtgcttggtgtgctccgcatggcaaagaagcgcgtgatagtgaagaaattgcctatcgtggaaactttgggctgctgttcagtgctgtgctccgataaaaccggcaccctgacagccaatgagatgactgtgacgcaactggttactagcgatggcttgcgcgctgaggtgtccggggtcggctacgatgggcagggaaccgtctgtctgctgcccagtaaggaagtaatcaaggagttctcgaacgtgtccgttggtaaactcgtggaggcgggctgtgtggcaaataatgccgttattcggaagaatgctgtcatggggcagccgactgagggggctctcatggccttggcaatgaagatggacctgagcgatatcaagaatagctacatccgaaaaaaggagatccctttctcaagcgagcaaaaatggatggctgtgaagtgttcactcaaaactgaggaccaagaggacatatattttatgaagggggccttggaagaggttattaggtactgcacaatgtataataacggtggtataccccttcctcttacccctcaacagaggtctttctgccttcaggaggagaagcgcatgggttcactcggccttcgagttctggccctagcaagcggaccggagctcggtcgactgaccttcttgggtctggtaggcatcatcgatccgcctagagtgggagtgaaagaggcagttcaagtcttgtcagagagtggcgtatccgttaaaatgattactggcgacgcactggagaccgcactcgctatcggccggaatatcggactttgcaatggcaaactgcaagcaatgtccggggaagaagtagatagtgtggagaagggagagctcgcagacagggtgggaaaggtgtcggtgttttttcgaacaagccccaagcataagctcaagatcattaaggcactgcaagaaagcggcgctatcgtggctatgaccggggacggtgtgaatgatgccgtagccctgaaatcagcagatatcgggatcgctatgggccagacgggaacagacgtgtctaaggaagccgccaacatgatactggtggacgatgatttttcagccatcatgaatgcagttgaagaaggaaaaggtatattctataacattaagaacttcgtccggttccagctgtccaccagcattagtgctttgtcattgataaccctgtcaactgtgttcaacttgcccagcccattgaatgccatgcaaatcttgtggattaacattatcatggacggacctccagcgcagcgtagctcgcaaaagacagaggtatgttgcaccgctgttcggctgggggtcgaggggcgtggggaatctacatgggcgggtcgcgccgggctgggggtggaacccgtcgacaaggatgcctttcggcagccacccagaagtgtgcgtgacacaattttaagccgggctctaatcctcaagatccttatgtctgccgctattattatcagcggaacactgttcatattctggaaggagatgccagaggaccgcgcctccaccccgcggacaacgaccatgactttcacatgctttgtgttttttgacttgtttaacgcactcacttgtcggtctcagacaaaactgatcttcgaaattggcttcttgcggaaccatatgttcctatacagcgtgttaggcagcattttgggacaactggcagttatttacatccctccactgcagcgggtgttccagactgagaatttgggtgctcttgacctgctgtttctgaccggattggccagctccgtattcatattatcggagcttctcaaactctgcgaaaaatactgttgtagccccaagagagttcaaatgcatccggaggacgtgtag

SEQ ID NO: 104962 - DNA, 2928 bp, Artificial Sequence
  derived and/or modified sequence
atggttgaaggaagggtatctgagttccttaagaagttagggtttagcggcggtggtagacagtaccaagctctggaaaaggacgaagaggaagctctaatcgatgagcagtccgaattaaaagctattgagaaagagaagaaggtcactgccctccctcctaaagaggcatgtaagtgccagaaggaggacctggccagagccttctgcgtggacctgcacactggcttgtctgagttcagtgttacacagcgtcgactggcccacggctggaatgagttcgtagccgacaattctgagccagtctggaaaaaatacctggaccagttcaagaacccgctgatactgctactcctgggaagtgccttggtttcggtcctcaccaaggaatatgaagatgccgtgagcattgcaacagcggtcctcgtcgttgtgacagtcgcatttatccaggaatacaggtccgagaagtcccttgaagagctgactaagatggtccctccagaatgcaattgtctgcgggagggcaagctgcagcatctgcttgcccgtgaactcgtgccgggagacgtggtgagtctgtcaatcggcgatcgcatcccggctgacatccggctgacagaggtaacagacctgcttgtggacgaaagctctttcacaggggaggccgagccctgcagcaagacagactccccgctcaccggaggaggcgacttgaccacactgagcaacatcgtatttatgggaaccctggtacagtacggcagggggcaaggggtggtcattggcacaggcgagagctcacaattcggggaagtctttaaaatgatgcaggctgaggaaactccaaaaacacccctgcagaagagcatggatagactggggaagcagttgacgctcttttccttcgggatcatcggtctgatcatgcttattggctggtcacaggggaaacaactcctcagtatgttcaccataggagtctcactggcagtagccgcaattccagaggggctccccatcgtggtcatggtcacactggtcctgggagtgttacgcatggccaagaaacgagtcattgtgaaaaagttaccgattgtggagactctgggatgctgttctgtgctttgttctgacaaaacaggcaccctcacggctaatgaaatgactgtgacacaattggtgacgagcgacggtttacgagcagaggttagtggggtgggctatgatggccaagggactgtgtgtctactgccaagcaaggaagtaataaaagaattttctaacgtgagcgtggggaaactggtggaggccggatgcgtggctaacaacgccgtgatacggaaaaacgctgtgatgggccagccaacagagggagccctgatggccctggctatgaagatggatctgagtgatattaagaatagctacatcaggaaaaaggagattccattctcttcagagcagaagtggatggccgtgaagtgttcgctgaagacagaagatcaagaggatatatacttcatgaaaggtgctcttgaggaagtgatcaggtactgcaccatgtacaacaatgggggaattccactgccacttaccccacaacagaggtctttctgtttacaggaagagaagcggatgggatcgctggggctacgggttctcgccctcgcatctgggccagagctcggccgattaactttcttgggactggttggcatcatcgatcctcccagggtcggtgtcaaagaggccgtgcaagtgttatcggagtctggcgtttctgttaaaatgattaccggagatgcactcgaaaccgctttagccataggtcgaaatattggattatgcaatggaaaacttcaggccatgtctggagaagaagtggactctgtggagaagggtgagttagccgacagggtggggaaagtgtcagttttcttccgtacgagtccaaaacacaagcttaaaatcataaaggcacttcaggaaagtggcgcaattgtggccatgacaggggatggagtgaacgacgctgtggcgctgaagtctgccgacattgggattgctatgggtcagaccggcacagatgtgtcgaaagaagcagctaacatgatcctggtggacgatgatttctccgcaattatgaatgctgtcgaggaaggaaaaggcattttctataatattaagaactttgtccgctttcaattgtccacaagcatctctgctctgtccctcatcactttatcaaccgtgttcaatctccctagcccgctgaacgccatgcagatcctttggattaacattatcatggatggcccaccagctcagaggtcgagccaaaaaacagaagtttgctgcaccgcggtgagactaggcgtcgaaggcaggggggaatccacctgggctggtcgggcagggctgggagtggaaccggtagataaggacgctttccgtcagccacccaggagcgtgagagatacaatcctgtctagagccttgattcttaaaattctgatgtccgcagctattataatcagcgggactctattcattttttggaaagaaatgccggaggacagagctagcactcctagaacaacgaccatgactttcacgtgctttgttttttttgacctgtttaacgcgcttacctgtagatctcagacaaagctaatctttgaaatcggcttcctgcgtaatcatatgtttctctatagcgttctgggcagtatcctggggcagctcgcggtgatttacattcctccactccagagggtgttccaaacagaaaacctcggcgctttggatttactctttctgaccggccttgccagcagtgtctttattctgtctgaactgctgaaattatgtgagaaatattgttgctcccctaagagggttcagatgcatccggaggacgtttag

SEQ ID NO: 104963 - DNA, 3471 bp, Artificial Sequence
  derived and/or modified sequence
gggtccggcccaggaggcttgggcgcgcgcagccatcccgggcctcgccggggacctagggacgcaggcaacgcctgcgcccgctcaccatggtcgagggacgcgtctccgagttcctgaagaaactcggcttctcgggcgggggccgccagtaccaggcgctggagaaggacgaagaggaagccttgattgatgaacagagtgagctgaaagccatcgagaaagagaagaaggtgacagccctgccccccaaggaagcgtgcaaatgccagaaagaggatttggccagagcgttttgtgtggacttacacactgggctgtcggagttctcggtgacgcagcgccggctggcccatggctggaatgagtttgttgctgacaacagcgaacctgtgtggaagaaatacctggatcagtttaagaaccccctgatcctgctgctgctgggctctgccctggtgagtgtcctcaccaaggagtatgaggacgccgtcagcatcgccacggcagtgcttgtcgtggtcactgtcgccttcatccaggagtacaggtcggagaaatctctggaagagctgaccaagatggttcctccagaatgtaactgcctaagagaaggaaaactccagcacctgcttgctcgagaactggttcctggtgatgtcgtatctctctcgatcggagaccggatccctgcagacatccgactcactgaggtcacggacctcttggtggatgaatccagtttcaccggggaagccgagccatgtagtaaaacagacagccccttgacaggcggtggggacctcaccaccctcagcaacatcgtcttcatggggaccctggtgcagtatgggaggggccagggggtcgtgattggaacaggggaaagctctcagttcggagaagtgtttaagatgatgcaggctgaagagacacctaaaactcctttgcagaaaagcatggacaggctaggaaagcaactgacactcttctcctttggcataatcggtctcatcatgctcattggctggtcgcaagggaaacaactcctgagtatgttcacgatcggggtcagcctggctgtggcggccattccagagggtctgcccatcgtcgtcatggtgacgctggtcctgggagtgctgcggatggccaagaagcgggtcatcgtgaagaagttacccatcgtggagactttaggttgctgcagcgttctctgttctgacaagacggggactctgactgccaatgaaatgacagtgacccagcttgtaacgtcagatgggcttcgtgccgaggtcagcggagttgggtatgacggtcaagggactgtgtgtcttctaccatccaaggaagtcattaaggaattttccaatgtctcagtgggaaagttagtggaggcgggctgtgttgccaacaatgcggtcatcagaaagaacgccgtgatggggcagcccaccgagggtgcattgatggccctggcgatgaagatggacttaagtgatattaaaaattcatatataagaaaaaaagagattccattcagttcagagcagaagtggatggcggtgaaatgcagtctgaagactgaggatcaggaagacatttacttcatgaaaggggccttggaagaggtgatccgctactgcaccatgtacaacaacgggggcatccccctgccgctgacgccccagcagaggtcattctgcctgcaggaagagaagaggatggggtcgctcggtttgcgggtgctggccctggcttctgggcccgagctggggcggctgacgtttctcggtcttgtgggcatcattgaccccccgagagttggcgtgaaggaagcagtccaggttctctccgagtctggtgtgtctgtgaagatgataacgggggatgccctggagacggccttggccataggaagaaacatcggcctgtgcaacgggaagctgcaagccatgtccggggaggaggtggacagcgtggagaagggcgagctggccgaccgcgtggggaaggtgtccgtgttcttcaggaccagcccaaagcacaagctcaaaatcatcaaggctctgcaggagtcaggggcgatcgtggccatgactggggatggggtgaacgacgcagtggccctgaagtctgcagacattgggatcgccatggggcagacagggacggacgtcagcaaagaggccgccaacatgatcctggtggatgatgacttctcagccatcatgaatgcagtggaggaaggcaagggtattttttacaacatcaaaaactttgtccgattccagctgagcacgagcatctccgccctgagtctcatcactctgtccaccgtgttcaacctgcccagccccctcaacgccatgcagatcctatggatcaacatcatcatggatgggccaccggcgcagaggagttcccagaaaactgaagtgtgttgcactgcagtgagactgggagtagaaggcagaggagaaagtacctgggccggcagagctggcttgggggtagagcccgttgacaaagacgccttcaggcagccaccacggagtgtgcgggacaccatcctcagcagagccctcatcctgaagatcctcatgtccgcggccatcatcatcagcgggaccctctttatcttctggaaggagatgcctgaagacagagcaagcactccccgcaccacgacgatgacgttcacttgttttgtgtttttcgatctcttcaacgccttgacctgccgctctcagaccaagctgatatttgagatcggctttctcaggaaccacatgttcctctactccgtcctggggtccatcctggggcagctggcggtcatttacatccccccgctgcagagggtcttccagacggagaacctgggagcgcttgatttgctgtttttaactggattggcctcatccgtcttcattttgtcagagctcctcaaactatgtgaaaaatactgttgcagccccaagagagtccagatgcaccctgaagatgtgtagtggaccgcactccgcggcaccttccctaatcatctcgatctggttgtgactgtggcccctgccgtgtctcctcgtcaggggagacttttaggaggccgcagccttccatcaccggatcagtttttcctcttaggaaagctgcaggaacctcgtgggctccagggacccaggcccacatccatccagcgttcccgctggctgtgggacagacagggaggggcctgtacagaaacaccacactgtttattaaatcacaatgatttttattaaccatgtctaactacgtatctgtgccacagcttgcagtgaggcaggccactcgtggcagatacaaggggctcctgagaggcagtgggtaggatggtcacactctgcccattgccctcctggaggccccatttcctcatcataaaatgagggacttttaaataaagtgctatgccgggggataatt

SEQ ID NO: 104964 - DNA, 2928 bp, Artificial Sequence
  derived and/or modified sequence
atggtggagggcagagtgagcgagttcctgaagaagctgggcttcagcggcggcggcagacagtaccaggccctggagaaggacgaggaggaggccctgatcgacgagcagagcgagctgaaggccatcgagaaggagaagaaggtgaccgccctgccccccaaggaggcctgcaagtgccagaaggaggacctggccagagccttctgcgtggacctgcacaccggcctgagcgagttcagcgtgacccagagaagactggcccacggctggaacgagttcgtggccgacaacagcgagcccgtgtggaagaagtacctggaccagttcaagaaccccctgatcctgctgctgctgggcagcgccctggtgagcgtgctgaccaaggagtacgaggacgccgtgagcatcgccaccgccgtgctggtggtggtgaccgtggccttcatccaggagtacagaagcgagaagagcctggaggagctgaccaagatggtgccccccgagtgcaactgcctgagagagggcaagctgcagcacctgctggccagagagctggtgcccggcgacgtggtgagcctgagcatcggcgacagaatccccgccgacatcagactgaccgaggtgaccgacctgctggtggacgagagcagcttcaccggcgaggccgagccctgcagcaagaccgacagccccctgaccggcggcggcgacctgaccaccctgagcaacatcgtgttcatgggcaccctggtgcagtacggcagaggccagggcgtggtgatcggcaccggcgagagcagccagttcggcgaggtgttcaagatgatgcaggccgaggagacccccaagacccccctgcagaagagcatggacagactgggcaagcagctgaccctgttcagcttcggcatcatcggcctgatcatgctgatcggctggagccagggcaagcagctgctgagcatgttcaccatcggcgtgagcctggccgtggccgccatccccgagggcctgcccatcgtggtgatggtgaccctggtgctgggcgtgctgagaatggccaagaagagagtgatcgtgaagaagctgcccatcgtggagaccctgggctgctgcagcgtgctgtgcagcgacaagaccggcaccctgaccgccaacgagatgaccgtgacccagctggtgaccagcgacggcctgagagccgaggtgagcggcgtgggctacgacggccagggcaccgtgtgcctgctgcccagcaaggaggtgatcaaggagttcagcaacgtgagcgtgggcaagctggtggaggccggctgcgtggccaacaacgccgtgatcagaaagaacgccgtgatgggccagcccaccgagggcgccctgatggccctggccatgaagatggacctgagcgacatcaagaacagctacatcagaaagaaggagatccccttcagcagcgagcagaagtggatggccgtgaagtgcagcctgaagaccgaggaccaggaggacatctacttcatgaagggcgccctggaggaggtgatcagatactgcaccatgtacaacaacggcggcatccccctgcccctgaccccccagcagagaagcttctgcctgcaggaggagaagagaatgggcagcctgggcctgagagtgctggccctggccagcggccccgagctgggcagactgaccttcctgggcctggtgggcatcatcgacccccccagagtgggcgtgaaggaggccgtgcaggtgctgagcgagagcggcgtgagcgtgaagatgatcaccggcgacgccctggagaccgccctggccatcggcagaaacatcggcctgtgcaacggcaagctgcaggccatgagcggcgaggaggtggacagcgtggagaagggcgagctggccgacagagtgggcaaggtgagcgtgttcttcagaaccagccccaagcacaagctgaagatcatcaaggccctgcaggagagcggcgccatcgtggccatgaccggcgacggcgtgaacgacgccgtggccctgaagagcgccgacatcggcatcgccatgggccagaccggcaccgacgtgagcaaggaggccgccaacatgatcctggtggacgacgacttcagcgccatcatgaacgccgtggaggagggcaagggcatcttctacaacatcaagaacttcgtgagattccagctgagcaccagcatcagcgccctgagcctgatcaccctgagcaccgtgttcaacctgcccagccccctgaacgccatgcagatcctgtggatcaacatcatcatggacggcccccccgcccagagaagcagccagaagaccgaggtgtgctgcaccgccgtgagactgggcgtggagggcagaggcgagagcacctgggccggcagagccggcctgggcgtggagcccgtggacaaggacgccttcagacagccccccagaagcgtgagagacaccatcctgagcagagccctgatcctgaagatcctgatgagcgccgccatcatcatcagcggcaccctgttcatcttctggaaggagatgcccgaggacagagccagcacccccagaaccaccaccatgaccttcacctgcttcgtgttcttcgacctgttcaacgccctgacctgcagaagccagaccaagctgatcttcgagatcggcttcctgagaaaccacatgttcctgtacagcgtgctgggcagcatcctgggccagctggccgtgatctacatcccccccctgcagagagtgttccagaccgagaacctgggcgccctggacctgctgttcctgaccggcctggccagcagcgtgttcatcctgagcgagctgctgaagctgtgcgagaagtactgctgcagccccaagagagtgcagatgcaccccgaggacgtgtag

SEQ ID NO: 104965 - DNA, 1038 bp, Artificial Sequence
  derived and/or modified sequence
atgagtgaaaatgagttagatacgaccctgcatctgaaatgtaaattgggaatgaagtccatactgccaattttccggtgcctgaacagtttggaacgaaatatcgaaaagtgtagaatcttcactcggtcagacaaatgcaaagtggtgattcaatttttttacagacatggcattaagagaacccataacatctgtttccaggaaagtcagccattgcaagtcatttttgacaagaacgtctgtacaaataccctgatgatccagcctcggctgctggcagatgcaattgtgttgttcactagttcccaggaggaggtgacactggccgtaaccccattaaacttctgcctgaagagctctaacgaggaatctatggatctatctaatgcagtgcactctgaaatgtttgtaggtagtgacgagttcgacttttttcaaattggaatggatactgaaatcacattctgttttaaagagctcaaaggtattctgaccttctctgaagctacccatgcccccatctccatttattttgatttccctgggaaacctttggccctatccatcgatgacatgctagttgaggcaaacttcattctcgccacattggcggatgagcaatcaagggcctcgtccccgcagagcctgtgcctctctcagaaacggaaacgcagtgacctgatagagaaaaaagctgggaaaaacgtgactggccaggctctggagtgtatatcaaagaaggcggctccccgccgtttatatccaaaggaaacactaacgaatatttcagctctagaaaactgtggcagccctgccatgaaacgcgtggatggcgatgtgtcagaggtcagcgagtcctctgtgagtaacacagaggaagttcccggaagtttgtgtctccgtaagtttagttgtatgttcttcggcgcagtgtcttctgaccagcaggagcatttcaatcacccctttgatagcctagcccgagcctccgacagcgaggaggatatgaataatgggtctttttcaatattctag

SEQ ID NO: 104966 - DNA, 1038 bp, Artificial Sequence
  derived and/or modified sequence
atgagcgagaatgagctcgatacgaccctccatttgaaatgcaagctgggcatgaagtctattctgccaatcttccgttgcctgaattctttggagcgtaatatcgagaagtgtcgtatttttactcgtagcgacaagtgcaaagtggtgattcagttcttttatagacacggaatcaagcgcacccacaacatttgctttcaagaatcccagccgctacaggtcatattcgacaagaacgtgtgcactaacactttgatgattcagccccgccttctggctgacgctatagttctctttacctcctcccaggaggaagtgaccctggccgttacacctctgaatttttgcctaaaatcatctaatgaggaatcgatggacctatcaaacgctgtacactccgagatgttcgtcgggagtgacgaattcgatttcttccagatcggaatggatacggaaattacattctgctttaaagaactcaaaggaatcctcaccttcagcgaggcaactcacgcccccatctccatatacttcgactttcctggcaagccactcgccttatccattgacgacatgctggtggaggcaaattttatcctggccacgctggccgatgaacagagtcgggccagtagcccccagagcctttgcctttcccagaaacggaagaggtcagatctgatcgaaaagaaggctggcaaaaatgttaccggccaggcacttgagtgtatcagcaagaaagctgccccacgacggctgtacccaaaggagaccttaacgaacatctccgcattggaaaactgtggatctccagccatgaagagggtagacggggatgtcagtgaggtgtcggagagcagtgtgagcaacactgaagaagtgcctggcagcttatgtctacgaaaattctcctgtatgtttttcggcgctgtgtcctctgatcagcaggagcatttcaaccatccatttgatagtctagcccgcgcttctgacagcgaggaggacatgaataatgggtctttcagcattttctag

SEQ ID NO: 104967 - DNA, 1038 bp, Artificial Sequence
  derived and/or modified sequence
atgtctgaaaatgagctggacaccaccctgcacctgaagtgcaagctgggcatgaagagcatcctgcccatcttccgctgcctgaacagcctggagagaaatattgaaaaatgtcgcatcttcaccaggagtgacaagtgcaaggtggtgatccagttcttctacagacatggcatcaagaggacccacaacatctgcttccaggagagccagcccctgcaggtgatctttgacaagaatgtgtgcaccaacaccctgatgatccagccccggctgctggctgatgccatcgtgctcttcaccagcagccaggaggaggtgaccctggccgtgacccccctgaacttctgcctgaagagcagcaatgaggagagcatggacctgagcaatgctgtgcacagcgagatgtttgtgggcagtgatgaatttgacttcttccagatcggcatggacacagagatcaccttctgcttcaaggagctgaagggcatcctgaccttcagcgaggccacccacgcccccatcagcatctactttgacttccctgggaagcccctggccctgagcattgatgacatgctggtggaggccaacttcatcctggccaccctggctgatgagcagagccgggccagcagcccccagagcctgtgcctgagccagaagaggaagagaagtgacctgattgagaagaaggccggcaagaatgtgacaggccaggccctggagtgcatcagcaagaaggccgccccccggcggctgtaccccaaggagaccctgaccaacatcagcgccctggagaactgtggcagccctgccatgaagagggtggatggagatgtgtctgaggtgtctgagagctctgtgagcaacacagaggaggtgcccggcagcctgtgcctgaggaagttcagctgcatgttctttggagctgtgtccagtgaccagcaggagcacttcaaccacccctttgacagcctggcccgggccagtgacagcgaggaggacatgaacaacggcagcttcagcatcttctag

SEQ ID NO: 104968 - DNA, 1038 bp, Artificial Sequence
  derived and/or modified sequence
atgagcgagaacgagctggacaccaccctgcacctgaagtgcaagctaggtatgaaatcaatcttgccgatctttcgatgccttaattcacttgaaaggaacattgaaaagtgcagaatattcacaagatccgataagtgcaaagtggtcatccaattcttttacaggcacggcattaagaggacacacaatatctgttttcaggagagtcagccactgcaggtcatcttcgacaagaatgtttgcactaatacgctgatgatccagccaaggctcctcgccgacgccatcgtactttttacatcttcccaggaggaagtaactcttgccgtcactccgctgaatttttgccttaagagttcaaatgaagaaagcatggatttaagcaatgccgtgcacagcgagatgtttgtcggcagcgacgagtttgacttcttccagataggcatggatacagaaatcacgttttgcttcaaggagctgaagggaatactaacgttcagcgaagcgacgcacgccccaatcagcatctactttgattttcccgggaagcctctagctctctccattgacgacatgcttgtcgaggctaactttatcctggcaaccttagcggacgagcagagccgcgctagcagtccacagtccttgtgcctgagccagaaacgcaagaggtctgatctaatcgagaagaaggccggcaagaatgtcaccgggcaggccctggaatgtataagtaaaaaggccgccccacggaggctttacccaaaagagacattgaccaatatatctgccctggaaaattgcggcagtcctgcaatgaaacgcgtggatggtgatgtctctgaggtttctgagtcttcagtcagcaacacagaggaagttcccggatcgttgtgtctccgtaagttctcttgtatgttctttggggcagtgagcagcgaccagcaagaacactttaaccacccttttgattctctcgcaagagccagcgacagcgaagaagatatgaataacggatccttttccatcttttag

SEQ ID NO: 104969 - DNA, 1038 bp, Artificial Sequence
  derived and/or modified sequence
atgagcgagaacgagctggacaccaccctgcacctgaagtgcaagctggggatgaagagcatcctgccgattttcaggtgtttaaactccctggaaaggaacatcgagaagtgccgtatatttacaaggtctgataagtgcaaggtcgtgatccagtttttctacaggcatggaataaagcgaactcataatatttgtttccaagaatcccagcctctgcaggtgatattcgataaaaacgtatgcacaaatactctgatgattcagccgagactgctggctgatgctatcgttctctttacctcgtcccaggaagaggttacattggctgtgactccactgaatttttgcttgaaatccagtaacgaagaaagcatggacctgtcaaacgccgttcactcagagatgttcgtcggttctgatgagttcgacttcttccagatcggcatggacactgagatcactttctgctttaaggagctgaagggaattctgaccttttccgaagcaactcacgcacccattagcatctattttgatttccccggtaagccgctcgccctctccatagatgacatgcttgtcgaagcgaatttcatcctggccacactggcagatgagcagtcccgcgcttcctcaccacaatccttatgcctctcacagaagcgcaagcgatccgacttgatcgagaaaaaagccgggaaaaatgtgaccggccaggccctggaatgcatatctaagaaagccgctccaagaaggctttatcctaaggagactttgaccaatatctctgcactcgaaaattgcggaagtcccgccatgaaacgagtagatggcgacgtcagcgaagtgagcgagtcctcagtgtccaatactgaagaggttcccggctccctttgcctgagaaaatttagttgtatgttttttggggccgtgagtagcgaccagcaggagcacttcaatcatccttttgatagccttgcacgggcttctgactccgaagaggacatgaataatggctcattcagcatattttag

SEQ ID NO: 104970 - DNA, 1038 bp, Artificial Sequence
  derived and/or modified sequence
atgtccgagaacgagctcgacaccactttgcatctgaagtgtaagctgggcatgaagtccattctgccaatatttcgatgtctgaattcattggagcggaatatcgagaagtgccgcatctttacccgcagtgataagtgcaaggtggttatccagtttttctacaggcacggaatcaagcgaacccataatatatgcttccaggagtcacaacccttgcaggttatctttgataaaaatgtgtgtactaacaccttgatgatccagccacgcttactggccgacgccatagttctgtttacgtctagtcaagaggaggtgactctggcggtgaccccccttaacttttgcctcaagtcgtcgaacgaggaaagcatggacctttcaaacgccgtgcacagtgagatgttcgtcggcagtgacgagtttgacttttttcagatcggtatggatacagaaatcaccttctgcttcaaggaattaaaaggtatcctgacatttagcgaggctacccatgcgcctattagcatatatttcgactttcctggcaagccacttgccctgtcaatcgatgatatgttggttgaggccaatttcattctggccacactggcagatgagcaatcacgagcttcctcaccccagtctctgtgcctgtctcaaaagaggaaaaggtctgatctcattgagaagaaggccggaaagaacgtcactggacaggcccttgagtgtatcagtaagaaggcagccccacgccgactgtatccaaaggaaacacttacaaatatatctgcattggaaaactgtgggagccccgcaatgaaacgggtcgatggagatgtctcagaagtgagcgaaagttcggtgagcaacaccgaagaagtccccggatctttgtgccttcgcaaattctcctgtatgttcttcggcgctgtctcgagcgaccagcaagaacatttcaatcatccttttgactctctcgcacgcgcttctgattccgaggaggatatgaataacggaagcttctcgattttttag

SEQ ID NO: 104971 - DNA, 1038 bp, Artificial Sequence
  derived and/or modified sequence
atgagcgagaacgaactggacaccaccctacaccttaaatgtaagctggggatgaaaagtatactccccatatttcgttgcctcaattcccttgagcggaacatcgaaaagtgtcgcatctttacccggagtgataagtgtaaggttgttatccagttcttctaccgtcacggtattaagcggacccacaacatttgtttccaggaaagccagccgctccaggtgatttttgacaagaacgtgtgtacgaacacactcatgatccaacccaggctattggccgacgccattgtcctgttcacctcaagtcaagaagaggttactctagccgtgacgcctctgaatttctgcttaaagtccagcaacgaagaaagcatggacctgagcaatgcggtccacagtgaaatgttcgtcgggtccgatgaatttgactttttccagatcggtatggacactgagattactttctgtttcaaagagcttaaaggcatcttgaccttctcagaggcaacacacgctccgataagcatttatttcgacttcccaggcaagcccctggcgctgagcattgacgacatgcttgttgaagcaaatttcatcctggctactctcgccgacgaacagtcgagagcctcatcaccgcaatctctgtgcttaagtcaaaagcggaaacgctccgatcttattgagaagaaagccggaaaaaacgtgactgggcaagctttggagtgcatctctaagaaagcggcacccaggcgcctttaccccaaagagaccttgacaaacatcagcgccttggagaattgcgggtcccccgcaatgaagagagttgatggcgacgtgagtgaggtgtctgaatcatccgtaagcaacactgaggaggtgccgggatctctttgcttgcgaaagttcagttgtatgttttttggggcagtgtcctccgatcaacaagagcactttaatcaccccttcgactctctggccagagcctccgattccgaggaagacatgaataatggaagcttcagtattttctag

SEQ ID NO: 104972 - DNA, 1038 bp, Artificial Sequence
  derived and/or modified sequence
atgagcgagaacgagctggacaccaccctgcacctgaagtgcaagctgggcatgaagagcatcctgcccatcttcagatgcctgaacagcctggagagaaacatcgagaagtgcagaatcttcaccagaagcgacaagtgcaaggtggtgatccagttcttctacagacacggcatcaagagaacccacaacatctgcttccaggagagccagcccctgcaggtgatcttcgacaagaacgtgtgcaccaacaccctgatgatccagcccagactgctggccgacgccatcgtgctgttcaccagcagccaggaggaggtgaccctggccgtgacccccctgaacttctgcctgaagagcagcaacgaggagagcatggacctgagcaacgccgtgcacagcgagatgttcgtgggcagcgacgagttcgacttcttccagatcggcatggacaccgagatcaccttctgcttcaaggagctgaagggcatcctgaccttcagcgaggccacccacgcccccatcagcatctacttcgacttccccggcaagcccctggccctgagcatcgacgacatgctggtggaggccaacttcatcctggccaccctggccgacgagcagagcagagccagcagcccccagagcctgtgcctgagccagaagagaaagagaagcgacctgatcgagaagaaggccggcaagaacgtgaccggccaggccctggagtgcatcagcaagaaggccgcccccagaagactgtaccccaaggagaccctgaccaacatcagcgccctggagaactgcggcagccccgccatgaagagagtggacggcgacgtgagcgaggtgagcgagagcagcgtgagcaacaccgaggaggtgcccggcagcctgtgcctgagaaagttcagctgcatgttcttcggcgccgtgagcagcgaccagcaggagcacttcaaccaccccttcgacagcctggccagagccagcgacagcgaggaggacatgaacaacggcagcttcagcatcttctag

SEQ ID NO: 104973 - DNA, 2794 bp, Artificial Sequence
  derived and/or modified sequence
aaagccgtttgggaacttgtggaggcggggtggtagagtgcagagacgagatcgcgaagctttgaaaagcgcgggcaacatccgggcacctgggccgtcgagctgaggcgcgccttccgagcctgctttttagggcggatggcagccatgctgaatatttgggaaagcagttcaagctctatcacgaattagtgacgagttctggctagacccatctaaaaaaggtcttgctctaagatgtgtgaattcttctcggtcagcatatggatgtgtcctgttctctcctgtgttttttcagcattatcaatggtcagctttagtgaaaatgagtgaaaatgaacttgacacaacactgcatttaaaatgcaaattgggaatgaagtcaattttgcccatctttagatgtctgaattcccttgaaagaaatatagagaagtgcagaatattcaccagatctgataaatgcaaagtagttattcaattcttctacagacatggtattaaaagaactcataatatatgttttcaagaaagtcagcctttgcaagttatttttgacaagaatgtttgtactaatacgctaatgattcaaccaagattgcttgctgatgccattgttctttttacatcaagtcaagaggaagttactcttgctgttactccactgaatttttgcctcaagagttctaatgaggaatcaatggatttgagcaatgctgtacacagtgagatgtttgttggctcagatgagtttgacttctttcaaattggaatggacactgagataacattttgtttcaaagaattgaagggaatactgacattttcagaagctacacatgctcctatatccatttattttgatttccctgggaaacctctggctttgagtattgatgatatgttagtggaagctaactttattttggccacattagctgatgaacaaagtagagcatcttcaccacagtcactgtgtctttcacagaaacgaaaaaggtcagatctgattgaaaaaaaggctggcaaaaatgtaactggccaggccctggaatgtatttcaaaaaaagcagcaccaagaaggctttatcctaaggagactctcacaaacatatctgcattggaaaactgtggcagccctgcaatgaaaagagtggatggagatgtcagtgaagtatcagaaagcagtgtcagcaacacagaggaagtgccagggtctctgtgtctcagaaagttttcttgcatgttctttggagcagtttcttctgaccagcaagaacacttcaaccaccctttcgacagtctggcaagagcaagtgacagtgaagaggacatgaataatggcagtttctctatattctaatgcttaatgatggctgagctgggccccagcccagtgactggctcatttgcccctcaagcacgagtttgcatgtttagtgtctaaaagaggttgtccaggacttccttttaatggaggatgggcttttaaaccacatcatcttgtacaacaaccatatctagaaatagctgtttgtcaagtgtatgtaacttgctttaaatccattatgctacttgtgaggcagaagagttttctgtgaaggaaaaaagcccattagagttcttcaattcaatgcacgttcaccctagagcttttaacatctttgctagttttataaaggtatttaaactttattcaacagccatttagagtgccatcaagatggcttgaaatggaattttgtgatttgtagtcaggtatcttttgtatttgattgcaaacatttggattttagttttctcatgtaataccatggccttttttgtgcattgttttttatattttaagactttaagtagaataaaccctggaaaaaagatcaagagtaaaaatatatagtcactttcacttggcttttttagacggagtctcactttgtcactcaggctcaagtgcagtggtgcaatctctgctcactgcaacatctgcctcccaggtccaagcgattctcctgcctcagcctcccgtgcagctgggattgcaggtgcgtgccaccatgcctggctaatttctggtattttgtagagacagggtttcgccatgttggccagggtggtcttgaactcctggcctcaagtgatctgcccacctcggcctcccaaagtgctgggattacagacttgagccactgcgcccaacctggagtgtttttacatattgtaaaattttatttcctaacctcaaattgttctgattttcagatgtgattttttattttgcagtgtgctgcaggaaagaatttaatggaagtgatgccaaatatttctgtattatctgacatagaacagtatcctccactgccaagacagcctgagtttggagtggaataaggtggaagacaaatgtctctgttctttggccctttaagagttagctttttacctgcacaaatggactaaaaaatctggcacaaaacattgttatgtaatgtcttatgatgtgtgcctctccctcccccaaacctgtttacagtcaattataacctgacaaacgagacttttgtaacatattattgttacatctttctgaaaccttcaaaccgtaaggaagtgttaactggcaagcagttgtactttagactttgtgagaaattcataaaggtggctgagtggatttgcatgctttagaactgtgaatagagttctaactgaaaccagaattaatttggctcttgtagcttagtaatgagtcatagctacccacaataacctaataaaaactcaagttcatccc

SEQ ID NO: 104974 - DNA, 2727 bp, Artificial Sequence
  derived and/or modified sequence
gggccgtcgagctgaggcgcgccttccgagcctgctttttagggcggatggcagccatgctgaagtgcgtgatgagcggcagtcagtatttgggaaagcagttcaagctctatcacgaattagtgacgagttctggctagacccatctaaaaaaggtcttgctctaagatgtgtgaattcttctcggtcagcatatggatgtgtcctgttctctcctgtgttttttcagcattatcaatggtcagctttagtgaaaatgagtgaaaatgaacttgacacaacactgcatttaaaatgcaaattgggaatgaagtcaattttgcccatctttagatgtctgaattcccttgaaagaaatatagagaagtgcagaatattcaccagatctgataaatgcaaagtagttattcaattcttctacagacatggtattaaaagaactcataatatatgttttcaagaaagtcagcctttgcaagttatttttgacaagaatgtttgtactaatacgctaatgattcaaccaagattgcttgctgatgccattgttctttttacatcaagtcaagaggaagttactcttgctgttactccactgaatttttgcctcaagagttctaatgaggaatcaatggatttgagcaatgctgtacacagtgagatgtttgttggctcagatgagtttgacttctttcaaattggaatggacactgagataacattttgtttcaaagaattgaagggaatactgacattttcagaagctacacatgctcctatatccatttattttgatttccctgggaaacctctggctttgagtattgatgatatgttagtggaagctaactttattttggccacattagctgatgaacaaagtagagcatcttcaccacagtcactgtgtctttcacagaaacgaaaaaggtcagatctgattgaaaaaaaggctggcaaaaatgtaactggccaggccctggaatgtatttcaaaaaaagcagcaccaagaaggctttatcctaaggagactctcacaaacatatctgcattggaaaactgtggcagccctgcaatgaaaagagtggatggagatgtcagtgaagtatcagaaagcagtgtcagcaacacagaggaagtgccagggtctctgtgtctcagaaagttttcttgcatgttctttggagcagtttcttctgaccagcaagaacacttcaaccaccctttcgacagtctggcaagagcaagtgacagtgaagaggacatgaataatggcagtttctctatattctaatgcttaatgatggctgagctgggccccagcccagtgactggctcatttgcccctcaagcacgagtttgcatgtttagtgtctaaaagaggttgtccaggacttccttttaatggaggatgggcttttaaaccacatcatcttgtacaacaaccatatctagaaatagctgtttgtcaagtgtatgtaacttgctttaaatccattatgctacttgtgaggcagaagagttttctgtgaaggaaaaaagcccattagagttcttcaattcaatgcacgttcaccctagagcttttaacatctttgctagttttataaaggtatttaaactttattcaacagccatttagagtgccatcaagatggcttgaaatggaattttgtgatttgtagtcaggtatcttttgtatttgattgcaaacatttggattttagttttctcatgtaataccatggccttttttgtgcattgttttttatattttaagactttaagtagaataaaccctggaaaaaagatcaagagtaaaaatatatagtcactttcacttggcttttttagacggagtctcactttgtcactcaggctcaagtgcagtggtgcaatctctgctcactgcaacatctgcctcccaggtccaagcgattctcctgcctcagcctcccgtgcagctgggattgcaggtgcgtgccaccatgcctggctaatttctggtattttgtagagacagggtttcgccatgttggccagggtggtcttgaactcctggcctcaagtgatctgcccacctcggcctcccaaagtgctgggattacagacttgagccactgcgcccaacctggagtgtttttacatattgtaaaattttatttcctaacctcaaattgttctgattttcagatgtgattttttattttgcagtgtgctgcaggaaagaatttaatggaagtgatgccaaatatttctgtattatctgacatagaacagtatcctccactgccaagacagcctgagtttggagtggaataaggtggaagacaaatgtctctgttctttggccctttaagagttagctttttacctgcacaaatggactaaaaaatctggcacaaaacattgttatgtaatgtcttatgatgtgtgcctctccctcccccaaacctgtttacagtcaattataacctgacaaacgagacttttgtaacatattattgttacatctttctgaaaccttcaaaccgtaaggaagtgttaactggcaagcagttgtactttagactttgtgagaaattcataaaggtggctgagtggatttgcatgctttagaactgtgaatagagttctaactgaaaccagaattaatttggctcttgtagcttagtaatgagtcatagctacccacaataacctaataaaaactcaagttcatcccaa

SEQ ID NO: 104975 - protein, 293 aa, Artificial Sequence
  derived and/or modified sequence
LINILYRAVISDPEQNLAIEQKESDHILPDSKMTPLRFRKRTLHETKIRTHSTLTENVLSHKLQFDGRIVSRTNVLPFIQKSIYSHQCGRRKGKQYRLGDFYVGATLTFLSSDHLSLPESIKENTLLKLRITNIDQIALDSLKTASMEQEDDIIIQETNDRLVFKAIQDVLKEKLHKRGVRILTGLGKYFQQLDKEGNGLLDKADFKQALKVFHLEVSEKDFESAWLILNDNGNGKVDYGEFKRGIIGEMNEYRKSYVRKAFMKLDFNKSGSVPIINIRKCYCAKKHSQVISG

SEQ ID NO: 104976 - DNA, 615 bp, Artificial Sequence
  derived and/or modified sequence
atggaacaggaagatgatattatcattcaggagacaaacgacagactggtgttcaaggccattcaggatgtcctgaaagaaaagctccacaaaaggggggttcgaatcctgactggactcggaaaatattttcagcagcttgacaaggaggggaatggtttactggacaaggccgactttaaacaggccctgaaggtcttccacctggaggtgtcagaaaaggatttcgagtcagcatggttgattctcaacgataatggaaacggcaaggtggattacggtgaattcaaacgcggaatcatcggagaaatgaacgagtacagaaagagttacgtcagaaaagcttttatgaagctggactttaacaagtctggttccgttcctatcatcaatatacggaagtgctattgcgctaaaaaacattcacaggtaatctccggtcactctaccgaggaggaaattaaaagctcattcctcgagacactcaaggtcgcttgcagcaagagcgacgaagtgtcttacggcgagttcgaggattattatgagggactcagcattggcatcgtcgacgacgaggatttcgtcaatatcctgagaaccccttgggggatttag

SEQ ID NO: 104977 - DNA, 615 bp, Artificial Sequence
  derived and/or modified sequence
atggagcaggaggatgacatcatcatccaggagaccaatgaccggctggtgttcaaggccatccaggatgtgctgaaggagaagctgcacaagaggggcgtgcgcatcctgaccggcctgggcaagtacttccagcagctggacaaggagggcaatggcctgctggacaaggctgacttcaagcaggccctgaaggtgttccacctggaggtgtctgagaaggactttgagagcgcctggctgatcctgaatgacaatggaaatggcaaggtggactatggagagttcaagaggggcatcattggagagatgaatgagtacaggaagagctatgtgaggaaggccttcatgaagctggacttcaacaagagcggctctgtgcccatcatcaacatcaggaagtgctactgtgccaagaagcacagccaggtgatcagcggccacagcacagaggaggagatcaagagcagcttcctggagaccctgaaggtggcctgcagcaagagtgatgaggtgtcctatggagaatttgaggactactatgagggcctgagcatcggcatcgtggatgatgaggactttgtgaacatcctgcggaccccctggggcatctag

SEQ ID NO: 104978 - DNA, 615 bp, Artificial Sequence
  derived and/or modified sequence
atggagcaggaggacgacatcatcatccaggagaccaacgaccggctggtcttcaaagccatccaggacgttctgaaagaaaagctgcataagagaggcgtccgcatcctgacaggcctcggaaagtacttccagcaacttgataaggaaggtaatgggctgctggacaaggctgactttaaacaagccctgaaagtttttcatttagaggttagcgagaaggatttcgagtctgcctggcttattctaaacgataatggaaatgggaaagtggactacggggaatttaaacggggcataattggcgaaatgaacgagtataggaaatcgtatgtgaggaaagcgttcatgaaacttgactttaacaaatctgggtcggtccccataataaacatcagaaaatgctactgcgccaagaagcatagccaggtgatttcgggccactccacagaggaagagattaaaagctcattcctcgaaacactgaaggtagcttgttcaaagtccgatgaggtgtcctatggtgaattcgaagactattatgaggggctgtctattggcatagtcgatgacgaagactttgtgaatatccttcgaactccctgggggatatag

SEQ ID NO: 104979 - DNA, 615 bp, Artificial Sequence
  derived and/or modified sequence
atggaacaggaggatgacattataattcaggagacaaacgacaggttggtcttcaaggctatccaggacgtactcaaggagaaacttcacaaaagaggggtccgcatcctgaccggtctgggcaagtatttccagcagttagacaaggagggcaacggcctgctggacaaagccgacttcaagcaagcacttaaggtgttccacctggaggtgtctgagaaggattttgagtccgcctggctgatactgaatgacaatgggaacggcaaagtagactatggcgagtttaagagagggataataggcgagatgaacgagtaccgaaagtcctatgtccgcaaagcattcatgaaactggactttaacaaatccggctctgtcccaataatcaatatcaggaagtgttactgcgcaaagaagcattctcaggtgatcagcggccactcaactgaggaagagatcaaatcgtccttcctcgaaacactgaaagtggcgtgcagtaaaagcgatgaagtttcgtatggagagttcgaggactactatgaagggctgtccatcggaatcgtcgacgatgaggattttgtgaacatcctgcgcactccttggggcatttag

SEQ ID NO: 104980 - DNA, 615 bp, Artificial Sequence
  derived and/or modified sequence
atggagcaggaggacgacatcatcatccaggagaccaacgacagactggtgttcaaggccatccaggacgtgctgaaggagaagctgcacaagagaggcgtgagaatcctgaccggcctgggcaagtacttccagcagctggacaaggagggcaacggcctgctggacaaggccgacttcaagcaggccctgaaggtgttccacctggaggtgagcgagaaggacttcgagagcgcctggctgatcctgaacgacaacggcaacggcaaggtggactacggcgagttcaagagaggcatcatcggcgagatgaacgagtacagaaagagctacgtgagaaaggccttcatgaagctggacttcaacaagagcggcagcgtgcccatcatcaacatcagaaagtgctactgcgccaagaagcacagccaggtgatcagcggccacagcaccgaggaggagatcaagagcagcttcctggagaccctgaaggtggcctgcagcaagagcgacgaggtgagctacggcgagttcgaggactactacgagggcctgagcatcggcatcgtggacgacgaggacttcgtgaacatcctgagaaccccctggggcatctag

SEQ ID NO: 104981 - protein, 688 aa, Artificial Sequence
  derived and/or modified sequence
MDRCKHVGRLRLAQDHSILNPQKWCCLECATTESVWACLKCSHVACGRYIEDHALKHFEETGHPLAMEVRDLYVFCYLCKDYVLNDNPEGDLKLLRSSLLAVRGQKQDTPVRRGRTLRSMASGEDVVLPQRAPQGQPQMLTALWYRRQRLLARTLRLWFEKSSRGQAKLEQRRQEEALERKKEEARRRRREVKRRLLEELASTPPRKSARLLLHTPRDAGPAASRPAALPTSRRVPAATLKLRRQPAMAPGVTGLRNLGNTCYMNSILQVLSHLQKFRECFLNLDPSKTEHLFPKATNGKTQLSGKPTNSSATELSLRNDRAEACEREGFCWNGRASISRSLELIQNKEPSSKHISLCRELHTLFRVMWSGKWALVSPFAMLHSVWSLIPAFRGYDQQDAQEFLCELLHKVQQELESEGTTRRILIPFSQRKLTKQVLKVVNTIFHGQLLSQVTCISCNYKSNTIEPFWDLSLEFPERYHCIEKGFVPLNQTECLLTEMLAKFTETEALEGRIYACDQCNSKRRKSNPKPLVLSEARKQLMIYRLPQVLRLHLKRFRWSGRNHREKIGVHVVFDQVLTMEPYCCRDMLSSLDKETFAYDLSAVVMHHGKGFGSGHYTAYCYNTEGGFWVHCNDSKLNVCSVEEVCKTQAYILFYTQRTVQGNARISETHLQAQVQSSNNDEGRPQTFS

SEQ ID NO: 104982 - protein, 37 aa, Artificial Sequence
  derived and/or modified sequence
MDRCKHVGRLRLAQDHSILNPQKWCCLECATTESVWA

SEQ ID NO: 104983 - DNA, 2067 bp, Artificial Sequence
  derived and/or modified sequence
atggacagatgcaagcacgtgggcagactgagactggcccaggaccacagcatcctgaacccccagaagtggtgctgcctggagtgcgccaccaccgagagcgtgtgggcctgcctgaagtgcagccacgtggcctgcggcagatacatcgaggaccacgccctgaagcacttcgaggagaccggccaccccctggccatggaggtgagagacctgtacgtgttctgctacctgtgcaaggactacgtgctgaacgacaaccccgagggcgacctgaagctgctgagaagcagcctgctggccgtgagaggccagaagcaggacacccccgtgagaagaggcagaaccctgagaagcatggccagcggcgaggacgtggtgctgccccagagagccccccagggccagccccagatgctgaccgccctgtggtacagaagacagagactgctggccagaaccctgagactgtggttcgagaagagcagcagaggccaggccaagctggagcagagaagacaggaggaggccctggagagaaagaaggaggaggccagaagaagaagaagagaggtgaagagaagactgctggaggagctggccagcaccccccccagaaagagcgccagactgctgctgcacacccccagagacgccggccccgccgccagcagacccgccgccctgcccaccagcagaagagtgcccgccgccaccctgaagctgagaagacagcccgccatggcccccggcgtgaccggcctgagaaacctgggcaacacctgctacatgaacagcatcctgcaggtgctgagccacctgcagaagttcagagagtgcttcctgaacctggaccccagcaagaccgagcacctgttccccaaggccaccaacggcaagacccagctgagcggcaagcccaccaacagcagcgccaccgagctgagcctgagaaacgacagagccgaggcctgcgagagagagggcttctgctggaacggcagagccagcatcagcagaagcctggagctgatccagaacaaggagcccagcagcaagcacatcagcctgtgcagagagctgcacaccctgttcagagtgatgtggagcggcaagtgggccctggtgagccccttcgccatgctgcacagcgtgtggagcctgatccccgccttcagaggctacgaccagcaggacgcccaggagttcctgtgcgagctgctgcacaaggtgcagcaggagctggagagcgagggcaccaccagaagaatcctgatccccttcagccagagaaagctgaccaagcaggtgctgaaggtggtgaacaccatcttccacggccagctgctgagccaggtgacctgcatcagctgcaactacaagagcaacaccatcgagcccttctgggacctgagcctggagttccccgagagataccactgcatcgagaagggcttcgtgcccctgaaccagaccgagtgcctgctgaccgagatgctggccaagttcaccgagaccgaggccctggagggcagaatctacgcctgcgaccagtgcaacagcaagagaagaaagagcaaccccaagcccctggtgctgagcgaggccagaaagcagctgatgatctacagactgccccaggtgctgagactgcacctgaagagattcagatggagcggcagaaaccacagagagaagatcggcgtgcacgtggtgttcgaccaggtgctgaccatggagccctactgctgcagagacatgctgagcagcctggacaaggagaccttcgcctacgacctgagcgccgtggtgatgcaccacggcaagggcttcggcagcggccactacaccgcctactgctacaacaccgagggcggcttctgggtgcactgcaacgacagcaagctgaacgtgtgcagcgtggaggaggtgtgcaagacccaggcctacatcctgttctacacccagagaaccgtgcagggcaacgccagaatcagcgagacccacctgcaggcccaggtgcagagcagcaacaacgacgagggcagaccccagaccttcagctag

SEQ ID NO: 104984 - DNA, 48 bp, Artificial Sequence
  derived and/or modified sequence
atggacagatgcaagcacgtgggcagactgagactggcccaggactag

SEQ ID NO: 104985 - DNA, 114 bp, Artificial Sequence
  derived and/or modified sequence
atggacagatgcaagcacgtgggcagactgagactggcccaggaccacagcatcctgaacccccagaagtggtgctgcctggagtgcgccaccaccgagagcgtgtgggcctag

SEQ ID NO: 104986 - DNA, 2067 bp, Artificial Sequence
  derived and/or modified sequence
atggaccgatgcaagcatgtgggccgacttcggctagcacaggaccattctattcttaatccccagaagtggtgttgtcttgagtgtgctactaccgagtccgtgtgggcatgtctgaaatgctctcatgtggcgtgcggccggtatatcgaagatcatgcattgaagcattttgaagagacaggacaccccctggcaatggaggttcgcgacctgtacgtgttttgctatctctgtaaggactacgtcttaaatgacaaccctgaaggagacctgaagctgttgcggagttctctccttgcggtgcggggacagaaacaagacaccccagttagacgcggccgcacgctccgaagcatggcttcaggggaggatgtcgtgctcccacaacgcgcaccccagggacagccgcaaatgctgacagctctatggtatcgacgacaaagactcctggccagaaccctgagactctggtttgagaagtcaagccggggacaggctaagttggaacaacgcagacaggaggaggccctggagagaaaaaaagaagaggcacgacgcagaagacgcgaggtgaaacggcgccttctcgaagaactggcttccacacctccccgaaagtcagctaggttgcttcttcacaccccccgcgacgccggcccagccgccagccggccagctgccttaccaacaagcaggagagtgcccgcagccactctgaagctccggaggcaacctgccatggccccaggcgttactggactgagaaatctcggaaatacatgctatatgaacagcatattacaggtccttagccatctgcaaaaatttcgcgaatgtttcctaaacttggatccatccaaaaccgagcatcttttccctaaggctaccaatgggaaaacgcagttaagtggcaagcctactaatagctcagccaccgaactcagcctgcggaatgacagagccgaggcctgcgaacgagaaggcttctgctggaatggcagggctagcatttcacgctcgctggagctgatccagaacaaagagcccagctcaaagcacatcagtctgtgccgggagctacacaccctcttcagggtgatgtggtcaggcaagtgggctctggtgtctcctttcgctatgctacatagcgtgtggtctctcatccctgcgtttcgcggctatgatcagcaggatgcccaggagttcctttgcgagcttctgcacaaggtgcaacaggaactggagagcgaggggacgacacgcagaatcctgatacctttttcccagagaaagctgactaaacaggtcctcaaagtcgtgaatacaatattccacggacaacttttatcccaagtgacatgcatctcgtgcaactacaagagtaacactatcgaaccattttgggatttatccttggagttcccagaaagatatcattgcatcgaaaagggtttcgtgccactcaaccaaacggagtgtcttctgacagaaatgctagcaaagttcactgagaccgaggccctggagggccgaatatatgcatgtgatcagtgcaacagcaaacggaggaaaagcaatcctaagcccctggtgctcagcgaagcccgaaagcagcttatgatctacaggcttccacaggtgttgaggctgcatcttaaacggttcagatggagtggccggaatcaccgcgagaaaataggagtacatgtggtttttgaccaggtgctgactatggaaccctattgctgcagggacatgttgtcatccctcgacaaggagaccttcgcctacgacctgagtgccgtggtcatgcaccacggaaaaggatttggttccggacattacaccgcctattgctacaacaccgagggtggattctgggtgcattgcaatgattcaaagttgaatgtgtgctccgtcgaggaggtttgcaagacccaggcctacattctgttctatacgcaacgaactgtgcagggaaacgcccggatctctgagacacatctgcaggcacaagttcagtcctctaataatgatgaaggcaggccacagacgttctcctag

SEQ ID NO: 104987 - DNA, 2067 bp, Artificial Sequence
  derived and/or modified sequence
atggaccgctgcaaacacgtaggccgcctccgattggcccaggaccattccatactgaatccacagaaatggtgttgcctggagtgtgcgacaacggaatctgtatgggcgtgtttaaaatgctcgcacgtcgcctgcggccgctacattgaagaccatgctctgaagcacttcgaggaaactggccaccctctcgccatggaggtcagagacctgtatgtgttctgctatctgtgcaaggattatgtgttaaatgataacccggagggggacctgaaactgctgcggtcaagccttctagcagttcgtggtcagaaacaggacactcccgtcagaagaggacggacacttagatccatggccagtggggaggacgtggttctgccgcagagagcgccacagggacagccccagatgttgactgccttatggtaccgccgacagagattgctcgccaggaccttgcgcctctggttcgaaaagtcttcaaggggccaggccaagttggagcagcgtcgccaagaggaggcactggagcgcaagaaagaggaggcccgtaggaggagacgggaggtgaagagaagactgctcgaggaactggcttctacaccaccacgaaaaagcgcgaggttgttgcttcatactccgagagatgcaggtcctgccgcttcacgacccgcagcgctgcctacctctcggagggtacccgcggctacccttaagttacgacgtcagcctgccatggcccccggtgtgacgggactgaggaacctgggaaacacatgttacatgaactccattctgcaagtactaagtcacttacagaaatttcgcgaatgttttctcaacctcgatcccagcaaaaccgagcacctgttccccaaagccaccaatggaaagacccagctgagtggcaagcctaccaattctagcgccacagaactgagcctccgtaatgaccgagctgaggcctgtgagagagaggggttttgttggaacggaagggcctcgattagcaggtctctggagctcatccaaaacaaggagcctagctcgaaacacatctccctttgccgtgagcttcacaccctgtttagagtgatgtggtccggaaagtgggctctcgtctcaccgtttgctatgctgcacagcgtctggtctttgatccccgcattcagaggttatgaccagcaggatgctcaggagttcctttgtgaattgctccataaggtacagcaggaactagaatcagaggggacgacccggcgtatcctgatccccttcagtcagcggaagctcacaaagcaggttcttaaagtggtgaatacaatattccacgggcagctgttaagtcaggtgacttgcattagttgtaactacaagagcaacactatcgagccgttttgggacctgtccctggagttcccagaacggtatcactgtatcgagaaaggatttgtcccattgaatcagacagagtgcctgttaacggagatgctggccaaatttacagagacagaggctctcgaaggtagaatttatgcttgtgaccagtgtaacagtaaacgccgtaaatccaatcccaagccacttgtgctgtctgaagccagaaagcaattgatgatttacaggttgccccaggtgctacggctgcacctcaagcgatttaggtggagcggacgcaatcacagggaaaagataggcgtgcacgttgtgtttgaccaggttctcaccatggagccctattgctgcagagatatgctcagttcgctggacaaggaaaccttcgcatatgacctgtcggctgttgtgatgcatcatggaaaaggcttcggatcagggcactatactgcctattgttataataccgagggtggattttgggtgcactgcaacgactccaaactcaacgtttgttctgtggaagaggtgtgcaagacccaggcctatatactgttctacactcagcgtactgtccagggcaatgcccggatctctgagactcatctgcaggcacaagtccagtcatcaaacaacgacgagggtaggccccaaaccttcagttag

SEQ ID NO: 104988 - DNA, 48 bp, Artificial Sequence
  derived and/or modified sequence
atggatagatgcaaacacgtgggaaggttaagactcgctcaggattag

SEQ ID NO: 104989 - DNA, 114 bp, Artificial Sequence
  derived and/or modified sequence
atggatagatgtaagcatgttggccgcttgcgtctggcacaggaccactctattctcaacccccagaaatggtgttgcttggaatgtgccacaaccgaatccgtgtgggcctag

SEQ ID NO: 104990 - DNA, 2067 bp, Artificial Sequence
  derived and/or modified sequence
atggaccgctgcaagcacgtgggccgcctgcggctggcccaggaccacagcatcctgaacccccagaagtggtgctgcctggagtgtgccaccacagagagcgtgtgggcctgcctgaagtgcagccacgtggcctgtggccgctacattgaagatcatgccctgaagcactttgaggagaccggccaccccctggccatggaggtgcgggacctgtatgtgttctgctacctgtgcaaggactatgtgctgaatgacaaccctgagggggacctgaagctgctgcggagcagcctgctggccgtgcggggccagaagcaggacacccctgtgcggcggggccgcaccctgcgctccatggccagcggggaggatgtggtgctgccccagagggccccccagggccagccccagatgctgacagccctgtggtaccgccggcagaggctgctggcccggaccctgcggctgtggtttgagaagagcagccggggccaggccaagctggagcagaggcggcaggaggaggccctggagaggaagaaggaggaggccaggagaagaagaagagaggtgaagaggcggctgctggaggagctggccagcaccccacccaggaagagcgcccggctgctgctgcacaccccaagagatgctggccctgctgccagcaggcctgctgccctgcccaccagcagaagagtgcctgctgccaccctgaagctgcggcggcagcctgccatggcccctggggtgacaggcctgaggaacctgggcaacacctgctacatgaacagcatcctgcaggtgctgagccacctgcagaagttccgggagtgcttcctgaacctggaccccagcaagacagagcacctgttccccaaggccaccaacgggaagacccagctgagcggcaagcccaccaacagcagcgccacagagctgagcctgagaaatgacagagctgaggcctgtgagcgggagggcttctgctggaatggccgggccagcatcagccgcagcctggagctgatccagaacaaggagcccagcagcaagcacatcagcctgtgccgggagctgcacaccctcttccgggtgatgtggagcggcaagtgggccctggtgagcccctttgccatgctgcacagcgtgtggagcctcatcccagccttccggggctatgaccagcaggatgcccaggagttcctgtgtgagctgctgcacaaggtgcagcaggagctggagagcgagggcaccacccggcgcatcctgatccccttcagccagaggaagctgaccaagcaggtgctgaaggtggtgaacaccatcttccacggccagctgctgagccaggtgacctgcatcagctgcaactacaagagcaacaccatcgagcccttctgggacctgagcctggagttccctgagcgctaccactgcatcgagaagggctttgtgcccctgaaccagacagaatgtctgctgacagagatgctggccaagttcacagaaacagaggccctggagggccgcatctatgcctgtgaccagtgcaacagcaagaggaggaagagcaaccccaagcccctggtgctgtctgaggccaggaagcagctgatgatctaccgcctgccccaggtgctgcggctgcacctgaagcgcttccgctggagcggcaggaaccaccgggagaagattggagtgcacgtggtgtttgaccaggtgctgaccatggagccctactgctgccgggacatgctgagcagcctggacaaggagacctttgcctatgacctgtctgctgtggtgatgcaccacggcaaaggatttggaagtggccactacacagcctactgctacaacacagaaggaggcttctgggtgcactgcaatgacagcaagctgaatgtgtgcagcgtggaggaggtgtgcaagacccaggcctacatcctcttctacacccagaggacagtgcagggcaatgcccgcatcagcgagacccacctgcaggcccaggtgcagagcagcaacaatgatgagggccggccccagaccttctcctag

SEQ ID NO: 104991 - DNA, 48 bp, Artificial Sequence
  derived and/or modified sequence
atggaccgctgcaagcacgtgggccgcctgcggctggcccaggactag

SEQ ID NO: 104992 - DNA, 114 bp, Artificial Sequence
  derived and/or modified sequence
atggaccgctgcaagcacgtgggccgcctgcggctggcccaggaccacagcatcctgaacccccagaagtggtgctgcctggagtgtgccaccacagagagcgtgtgggcctag

SEQ ID NO: 104993 - DNA, 2067 bp, Artificial Sequence
  derived and/or modified sequence
atggaccggtgcaagcacgtgggccggctgcggctggcccaggaccatagcatcctgaatcctcagaagtggtgctgtctggaatgcgcaaccactgagagtgtctgggcctgcctgaagtgctcccacgtggcgtgcgggagatacatcgaggatcatgctctcaaacattttgaggagaccgggcatccactcgctatggaggtccgcgacctctacgtcttctgctacctgtgcaaagattatgtgctcaacgataatccagaaggggatttgaagctgctccggagctctctcctggccgtgagggggcagaaacaggatacaccagtgagaagaggaagaacattacgcagtatggccagtggcgaagacgtggtgctgcctcagcgcgccccacagggccagccacagatgctcacagccctatggtataggcgccagaggcttttggcccgtaccctgcgcctgtggttcgagaaatcttccaggggccaagctaagctcgaacagcgccgtcaggaggaagccctggagagaaagaaggaagaagctagacggcggcgtcgcgaagtcaagcgccgcctgcttgaagagcttgcctcaactccacctcgcaagtctgcgcgcctgctactgcatacgccacgtgatgccggacccgcagcttccagaccggctgcattgcccacatcgcggcgcgtgccagcagctacattgaagctccgtagacaaccggctatggctcccggtgtgactggcctccgcaatttaggaaatacatgttacatgaattcaatcttgcaagttctcagccacctgcagaaatttagagagtgctttttaaatctcgatccttcaaagactgagcatctctttccgaaggccacgaatggtaagacacagctgagcggcaaacccaccaactcctccgctactgagcttagcctacgcaatgacagagcagaggcttgcgagcgggaggggttttgctggaatggacgtgcatccatttcacggtctctcgagcttatacaaaataaagagccttcctccaaacacatctctttgtgcagagaactgcataccctcttccgggtgatgtggtctgggaagtgggccctggttagtccatttgctatgcttcacagtgtgtggtcgctaattcccgcatttagaggctatgaccagcaggatgctcaagagttcctatgtgagttgctgcacaaggtgcagcaagaactggagtcagagggcactacaagaaggatcctaataccattctctcagagaaaactgaccaagcaggtgctgaaagtggtgaacacgatattccatggccagttgctgtcacaggttacttgtatctcatgtaactataaatccaacactattgagccattttgggacctgtccctggagtttccggaacgataccattgcattgaaaaagggttcgtgcccctcaatcaaacggaatgcctgttaactgagatgctcgctaaatttactgaaactgaggccctggagggcagaatctacgcctgtgatcaatgcaattccaagagaagaaaaagcaaccccaagcccctggtgctgagtgaggctagaaagcaacttatgatttacagattacctcaagttctccgtctacacctgaagagattccgttggtcggggcgcaaccatagggaaaaaatcggtgttcacgtagtattcgaccaagtcctaaccatggaaccctactgttgcagagacatgctctcatcgctcgataaggagaccttcgcttatgatctgtccgccgtggtgatgcaccatggaaaaggcttcgggtctggacactacactgcatactgttataataccgaaggggggttttgggtacattgcaacgactctaagctaaatgtttgtagcgtagaagaggtgtgtaagacacaagcctacatactcttctatacacagcgcacagtgcagggcaacgcgaggatcagtgaaacccatcttcaggctcaggtccaaagttcaaataatgacgaaggtcgaccacagacattttcttag

SEQ ID NO: 104994 - DNA, 2067 bp, Artificial Sequence
  derived and/or modified sequence
atggaccggtgcaagcacgtgggccggctgcggctggcccaggaccattccatactcaatcctcaaaaatggtgttgtcttgaatgtgccaccaccgaatccgtgtgggcgtgtctgaagtgctcacacgtggcctgtgggcgttacattgaagaccatgccctcaaacactttgaggaaacaggtcatcccctggcaatggaggttcgggatctatacgttttttgctatctctgcaaagactatgttctgaacgataatcctgagggagacttaaagctcctccgaagtagccttctggccgtgaggggacagaaacaggacacgcctgttagaagaggaaggacccttcgaagcatggcctctggcgaggacgtcgttttgcctcagcgagctccacagggccagccccagatgttgacagccctctggtaccgccgtcaacgattactggctaggaccctacgcctttggtttgagaaatctagcagaggacaggcaaaacttgagcagcggagacaggaagaagccctggaacgcaagaaggaagaggccaggcggaggaggagggaagttaaacgcagacttctggaagagttggcttcaacacccccccgaaaatctgccagactgttgttgcatacaccccgcgacgccggacctgcagcaagtcgtccagctgctcttcctacctctcgccgggtccctgccgcgacgctcaagctgagaaggcaaccggctatggccccaggcgtcaccggcttaaggaacttgggaaacacttgttacatgaactccattctgcaggtgcttagccacctgcagaaatttcgagaatgcttcctgaacctggatccctccaagacagagcacttatttcctaaagctaccaatggaaaaacacagcttagtggcaagccgacaaatagcagcgctaccgaactttcattacgcaatgatcgggccgaggcctgcgagcgggaggggttctgctggaacggacgggccagcataagtaggtccctagagcttatacagaataaggagcctagctctaaacacatttccctctgccgcgagttgcacactctgttccgggtcatgtggagcggcaagtgggcactagtgagcccgtttgcgatgcttcactcagtctggagcctgattccggccttccgcggttacgatcaacaggacgcccaggagttcttatgtgagttgctccacaaagtacagcaggaactggaatctgaagggacgactagacgcatcctgatccctttttcccaacgaaagctaaccaaacaggtactgaaagtggtgaataccatttttcacgggcagctcctgagtcaggtgacctgtatcagctgtaattacaaaagtaatacaattgagcctttttgggacttgtcactggagtttcccgagaggtatcactgtatcgagaaaggatttgtgccactcaaccagacagagtgtcttctgacagaaatgcttgctaaatttacagagacggaggcattggagggcaggatttatgcctgcgaccagtgtaattctaagcggcggaagtctaatcctaaaccattggtgttgagtgaagcacgcaaacaattaatgatttaccggctgccccaagttctgcgcctgcatctaaaaagatttaggtggtcagggcgaaatcatcgggaaaagataggcgtccatgtagtgttcgatcaagtgttaactatggagccatactgttgtcgggatatgctcagctctctcgataaggaaacatttgcgtatgacctgtccgcggtcgtgatgcaccatgggaagggcttcggctccgggcactatacagcttattgttataatacagaaggcgggttctgggtacattgcaacgattctaaattaaacgtctgcagcgttgaggaagtgtgcaaaacccaggcctatattctgttttacacccagcggacggtgcaagggaacgcacgaatatctgagactcatttacaggctcaggtccagtcatctaacaatgatgagggccgccctcagacgtttagttag

SEQ ID NO: 104995 - DNA, 48 bp, Artificial Sequence
  derived and/or modified sequence
atggaccggtgcaagcacgtgggccggctgcggctggcccaggactag

SEQ ID NO: 104996 - DNA, 114 bp, Artificial Sequence
  derived and/or modified sequence
atggaccggtgcaagcacgtgggccggctgcggctggcccaggaccacagtatactgaaccctcaaaagtggtgttgtctagaatgcgccacaaccgagagtgtctgggcatag

SEQ ID NO: 104997 - DNA, 2067 bp, Artificial Sequence
  derived and/or modified sequence
atggatcgttgtaagcacgttggcagactgcgcctggcgcaggatcattctattctgaacccccagaagtggtgttgcttggagtgtgccactaccgaatcagtgtgggcttgtctgaaatgctcccacgtggcgtgtggccgttacattgaggatcacgctcttaagcatttcgaagagaccgggcatcccctggcaatggaagtgagggatctttacgttttttgctacctatgtaaagattatgtgctgaatgacaacccggagggtgacctgaagttattgcggtcatcgctgttagccgtcaggggccagaagcaggataccccggttcgcagaggtagaacgctgaggtctatggcatccggtgaggacgtagtgcttccgcagcgtgcaccccaagggcagccccagatgttaactgcgttgtggtacaggcgacagcgcctgctggccaggacactcaggctctggtttgagaaaagttcaagaggacaggcgaaattagagcagcgtcgacaggaagaggcccttgagagaaagaaggaagaggcacgacgcaggagacgcgaggtcaagcgcaggctgttggaagagctcgcgtctacccccccaagaaaaagtgctcgactgctgcttcacactccaagagacgccggacccgcagcgagtaggccagctgccttgccaactagcaggagggtcccagctgcgactctgaaattgcggcgacaacctgcgatggcaccgggtgttaccggcctccgtaaccttggaaacacctgctacatgaactccatcttgcaagtcctttcccacctgcagaagttcagagagtgttttttaaaccttgacccgtccaaaaccgaacacttgtttcctaaagcaactaacggcaaaacccagctaagcggtaagccaacgaattcatcagctactgagcttagcctgcgaaacgacagggcggaggcctgtgagcgagaggggttttgctggaatggacgggcttcaattagtcgcagtctggaactgatccagaacaaggagcccagtagcaaacacataagcctgtgccgggagctgcatacgctgtttcgcgtcatgtggtcagggaagtgggctttggtgtcgcctttcgcaatgcttcatagcgtttggagcttaattccagccttcaggggttacgaccagcaggatgcccaggagttcctctgcgaactgttgcacaaagtgcaacaggaattggaatcagaagggactaccaggagaattctgatcccctttagccaacggaagctgaccaagcaagttcttaaggtcgtcaatacaatctttcatggccagctgttgtcacaggtgacctgtatcagttgtaactataagtctaacacaattgagcccttttgggatttatcgcttgagtttcctgagagataccattgcattgagaaaggtttcgttccacttaatcagacggagtgtctgctgaccgagatgcttgctaaattcacagagaccgaggcactagagggtaggatttacgcctgtgaccagtgcaatagtaagcggcgaaagtccaatccaaagccactcgttctgtccgaggcccgtaaacaattgatgatttacaggctcccccaggtgttgcgcctacatctgaaaaggtttagatggtcaggacgcaatcatcgcgagaaaatcggggttcacgtagtgttcgaccaagtcctgacgatggaaccgtattgctgtcgcgacatgctcagtagtctcgacaaagaaacttttgcctatgatcttagtgcagttgttatgcaccacggcaagggttttggctccggccattataccgcctattgctataatactgagggagggttttgggtccattgtaacgacagtaaactcaatgtatgttctgtggaggaggtttgcaagacacaggcttatattttgttttatacgcagaggactgtgcaggggaatgccagaatctcagagacccatctccaggctcaagtgcaatcttcaaataacgacgagggccgtccccagaccttctcctag

SEQ ID NO: 104998 - DNA, 2067 bp, Artificial Sequence
  derived and/or modified sequence
atggaccgttgcaagcacgttggcagactgcggttagcgcaggatcacagtattcttaacccacagaagtggtgctgcctggaatgtgctaccacggaatcggtttgggcgtgccttaagtgcagtcatgtggcttgtggccgttatatagaagatcatgcgctgaaacattttgaagagaccggacaccccttagcgatggaggtccgggacctctacgttttctgttacctttgtaaggattacgttctgaatgataaccctgagggagatctcaagttgcttcggtcaagcctgcttgcggtgagaggtcaaaagcaagatactccagtgcggaggggccgaactctccgttctatggccagcggcgaggacgtggtgctgccccagcgggctccacagggtcagccccagatgttgaccgccctttggtatcgccgtcaacggctgctcgctcgaacattacgtctctggttcgagaagtcatccagaggccaagcaaaactcgagcaacgccgacaggaagaggcactcgagagaaagaaggaggaggcccgtagaaggagacgagaagtgaagaggcgactgctcgaggagctggcttcaaccccccctagaaagagtgccagacttctccttcatacacccagagacgcaggccctgcagcctctagacctgccgctctgcctacttctagaagggtgcccgcagctacccttaaactccggagacagcccgcaatggctcctggagtgaccggtctcaggaatctgggtaatacatgctatatgaattccattctccaggtgctgagtcatctgcagaaatttagggagtgcttcctgaatctggacccatccaaaaccgaacacctgttccctaaagcaactaatgggaaaactcaattgagcgggaagccaaccaattcctccgccactgagctttctctgagaaatgaccgggcagaggcctgcgagagggagggcttctgctggaacggccgagcgtccatcagcagatcactcgaactcatacagaataaggagccttcgagtaaacatatctccctatgcagggaattgcacaccctattccgagtgatgtggtcaggcaaatgggctcttgttagcccatttgcaatgctccacagcgtgtggtcactaatccccgctttcagaggttatgatcagcaagatgctcaagaattcctgtgtgagctcctgcacaaagtgcagcaagagcttgaaagcgagggtaccactcgtcggatattgattccgtttagccaacgcaagttgaccaagcaagtactgaaggtcgtgaataccattttccatggacagctcctgtctcaggtcacatgcatatcatgcaattacaagtccaatactatcgagcctttctgggacttgagcttagagtttcccgaaaggtaccactgcatcgagaaaggattcgttcctctgaaccaaaccgagtgtctcctgactgagatgttggctaagtttaccgaaacagaagctctggaaggcagaatttatgcctgcgatcagtgcaactccaaacgcagaaaatcgaaccccaagcctcttgtgctatccgaagcaagaaagcagctaatgatttatcgactgccccaggtactaagactgcacctcaagaggtttcggtggtcgggtcggaatcatagggagaagatcggtgtgcacgtagtctttgatcaggtgctcaccatggagccatattgttgtcgagacatgctttccagtctcgacaaagagacgttcgcatatgacttgtcagccgtcgtgatgcaccatggcaagggattcgggtcaggtcattataccgcgtattgctacaacacagaaggcggattttgggtgcattgcaatgatagtaaactgaatgtttgtagcgttgaagaggtttgtaagacacaggcctacattctgttctatacccagcgtacagtgcagggcaacgccagaatctctgagacccacctccaggctcaggtacagtcaagcaacaacgacgagggacgtcctcagactttttcctag

SEQ ID NO: 104999 - DNA, 48 bp, Artificial Sequence
  derived and/or modified sequence
atggatcgctgcaagcacgtgggtagactgcgcctcgcccaggactag

SEQ ID NO: 105000 - DNA, 114 bp, Artificial Sequence
  derived and/or modified sequence
atggatcggtgtaaacacgtcgggcgactgaggctggcacaagaccattcaatacttaacccccagaagtggtgttgtctcgagtgcgctacaaccgaaagtgtctgggcttag

SEQ ID NO: 105001 - DNA, 2067 bp, Artificial Sequence
  derived and/or modified sequence
atggatagatgcaaacatgtagggcggttacggctcgcccaggaccactccatcctgaaccctcagaagtggtgctgcttagagtgtgccaccaccgagtccgtgtgggcctgcctcaagtgctcccacgtggcctgcggccgctatattgaggaccacgccctgaaacactttgaggagacgggacacccgctagccatggaagtccgggatctctacgtgttctgttacctgtgcaaggactacgtgctcaatgataacccagagggggacctgaagctgctaagaagctccctcctggcggtccggggccagaaacaggacacgccggtgagacgtgggcggacgctgcggtccatggcttcgggtgaggacgtggtcctgccgcagcgcgctcctcagggacagccgcagatgctcacggctctgtggtaccggcgtcagcgcctgctggccaggacgctgcggctgtggttcgagaagagctcccggggccaggcgaagctggagcagcggcggcaggaggaggccctggagcgcaagaaggaggaggcgcggaggcggcggcgcgaggtgaaacggcggctgctggaggagctggccagcacccctccgcgcaagagtgcacggctgctcctgcacacgccccgcgacgcgggcccggctgcctcgcgccccgccgccctccctacctcacgcagagtgcccgccgccacactcaagctgcgtcgccagccggccatggccccaggcgtcacgggcctgcgcaacctgggcaacacctgctacatgaactccatcctccaggtgctcagccacctccagaagttccgagaatgtttcctcaaccttgacccttccaaaacggaacatctgtttcccaaagccaccaacgggaagactcagctttctggcaagccaaccaacagctcggccacggagctgtccttgagaaatgacagggccgaggcatgcgagcgggagggcttctgctggaacggcagggcctccattagtcggagtctggagctcatccagaacaaggagccgagttcaaagcacatttccctctgccgtgaactgcacaccctcttccgagtcatgtggtccgggaagtgggccctagtgtcgcccttcgccatgctccactcagtgtggagcctgatccctgccttccgcggctacgaccaacaggacgcgcaggaatttctctgcgagctgctgcacaaggtgcagcaggaactcgagtctgagggcaccacacgccggatcctcatccccttctcccagaggaagctcaccaaacaggtcttaaaggtggtgaataccatatttcatgggcagctgctcagtcaggtcacatgtatatcatgcaattacaaatccaataccattgagcccttttgggacctatccctggaattccctgaacgctatcactgcatagaaaaggggtttgtccctttgaatcaaacagagtgcttgctcactgagatgctggccaaattcacagagacagaggccctggaagggagaatctacgcttgtgaccagtgtaacagcaaacgacgaaaatccaatcccaaaccccttgttctgagtgaagctagaaagcagttaatgatctacagactacctcaggttctccggctgcaccttaaaagattcaggtggtctggccgtaatcatcgagagaagattggggtccatgtcgtctttgaccaggtattaaccatggaaccttactgctgcagggacatgctctcctctcttgacaaagagacctttgcctatgatctctccgcagtggtcatgcatcacgggaaagggtttggctcaggacactacacagcctattgctacaacacagagggaggtttttgggtccactgcaatgactcaaagctgaatgtatgcagtgtcgaggaagtgtgcaaaacccaggcctacatccttttttacactcaaagaacagtgcagggcaatgcaagaatctcagaaacccatctccaagctcaggtgcagtccagcaacaatgatgaaggcagaccacagacattttcctga

SEQ ID NO: 105002 - DNA, 4561 bp, Artificial Sequence
  derived and/or modified sequence
gggccccagaatttaaaggatgagatggggagtaagggaagagagggggctaagagaagctgggggagtcctgatggatgtagaactggggtagactgcaggggggtgggaatcgaatgtgcgtgttatggggagttgctccagaaggtctgcaagggtcagggcagaaatgctgtagtgaaagatcaagtgtaagagagcctttggtgcagaagacgaggaaccatggtaatagagaagaggaaacctaaccaatgactgtggaataatatggaagaagatggaaaaaacttgtttaatgggttgagaaagtggcgacttctataagacatggatagatgcaaacatgtagggcggttacggctcgcccaggaccactccatcctgaaccctcagaagtggtgctgcttagagtgtgccaccaccgagtccgtgtgggcctgcctcaagtgctcccacgtggcctgcggccgctatattgaggaccacgccctgaaacactttgaggagacgggacacccgctagccatggaagtccgggatctctacgtgttctgttacctgtgcaaggactacgtgctcaatgataacccagagggggacctgaagctgctaagaagctccctcctggcggtccggggccagaaacaggacacgccggtgagacgtgggcggacgctgcggtccatggcttcgggtgaggacgtggtcctgccgcagcgcgctcctcagggacagccgcagatgctcacggctctgtggtaccggcgtcagcgcctgctggccaggacgctgcggctgtggttcgagaagagctcccggggccaggcgaagctggagcagcggcggcaggaggaggccctggagcgcaagaaggaggaggcgcggaggcggcggcgcgaggtgaaacggcggctgctggaggagctggccagcacccctccgcgcaagagtgcacggctgctcctgcacacgccccgcgacgcgggcccggctgcctcgcgccccgccgccctccctacctcacgcagagtgcccgccgccacactcaagctgcgtcgccagccggccatggccccaggcgtcacgggcctgcgcaacctgggcaacacctgctacatgaactccatcctccaggtgctcagccacctccagaagttccgagaatgtttcctcaaccttgacccttccaaaacggaacatctgtttcccaaagccaccaacgggaagactcagctttctggcaagccaaccaacagctcggccacggagctgtccttgagaaatgacagggccgaggcatgcgagcgggagggcttctgctggaacggcagggcctccattagtcggagtctggagctcatccagaacaaggagccgagttcaaagcacatttccctctgccgtgaactgcacaccctcttccgagtcatgtggtccgggaagtgggccctagtgtcgcccttcgccatgctccactcagtgtggagcctgatccctgccttccgcggctacgaccaacaggacgcgcaggaatttctctgcgagctgctgcacaaggtgcagcaggaactcgagtctgagggcaccacacgccggatcctcatccccttctcccagaggaagctcaccaaacaggtcttaaaggtggtgaataccatatttcatgggcagctgctcagtcaggtcacatgtatatcatgcaattacaaatccaataccattgagcccttttgggacctatccctggaattccctgaacgctatcactgcatagaaaaggggtttgtccctttgaatcaaacagagtgcttgctcactgagatgctggccaaattcacagagacagaggccctggaagggagaatctacgcttgtgaccagtgtaacagcaaacgacgaaaatccaatcccaaaccccttgttctgagtgaagctagaaagcagttaatgatctacagactacctcaggttctccggctgcaccttaaaagattcaggtggtctggccgtaatcatcgagagaagattggggtccatgtcgtctttgaccaggtattaaccatggaaccttactgctgcagggacatgctctcctctcttgacaaagagacctttgcctatgatctctccgcagtggtcatgcatcacgggaaagggtttggctcaggacactacacagcctattgctacaacacagagggaggtttttgggtccactgcaatgactcaaagctgaatgtatgcagtgtcgaggaagtgtgcaaaacccaggcctacatccttttttacactcaaagaacagtgcagggcaatgcaagaatctcagaaacccatctccaagctcaggtgcagtccagcaacaatgatgaaggcagaccacagacattttcctgaatgggaggcatgtatcaaagactggcttttgtgtattggtgtccatacatctttcctcttataggaaataaggctactgcaggaacagattactaggtttgccttgctgggtctagagtagaaggtgccaggtgattcgtgtcctgtcgtaaattttatagtctctttcttttgaatgagtttgggagttccctcctttcctaaaaacaaaagaagtaacttctatgaagatcctttcatcagttgcttctgaatatagagggatctgggtggaggaaagcggggcgggggggtaaatcaatcatatccacacaggagagcagccatgttttctctccatgatgtgattcccctgctaatcaggacctccttgcagcaccagaagaaccctccggatgtgagcagtcctggacagagcacgtgaggaggggccctgggctagcagtttgctggatgggattggctccaagatgggagatgaagtctaaagggtttattcccacaaaggaagtaaccttcaagggtttaaaacaaacttccttttttggggatagcagctgaagagtggagtgagatgcatggaacaaatttccccatgcaaagtgggatggttttcatatgtcataccctccctacttgctgctgtcatataatcattccatacttctgagactggcatgaataccccttcattctaaagaaggggcaggtcatataaagaagcaatagactagcacatgttccatgctgagccaaaggacactcctggctatctcagttctgtagcagatccctggttcaggtctagggcaagcacatggtttggtttaaattgattcttaggttttctcagaactcaattgagggtgggcagagatagctgatgctccagggcttattgaaggcctgtcacccgttctcacttcagtgcggcatgcagcttcttagcctgcagcttctttcttgctcctggagagctagaacattcatgttcacagggtttgggagcttttggttctctagggtatgttaactgcttaggagtccacctcgtacatatctgaagagttgattaccaatggccttgacctgtttcctcccaaatctgataatccctactgttgctttaccccccatactcagtccatcagagaaaaaaacaagagtgccccgtcctttcccccagtgctagtaaaatacatcttcctttttaaattgggtcagtttctaaacagaatgaaattgcccagataaaaacccttgtccccatcaggcaccacttcattcttagttcttcacttagatttgctggtgaaagtgaatgcaaaccctaacttttgttgctgtggtcactgcagtgagcctcactcaacctgtcactatgaatgctcatcttttgactgagtatatcatattaatgtttgaattcaggtagaagtacagttgtcacttgaagggagtagatgtggaagggcgttcggggaggagtgggaagtggggaaagccaggctaaagaatgagggttatagctttagcaatgttgatgagccacatttcccacacagatctgtagcatttgctgttgacctcttttgagatgaactctcccataggccctgccaggcagcactgagacatggaggaaattcagacaaaaaatggctcaccctgatagggaaggagtgactatattttaaattaaacttgctttttccaacactgtgaggtttctgtaatatttagcttttatttggaagcgatagcgtatggcattttttatgctgtttggtttatattgtctactgcaggcttctttgtataagctttgcctgggctcaccctctcctggacactgttttaaagtgtcaccgctgtccatgctgccagaggctctgatgtgaagctgtactctcaagatccacgtttttaagtcggcatgattagtaatgactttttgtggcaatagaaaagcccattaactcaaaaaaaccaaggagagtaaaaaggaaaggaaactatgaatcgtgcctcatctttcattgaatcctatatttattattctagaaaaaaagaacttacaagatagagaagaactaatagagcatctactttacccctcaggctgtccagtggggataattattaataaacatttaatggaaaa

SEQ ID NO: 105003 - protein, 143 aa, Artificial Sequence
  derived and/or modified sequence
  misc_feature (1)..(1): Xaa can be any naturally occurring amino acid
XTRHFKESIKFIHECRLRGESCLVHCLAGVSRSVTLVIAYIMTVTDFGWEDALHTVRAGRSCANPNVGFQRQLQEFEKHEVHQYRQWLKEEYGESPLQDAEEAKNILGKYKEQGRTEPQPGARRWSSFPALAPLTYDNYTTET

SEQ ID NO: 105004 - protein, 2101 aa, Artificial Sequence
  derived and/or modified sequence
MTLHATRGAALLSWVNSLHVADPVEAVLQLQDCSIFIKIIDRIHGTEEGQQILKQPVSERLDFVCSFLQKNRKHPSSPECLVSAQKVLEGSELELAKMTMLLLYHSTMSSKSPRDWEQFEYKIQAELAVILKFVLDHEDGLNLNEDLENFLQKAPVPSTCSSTFPEELSPPSHQAKREIRFLELQKVASSSSGNNFLSGSPASPMGDILQTPQFQMRRLKKQLADERSNRDELELELAENRKLLTEKDAQIAMMQQRIDRLALLNEKQAASPLEPKELEELRDKNESLTMRLHETLKQCQDLKTEKSQMDRKINQLSEENGDLSFKLREFASHLQQLQDALNELTEEHSKATQEWLEKQAQLEKELSAALQDKKCLEEKNEILQGKLSQLEEHLSQLQDNPPQEKGEVLGDVLQLETLKQEAATLAANNTQLQARVEMLETERGQQEAKLLAERGHFEEEKQQLSSLITDLQSSISNLSQAKEELEQASQAHGARLTAQVASLTSELTTLNATIQQQDQELAGLKQQAKEKQAQLAQTLQQQEQASQGLRHQVEQLSSSLKQKEQQLKEVAEKQEATRQDHAQQLATAAEEREASLRERDAALKQLEALEKEKAAKLEILQQQLQVANEARDSAQTSVTQAQREKAELSRKVEELQACVETARQEQHEAQAQVAELELQLRSEQQKATEKERVAQEKDQLQEQLQALKESLKVTKGSLEEEKRRAADALEEQQRCISELKAETRSLVEQHKRERKELEEERAGRKGLEARLQQLGEAHQAETEVLRRELAEAMAAQHTAESECEQLVKEVAAWRERYEDSQQEEAQYGAMFQEQLMTLKEECEKARQELQEAKEKVAGIESHSELQISRQQNELAELHANLARALQQVQEKEVRAQKLADDLSTLQEKMAATSKEVARLETLVRKAGEQQETASRELVKEPARAGDRQPEWLEEQQGRQFCSTQAALQAMEREAEQMGNELERLRAALMESQGQQQEERGQQEREVARLTQERGRAQADLALEKAARAELEMRLQNALNEQRVEFATLQEALAHALTEKEGKDQELAKLRGLEAAQIKELEELRQTVKQLKEQLAKKEKEHASGSGAQSEAAGRTEPTGPKLEALRAEVSKLEQQCQKQQEQADSLERSLEAERASRAERDSALETLQGQLEEKAQELGHSQSALASAQRELAAFRTKVQDHSKAEDEWKAQVARGRQEAERKNSLISSLEEEVSILNRQVLEKEGESKELKRLVMAESEKSQKLEERLRLLQAETASNSARAAERSSALREEVQSLREEAEKQRVASENLRQELTSQAERAEELGQELKAWQEKFFQKEQALSTLQLEHTSTQALVSELLPAKHLCQQLQAEQAAAEKRHREELEQSKQAAGGLRAELLRAQRELGELIPLRQKVAEQERTAQQLRAEKASYAEQLSMLKKAHGLLAEENRGLGERANLGRQFLEVELDQAREKYVQELAAVRADAETRLAEVQREAQSTARELEVMTAKYEGAKVKVLEERQRFQEERQKLTAQVEELSKKLADSDQASKVQQQKLKAVQAQGGESQQEAQRLQAQLNELQAQLSQKEQAAEHYKLQMEKAKTHYDAKKQQNQELQEQLRSLEQLQKENKELRAEAERLGHELQQAGLKTKEAEQTCRHLTAQVRSLEAQVAHADQQLRDLGKFQVATDALKSREPQAKPQLDLSIDSLDLSCEEGTPLSITSKLPRTQPDGTSVPGEPASPISQRLPPKVESLESLYFTPIPARSQAPLESSLDSLGDVFLDSGRKTRSARRRTTQIINITMTKKLDVEEPDSANSSFYSTRSAPASQASLRATSSTQSLARLGSPDYGNSALLSLPGYRPTTRSSARRSQAGVSSGAPPGRNSFYMGTCQDEPEQLDDWNRIAELQQRNRVCPPHLKTCYPLESRPSLSLGTITDEEMKTGDPQETLRRASMQPIQIAEGTGITTRQQRKRVSLEPHQGPGTPESKKATSCFPRPMTPRDRHEGRKQSTTEAQKKAAPASTKQADRRQSMAFSILNTPKKLGNSLLRRGASKKALSKASPNTRSGTRRSPRIATTTASAATAAAIGATPRAKGKAKH

SEQ ID NO: 105005 - protein, 1664 aa, Artificial Sequence
  derived and/or modified sequence
MLETERGQQEAKLLAERGHFEEEKQQLSSLITDLQSSISNLSQAKEELEQASQAHGARLTAQVASLTSELTTLNATIQQQDQELAGLKQQAKEKQAQLAQTLQQQEQASQGLRHQVEQLSSSLKQKEQQLKEVAEKQEATRQDHAQQLATAAEEREASLRERDAALKQLEALEKEKAAKLEILQQQLQVANEARDSAQTSVTQAQREKAELSRKVEELQACVETARQEQHEAQAQVAELELQLRSEQQKATEKERVAQEKDQLQEQLQALKESLKVTKGSLEEEKRRAADALEEQQRCISELKAETRSLVEQHKRERKELEEERAGRKGLEARLQQLGEAHQAETEVLRRELAEAMAAQHTAESECEQLVKEVAAWRERYEDSQQEEAQYGAMFQEQLMTLKEECEKARQELQEAKEKVAGIESHSELQISRQQNELAELHANLARALQQVQEKEVRAQKLADDLSTLQEKMAATSKEVARLETLVRKAGEQQETASRELVKEPARAGDRQPEWLEEQQGRQFCSTQAALQAMEREAEQMGNELERLRAALMESQGQQQEERGQQEREVARLTQERGRAQADLALEKAARAELEMRLQNALNEQRVEFATLQEALAHALTEKEGKDQELAKLRGLEAAQIKELEELRQTVKQLKEQLAKKEKEHASGSGAQSEAAGRTEPTGPKLEALRAEVSKLEQQCQKQQEQADSLERSLEAERASRAERDSALETLQGQLEEKAQELGHSQSALASAQRELAAFRTKVQDHSKAEDEWKAQVARGRQEAERKNSLISSLEEEVSILNRQVLEKEGESKELKRLVMAESEKSQKLEERLRLLQAETASNSARAAERSSALREEVQSLREEAEKQRVASENLRQELTSQAERAEELGQELKAWQEKFFQKEQALSTLQLEHTSTQALVSELLPAKHLCQQLQAEQAAAEKRHREELEQSKQAAGGLRAELLRAQRELGELIPLRQKVAEQERTAQQLRAEKASYAEQLSMLKKAHGLLAEENRGLGERANLGRQFLEVELDQAREKYVQELAAVRADAETRLAEVQREAQSTARELEVMTAKYEGAKVKVLEERQRFQEERQKLTAQVEELSKKLADSDQASKVQQQKLKAVQAQGGESQQEAQRLQAQLNELQAQLSQKEQAAEHYKLQMEKAKTHYDAKKQQNQELQEQLRSLEQLQKENKELRAEAERLGHELQQAGLKTKEAEQTCRHLTAQVRSLEAQVAHADQQLRDLGKFQVATDALKSREPQAKPQLDLSIDSLDLSCEEGTPLSITSKLPRTQPDGTSVPGEPASPISQRLPPKVESLESLYFTPIPARSQAPLESSLDSLGDVFLDSGRKTRSARRRTTQIINITMTKKLDVEEPDSANSSFYSTRSAPASQASLRATSSTQSLARLGSPDYGNSALLSLPGYRPTTRSSARRSQAGVSSGAPPGRNSFYMGTCQDEPEQLDDWNRIAELQQRNRVCPPHLKTCYPLESRPSLSLGTITDEEMKTGDPQETLRRASMQPIQIAEGTGITTRQQRKRVSLEPHQGPGTPESKKATSCFPRPMTPRDRHEGRKQSTTEAQKKAAPASTKQADRRQSMAFSILNTPKKLGNSLLRRGASKKALSKASPNTRSGTRRSPRIATTTASAATAAAIGATPRAKGKAKH

SEQ ID NO: 105006 - protein, 91 aa, Artificial Sequence
  derived and/or modified sequence
MTLHATRGAALLSWVNSLHVADPVEAVLQLQDCSIFIKIIDRIHGTEEGQQILKQPVSERLDFVCSFLQKNRKHPSSPECLVSAQKVLEGS

SEQ ID NO: 105007 - protein, 109 aa, Artificial Sequence
  derived and/or modified sequence
MTLHATRGAALLSWVNSLHVADPVEAVLQLQDCSIFIKIIDRIHGTEEGQQILKQPVSERLDFVCSFLQKNRKHPSSPECLVSAQKVLEGSELELAKMTMLLLYHSTMS

SEQ ID NO: 105008 - protein, 83 aa, Artificial Sequence
  derived and/or modified sequence
MTLHATRGAALLSWVNSLHVADPVEAVLQLQDCSIFIKIIDRIHGTEEGQQILKQPVSERLDFVCSFLQKNRKHPSSPECLVS

SEQ ID NO: 105009 - protein, 220 aa, Artificial Sequence
  derived and/or modified sequence
MTLHATRGAALLSWVNSLHVADPVEAVLQLQDCSIFIKIIDRIHGTEEGQQILKQPVSERLDFVCSFLQKNRKHPSSPECLVSAQKVLEGSELELAKMTMLLLYHSTMSSKSPRDWEQFEYKIQAELAVILKFVLDHEDGLNLNEDLENFLQKAPVPSTCSSTFPEELSPPSHQAKREIRFLELQKVASSSSGNNFLSGSPASPMGDILQTPQFQMRRLK

SEQ ID NO: 105010 - DNA, 2940 bp, Artificial Sequence
  derived and/or modified sequence
atgaccctgcatgcgactcgcggcgccgccttgctctcctgggtcaactcactccacgttgccgaccctgtggaagctgtcttacagctgcaggactgctcaatttttattaaaattattgatcggatccatgggacggaggagggccaacagatactgaagcaacccgtgtctgaacgtctggactttgtctgtagctttctccagaaaaatcggaaacacccgagtagccctgaatgcctggtgtctgcccagaaagtgctcgaagggtcagagcttgaattggcaaagatgactatgctgttactctatcactccacaatgagctccaaaagcccgcgcgattgggagcagtttgagtacaaaatacaggccgaattggccgtgatcttaaaattcgtgctggatcacgaggatggtcttaatttgaatgaagatctggagaactttttacaaaaagcccccgtaccctcaacatgttcctccacttttcctgaagaactgtctccaccttctcatcaggccaaacgtgaaattcgattcttggaattacagaaggtggcttcatctagttcgggcaataactttctatccggctcccctgcatctcccatgggcgacatacttcagaccccccagttccagatgagacggttgaagaagcagctcgccgatgaaaggtccaatagggatgagctcgaactcgaactggctgagaaccggaaattattaacagaaaaagacgcgcagattgccatgatgcagcagaggatcgacaggcttgccttactgaatgagaagcaggctgcgagcccgcttgagccaaaagagctggaagaactccgagataagaatgaatcactcaccatgagactgcacgagactttaaagcagtgccaggacttgaagactgaaaagtcccagatggatcgcaaaatcaaccagttgagcgaggaaaatggtgatctgagcttcaaactgcgtgaatttgctagccatctccagcagctccaggatgctctgaacgagctaacagaggagcatagcaaggctactcaggaatggctggagaaacaggctcagctcgagaaggaactgtcagctgctctacaggacaagaagtgtttagaagaaaagaatgagattctgcagggcaagctgagccagctggaggaacacctttcacagttacaagataatccacctcaggaaaaaggagaggtgctgggagacgttttacaggttgaagaattgtctaagaagcttgctgactccgatcaggcctctaaggtccagcagcagaaattgaaggcggtgcaagctcaaggcggcgagtctcagcaggaggcccaacgcctgcaagcacagctgaatgagctgcaggctcagctttctcagaaggagcaagctgccgagcattacaaactgcagatggagaaagccaagactcactatgacgcaaagaaacagcagaaccaggagctacaggagcagctgcgaagcctcgagcagctgcaaaaagagaacaaagagctgcgagccgaagccgagagacttgggcatgagttacagcaggccgggttgaagacaaaggaagcggagcagacttgcagacatcttactgctcaggttcgctcactggaggctcaggtggctcatgcagaccagcagctcagggacttgggaaagttccaagtggctacagatgccctgaagtctagagaaccgcaggctaagccccaactggatcttagcattgattctctggacctatcatgtgaggaaggtacaccgttgtcaattaccagtaagctgcctcgcacacagcccgacgggacttcagtgcccggtgagccggccagtccgatttcacagaggttgccccctaaggttgaatctttagagtcactgtatttcacccctataccagctaggtctcaggcgccgttggagtcttctctggattctcttggtgatgtgttcttagacagtggaaggaagacccgttctgcgagaaggcggacaacccagatcatcaacattaccatgacaaaaaagctcgatgtcgaagagcctgattccgccaatagcagcttttactccacacgctccgccccagcttcacaagcgtcactgagagctacctctagcacacagtcactggctaggctgggttctcctgattacgggaacagcgctctactatccctacccggctaccggccaactacgcggagctccgcaagaaggagccaggccggggtgagctccggtgcaccccccggtcgaaattcattctacatgggtacctgccaggatgagcctgaacagctggacgattggaaccggatcgctgagttgcagcagaggaacagggtgtgccccccacaccttaagacatgttacccactggagagtagaccaagcctgagtcttggaactatcaccgacgaagaaatgaaaaccggggatcctcaggagacattgcgccgcgcctccatgcagccaattcaaatcgccgaagggactgggatcaccacgcgacaacagcggaagagggtgagcctagaaccgcatcagggccccggaactccagagtcgaagaaagccacctcatgctttcctcgccctatgaccccacgcgatcgccacgaaggtaggaaacaaagcaccaccgaggcacagaagaaggccgccccagctagcaccaaacaggccgatcgccggcaaagcatggccttctccatcttaaacactccaaaaaaactcggcaatagcttattaaggcgaggcgcctcaaaaaaagcacttagtaaggccagtccaaacactcggtcaggcactcgccgcagtccacggattgcgacaacaacagcgtcagcagccactgccgccgccattggcgctacacccagagccaaaggcaaggccaagcactag

SEQ ID NO: 105011 - DNA, 6306 bp, Artificial Sequence
  derived and/or modified sequence
atgacactccatgcaacgcgaggcgccgcgttattatcatgggtaaatagtctccacgtggccgatccagtggaagctgtgctccagcttcaggattgttccatcttcatcaagattatcgatcggattcacggcacagaggaaggccagcagatcctcaaacagccagtcagcgaacgccttgatttcgtgtgttcctttctgcaaaaaaacagaaaacatcctagctcgccagagtgtctggtatccgcacaaaaggttctggaggggagcgaacttgaactggccaaaatgacaatgctcctcctgtaccattcaaccatgagtagtaagtctccccgcgattgggagcagttcgaatacaaaatccaagctgagctggctgtgatactgaagttcgtgttagatcacgaagatggtctaaatttgaatgaggatcttgagaattttttgcagaaagcccctgtgccttctacgtgtagcagcaccttccctgaagagcttagtcccccaagtcaccaggctaagagagagattcgtttcctcgaactgcagaaggtggcatcatcctcatccggaaacaattttctcagcggcagccctgcctcaccgatgggagacatacttcaaacccctcagttccagatgaggcggctgaagaagcagctagccgacgagaggtctaatcgggacgagttagagctcgaactagccgaaaaccggaagctgttgactgaaaaggatgcccaaattgctatgatgcaacagagaattgaccgactggcgctactaaatgaaaagcaggcagccagccctttagagcccaaggagttggaggaactacgagataagaacgagtccttgaccatgaggctgcacgagactctgaagcagtgccaagacttgaaaacagaaaagtcccagatggaccgcaagataaaccagctgtcagaggaaaatggggacttgtcatttaaactgagagagttcgctagccatctgcaacagcttcaagacgccttgaatgaactgacagaagaacattctaaggcaacacaggagtggctcgagaagcaggcccagctggagaaggagctttccgccgctctccaggataagaagtgcctggaggaaaaaaacgagatcctgcagggcaagctgtcccaattggaggaacatctgagtcagctgcaggataatccgccccaggaaaaaggggaggtgctaggggatgtcctccaattggagactctgaaacaggaagctgccacgttggctgccaataacacacaactacaggcccgcgtggagatgctggagaccgagcgcggccagcaagaagccaaacttcttgccgaacgtggacacttcgaggaggaaaaacagcaattgagttccttgatcaccgacctccagagctcaataagcaatctgtcccaggctaaagaagaactggagcaggcctcccaagctcacggcgcccggcttacagcccaggtcgctagcctgacttccgaactgacaacgcttaacgctaccatccaacaacaagaccaggagcttgccggcctcaagcagcaggcgaaggaaaagcaggcacaactagctcaaactctccaacagcaggagcaggcctcccaaggtctccgtcaccaggttgagcagctgtcaagctctttgaagcagaaggagcagcaactgaaggaggtggccgaaaagcaggaggccactaggcaagaccacgctcagcagctggcaaccgcggcagaggagcgcgaggccagcttgcgagaacgggacgcagcattgaagcagttggaagctttggagaaggagaaggctgctaagctggagattctccagcaacagctgcaagtggcaaacgaagctcgcgactccgcgcagacatcggtcacccaagctcagcgcgaaaaggcagagctcagtaggaaagttgaggagctacaggcttgcgttgaaacggcccggcaggagcagcatgaggcccaggcccaggttgcggagctggagctccagctgagatcagaacagcagaaagcaacagaaaaggagagggtagcccaagaaaaagaccagttacaggaacagctgcaagcccttaaggaaagtctcaaagtcacaaaggggagcttagaggaggagaaaaggagagcagctgacgctctcgaggaacagcagagatgcatctcagagttgaaagccgaaactcgctcgttggtggagcagcataaacgcgaacggaaagagcttgaagaagaaagggcgggcagaaaagggttggaagcacgcttacagcagttgggtgaggcgcatcaggcagagacagaagtgcttcggagggagcttgctgaggccatggccgcgcagcatactgccgagtccgagtgcgaacaactggtcaaagaggtggcagcctggcgagaacggtatgaggacagtcaacaagaggaggcgcagtacggcgccatgtttcaggagcaactgatgacactcaaggaggagtgtgagaaagcgcggcaggagctgcaggaagccaaggagaaagtcgccgggatcgagagccatagtgaacttcagatatcaaggcagcagaacgagctggccgagttacatgcaaatctcgcacgggccctgcagcaagttcaggaaaaagaggtgagggcccagaagttggctgacgatctttccaccctgcaggagaaaatggccgccactagcaaagaggtggcaagactggaaaccctcgtcaggaaagccggcgagcagcaggagacggcctcacgcgagctcgttaaggagcctgccagagctggcgatcgccagcccgaatggcttgaggagcagcaggggcgacagttctgttcgacacaagcagccttgcaggcaatggaacgtgaggctgagcagatgggaaacgagttggagaggcttcgcgctgcactgatggaatctcaaggccagcagcaggaggaacgcggccagcaggaacgggaggtggctcgcctaacccaggaacgcggtagagcccaagcggatctggcgcttgaaaaggctgcacgtgctgagctggaaatgagactccagaatgctcttaatgaacaacgggtggaattcgccacgctgcaggaagccctggcgcacgcattgactgagaaggagggtaaggaccaggagctcgccaaacttcgcggccttgaagccgcacagattaaggaacttgaggagctccgccagactgtgaaacagctgaaggagcaattagctaagaaagaaaaggagcatgccagtggcagcggggcccagagtgaggctgcaggtagaaccgagcccacgggccctaaattagaagccctccgggctgaagtgagtaagctcgagcagcagtgtcaaaaacagcaggaacaggctgattcattggaacgtagcctggaggccgaacgggccagtcgcgcagagcgtgactccgctctcgagactctgcaggggcaattggaggaaaaggcacaggagctcggacattcccaatccgccctggcttccgctcagcgagaactggccgcattccgaacaaaagttcaggatcatagcaaggccgaagacgagtggaaggctcaagtggcccgcggtagacaagaggctgagagaaagaattcactcataagtagccttgaagaagaagtgtcaatcctaaaccggcaggtgctggagaaggagggggagagtaaggaacttaaacgtttggtaatggctgagagcgaaaagagccagaaactggaagagcgcctcagactcctccaggccgagacggctagcaattctgccagagccgccgagcgcagcagcgccctgagggaggaagtacagtcacttcgtgaggaggcagaaaagcaacgggtggcgtccgagaatctgcgacaggagctgacatcccaggctgagagagctgaggagctaggccaggagcttaaagcttggcaagaaaagtttttccagaaagagcaagcactgagtactcttcagctcgaacatacatcaacgcaggcacttgtgtccgagctgttgcctgccaagcacctttgccagcagctacaggccgaacaagccgcggcagaaaaacgccacagagaggaactggagcaatctaaacaggcagccggcgggttgcgcgcggagcttctccgggcccagcgggaattgggtgaactgatccctctccggcaaaaggtggcagagcaagaacgtactgctcaacaactgcgtgccgagaaggccagctacgcagagcagctgtcaatgctgaagaaagctcacggtcttctcgcagaagagaatcggggtctaggagaacgggctaatctagggagacagtttcttgaggttgagcttgaccaggccagggagaaatacgtgcaggagctggccgccgtccgcgcggacgctgaaactcgccttgcggaggtgcagcgcgaagcacaaagcaccgccagggagttggaggtgatgactgcaaaatatgagggagctaaggtgaaggtgctagaggaaagacaaagatttcaggaggagcgacagaagctcacggcccaggttgaggagctttcaaaaaagctggcggacagtgaccaggctagcaaggtccagcagcaaaaacttaaggccgtccaggcccagggtggagagagccagcaggaggctcaacgactacaagcccaactgaacgaacttcaagcccagcttagtcagaaggagcaggcagccgaacactacaaacttcagatggagaaggcaaagacacactacgacgcgaaaaagcaacagaaccaggagctccaggagcaactaaggtccctggagcagctgcagaaggagaataaggaactccgcgctgaggctgaaaggctggggcacgaacttcaacaggcagggctgaagactaaggaagccgagcaaacatgccgccaccttactgcccaggtgaggtcgctggaagctcaggtggctcatgccgatcagcaactacgggacctgggcaagttccaagtggccaccgacgccctgaagagtagagagccacaggctaagccgcagctagatctctctattgactcactggacctctcgtgtgaggaggggacccctctgtccatcacaagcaagttgcctcgaactcaaccagatgggaccagcgtgcctggggagcctgctagccccatcagtcaaaggttgccacctaaggtcgagagccttgaatctctatacttcacaccgatccccgcccgttcccaggctccactggaatcttctctagatagcctcggcgacgtgttcctggacagcggacgtaagacccggtctgctaggcgaagaacaactcaaatcatcaacataacgatgacaaagaagctggatgtggaggagcccgatagcgctaattccagcttttacagtacaagaagtgccccggcatcccaggcttctttacgcgccacctcgagcacacaaagccttgcacgccttggctcgccagattatggcaactctgctctcctcagtctgcccgggtaccgcccaacaacccgttcctcagctagaaggagtcaggcgggagtctcttccggcgctcctcctggcagaaactccttttacatgggcacatgtcaagatgagccagaacagttagacgattggaacaggatcgccgagcttcaacagaggaatagggtctgccccccacaccttaaaacgtgttatcctcttgagtcaaggccgagcctcagtctggggaccatcacagacgaagagatgaagactggggacccccaagagaccttgcggcgggctagtatgcagcctattcagatcgctgaaggaacaggtataacaacccggcaacagcgcaaacgggtatccctggaaccacaccagggccccggcactccagagtctaagaaggcaacatcttgcttccctcggccaatgactccacgagatcgtcacgaggggagaaagcagagcacgactgaagcccaaaagaaggccgccccggcttctactaagcaggccgataggcggcagtccatggcgtttagtattctaaatacccccaagaagctgggtaatagcctgcttcggaggggagccagcaagaaggcccttagcaaggcatcgccaaatactcgctcagggacccgccgcagcccacgaatcgcaacgacaaccgcgtcggcagccaccgcagcagcgatcggagcaaccccccgcgcaaaaggcaaggccaagcattag

SEQ ID NO: 105012 - DNA, 4995 bp, Artificial Sequence
  derived and/or modified sequence
atgttggagacggagcgggggcaacaagaggcgaagctcctcgccgaaagagggcattttgaagaggaaaaacagcaactctcttctctgattactgatctgcagagcagtatatctaatttatcgcaggccaaggaagaactggagcaggcatctcaggcccatggggcaaggctgactgcccaggtcgcctctctgacttctgaactcacaacattaaacgcaaccattcagcagcaggatcaggaactggcgggcctgaagcagcaagctaaggagaaacaagcgcaactcgcccaaacactacaacagcaagaacaggcctctcaggggctacgacaccaggtagaacagctgagtagctctttaaagcaaaaggaacagcagctaaaggaagttgccgagaagcaggaagcgacaagacaggatcacgctcagcagctcgctacagccgccgaagagcgggaagcctctttgcgcgagcgcgatgccgcgctgaagcagcttgaggcattggagaaggagaaggcggctaaactggagattctgcagcagcaactgcaggtagccaatgaggccagggactccgcccagacctccgtcacccaagcccagagggagaaggcggaattatctcgtaaagtcgaagaactgcaggcctgtgtggaaacagcccgtcaggaacagcacgaggcacaggcgcaggtcgcagagttggaattgcagctgaggtctgaacagcagaaggccaccgagaaagaaagagttgcccaggaaaaagatcaactccaagagcagctccaggctctcaaggaaagcttaaaggtgaccaaagggagcctagaggaagagaagcggagggccgccgatgcactcgaggaacagcagcggtgtatttccgaattgaaggcggaaactaggagcctagtggagcagcataaacgggaaagaaaagaactggaagaggaacgtgcagggcggaagggcttagaggcacgactgcagcagcttggagaagcccatcaagctgagactgaggtgctgaggagagagcttgccgaggctatggctgcccaacacactgccgaatcggaatgtgagcaactcgtgaaagaggtcgccgcatggcgcgaacgttatgaggattcacagcaagaggaagcgcagtacggggccatgtttcaggagcaactgatgaccctgaaggaagagtgcgagaaagctagacaggaacttcaggaggccaaagagaaggtcgccgggatcgagagtcactccgaactccagattagcaggcagcagaatgagctggcagaactacacgccaatctcgcccgcgctttgcagcaggtccaggagaaggaagttcgcgcccagaaactcgccgatgacctgagtacgctccaagagaagatggcggcaacctccaaagaggttgccaggcttgaaactttagttaggaaagccggagaacagcaggagacggccagtcgtgagctcgtgaaggaacctgccagggccggagaccggcaaccagaatggctagaagagcagcagggccgtcagttctgcagcactcaagctgccctccaggccatggaacgcgaggccgaacagatgggcaatgagctcgagcgcctcagagctgccctaatggagtcccagggtcagcagcaagaggagaggggccaacaggaacgggaggtagcccggttgacacaagaacgcggtcgagcacaggccgatctggccctagagaaagcggctcgggccgagctggaaatgagactgcagaatgccttgaatgagcagcgggtggagtttgcaaccttacaggaggccctggcgcacgctctgactgaaaaagagggtaaggaccaagagctcgcgaagctgcgcggactcgaagctgcccaaattaaggagctagaggagttgagacagacagttaagcagctgaaagagcaactagccaaaaaggagaaagagcacgcctcgggttcaggcgctcaatcagaagctgcaggacgaacagagcctacaggccccaaattggaggccttgagggctgaggtatcaaaacttgagcagcagtgtcagaagcagcaagagcaagctgacagcctggagcggagcctggaagcggagcgagccagcagggcagagcgtgatagcgcgcttgaaacacttcaggggcagctggaggaaaaagcccaggagctggggcactctcagtcagccctggcgtctgctcagcgggaactcgcagctttcaggacaaaagttcaagatcacagtaaagcggaggacgagtggaaagcccaggttgcgcggggacgccaagaggcagaacgtaagaacagtctgatatctagcctggaagaggaggtctccatacttaacaggcaggtcctagaaaaagagggggaatctaaggaattgaaaagactggtcatggcagagtcggaaaaatcccagaagttagaggagcgactgaggctattacaggccgaaactgcttcaaactctgcgcgcgccgccgagagaagttctgctcttagagaagaagtacagtccctccgcgaagaggcggaaaaacaacgtgtggctagtgaaaatctgaggcaggagctaacatctcaggccgagcgcgcagaagagctgggtcaggagctcaaggcatggcaggagaaattttttcaaaaggaacaggcactgagcactttgcagcttgagcatacctctacacaggctctagttagcgagctgctgcccgcgaagcatctgtgtcagcaacttcaggccgaacaagccgcagctgaaaagagacaccgcgaagaactcgaacagtctaaacaagccgcggggggactgagggccgaattgctgagagcccagagagagttaggggagttgattccattgaggcagaaagtggccgagcaggaacgaacagcccagcagctgcgagctgagaaggcctcctacgccgagcagctgtcaatgctgaaaaaggcacatggacttctcgcagaggaaaaccgaggcttgggtgagcgagccaacctaggaaggcagtttctggaggtagagctggaccaggccagggaaaagtatgtgcaggagttagctgctgtgcgcgcagacgccgaaacccgactggccgaagtacagagagaagctcaaagtacagctcgggaactggaagtaatgaccgcaaaatatgagggcgccaaggttaaggtcttagaagaaaggcagcgtttccaggaggagcgtcaaaagctcaccgcccaagtcgaggaactgtccaaaaaattggcggattccgaccaggccagtaaggtgcagcagcagaagttgaaggcggtacaggcgcagggcggtgagtcgcaacaggaagctcaaaggcttcaggcccagctaaatgagcttcaggcccagctgagccagaaggaacaggccgcagaacattataagctgcagatggagaaagcgaaaacgcattacgacgctaaaaagcagcagaatcaggaactccaggaacaattacggtctctggagcagttacaaaaggagaacaaagaactacgcgccgaagctgaacggttaggccatgaacttcagcaggccgggctgaaaacgaaagaggctgaacagacctgccgtcatttgaccgcccaggtgaggtctttggaagctcaagtggcccatgcagaccagcagctaagagatctcggcaagtttcaggtggccacggatgctctcaagtcacgggaacctcaggcaaagccacagttggacctgtccatcgactcactcgacctgagctgcgaggaggggacgcccctgagcattacaagcaaattaccccgaactcaacctgatggaacctctgtgccaggcgaaccggcgtccccgatttcgcaacggctaccacccaaagtcgagtctttggagtctctctatttcacacctatccccgcacgttcgcaagctcccctcgaaagcagcctcgactcccttggcgacgtattcctggacagcggcagaaaaacgagaagtgcaaggcggcgcactacacaaattatcaatattactatgacgaagaaactcgatgtggaggaacctgattctgccaatagttcattctattctactcgttccgcacctgccagtcaagcttcactcagggccacgagtagtacccaaagcctggctcggttaggaagtcccgactacgggaattcagccctgctttccttaccaggctacaggcccactacgcgttctagcgcaaggcggtcccaggcgggggtctcttctggagccccgcctggacggaatagtttctacatggggacatgccaagatgagccagaacagttagacgattggaaccggatagcagagctccagcagaggaaccgggtttgtcctccgcacctcaaaacatgttatcccctcgagtcacgcccgtctctttccctggggacaataaccgatgaagaaatgaaaacaggcgatcctcaggagacactcaggcgggcatcaatgcagcctatccagatcgctgagggcacaggcatcacaactaggcaacagcgaaaacgggtctccttagaacctcaccagggcccaggtacccccgaatccaagaaggccacgagctgtttccctaggcccatgacccctagagatcggcacgagggacggaaacagagtaccacagaagcccagaagaaagcagcccccgcgagcacaaagcaggccgatagaagacagtctatggcctttagcattctgaatacgcctaagaagctgggcaattccctgctccgacgcggggcttccaaaaaggccttatccaaggcctcaccaaacacccggagcggtacccgacggagtcctaggattgctacgactacagcctctgccgcaacagctgccgctatcggcgcaacgcctagagcaaaagggaaggccaagcattag

SEQ ID NO: 105013 - DNA, 606 bp, Artificial Sequence
  derived and/or modified sequence
atgacactgcatgccaccagaggggccgcgctcctgtcctgggttaatagtctccacgtggccgatcccgtagaggccgtccttcagcttcaggactgcagtatcttcattaaaatcattgaccggattcacggtacggaggagggacaacaaatccttaagcagccggtctctgagcgactggatttcgtgtgcagctttctccaaaaaaaccgcaaacaccccagctccccagaatgtctcgtctcagcccagaaggtgctcgaaggaagtgagttggaactggccaaaatgactatgctgctgctgtaccatagtaccatgtccagcaagagccctcgtgactgggaacagttcgagtataagattcaggcagaactggcagtgatcttaaagtttgtgctagaccacgaggacggcctgaacttgaacgaagacttagaaaatttcctccagaaggcccccgttcccagtacttgttcttctaccttcccagaagagctcagcccacccagccaccaagccaagcgagagattcgatttttggaactccaaaaggtggcctcatcctccagcgggaataatttcttgtcaggcagtccatag

SEQ ID NO: 105014 - DNA, 663 bp, Artificial Sequence
  derived and/or modified sequence
atgacactccacgctactcgcggggcagcacttttatcctgggttaacagcctccacgtagccgacccagtggaggccgttcttcagctgcaggactgttctatttttatcaaaatcatcgatcgcatccatggaaccgaagagggccagcagattctgaagcaacccgtgtctgagcgattggatttcgtgtgctctttcctccaaaaaaatcgcaagcaccccagtagtcccgagtgtttggttagtgctcagaaggtactggaagggagtgaactggaattagccaagatgacgatgttgttgctgtatcattcaaccatgtcctccaagagcccaagggattgggagcagtttgaatacaagatccaggctgagctggccgtcatcttgaaatttgtgctagatcacgaggatggactgaatctcaatgaagatctcgaaaactttttgcagaaagcacctgtgccctccacttgtagtagcaccttccccgaggagctgtccccacccagtcaccaggctaaacgcgagattagatttctggagctgcagaaggtagcaagcagcagttccggaaataatttcctgagtggctcacccgccagccccatgggagatattttacagacaccacaattccagatgagacgcttgaaatag

SEQ ID NO: 105015 - DNA, 2940 bp, Artificial Sequence
  derived and/or modified sequence
atgaccctgcacgccaccagaggagctgccctgctgtcctgggtgaacagcctgcacgtggccgaccctgtggaggccgtgctgcagctgcaggactgcagcatcttcatcaagatcatcgaccgcatccacggcacagaggagggccagcagatcctgaagcagcctgtgtctgagcggctggactttgtgtgcagcttcctgcagaagaacaggaagcaccccagcagcccagaatgtctggtgtctgcccagaaggtgctggagggcagcgagctggagctggccaagatgaccatgctgctgctgtaccacagcaccatgagcagcaagagcccccgggactgggagcagtttgagtacaagatccaggccgagctggccgtcatcctgaagtttgtgctggaccatgaagatggcctgaacctgaatgaagacctggagaacttcctgcagaaggcccctgtgcccagcacctgcagcagcaccttccctgaggagctgagcccccccagccaccaggccaagcgggagatccgcttcctggagctgcagaaggtggccagcagcagcagcggcaacaacttcctgagcggcagccctgccagccccatgggagacatcctgcagaccccccagttccagatgaggcggctgaagaagcagctggctgatgagaggagcaacagagatgagctggagctggagctggctgaaaataggaagctgctgacagagaaggatgcccagatcgccatgatgcagcagagaattgaccggctggccctgctgaatgagaagcaggccgccagccccctggagcccaaggagctggaggagctgcgggacaagaatgaaagcctgaccatgaggctgcacgagaccctgaagcagtgccaggacctgaagacagagaagagccagatggacaggaagatcaaccagctgtctgaagaaaatggagacctgtccttcaagctgcgggagtttgccagccacctgcagcagctgcaggatgccctgaatgagctgacagaggagcacagcaaggccacccaggagtggctggagaagcaggcccagctggagaaggagctgtctgctgccctgcaggacaagaagtgcctggaggagaagaatgagatcctgcagggcaagctgagccagctggaggagcacctgagccagctgcaggacaaccccccccaggagaagggggaggtgctgggagatgtgctgcaggtggaggagctgagcaagaagctggccgacagcgaccaggccagcaaggtgcagcagcagaagctgaaggctgtgcaggcccagggcggggagagccagcaggaggcccagaggctgcaggcccagctgaatgagctgcaggcccagctgagccagaaggagcaggccgctgagcactacaagctgcagatggagaaggccaagacccactatgatgccaagaagcagcagaaccaggagctgcaggagcagctgcggagcctggagcagctgcagaaggagaacaaggagctgcgggcagaggccgagcggctgggccacgagctgcagcaggccggcctgaagaccaaggaggccgagcagacctgccgccacctgacagcccaggtgcgcagcctggaggcccaggtggcccacgccgaccagcagctgcgggacctgggcaagttccaggtggccacagatgccctgaagagccgggagccccaggccaagccccagctggacctgagcattgacagcctggacctgagctgtgaggagggcacccccctgagcatcaccagcaagctgcccaggacccagccagatggcacctctgtgcctggagagcccgccagccccatcagccagaggctgccccccaaggtggagagcctggagagcctgtacttcacccccatcccagcccggagccaggcccccctggagagcagcctggacagcctgggagatgtgttcctggacagcggcaggaagaccaggtctgcccggcggaggaccacccagatcatcaacatcaccatgaccaagaagctggatgtggaggagccagacagcgccaacagcagcttctacagcaccaggtctgccccagccagccaggccagcctgcgggccaccagcagcacccagagcctggcccggctgggcagcccagactatggcaacagcgccctgctgagcctgcccggctaccggcccaccaccaggagcagcgcccggcgcagccaggccggcgtgtcctctggggcccctcctggaagaaattccttctacatgggcacctgccaggatgagcctgagcagctggatgactggaacagaattgctgagctgcagcagaggaacagagtgtgccccccccacctgaagacctgctaccccctggagagccggcccagcctgagcctgggcaccatcacagatgaggagatgaagacaggagacccccaggagaccctgcggcgggcctccatgcagcccatccagattgctgagggcaccggcatcaccacccggcagcagaggaagagggtgtccctggagccccaccagggccctggcaccccagagagcaagaaggccaccagctgcttcccccggcccatgaccccccgggacagacatgagggcaggaagcagagcaccacagaggcccagaagaaggccgccccagccagcaccaagcaggccgaccggcggcagagcatggccttcagcatcctgaacacccccaagaagctgggcaacagcctgctgcggcggggggccagcaagaaggccctgagcaaggccagccccaacaccaggagcggcaccaggaggagcccccgcatcgccaccaccacagccagcgctgccacagctgctgccatcggggccaccccccgggccaagggcaaggccaagcactag

SEQ ID NO: 105016 - DNA, 6306 bp, Artificial Sequence
  derived and/or modified sequence
atgaccctgcacgccaccagaggagctgccctgctgtcctgggtgaacagcctgcacgtggccgaccctgtggaggccgtgctgcagctgcaggactgcagcatcttcatcaagatcatcgaccgcatccacggcacagaggagggccagcagatcctgaagcagcctgtgtctgagcggctggactttgtgtgcagcttcctgcagaagaacaggaagcaccccagcagcccagaatgtctggtgtctgcccagaaggtgctggagggcagcgagctggagctggccaagatgaccatgctgctgctgtaccacagcaccatgagcagcaagagcccccgggactgggagcagtttgagtacaagatccaggccgagctggccgtcatcctgaagtttgtgctggaccatgaagatggcctgaacctgaatgaagacctggagaacttcctgcagaaggcccctgtgcccagcacctgcagcagcaccttccctgaggagctgagcccccccagccaccaggccaagcgggagatccgcttcctggagctgcagaaggtggccagcagcagcagcggcaacaacttcctgagcggcagccctgccagccccatgggagacatcctgcagaccccccagttccagatgaggcggctgaagaagcagctggctgatgagaggagcaacagagatgagctggagctggagctggctgaaaataggaagctgctgacagagaaggatgcccagatcgccatgatgcagcagagaattgaccggctggccctgctgaatgagaagcaggccgccagccccctggagcccaaggagctggaggagctgcgggacaagaatgaaagcctgaccatgaggctgcacgagaccctgaagcagtgccaggacctgaagacagagaagagccagatggacaggaagatcaaccagctgtctgaagaaaatggagacctgtccttcaagctgcgggagtttgccagccacctgcagcagctgcaggatgccctgaatgagctgacagaggagcacagcaaggccacccaggagtggctggagaagcaggcccagctggagaaggagctgtctgctgccctgcaggacaagaagtgcctggaggagaagaatgagatcctgcagggcaagctgagccagctggaggagcacctgagccagctgcaggacaaccccccccaggagaagggggaggtgctgggagatgtgctgcagctggagaccctgaagcaggaggccgccaccctggccgccaacaacacccagctgcaggcccgggtggagatgctggagacagagcggggccagcaggaggccaagctgctggccgagcggggccactttgaggaggagaagcagcagctgagcagcctcatcacagacctgcagagcagcatcagcaacctgagccaggccaaggaggagctggagcaggccagccaggcccacggggcccggctgacagcccaggtggccagcctgaccagcgagctgaccaccctgaatgccaccatccagcagcaggaccaggagctggccggcctgaagcagcaggccaaggagaagcaggcccagctggcccagaccctgcagcagcaggagcaggccagccagggcctgcggcaccaggtggagcagctgagcagcagcctgaagcagaaggagcagcagctgaaggaggtggccgagaagcaggaggccacccggcaggaccacgcccagcagctggccacagctgctgaggagcgggaggccagcctgcgggagagagatgctgccctgaagcagctggaggccctggagaaggagaaggccgccaagctggagatcctgcagcagcagctgcaggtggccaatgaggcccgggacagcgcccagacctctgtgacccaggcccagcgggagaaggccgagctgagcaggaaggtggaggagctgcaggcctgtgtggagacagcccggcaggagcagcacgaggcccaggcccaggtggccgagctggagctgcagctgcggtctgagcagcagaaggccacagagaaggagcgggtggcccaggagaaggaccagctgcaggagcagctgcaggccctgaaggagagcctgaaggtgaccaagggcagcctggaggaggagaagagaagagctgctgatgccctggaggagcagcagcgctgcatcagcgagctgaaggccgagaccaggagcctggtggagcagcacaagcgggagaggaaggagctggaggaggagcgggccggcaggaagggcctggaggcccggctgcagcagctgggggaggcccaccaggccgagacagaggtgctgcggcgggagctggccgaggccatggccgcccagcacacagctgagagtgaatgtgagcagctggtgaaggaggtggccgcctggagggagagatatgaggacagccagcaggaggaggcccagtatggagccatgttccaggagcagctgatgaccctgaaggaggagtgtgagaaggcccggcaggagctgcaggaggccaaggagaaggtggccggcatcgagagccacagcgagctgcagatcagccggcagcagaatgagctggccgagctgcacgccaacctggcccgggccctgcagcaggtgcaggagaaggaggtgcgggcccagaagctggctgatgacctgagcaccctgcaggagaagatggccgccaccagcaaggaggtggcccggctggagaccctggtgaggaaggccggggagcagcaggagacagccagccgggagctggtgaaggagcccgcccgggccggggaccggcagcctgagtggctggaggagcagcagggccggcagttctgcagcacccaggccgccctgcaggccatggagcgggaggccgagcagatgggaaatgagctggagcggctgcgggccgccctgatggagagccagggccagcagcaggaggagcggggccagcaggagcgggaggtggcccggctgacccaggagcggggccgggcccaggccgacctggccctggagaaggccgcccgggcagagctggagatgaggctgcagaatgccctgaatgagcagagggtggagtttgccaccctgcaggaggccctggcccacgccctgacagagaaggagggcaaggaccaggagctggccaagctgcggggcctggaggccgcccagatcaaggagctggaggagctgcggcagacagtgaagcagctgaaggagcagctggccaagaaggagaaggagcacgccagcggcagcggggcccagagcgaggccgccggccgcacagagcccaccggccccaagctggaggccctgcgggcagaggtgtccaagctggagcagcagtgccagaagcagcaggagcaggccgacagcctggagaggagcctggaggccgagcgggccagcagagctgagcgggacagcgccctggagaccctgcagggccagctggaggagaaggcccaggagctgggccacagccagagcgccctggccagcgcccagcgggagctggccgccttccgcaccaaggtgcaggaccacagcaaggccgaggatgagtggaaggcccaggtggcccggggccggcaggaggccgagaggaagaacagcctcatcagcagcctggaggaggaggtgtccatcctgaaccggcaggtgctggagaaggagggggagagcaaggagctgaagaggctggtgatggccgagagcgagaagagccagaagctggaggagcggctgcggctgctgcaggccgagacagccagcaacagcgcccgggctgctgagaggagcagcgccctgcgggaggaggtgcagagcctgcgggaggaggccgagaagcagagggtggccagcgagaacctgcggcaggagctgaccagccaggccgagcgggcagaggagctgggccaggagctgaaggcctggcaggagaagttcttccagaaggagcaggccctgagcaccctgcagctggagcacaccagcacccaggccctggtgtctgagctgctgcctgccaagcacctgtgccagcagctgcaggccgagcaggccgctgctgagaagaggcaccgggaggagctggagcagagcaagcaggccgccggcggcctgcgggcagagctgctgcgggcccagcgggagctgggggagctgatccccctgcggcagaaggtggccgagcaggagaggacagcccagcagctgcgggcagagaaggccagctatgcagagcagctgtccatgctgaagaaggcccacggcctgctggccgaggagaacagaggcctgggggagcgggccaacctgggccggcagttcctggaggtggagctggaccaggcccgggagaagtatgtgcaggagctggccgctgtgcgggcagatgctgagacccggctggccgaggtgcagcgggaggcccagagcacagcccgggagctggaggtgatgacagccaagtatgagggcgccaaggtgaaggtgctggaggagcggcagcgcttccaggaggagcggcagaagctgacagcccaggtggaggagctgagcaagaagctggccgacagcgaccaggccagcaaggtgcagcagcagaagctgaaggctgtgcaggcccagggcggggagagccagcaggaggcccagaggctgcaggcccagctgaatgagctgcaggcccagctgagccagaaggagcaggccgctgagcactacaagctgcagatggagaaggccaagacccactatgatgccaagaagcagcagaaccaggagctgcaggagcagctgcggagcctggagcagctgcagaaggagaacaaggagctgcgggcagaggccgagcggctgggccacgagctgcagcaggccggcctgaagaccaaggaggccgagcagacctgccgccacctgacagcccaggtgcgcagcctggaggcccaggtggcccacgccgaccagcagctgcgggacctgggcaagttccaggtggccacagatgccctgaagagccgggagccccaggccaagccccagctggacctgagcattgacagcctggacctgagctgtgaggagggcacccccctgagcatcaccagcaagctgcccaggacccagccagatggcacctctgtgcctggagagcccgccagccccatcagccagaggctgccccccaaggtggagagcctggagagcctgtacttcacccccatcccagcccggagccaggcccccctggagagcagcctggacagcctgggagatgtgttcctggacagcggcaggaagaccaggtctgcccggcggaggaccacccagatcatcaacatcaccatgaccaagaagctggatgtggaggagccagacagcgccaacagcagcttctacagcaccaggtctgccccagccagccaggccagcctgcgggccaccagcagcacccagagcctggcccggctgggcagcccagactatggcaacagcgccctgctgagcctgcccggctaccggcccaccaccaggagcagcgcccggcgcagccaggccggcgtgtcctctggggcccctcctggaagaaattccttctacatgggcacctgccaggatgagcctgagcagctggatgactggaacagaattgctgagctgcagcagaggaacagagtgtgccccccccacctgaagacctgctaccccctggagagccggcccagcctgagcctgggcaccatcacagatgaggagatgaagacaggagacccccaggagaccctgcggcgggcctccatgcagcccatccagattgctgagggcaccggcatcaccacccggcagcagaggaagagggtgtccctggagccccaccagggccctggcaccccagagagcaagaaggccaccagctgcttcccccggcccatgaccccccgggacagacatgagggcaggaagcagagcaccacagaggcccagaagaaggccgccccagccagcaccaagcaggccgaccggcggcagagcatggccttcagcatcctgaacacccccaagaagctgggcaacagcctgctgcggcggggggccagcaagaaggccctgagcaaggccagccccaacaccaggagcggcaccaggaggagcccccgcatcgccaccaccacagccagcgctgccacagctgctgccatcggggccaccccccgggccaagggcaaggccaagcactag

SEQ ID NO: 105017 - DNA, 4995 bp, Artificial Sequence
  derived and/or modified sequence
atgctggagacagagcggggccagcaggaggccaagctgctggccgagcggggccactttgaggaggagaagcagcagctgagcagcctcatcacagacctgcagagcagcatcagcaacctgagccaggccaaggaggagctggagcaggccagccaggcccatggagcccggctgacagcccaggtggccagcctgaccagcgagctgaccaccctgaatgccaccatccagcagcaggaccaggagctggccggcctgaagcagcaggccaaggagaagcaggcccagctggcccagaccctgcagcagcaggagcaggccagccagggcctgcggcaccaggtggagcagctgagcagcagcctgaagcagaaggagcagcagctgaaggaggtggccgagaagcaggaggccacccggcaggaccacgcccagcagctggccacagctgctgaggagcgggaggccagcctgcgggagagagatgctgccctgaagcagctggaggccctggagaaggagaaggccgccaagctggagatcctgcagcagcagctgcaggtggccaatgaggcccgggacagcgcccagacctctgtgacccaggcccagcgggagaaggccgagctgagcaggaaggtggaggagctgcaggcctgtgtggagacagcccggcaggagcagcacgaggcccaggcccaggtggccgagctggagctgcagctgcggtctgagcagcagaaggccacagagaaggagcgggtggcccaggagaaggaccagctgcaggagcagctgcaggccctgaaggagagcctgaaggtgaccaagggcagcctggaggaggagaagagaagagctgctgatgccctggaggagcagcagcgctgcatcagcgagctgaaggccgagaccaggagcctggtggagcagcacaagcgggagaggaaggagctggaggaggagagagctggcaggaagggcctggaggcccggctgcagcagctgggggaggcccaccaggccgagacagaggtgctgcggcgggagctggccgaggccatggccgcccagcacacagctgagagtgaatgtgagcagctggtgaaggaggtggccgcctggagggagagatatgaggacagccagcaggaggaggcccagtacggggccatgttccaggagcagctgatgaccctgaaggaggagtgtgagaaggcccggcaggagctgcaggaggccaaggagaaggtggccggcatcgagagccacagcgagctgcagatcagccggcagcagaatgagctggccgagctgcacgccaacctggcccgggccctgcagcaggtgcaggagaaggaggtgcgggcccagaagctggctgatgacctgagcaccctgcaggagaagatggccgccaccagcaaggaggtggcccggctggagaccctggtgaggaaggccggggagcagcaggagacagccagccgggagctggtgaaggagcccgcccgggccggggaccggcagcctgagtggctggaggagcagcagggccggcagttctgcagcacccaggccgccctgcaggccatggagcgggaggccgagcagatgggaaatgagctggagcggctgcgggccgccctgatggagagccagggccagcagcaggaggagcggggccagcaggagcgggaggtggcccggctgacccaggagcggggccgggcccaggccgacctggccctggagaaggccgcccgggcagagctggagatgaggctgcagaatgccctgaatgagcagagggtggagtttgccaccctgcaggaggccctggcccacgccctgacagagaaggagggcaaggaccaggagctggccaagctgcggggcctggaggccgcccagatcaaggagctggaggagctgcggcagacagtgaagcagctgaaggagcagctggccaagaaggagaaggagcacgccagcggcagcggggcccagagcgaggccgccggccgcacagagcccaccggccccaagctggaggccctgcgggcagaggtgtccaagctggagcagcagtgccagaagcagcaggagcaggccgacagcctggagaggagcctggaggccgagcgggccagcagagctgagcgggacagcgccctggagaccctgcagggccagctggaggagaaggcccaggagctgggccacagccagagcgccctggccagcgcccagcgggagctggccgccttccgcaccaaggtgcaggaccacagcaaggcagaagatgagtggaaggcccaggtggcccggggccggcaggaggccgagaggaagaacagcctcatcagcagcctggaggaggaggtgtccatcctgaaccggcaggtgctggagaaggagggggagagcaaggagctgaagaggctggtgatggccgagagcgagaagagccagaagctggaggagcggctgcggctgctgcaggccgagacagccagcaacagcgcccgggctgctgagaggagcagcgccctgcgggaggaggtgcagagcctgcgggaggaggccgagaagcagagggtggccagcgagaacctgcggcaggagctgaccagccaggccgagagagctgaggagctgggccaggagctgaaggcctggcaggagaagttcttccagaaggagcaggccctgagcaccctgcagctggagcacaccagcacccaggccctggtgtctgagctgctgcctgccaagcacctgtgccagcagctgcaggccgagcaggccgctgctgagaagaggcaccgggaggagctggagcagagcaagcaggccgccggcggcctgcgggcagagctgctgcgggcccagcgggagctgggggagctgatccccctgcggcagaaggtggccgagcaggagaggacagcccagcagctgcgggcagagaaggccagctatgcagagcagctgtccatgctgaagaaggcccacggcctgctggccgaggagaacagaggcctgggggagcgggccaacctgggccggcagttcctggaggtggagctggaccaggcccgggagaagtatgtgcaggagctggccgctgtgcgggcagatgctgagacccggctggccgaggtgcagcgggaggcccagagcacagcccgggagctggaggtgatgacagccaagtatgaaggagccaaggtgaaggtgctggaggagcggcagcgcttccaggaggagcggcagaagctgacagcccaggtggaggagctgagcaagaagctggccgacagcgaccaggccagcaaggtgcagcagcagaagctgaaggctgtgcaggcccagggcggggagagccagcaggaggcccagaggctgcaggcccagctgaatgagctgcaggcccagctgagccagaaggagcaggccgctgagcactacaagctgcagatggagaaggccaagacccactatgatgccaagaagcagcagaaccaggagctgcaggagcagctgcggagcctggagcagctgcagaaggagaacaaggagctgcgggcagaggccgagcggctgggccacgagctgcagcaggccggcctgaagaccaaggaggccgagcagacctgccgccacctgacagcccaggtgcgcagcctggaggcccaggtggcccatgctgaccagcagctgcgggacctgggcaagttccaggtggccacagatgccctgaagagccgggagccccaggccaagccccagctggacctgagcattgacagcctggacctgagctgtgaggagggcacccccctgagcatcaccagcaagctgcccaggacccagccagatggcacctctgtgcctggagagcccgccagccccatcagccagaggctgccccccaaggtggagagcctggagagcctgtacttcacccccatcccagcccggagccaggcccccctggagagcagcctggacagcctgggagatgtgttcctggacagcggcaggaagaccaggtctgcccggcggaggaccacccagatcatcaacatcaccatgaccaagaagctggatgtggaggagccagattctgccaacagcagcttctacagcaccaggtctgccccagccagccaggccagcctgcgggccaccagcagcacccagagcctggcccggctgggcagcccagactatggcaacagcgccctgctgagcctgcccggctaccggcccaccaccaggagcagcgcccggcgcagccaggccggcgtgagcagcggggcccctcctggcaggaacagcttctacatgggcacctgccaggatgagcctgagcagctggatgactggaacagaattgctgagctgcagcagaggaacagagtgtgccccccccacctgaagacctgctaccccctggagagccggcccagcctgagcctgggcaccatcacagatgaggagatgaagacaggagacccccaggagaccctgcggcgggcctccatgcagcccatccagattgctgagggcaccggcatcaccacccggcagcagaggaagagggtgtccctggagccccaccagggccctggcaccccagagagcaagaaggccaccagctgcttcccccggcccatgaccccccgggacagacatgagggcaggaagcagagcaccacagaggcccagaagaaggccgccccagccagcaccaagcaggccgaccggcggcagagcatggccttcagcatcctgaacacccccaagaagctgggcaacagcctgctgcggcggggggccagcaagaaggccctgagcaaggccagccccaacaccaggagcggcacccggcgcagccccagaattgccaccaccacagccagcgctgccacagctgctgccatcggggccaccccccgggccaagggcaaggccaagcactag

SEQ ID NO: 105018 - DNA, 606 bp, Artificial Sequence
  derived and/or modified sequence
atgaccctgcacgccaccagaggagctgccctgctgtcctgggtgaacagcctgcacgtggccgaccctgtggaggccgtgctgcagctgcaggactgcagcatcttcatcaagatcatcgaccgcatccacggcacagaggagggccagcagatcctgaagcagcctgtgtctgagcggctggactttgtgtgcagcttcctgcagaagaacaggaagcaccccagcagcccagaatgtctggtgtctgcccagaaggtgctggagggcagcgagctggagctggccaagatgaccatgctgctgctgtaccacagcaccatgagcagcaagagcccccgggactgggagcagtttgagtacaagatccaggccgagctggccgtcatcctgaagtttgtgctggaccatgaagatggcctgaacctgaatgaagacctggagaacttcctgcagaaggcccctgtgcccagcacctgcagcagcaccttccctgaggagctgagcccccccagccaccaggccaagcgggagatccgcttcctggagctgcagaaggtggccagcagcagcagcggcaacaacttcctgagcggcagcccctag

SEQ ID NO: 105019 - DNA, 663 bp, Artificial Sequence
  derived and/or modified sequence
atgaccctgcacgccaccagaggagctgccctgctgtcctgggtgaacagcctgcacgtggccgaccctgtggaggccgtgctgcagctgcaggactgcagcatcttcatcaagatcatcgaccgcatccacggcacagaggagggccagcagatcctgaagcagcctgtgtctgagcggctggactttgtgtgcagcttcctgcagaagaacaggaagcaccccagcagcccagaatgtctggtgtctgcccagaaggtgctggagggcagcgagctggagctggccaagatgaccatgctgctgctgtaccacagcaccatgagcagcaagagcccccgggactgggagcagtttgagtacaagatccaggccgagctggccgtcatcctgaagtttgtgctggaccatgaagatggcctgaacctgaatgaagacctggagaacttcctgcagaaggcccctgtgcccagcacctgcagcagcaccttccctgaggagctgagcccccccagccaccaggccaagcgggagatccgcttcctggagctgcagaaggtggccagcagcagcagcggcaacaacttcctgagcggcagccctgccagccccatgggagacatcctgcagaccccccagttccagatgaggcggctgaagtag

SEQ ID NO: 105020 - DNA, 2940 bp, Artificial Sequence
  derived and/or modified sequence
atgaccctgcacgccacccggggcgccgccctgctgagctgggtgaacagtctccatgttgcagatcccgtcgaggccgttctgcagctacaagattgctccatattcatcaaaattatcgatcgcattcatggtactgaggagggccagcaaatcctaaagcaacctgtcagcgaaaggcttgatttcgtgtgttcgttcctccagaaaaatcgcaaacacccttcaagcccagaatgcctcgtgtctgcacagaaagtgctggagggaagcgagctggaacttgctaagatgactatgctccttctataccactcaactatgtcctccaagtcaccgcgagattgggaacagttcgagtacaagatacaagccgagctggccgtcatactcaagttcgtattggatcacgaagacggcctgaatcttaatgaagatctggagaattttctgcagaaagcccctgtgccatccacatgcagctcaaccttcccagaggagttgagcccaccaagtcaccaagcgaagagagagataaggtttctagaactgcagaaggttgccagttccagctccggcaacaacttcttgagcggatctcccgctagtcctatgggggatatcctgcagacccctcagtttcaaatgaggagactgaagaaacaactggccgacgaaagatcaaatcgagatgaacttgagctggaactagccgagaacagaaagctgttgactgagaaagatgcacagatcgctatgatgcagcagcggattgaccggcttgccttgctgaacgaaaaacaggctgccagtcccctcgaaccgaaggaattggaggaactgagggacaagaatgagagtctgaccatgcgcttgcacgaaactcttaagcaatgtcaggacctgaagaccgagaaatctcagatggacaggaagatcaaccagttaagcgaggaaaacggtgacctctctttcaagcttcgcgaattcgcttcacacctccaacagctgcaggatgcactgaacgagctgaccgaggaacactccaaagctacccaggagtggctagaaaaacaggcgcagttggaaaaagaattatctgctgccttgcaggacaagaaatgtctcgaagaaaagaacgaaatactgcaggggaagttgagtcagttggaggagcacctgtcacagcttcaggacaatccacctcaggagaaaggggaggtattaggtgatgtcctacaggtggaagagctctccaagaaactcgccgactcagaccaggcatccaaggttcagcaacagaaactgaaagcagtgcaggcccagggaggtgagtcacagcaggaggcacagcggctgcaggcccagctcaacgaacttcaagcccagctgagccagaaggaacaagctgccgagcactataagctccagatggaaaaggctaagacacactacgacgctaagaagcaacagaaccaggaactacaggaacagctgagatccctggagcagttacagaaggagaacaaggaacttagagcagaggccgagaggctggggcacgaacttcagcaggcagggctgaaaactaaggaagcagaacagacatgcaggcacttaacagcccaggtaagatctctcgaagcccaggtggcccatgccgaccagcagctgagggatctagggaagtttcaagtcgctaccgatgccctgaaatcacgggagcctcaagccaagccccagttggatttatccatcgattcacttgatctctcttgcgaagaagggactcctctctcaataacttccaagctgccacggacccagcccgatgggacgagcgtacccggtgaacccgctagccccattagtcagcggttgcctccaaaagtggaatctctcgagagcctctatttcacccctatcccagctcgcagccaggccccactggaatcttccctggacagcctcggcgacgttttcctcgacagtgggagaaaaacacgcagtgctcgaaggcgaaccacacaaattataaatatcactatgactaagaagctcgatgtggaagaacctgacagtgcgaactcctccttctactcgacacgtagcgcccctgcgtcccaggccagccttcgggcaacaagttctacccaaagtctcgccagacttggctcacctgattacggcaatagtgcgctgctgtcccttcctggatacaggcctacaacccgctcaagtgctcggagaagtcaggccggcgttagcagtggggctcccccagggcgaaactccttctacatggggacctgtcaagacgagcctgaacagctggacgactggaatcggatagcagagctccagcagcgaaacagagtatgccccccacacctgaagacttgctaccctcttgagagtcggccttcgcttagcctgggaactatcacagacgaggaaatgaaaactggagatcctcaggaaaccctgagacgggcctccatgcagcccatacagatagctgagggcactgggattacgaccaggcaacagcgaaaacgcgtctctctcgagcctcaccagggaccaggaaccccagaaagcaaaaaggccacttcttgctttccacgcccaatgacgccgagagataggcatgagggccgtaagcagtcaaccacagaagctcaaaaaaaagccgccccagcatccaccaaacaggcagatcgacggcagtcaatggccttttcaatcctcaacactcccaaaaagctgggaaactctctgcttcgtcgtggagcgtccaaaaaagccttgtcaaaggctagccccaatacacgatctggaacgcggcgtagtcccaggatcgcgaccaccacagcctccgccgctacagccgcggcgatcggcgctacgcctcgtgccaagggtaaagccaaacactag

SEQ ID NO: 105021 - DNA, 6306 bp, Artificial Sequence
  derived and/or modified sequence
atgaccctgcacgccacccggggcgccgccctgctgagctgggtgaattctctacatgtcgctgacccagtggaggctgtcctccaactgcaggattgctcaatcttcataaagattatagaccggatccacggcaccgaggaaggtcagcaaatattaaagcagcctgtttcagaaaggctggattttgtgtgctcatttctacagaagaataggaagcacccgagcagccctgagtgtctggtgtccgcgcagaaggtcctcgaaggctccgaactggaacttgctaagatgaccatgctccttctgtaccacagcactatgagtagcaagtcccctagggactgggagcaattcgaatataagatacaggcggagctggccgtcattctgaagttcgtgttggatcatgaggacggacttaatctaaacgaagacctggaaaatttcctacagaaggccccagtccctagtacatgctctagcaccttcccagaggagctctctcccccaagccaccaggccaaacgtgagattagattcctcgaactacaaaaggtggcctcctccagcagcggaaataatttcctaagcggatcacccgcttctcccatgggtgacatcctgcagacccctcagtttcagatgcgccggctgaagaagcagttagctgacgagaggtctaaccgcgacgaactggaactcgaactagctgagaataggaagttgctcactgagaaagatgcacaaatcgcaatgatgcagcaacgaatcgataggctcgcattgctcaacgagaagcaggcagccagcccactggagcccaaggagcttgaggagctgagagataagaatgaaagtcttacaatgaggctacacgaaaccctgaagcagtgtcaagaccttaagaccgagaaaagccagatggatcgaaaaatcaaccaactctctgaggagaacggggacctctcctttaaactcagggagtttgcgtcccatctgcagcagctacaggatgcactgaatgaattaacagaagaacatagcaaagccactcaggagtggctcgaaaaacaggcccagctggaaaaggagttgtctgccgcactccaggacaaaaagtgtcttgaagagaaaaacgaaatcttgcaggggaagcttagtcagcttgaagaacatctgtctcagttgcaggataacccaccacaagagaagggtgaagtgctgggtgacgttttgcagcttgagacactgaagcaggaggctgcaaccctggccgccaacaatacccagcttcaggccagagtggagatgttggaaaccgagcgcgggcaacaagaagctaaactgctggctgagcgcggccacttcgaggaggaaaagcagcagttatcttccctaattacagacctacagtcttccatctccaacctttcccaggctaaggaagaactggagcaggcttctcaggcacatggggcacgcctgactgcccaggtcgcctctctgacttcagagctgacaacattgaacgctaccattcagcagcaggatcaggaactggccggcttaaagcagcaggcgaaagagaagcaggcccagctggcccagaccctgcagcagcaggagcaggcctcccagggcctacgccatcaggtggagcaactgagctctagcctgaagcagaaggaacagcagttgaaagaggttgccgagaagcaagaggccacaaggcaagaccacgcgcagcagctggcgactgccgcagaggaaagagaggctagcttgcgtgagagagatgcggctttgaaacagttggaagcgctggagaaagagaaggctgctaagctggagatcctgcagcagcagcttcaggtggctaatgaggcgcgagacagtgcacagactagcgtaactcaagctcagagagagaaggccgagctctctcgcaaagtggaggagcttcaggcctgcgtcgaaaccgcccgtcaagaacaacatgaagcacaggcccaggttgctgagttggagctacagctccggtccgagcaacagaaagccaccgagaaggagagggtggctcaagagaaggaccagttacaggaacagttgcaagcactgaaggagagtctgaaagttaccaaaggttcactggaggaggagaaacggcgcgccgcagacgcactcgaggaacagcagagatgtatcagtgaactcaaggctgaaacgagaagcctggtggaacagcacaagcgtgagaggaaggagctcgaggaagagcgggccggtcgaaagggcctcgaggctagattgcagcagttgggtgaagcccaccaggcggaaacagaagtcctccgaagggaactggctgaagctatggccgctcagcatactgccgagtccgagtgtgagcagctcgtgaaagaagttgccgcctggcgggagcgctacgaagacagtcagcaggaggaagcacagtatggggcaatgtttcaagaacagcttatgacgctgaaggaagaatgcgagaaggcacgccaggaactgcaggaagcgaaggaaaaagtcgctggcattgaatcacattccgaattgcagatctctaggcagcagaacgaactggccgagctccatgcgaatctggcccgggccctgcaacaggtgcaggagaaggaggtccgagcccagaagttagcggatgatctcagtacactgcaggagaagatggccgctacatcgaaggaagtggcccgcctggagacgcttgtgcgaaaggccggagaacaacaggagaccgcaagccgggaattagtgaaggagccggcccgggccggggatcgccagcccgagtggttggaagagcaacagggtagacagttttgcagcacccaggccgcccttcaggccatggaacgggaagccgagcaaatgggcaacgagctggaacggctgcgagctgcgctcatggaaagtcagggacagcagcaggaagaacgtggtcagcaagagagagaggttgctaggctcacccaagagagagggcgggctcaggccgacctggcactagagaaggccgcacgggccgagctggagatgcgcctgcagaacgccctgaatgaacagagagtcgagtttgcgacactgcaggaagcattggcccacgcccttacggagaaggagggcaaggatcaggagctcgcgaagctgagggggctggaagcggctcagatcaaagaattagaggagctccggcagaccgttaagcagctgaaggaacagctggctaagaaagagaaagagcatgccagtggtagtggggcccagagcgaagcagccggccgaaccgagccgactggtcctaaactggaagcccttcgggctgaagtcagtaagctggaacaacagtgtcaaaaacagcaggaacaggctgattcgcttgagcgcagcctcgaggccgagcgggcatcccgagccgaacgtgattccgctctcgagacactccagggccagctggaagagaaagcgcaggagcttggacactcacagagcgctctggcctcagctcagcgggagctggccgcctttcgaacaaaggtgcaggaccactcaaaggctgaagatgagtggaaggcacaggtggcgagggggagacaggaagcagagagaaaaaactctctgattagctctctcgaggaggaagtcagtatcctgaatcgacaggtgctggaaaaagaaggagagagcaaagagctgaagcgactggtgatggccgagtctgaaaaatcgcagaagttggaggaaagacttcggctcctgcaggcagaaacagcctcgaactccgcgagggctgctgagcggtcttccgccctgcgggaagaagtgcaaagcttgcgggaggaggccgagaagcagagagtggcatccgaaaatcttaggcaagaactcacttcgcaggctgaacgcgctgaagaactgggacaggaattaaaggcttggcaggaaaaatttttccaaaaggagcaggcccttagtactctacagctggagcacacctccacccaagccctggtcagcgagttgctgcctgcaaaacacttgtgtcagcagctgcaggctgaacaggccgcggctgagaaaagacatagggaagagcttgagcaaagtaagcaggccgccgggggtctgcgagccgaattactccgggctcagcgagagctgggggagttgatccccctacggcaaaaggttgccgagcaggagagaacagcccagcagctgcgggctgaaaaggccagttacgcggaacagcttagtatgctgaagaaagcccacggactgcttgcagaggaaaacagggggctgggcgagcgggccaacttgggccgccagttcctggaggtggagctcgatcaggcccgggagaagtacgtgcaggaactggcggccgtccgggccgacgctgaaacaagacttgctgaggtgcagagggaggcacagtccaccgcacgtgagcttgaggtgatgacagccaaatacgagggtgcaaaagtcaaagtgctggaagagagacagcgcttccaggaggaacgccagaagttgaccgcacaggtagaagagctctctaaaaaactcgctgattccgaccaggcttctaaagtgcagcagcagaagcttaaggccgtgcaggcccagggcggagaatctcagcaggaagctcaacggcttcaggcacagctgaacgaattacaagctcagttgtcccagaaggaacaggccgccgaacactacaaactccagatggaaaaagccaaaactcattacgacgctaaaaaacaacagaaccaggagctgcaggaacagttgcgctctctggagcagctgcaaaaagaaaataaggagttaagggctgaagctgagagactcggtcatgaactgcagcaagccgggctgaaaaccaaagaagctgagcagacatgcaggcacctgactgctcaggtacgctcactggaggcgcaagtcgcccacgcagaccagcagttgcgtgacctgggcaagtttcaagtcgcaactgatgctctgaaatctagagagccccaggctaaaccccaacttgacctatccatcgactctttggatctttcctgcgaggagggaaccccactgagtattacctcaaaactcccccggacccagcctgacggtacctccgtccctggagagcccgcatctcccatttcccagcgcctgccccccaaggtcgagagcctcgagtccttgtatttcaccccaatccccgctagatcacaggcccccttagaaagcagcttagactccttgggagacgtgtttttagatagcgggcgtaaaacgaggagtgcccggagaaggacgacacagattatcaacattactatgacaaagaaacttgacgtggaagaaccagacagcgccaatagctccttctattcaactcggtcggctccagctagccaagcgagccttagagccacctcaagcacccagagcctggcacgtctggggagtcccgactacggaaactctgccctgctgagcctaccaggttatcgccccaccacgagatcttctgctcggcggtcgcaggcaggggtgtcttcaggggcacctcctggaaggaattctttctatatgggcacatgtcaggacgagcccgaacagctggatgactggaacaggattgcagagctgcagcagagaaacagggtgtgccctcctcatttaaaaacatgctacccacttgagtctaggccatctctctcattgggaacgatcactgatgaagaaatgaagacaggggatcctcaggaaaccctgcgcagggcctctatgcagcccattcagatcgcggaaggcaccggaattaccacccggcagcagagaaagagggtgagcctagagccccatcagggcccagggaccccagagtcaaaaaaggctacgtcttgtttcccaagacccatgacccctagagatcgacacgaagggaggaagcagtccacaaccgaggcgcagaagaaggcggcccccgcaagcacaaagcaggctgataggcggcagagcatggcattttcgatcttgaatacacctaagaagctgggaaactcactgttgaggagaggagcctcaaaaaaagctttgtccaaggccagtccaaatacaaggtcagggacgagacgcagcccgcgcattgccactaccaccgccagcgctgccacagctgccgccataggggcaacgcccagagctaaaggaaaggccaaacactag

SEQ ID NO: 105022 - DNA, 4995 bp, Artificial Sequence
  derived and/or modified sequence
atgctggagaccgagcggggccagcaggaggccaagctgctggccgaacggggacactttgaggaggagaagcagcagttgagcagtctcatcaccgatctgcagtctagcatttctaatttatctcaggctaaggaagaactggagcaggcaagccaggcacatggggctaggcttaccgcccaagtggcaagcctgacatcggaactgactaccctcaatgccaccatccagcagcaggaccaggagctggccggcctgaagcaacaggccaaggaaaagcaggcccaactcgcccaaactctgcagcagcaggagcaggccagccaggggcttagacaccaagtagaacagttgtcaagtagtcttaagcagaaggagcagcagctgaaagaggtagccgagaagcaagaggcgactagacaggaccacgctcagcagttagcaaccgccgctgaagagagggaggcgtcgctgcgtgaacgtgatgccgccctgaagcaacttgaagcacttgagaaagagaaagccgctaaactagagatcctgcagcaacagctccaagtagccaatgaggcaagagactctgcccagacctcagtgactcaggcccagagggaaaaggccgaactctctcgaaaggttgaagagctccaggcctgtgtggaaactgccaggcaggagcagcacgaggcacaggctcaggtcgccgagcttgagttacaacttagatcagaacagcaaaaggccacagaaaaggaacgggtcgcccaggaaaaggaccaactccaggaacagctacaggcactaaaagagtcactgaaggtaactaaaggctcattggaagaggagaagcggagggctgctgatgccctggaggagcaacagaggtgtatcagtgaactgaaagcggaaactagaagcctagttgaacagcataaacgcgagcggaaagaactggaggaggagcgggcagggagaaagggcctcgaggccagactccaacagttgggagaggcccaccaggcagaaacagaggtgcttcgccgggaactagctgaggctatggctgcccagcataccgccgaatccgaatgcgaacagttggttaaggaggtggccgcgtggcgcgaacggtatgaggatagtcagcaggaggaggctcaatatggcgcaatgtttcaggaacagctcatgacacttaaggaggagtgcgagaaggcgagacaagagctgcaggaggcaaaagaaaaggtagctggcatcgaatcgcattccgagctacagatcagcaggcaacagaatgagctggctgagctgcacgctaacttagctcgagcacttcaacaggtacaagagaaagaagtgagggctcagaaattggctgatgatctcagcacactgcaggaaaaaatggccgccacctccaaggaagtcgccagacttgaaaccctggtgcgcaaggcgggggagcagcaagaaaccgcttctagggagctggtcaaagaacctgctagagccggggatcgccagcctgaatggctggaagagcagcaggggaggcagttctgcagcactcaggcggccctgcaggccatggagagagaggctgaacagatgggtaacgagctcgagcgccttagagcagcgttaatggaatcacagggtcagcagcaggaggagcgtgggcagcaggagcgagaggtggctcgactcacccaggagagaggcagagcacaggctgatctggccctcgagaaggcagccagggctgagttggagatgcgcctgcagaacgccctgaacgagcagagggtggaattcgccaccctgcaggaggctcttgcacatgccctgactgagaaagagggcaaggatcaggagctagccaaacttcgcggattggaagccgcccagattaaggagctcgaggaactacgccagactgtgaaacaactaaaagagcagctggccaagaaagagaaggaacatgccagcggctctggcgcacagtcagaggccgcaggccgcactgaaccgacgggacctaagctcgaagcgctgcgagcggaggtctctaaactggaacagcagtgtcagaaacaacaggaacaggcagattctctggagcggagtctggaggcagaaagggccagtcgagccgagcgggacagcgcacttgaaaccctccagggccagctggaagagaaagcccaggagttgggtcattcccagtctgccctggccagcgcccagcgagagctggctgcctttagaacgaaggtacaggaccattctaaagcagaagacgaatggaaagcccaggtggcccgagggcgacaggaggctgagcgtaagaactccctcattagttcactcgaggaagaggtctcaatactgaaccgccaggtgcttgagaaagagggcgagtccaaagaactgaaaagactcgtgatggccgaaagcgagaaaagtcagaagctggaggagaggcttcgcctgctgcaagctgagaccgcctcaaattccgctagggctgcagagagatcgagtgcgctgagagaggaagttcagagtttgagagaggaggccgagaagcagagagtggcttctgagaacttgcggcaagaattgaccagccaagccgagcgcgcagaggagcttgggcaggagctgaaagcctggcaggagaaattcttccagaaagaacaggctttgagcaccctgcagctggagcacacaagcacccaagcactcgtctccgaattgcttccagctaaacatctgtgtcagcagctacaggcagagcaggctgcagctgagaagaggcaccgcgaagagttagagcagagtaaacaggctgcaggggggcttcgggccgaactcctaagggcccagagggaattaggggaattaatcccattaaggcagaaagtggccgagcaggagcgcacagcccagcaacttagagctgaaaaggcgtcatatgctgagcaactgtcaatgttgaaaaaagcgcatggcctcctcgccgaagaaaatagaggccttggcgaaagggctaaccttggacgtcaatttctcgaggttgagttagaccaagcaagagaaaagtatgtgcaggagcttgctgcagtccgcgcagatgccgaaactaggctcgccgaagttcaacgggaagcccagtctaccgcaagagagctggaagtcatgaccgcgaaatacgagggcgcaaaggtcaaagtactggaggaaaggcagagattccaggaagagagacagaagctcacagcacaggtggaagagctgtccaagaaactcgctgactctgatcaagccagtaaggtccagcagcagaaactgaaggcagtgcaagctcaaggcggtgagagtcaacaggaggcgcaacggttacaggcccagctcaatgagttgcaggcacaactttcacaaaaggagcaagccgcagagcactacaagctgcagatggagaaggccaaaactcattacgacgccaagaagcaacagaaccaggaattgcaggagcaattacgctccctggagcaacttcagaaagagaacaaggaactcagagcggaagctgagagacttgggcatgagcttcagcaggcgggactgaaaaccaaggaagccgagcagacctgtcggcacttgaccgctcaagtaagatccctcgaagcacaagttgcacacgctgaccagcagctgcgcgacttaggcaagttccaggtcgccactgatgccctgaaatcccgcgaaccccaagctaagccacagctcgatctgagcattgacagcctggatctgtcttgcgaggagggtacccctctctccataacttccaagttaccgcggacccaacctgacgggacatccgtccccggggagccggcttccccaatcagccagagactgccgcctaaggttgaaagcctcgaaagtctttacttcactccaatcccggcccggtcccaggcgccgcttgagtcttctcttgactccctgggcgacgtgtttctggattccggacgcaagactcgtagtgctagaaggcgaaccacacaaatcattaatatcacaatgactaagaagctggacgtggaagaacctgactcagctaactcttccttttactccacgcggagcgctcctgcaagccaggcaagtcttagggcaacatcttccactcagtctctggcaaggctgggctcgcctgattacggtaatagcgccttgctttcactccccgggtaccggccaactacgcgctcctccgctcgccgttctcaggccggagtctcctccggagcacctccaggccggaacagtttctacatggggacctgtcaggatgaaccggagcagctggacgactggaacaggatcgctgaactgcaacagcgtaaccgagtctgtcctccccatttgaagacctgctaccctctcgaatccagaccatcgctctcgctgggaactataactgatgaagaaatgaagactggggacccccaagaaaccctgagacgagcaagcatgcagcctattcagatcgccgaaggaactgggatcaccactagacaacagagaaaaagagtatccctggaaccacaccagggcccagggacaccagagagcaagaaagccacgtcgtgttttcccagaccaatgactcctcgcgatcgccacgaggggaggaagcagtctacgaccgaagcccagaaaaaggctgctcccgcaagtacaaagcaggcagacagacgacagtcaatggccttcagtatattgaacacccctaagaagctggggaactccctcctgcggcgcggagcttcgaagaaagctcttagtaaggccagtcctaatacacgctcgggcacaagacgatcccctcgtatagcaaccacgaccgcatcggctgccaccgccgccgctattggggccaccccaagagcaaagggcaaggcgaagcactag

SEQ ID NO: 105023 - DNA, 606 bp, Artificial Sequence
  derived and/or modified sequence
atgaccctgcacgccacccggggcgccgccctgctgagctgggtgaactctctgcacgtcgcagaccccgtggaggcggtgctgcagctgcaggattgttctatcttcatcaagattatcgaccgcatccatggcactgaagagggccaacagatcctgaagcagccagtctcggagcggctggacttcgtgtgctcattcctgcagaaaaacaggaaacatccaagcagtcccgaatgtctagtatctgcccaaaaagtcctggagggctctgaacttgagctggctaaaatgacaatgttgcttctgtaccattcgacgatgtcatctaaatcacctagagattgggaacagttcgagtacaaaatacaggccgagctcgccgtgatcctcaaatttgttctggaccacgaggatgggctcaatctcaatgaagatctggaaaactttctgcagaaggcacccgttccatccacgtgtagtagcaccttcccagaggaactgagcccaccttcccatcaggctaaacgtgagatcagatttcttgagctgcaaaaggttgcatcctcatcatctggcaataattttctatctggttccccttag

SEQ ID NO: 105024 - DNA, 663 bp, Artificial Sequence
  derived and/or modified sequence
atgaccctgcacgccacccggggcgccgccctgctgagctgggtgaactcactgcatgttgccgaccctgtggaggcagtcctacagctgcaggactgctcaatcttcatcaagatcatcgaccgaatacacggcacagaggagggtcagcagatcttgaaacaacctgttagtgaaaggcttgattttgtgtgctccttcctccagaagaatagaaagcatccttcttcacctgaatgcctggtatctgcgcaaaaagtcttagaaggctctgagctggaactggccaagatgactatgctcttgctataccattcaactatgtcaagcaagtccccaagggactgggagcagtttgaatataaaatccaggcagagctggctgtcatcctgaagttcgtgctggaccacgaagacggtctgaacttgaacgaagacttggagaattttctccagaaagcccctgtcccaagcacctgctcctctaccttcccggaggaactgagtcctccgtcacatcaagctaaacgggaaatccgctttctagaactacaaaaagtggcatcttccagctctggcaataacttcctcagcgggtcccccgcgtctcccatgggagacatcctgcagactccgcagtttcaaatgcgaaggctgaagtag

SEQ ID NO: 105025 - DNA, 3775 bp, Artificial Sequence
  derived and/or modified sequence
gtgctggagaggccgctgcgagcggaaggcctcctccataaccgagtccgaaagggcagaatctatgggggtggaaactaattctaagccagactgctggagatcaccctgttctagtgtgtggaggcttccaccaggaggcgcattggagtgactgtctggcatcaccaagatgacactccacgccacccggggggctgcactcctctcttgggtgaacagtctacacgtggctgaccctgtggaggctgtgctgcagctccaggactgcagcatcttcatcaagatcattgacagaatccatggcactgaagagggacagcaaatcttgaagcagccggtgtcagagagactggactttgtgtgcagttttctgcagaaaaatcgaaaacatccctcttccccagaatgcctggtatctgcacagaaggtgctagagggatcagagctggaactggcgaagatgaccatgctgctcttataccactctaccatgagctccaaaagtcccagggactgggaacagtttgaatataaaattcaggctgagttggctgtcattcttaaatttgtgctggaccatgaggacgggctaaaccttaatgaggacctagagaacttcctacagaaagctcctgtgccttctacctgttctagcacattccctgaagagctctccccacctagccaccaggccaagagggagattcgcttcctagagctacagaaggttgcctcctcttccagtgggaacaactttctctcaggttctccagcttctcccatgggtgatatcctgcagaccccacagttccagatgagacggctgaagaagcagcttgctgatgagagaagtaatagggatgagctggagctggagctagctgagaaccgcaagctcctcaccgagaaggatgcacagatagccatgatgcagcagcgcattgaccgcctagccctgctgaatgagaagcaggcggccagcccactggagcccaaggagcttgaggagctgcgtgacaagaatgagagccttaccatgcggctgcatgaaaccctgaagcagtgccaggacctgaagacagagaagagccagatggatcgcaaaatcaaccagctttcggaggagaatggagacctttcctttaagctgcgggagtttgccagtcatctgcagcagctacaggatgccctcaatgagctgacggaggagcacagcaaggccactcaggagtggctagagaagcaggcccagctggagaaggagctcagcgcagccctgcaggacaagaaatgccttgaagagaagaacgaaatccttcagggaaaactttcacagctggaagaacacttgtcccagctgcaggataacccaccccaggagaagggcgaggtgctgggtgatgtcttgcaggtggaagaactgagtaagaaactggctgactctgaccaagccagcaaggtgcagcagcagaagctgaaggctgtccaggctcagggaggcgagagccagcaggaggcccagcgcctccaggcccagctgaatgaactgcaagcccagttgagccagaaggagcaggcagctgagcactataagctgcagatggagaaagccaaaacacattatgatgccaagaagcagcagaaccaagagctgcaggagcagctgcggagcctggagcagctgcagaaggaaaacaaagagctgcgagctgaagctgaacggctgggccatgagctacagcaggctgggctgaagaccaaggaggctgaacagacctgccgccaccttactgcccaggtgcgcagcctggaggcacaggttgcccatgcagaccagcagcttcgagacctgggcaaattccaggtggcaactgatgctttaaagagccgtgagccccaggctaagccccagctggacttgagtattgacagcctggatctgagctgcgaggaggggaccccactcagtatcaccagcaagctgcctcgtacccagccagacggcaccagcgtccctggagaaccagcctcacctatctcccagcgcctgccccccaaggtagaatccctggagagtctctacttcactcccatccctgctcggagtcaggcccccctggagagcagcctggactccctgggagacgtcttcctggactcgggtcgtaagacccgctccgctcgtcggcgcaccacgcagatcatcaacatcaccatgaccaagaagctagatgtggaagagccagacagcgccaactcatcgttctacagcacgcggtctgctcctgcttcccaggctagcctgcgagccacctcctctactcagtctctagctcgcctgggttctcccgattatggcaactcagccctgctcagcttgcctggctaccgccccaccactcgcagttctgctcgtcgttcccaggccggggtgtccagtggggcccctccaggaaggaacagcttctacatgggcacttgccaggatgagcctgagcagctggatgactggaaccgcattgcagagctgcagcagcgcaatcgagtgtgccccccacatctgaagacctgctatcccctggagtccaggccttccctgagcctgggcaccatcacagatgaggagatgaaaactggagacccccaagagaccctgcgccgagccagcatgcagccaatccagatagccgagggcactggcatcaccacccggcagcagcgcaaacgggtctccctagagccccaccagggccctggaactcctgagtctaagaaggccaccagctgtttcccacgccccatgactccccgagaccgacatgaagggcgcaaacagagcactactgaggcccagaagaaagcagctccagcttctactaaacaggctgaccggcgccagtcgatggccttcagcatcctcaacacacccaagaagctagggaacagccttctgcggcggggagcctcaaagaaggccctgtccaaggcttcccccaacactcgcagtggaacccgccgttctccgcgcattgccaccaccacagccagcgccgccactgctgccgccattggtgccacccctcgagccaagggcaaggcaaagcactaaagggccagtaccagtgagtggccccacctgtgtccccgatgctgacctcacctggtcctccgcctactgtccctctcagtgccttctctcagctcccaggccaacagtagccaaacccctagagacagtgatgcctgcccgcaccctggcctggtccctggtccttcactggcgccttctcggagctggcccagggggcctggagcatggacagtgtgggcgctctccctaccttgcctccttttttcttaaagcaaagtcacttctccatcacaaccagatttgaggctggttttgatggctgggtccttgggcctggccagtcttcctcttagcctctggatctagaagggaccataagaggagtaggccctggttcctgctgtcctggtggctgggcccagcaggggccctcactcttgaagtccaggactgggtctgacctggtgggagcacctgccagaggatgctctttcccaggacggatgggccctatgtctcaggagtggggttgggggacagccttcagcagcagctcacaccctaccttccccagacttgcactggggtgggatttggagtgatgggaaggtttttaagggccggggatggatcttttctaaatgttattacttgtaaataaagtctatttttctcccgtga

SEQ ID NO: 105026 - DNA, 7227 bp, Artificial Sequence
  derived and/or modified sequence
gcccacgaagaggtacgattccggagaatcgcgaggcagagcgggagcgcgcagccaggtggaaactaattctaagccagactgctggagatcaccctgttctagtgtgtggaggcttccaccaggagtctggagtgcaatggcacgatctcggctcactgcaacctccacctcccaggttcaagcgattctcctgcctcagcctcccaagtagctgggattacaggcgcattggagtgactgtctggcatcaccaagatgacactccacgccacccggggggctgcactcctctcttgggtgaacagtctacacgtggctgaccctgtggaggctgtgctgcagctccaggactgcagcatcttcatcaagatcattgacagaatccatggcactgaagagggacagcaaatcttgaagcagccggtgtcagagagactggactttgtgtgcagttttctgcagaaaaatcgaaaacatccctcttccccagaatgcctggtatctgcacagaaggtgctagagggatcagagctggaactggcgaagatgaccatgctgctcttataccactctaccatgagctccaaaagtcccagggactgggaacagtttgaatataaaattcaggctgagttggctgtcattcttaaatttgtgctggaccatgaggacgggctaaaccttaatgaggacctagagaacttcctacagaaagctcctgtgccttctacctgttctagcacattccctgaagagctctccccacctagccaccaggccaagagggagattcgcttcctagagctacagaaggttgcctcctcttccagtgggaacaactttctctcaggttctccagcttctcccatgggtgatatcctgcagaccccacagttccagatgagacggctgaagaagcagcttgctgatgagagaagtaatagggatgagctggagctggagctagctgagaaccgcaagctcctcaccgagaaggatgcacagatagccatgatgcagcagcgcattgaccgcctagccctgctgaatgagaagcaggcggccagcccactggagcccaaggagcttgaggagctgcgtgacaagaatgagagccttaccatgcggctgcatgaaaccctgaagcagtgccaggacctgaagacagagaagagccagatggatcgcaaaatcaaccagctttcggaggagaatggagacctttcctttaagctgcgggagtttgccagtcatctgcagcagctacaggatgccctcaatgagctgacggaggagcacagcaaggccactcaggagtggctagagaagcaggcccagctggagaaggagctcagcgcagccctgcaggacaagaaatgccttgaagagaagaacgaaatccttcagggaaaactttcacagctggaagaacacttgtcccagctgcaggataacccaccccaggagaagggcgaggtgctgggtgatgtcttgcagctggaaaccttgaagcaagaggcagccactcttgctgcaaacaacacacagctccaagccagggtagagatgctggagactgagcgaggccagcaggaagccaagctgcttgctgagcggggccacttcgaagaagaaaagcagcagctgtctagcctgatcactgacctgcagagctccatctccaacctcagccaggccaaggaagagctggagcaggcctcccaggctcatggggcccggttgactgcccaggtggcctctctgacctctgagctcaccacactcaatgccaccatccagcaacaggatcaagaactggctggcctgaagcagcaggccaaagagaagcaggcccagctagcacagaccctccaacagcaagaacaggcctcccagggcctccgccaccaggtggagcagctaagcagtagcctgaagcagaaggagcagcagttgaaggaggtagcggagaagcaggaggcaactaggcaggaccatgcccagcaactggccactgctgcagaggagcgagaggcctccttaagggagcgggatgcggctctcaagcagctggaggcactggagaaggagaaggctgccaagctggagattctgcagcagcaacttcaggtggctaatgaagcccgggacagtgcccagacctcagtgacacaggcccagcgggagaaggcagagctgagccggaaggtggaggaactccaggcctgtgttgagacagcccgccaggaacagcatgaggcccaggcccaggttgcagagctagagttgcagctgcggtctgagcagcaaaaagcaactgagaaagaaagggtggcccaggagaaggaccagctccaggagcagctccaggccctcaaagagtccttgaaggtcaccaagggcagccttgaagaggagaagcgcagggctgcagatgccctggaagagcagcagcgttgtatctctgagctgaaggcagagacccgaagcctggtggagcagcataagcgggaacgaaaggagctggaagaagagagggctgggcgcaaggggctggaggctcgattacagcagcttggggaggcccatcaggctgagactgaagtcctgcggcgggagctggcagaggccatggctgcccagcacacagctgagagtgagtgtgagcagctcgtcaaagaagtagctgcctggcgtgagcggtatgaggatagccagcaagaggaggcacagtatggcgccatgttccaggaacagctgatgactttgaaggaggaatgtgagaaggcccgccaggagctgcaggaggcaaaggagaaggtggcaggcatagaatcccacagcgagctccagataagccggcagcagaacgaactagctgagctccatgccaacctggccagagcactccagcaggtccaagagaaggaagtcagggcccagaagcttgcagatgacctctccactctgcaggaaaagatggctgccaccagcaaagaggtggcccgcttggagaccttggtgcgcaaggcaggtgagcagcaggaaacagcctcccgggagttagtcaaggagcctgcgagggcaggagacagacagcccgagtggctggaagagcaacagggacgccagttctgcagcacacaggcagcgctgcaggctatggagcgggaggcagagcagatgggcaatgagctggaacggctgcgggccgcgctgatggagagccaggggcagcagcaggaggagcgtgggcagcaggaaagggaggtggcgcggctgacccaggagcggggccgtgcccaggctgaccttgccctggagaaggcggccagagcagagcttgagatgcggctgcagaacgccctcaacgagcagcgtgtggagttcgctaccctgcaagaggcactggctcatgccctgacggaaaaggaaggcaaggaccaggagttggccaagcttcgtggtctggaggcagcccagataaaagagctggaggaacttcggcaaaccgtgaagcaactgaaggaacagctggctaagaaagaaaaggagcacgcatctggctcaggagcccaatctgaggctgctggcaggacagagccaacaggccccaagctggaggcactgcgggcagaggtgagcaagctggaacagcaatgccagaagcagcaggagcaggctgacagcctggaacgcagcctcgaggctgagcgggcctcccgggctgagcgggacagtgctctggagactctgcagggccagttagaggagaaggcccaggagctagggcacagtcagagtgccttagcctcggcccaacgggagttggctgccttccgcaccaaggtacaagaccacagcaaggctgaagatgagtggaaggcccaggtggcccggggccggcaagaggctgagaggaaaaatagcctcatcagcagcttggaggaggaggtgtccatcctgaatcgccaggtcctggagaaggagggggagagcaaggagttgaagcggctggtgatggccgagtcagagaagagccagaagctggaggagaggctgcgcctgctgcaggcagagacagccagcaacagtgccagagctgcagaacgcagctctgctctgcgggaggaggtgcagagcctccgggaggaggctgagaaacagcgggtggcttcagagaacctgcggcaggagctgacctcacaggctgagcgtgcggaggagctgggccaagaattgaaggcgtggcaggagaagttcttccagaaagagcaggccctctccaccctgcagctcgagcacaccagcacacaggccctggtgagtgagctgctgccagctaagcacctctgccagcagctgcaggccgagcaggccgctgccgagaaacgccaccgtgaggagctggagcagagcaagcaggccgctgggggactgcgggcagagctgctgcgggcccagcgggagcttggggagctgattcctctgcggcagaaggtggcagagcaggagcgaacagctcagcagctgcgggcagagaaggccagctatgcagagcagctgagcatgctgaagaaggcgcatggcctgctggcagaggagaaccgggggctgggtgagcgggccaaccttggccggcagtttctggaagtggagttggaccaggcccgggagaagtatgtccaagagttggcagccgtacgtgctgatgctgagacccgtctggctgaggtgcagcgagaagcacagagcactgcccgggagctggaggtgatgactgccaagtatgagggtgccaaggtcaaggtcctggaggagaggcagcggttccaggaagagaggcagaaactcactgcccaggtggaagaactgagtaagaaactggctgactctgaccaagccagcaaggtgcagcagcagaagctgaaggctgtccaggctcagggaggcgagagccagcaggaggcccagcgcctccaggcccagctgaatgaactgcaagcccagttgagccagaaggagcaggcagctgagcactataagctgcagatggagaaagccaaaacacattatgatgccaagaagcagcagaaccaagagctgcaggagcagctgcggagcctggagcagctgcagaaggaaaacaaagagctgcgagctgaagctgaacggctgggccatgagctacagcaggctgggctgaagaccaaggaggctgaacagacctgccgccaccttactgcccaggtgcgcagcctggaggcacaggttgcccatgcagaccagcagcttcgagacctgggcaaattccaggtggcaactgatgctttaaagagccgtgagccccaggctaagccccagctggacttgagtattgacagcctggatctgagctgcgaggaggggaccccactcagtatcaccagcaagctgcctcgtacccagccagacggcaccagcgtccctggagaaccagcctcacctatctcccagcgcctgccccccaaggtagaatccctggagagtctctacttcactcccatccctgctcggagtcaggcccccctggagagcagcctggactccctgggagacgtcttcctggactcgggtcgtaagacccgctccgctcgtcggcgcaccacgcagatcatcaacatcaccatgaccaagaagctagatgtggaagagccagacagcgccaactcatcgttctacagcacgcggtctgctcctgcttcccaggctagcctgcgagccacctcctctactcagtctctagctcgcctgggttctcccgattatggcaactcagccctgctcagcttgcctggctaccgccccaccactcgcagttctgctcgtcgttcccaggccggggtgtccagtggggcccctccaggaaggaacagcttctacatgggcacttgccaggatgagcctgagcagctggatgactggaaccgcattgcagagctgcagcagcgcaatcgagtgtgccccccacatctgaagacctgctatcccctggagtccaggccttccctgagcctgggcaccatcacagatgaggagatgaaaactggagacccccaagagaccctgcgccgagccagcatgcagccaatccagatagccgagggcactggcatcaccacccggcagcagcgcaaacgggtctccctagagccccaccagggccctggaactcctgagtctaagaaggccaccagctgtttcccacgccccatgactccccgagaccgacatgaagggcgcaaacagagcactactgaggcccagaagaaagcagctccagcttctactaaacaggctgaccggcgccagtcgatggccttcagcatcctcaacacacccaagaagctagggaacagccttctgcggcggggagcctcaaagaaggccctgtccaaggcttcccccaacactcgcagtggaacccgccgttctccgcgcattgccaccaccacagccagcgccgccactgctgccgccattggtgccacccctcgagccaagggcaaggcaaagcactaaagggccagtaccagtgagtggccccacctgtgtccccgatgctgacctcacctggtcctccgcctactgtccctctcagtgccttctctcagctcccaggccaacagtagccaaacccctagagacagtgatgcctgcccgcaccctggcctggtccctggtccttcactggcgccttctcggagctggcccagggggcctggagcatggacagtgtgggcgctctccctaccttgcctccttttttcttaaagcaaagtcacttctccatcacaaccagatttgaggctggttttgatggctgggtccttgggcctggccagtcttcctcttagcctctggatctagaagggaccataagaggagtaggccctggttcctgctgtcctggtggctgggcccagcaggggccctcactcttgaagtccaggactgggtctgacctggtgggagcacctgccagaggatgctctttcccaggacggatgggccctatgtctcaggagtggggttgggggacagccttcagcagcagctcacaccctaccttccccagacttgcactggggtgggatttggagtgatgggaaggtttttaagggccggggatggatcttttctaaatgttattacttgtaaataaagtctatttttctcccgtga

SEQ ID NO: 105027 - DNA, 7140 bp, Artificial Sequence
  derived and/or modified sequence
gcgctggcgcgagcccacgaagaggtacgattccggagaatcgcgaggcagagcgggagcgcgcagccaggtggaaactaattctaagccagactgctggagatcaccctgttctagtgtgtggaggcttccaccaggaggcgcattggagtgactgtctggcatcaccaagatgacactccacgccacccggggggctgcactcctctcttgggtgaacagtctacacgtggctgaccctgtggaggctgtgctgcagctccaggactgcagcatcttcatcaagatcattgacagaatccatggcactgaagagggacagcaaatcttgaagcagccggtgtcagagagactggactttgtgtgcagttttctgcagaaaaatcgaaaacatccctcttccccagaatgcctggtatctgcacagaaggtgctagagggatcagagctggaactggcgaagatgaccatgctgctcttataccactctaccatgagctccaaaagtcccagggactgggaacagtttgaatataaaattcaggctgagttggctgtcattcttaaatttgtgctggaccatgaggacgggctaaaccttaatgaggacctagagaacttcctacagaaagctcctgtgccttctacctgttctagcacattccctgaagagctctccccacctagccaccaggccaagagggagattcgcttcctagagctacagaaggttgcctcctcttccagtgggaacaactttctctcaggttctccagcttctcccatgggtgatatcctgcagaccccacagttccagatgagacggctgaagaagcagcttgctgatgagagaagtaatagggatgagctggagctggagctagctgagaaccgcaagctcctcaccgagaaggatgcacagatagccatgatgcagcagcgcattgaccgcctagccctgctgaatgagaagcaggcggccagcccactggagcccaaggagcttgaggagctgcgtgacaagaatgagagccttaccatgcggctgcatgaaaccctgaagcagtgccaggacctgaagacagagaagagccagatggatcgcaaaatcaaccagctttcggaggagaatggagacctttcctttaagctgcgggagtttgccagtcatctgcagcagctacaggatgccctcaatgagctgacggaggagcacagcaaggccactcaggagtggctagagaagcaggcccagctggagaaggagctcagcgcagccctgcaggacaagaaatgccttgaagagaagaacgaaatccttcagggaaaactttcacagctggaagaacacttgtcccagctgcaggataacccaccccaggagaagggcgaggtgctgggtgatgtcttgcagctggaaaccttgaagcaagaggcagccactcttgctgcaaacaacacacagctccaagccagggtagagatgctggagactgagcgaggccagcaggaagccaagctgcttgctgagcggggccacttcgaagaagaaaagcagcagctgtctagcctgatcactgacctgcagagctccatctccaacctcagccaggccaaggaagagctggagcaggcctcccaggctcatggggcccggttgactgcccaggtggcctctctgacctctgagctcaccacactcaatgccaccatccagcaacaggatcaagaactggctggcctgaagcagcaggccaaagagaagcaggcccagctagcacagaccctccaacagcaagaacaggcctcccagggcctccgccaccaggtggagcagctaagcagtagcctgaagcagaaggagcagcagttgaaggaggtagcggagaagcaggaggcaactaggcaggaccatgcccagcaactggccactgctgcagaggagcgagaggcctccttaagggagcgggatgcggctctcaagcagctggaggcactggagaaggagaaggctgccaagctggagattctgcagcagcaacttcaggtggctaatgaagcccgggacagtgcccagacctcagtgacacaggcccagcgggagaaggcagagctgagccggaaggtggaggaactccaggcctgtgttgagacagcccgccaggaacagcatgaggcccaggcccaggttgcagagctagagttgcagctgcggtctgagcagcaaaaagcaactgagaaagaaagggtggcccaggagaaggaccagctccaggagcagctccaggccctcaaagagtccttgaaggtcaccaagggcagccttgaagaggagaagcgcagggctgcagatgccctggaagagcagcagcgttgtatctctgagctgaaggcagagacccgaagcctggtggagcagcataagcgggaacgaaaggagctggaagaagagagggctgggcgcaaggggctggaggctcgattacagcagcttggggaggcccatcaggctgagactgaagtcctgcggcgggagctggcagaggccatggctgcccagcacacagctgagagtgagtgtgagcagctcgtcaaagaagtagctgcctggcgtgagcggtatgaggatagccagcaagaggaggcacagtatggcgccatgttccaggaacagctgatgactttgaaggaggaatgtgagaaggcccgccaggagctgcaggaggcaaaggagaaggtggcaggcatagaatcccacagcgagctccagataagccggcagcagaacgaactagctgagctccatgccaacctggccagagcactccagcaggtccaagagaaggaagtcagggcccagaagcttgcagatgacctctccactctgcaggaaaagatggctgccaccagcaaagaggtggcccgcttggagaccttggtgcgcaaggcaggtgagcagcaggaaacagcctcccgggagttagtcaaggagcctgcgagggcaggagacagacagcccgagtggctggaagagcaacagggacgccagttctgcagcacacaggcagcgctgcaggctatggagcgggaggcagagcagatgggcaatgagctggaacggctgcgggccgcgctgatggagagccaggggcagcagcaggaggagcgtgggcagcaggaaagggaggtggcgcggctgacccaggagcggggccgtgcccaggctgaccttgccctggagaaggcggccagagcagagcttgagatgcggctgcagaacgccctcaacgagcagcgtgtggagttcgctaccctgcaagaggcactggctcatgccctgacggaaaaggaaggcaaggaccaggagttggccaagcttcgtggtctggaggcagcccagataaaagagctggaggaacttcggcaaaccgtgaagcaactgaaggaacagctggctaagaaagaaaaggagcacgcatctggctcaggagcccaatctgaggctgctggcaggacagagccaacaggccccaagctggaggcactgcgggcagaggtgagcaagctggaacagcaatgccagaagcagcaggagcaggctgacagcctggaacgcagcctcgaggctgagcgggcctcccgggctgagcgggacagtgctctggagactctgcagggccagttagaggagaaggcccaggagctagggcacagtcagagtgccttagcctcggcccaacgggagttggctgccttccgcaccaaggtacaagaccacagcaaggctgaagatgagtggaaggcccaggtggcccggggccggcaagaggctgagaggaaaaatagcctcatcagcagcttggaggaggaggtgtccatcctgaatcgccaggtcctggagaaggagggggagagcaaggagttgaagcggctggtgatggccgagtcagagaagagccagaagctggaggagaggctgcgcctgctgcaggcagagacagccagcaacagtgccagagctgcagaacgcagctctgctctgcgggaggaggtgcagagcctccgggaggaggctgagaaacagcgggtggcttcagagaacctgcggcaggagctgacctcacaggctgagcgtgcggaggagctgggccaagaattgaaggcgtggcaggagaagttcttccagaaagagcaggccctctccaccctgcagctcgagcacaccagcacacaggccctggtgagtgagctgctgccagctaagcacctctgccagcagctgcaggccgagcaggccgctgccgagaaacgccaccgtgaggagctggagcagagcaagcaggccgctgggggactgcgggcagagctgctgcgggcccagcgggagcttggggagctgattcctctgcggcagaaggtggcagagcaggagcgaacagctcagcagctgcgggcagagaaggccagctatgcagagcagctgagcatgctgaagaaggcgcatggcctgctggcagaggagaaccgggggctgggtgagcgggccaaccttggccggcagtttctggaagtggagttggaccaggcccgggagaagtatgtccaagagttggcagccgtacgtgctgatgctgagacccgtctggctgaggtgcagcgagaagcacagagcactgcccgggagctggaggtgatgactgccaagtatgagggtgccaaggtcaaggtcctggaggagaggcagcggttccaggaagagaggcagaaactcactgcccaggtggaagaactgagtaagaaactggctgactctgaccaagccagcaaggtgcagcagcagaagctgaaggctgtccaggctcagggaggcgagagccagcaggaggcccagcgcctccaggcccagctgaatgaactgcaagcccagttgagccagaaggagcaggcagctgagcactataagctgcagatggagaaagccaaaacacattatgatgccaagaagcagcagaaccaagagctgcaggagcagctgcggagcctggagcagctgcagaaggaaaacaaagagctgcgagctgaagctgaacggctgggccatgagctacagcaggctgggctgaagaccaaggaggctgaacagacctgccgccaccttactgcccaggtgcgcagcctggaggcacaggttgcccatgcagaccagcagcttcgagacctgggcaaattccaggtggcaactgatgctttaaagagccgtgagccccaggctaagccccagctggacttgagtattgacagcctggatctgagctgcgaggaggggaccccactcagtatcaccagcaagctgcctcgtacccagccagacggcaccagcgtccctggagaaccagcctcacctatctcccagcgcctgccccccaaggtagaatccctggagagtctctacttcactcccatccctgctcggagtcaggcccccctggagagcagcctggactccctgggagacgtcttcctggactcgggtcgtaagacccgctccgctcgtcggcgcaccacgcagatcatcaacatcaccatgaccaagaagctagatgtggaagagccagacagcgccaactcatcgttctacagcacgcggtctgctcctgcttcccaggctagcctgcgagccacctcctctactcagtctctagctcgcctgggttctcccgattatggcaactcagccctgctcagcttgcctggctaccgccccaccactcgcagttctgctcgtcgttcccaggccggggtgtccagtggggcccctccaggaaggaacagcttctacatgggcacttgccaggatgagcctgagcagctggatgactggaaccgcattgcagagctgcagcagcgcaatcgagtgtgccccccacatctgaagacctgctatcccctggagtccaggccttccctgagcctgggcaccatcacagatgaggagatgaaaactggagacccccaagagaccctgcgccgagccagcatgcagccaatccagatagccgagggcactggcatcaccacccggcagcagcgcaaacgggtctccctagagccccaccagggccctggaactcctgagtctaagaaggccaccagctgtttcccacgccccatgactccccgagaccgacatgaagggcgcaaacagagcactactgaggcccagaagaaagcagctccagcttctactaaacaggctgaccggcgccagtcgatggccttcagcatcctcaacacacccaagaagctagggaacagccttctgcggcggggagcctcaaagaaggccctgtccaaggcttcccccaacactcgcagtggaacccgccgttctccgcgcattgccaccaccacagccagcgccgccactgctgccgccattggtgccacccctcgagccaagggcaaggcaaagcactaaagggccagtaccagtgagtggccccacctgtgtccccgatgctgacctcacctggtcctccgcctactgtccctctcagtgccttctctcagctcccaggccaacagtagccaaacccctagagacagtgatgcctgcccgcaccctggcctggtccctggtccttcactggcgccttctcggagctggcccagggggcctggagcatggacagtgtgggcgctctccctaccttgcctccttttttcttaaagcaaagtcacttctccatcacaaccagatttgaggctggttttgatggctgggtccttgggcctggccagtcttcctcttagcctctggatctagaagggaccataagaggagtaggccctggttcctgctgtcctggtggctgggcccagcaggggccctcactcttgaagtccaggactgggtctgacctggtgggagcacctgccagaggatgctctttcccaggacggatgggccctatgtctcaggagtggggttgggggacagccttcagcagcagctcacaccctaccttccccagacttgcactggggtgggatttggagtgatgggaaggtttttaagggccggggatggatcttttctaaatgttattacttgtaaataaagtctatttttctcccgtg

SEQ ID NO: 105028 - DNA, 539 bp, Artificial Sequence
  derived and/or modified sequence
agagcgggagcgcgcagccaggctggagtccagtggtgcaatctcggctccctgcaacctctgcctcctgggttcaagcgattctcctgcctcagcctcctgagtagctgggattacaggcatgcaccaccatgcccagctaattttgtatttttaatagaaatggggtttcaccatgttggtcaggctgatcttgaactgccaacctcaggtggaaactaattctaagccagactgctggagatcaccctgttctagtgtgtggaggcttccaccaggaggcgcattggagtgactgtctggcatcaccaagatgacactccacgccacccggggggctgcactcctctcttgggtgaacagtctacacgtggctgaccctgtggaggctgtgctgcagctccaggactgcagcatcttcatcaagatcattgacagaatccatggcactgaagagggacagcaaatcttgaagcagccggtgtcagagagactggactttgtgtgcagttttctgcagaaaaatcgaaaacatccct

SEQ ID NO: 105029 - DNA, 583 bp, Artificial Sequence
  derived and/or modified sequence
aattgtgcgctcacagcgctggcgcgagcccacgaagaggtacgattccggagaatcgcgaggcagagcgggagcgcgcagccaggtggaaactaattctaagccagactgctggagatcaccctgttctagtgtgtggaggcttccaccaggagacagggtctctctctgtcacccagactggagtgcaatggcgggatctcagctcactgcaacctccacctctcgggttcaagcgattctcctgcctcagcctccctagtagctatgattacaggcgcattggagtgactgtctggcatcaccaagatgacactccacgccacccggggggctgcactcctctcttgggtgaacagtctacacgtggctgaccctgtggaggctgtgctgcagctccaggactgcagcatcttcatcaagatcattgacagaatccatggcactgaagagggacagcaaatcttgaagcagccggtgtcagagagactggactttgtgtgcagttttctgcagaaaaatcgaaaacatccctcttccccagaatgcctggtatctgcacagaaggtgctagagggatcag

SEQ ID NO: 105030 - DNA, 582 bp, Artificial Sequence
  derived and/or modified sequence
agccaggtaaccggcgcgggcccgcgtttggcgtgcggcctgggcacccctgcgggtgctcaggcctaaaaggggtgctggagaggccgctgcgagcggaaggcctcctccataaccgagtccgaaagggcagaatctatgggggtggaaactaattctaagccagactgctggagatcaccctgttctagtgtgtggaggcttccaccaggaggaaactgcagctgaggagccattgcagtcccatctccagaagacccccagaaagagttggaagagttcttcaggctgtggcagccactgcccaccaacacacccaaatcaatcaagatgaatcccaggtggtgaggctgaagcagatggtttggcgcattggagtgactgtctggcatcaccaagatgacactccacgccacccggggggctgcactcctctcttgggtgaacagtctacacgtggctgaccctgtggaggctgtgctgcagctccaggactgcagcatcttcatcaagatcattgacagaatccatggcactgaagagggacagcaaatcttgaagcagccggtgtcagagagactg

SEQ ID NO: 105031 - DNA, 582 bp, Artificial Sequence
  derived and/or modified sequence
agtgactcttcctgctctgccactgactcaccccgttgacctggcctgcatggcttcccttctgcttgctgtctgatccacagaacgctggggttgcccaggataatgtgaggctgagctcactaagagtgggtgggttaggggaatgaataatcattcctgtccctttgccccttccctaggtggaaactaattctaagccagactgctggagatcaccctgttctagtgtgtggaggcttccaccaggagacaggttctcactatgttgcccacgctggtctcaaattccttggctcaagtgatcctcccatcttggcctccaaaagtgccgggattacaagcatgagcaactgtgcctggccctgaaaaggcgcattggagtgactgtctggcatcaccaagatgacactccacgccacccggggggctgcactcctctcttgggtgaacagtctacacgtggctgaccctgtggaggctgtgctgcagctccaggactgcagcatcttcatcaagatcattgacagaatccatggcactgaagagggacagcaaatcttgaagcagccggtgtcagag

SEQ ID NO: 105032 - DNA, 589 bp, Artificial Sequence
  derived and/or modified sequence
atagtttaaactaattgtgcgctcacagcgctggcgcgagcccacgaagaggtacgattccggagaatcgcgaggcagagcgggagcgcgcagccaggtggaaactaattctaagccagactgctggagatcaccctgttctagtgtgtggaggcttccaccaggagctgtggcagaagcagtgtgaacaatgaatgcagaaatgctttgtatacatgaagacctatactgatgagaaagatagaggatgtagctgagatgtgctggagagagcactggatttagaagacatctctttgagttctggctctgcagccttaccagtcgaccttgaggcaggcgcattggagtgactgtctggcatcaccaagatgacactccacgccacccggggggctgcactcctctcttgggtgaacagtctacacgtggctgaccctgtggaggctgtgctgcagctccaggactgcagcatcttcatcaagatcattgacagaatccatggcactgaagagggacagcaaatcttgaagcagccggtgtcagagagactggactttgtgtgcagttttctgcagaaaaatcgaaa

SEQ ID NO: 105033 - DNA, 583 bp, Artificial Sequence
  derived and/or modified sequence
gtgcggcctgggcacccctgcgggtgctcaggcctaaaaggggtgctggagaggccgctgcgagcggaaggcctcctccataaccgagtccgaaagggcagaatctatgggggtggaaactaattctaagccagactgctggagatcaccctgttctagtgtgtggaggcttccaccaggagacaggttctcactatgttgcccacgctggtctcaaattccttggctcaagtgatcctcccatcttggcctccaaaagtgccgggattacaagcatgagcaactgtgcctggccctgaaaaggcgcattggagtgactgtctggcatcaccaagatgacactccacgccacccggggggctgcactcctctcttgggtgaacagtctacacgtggctgaccctgtggaggctgtgctgcagctccaggactgcagcatcttcatcaagatcattgacagaatccatggcactgaagagggacagcaaatcttgaagcagccggtgtcagagagactggactttgtgtgcagttttctgcagaaaaatcgaaaacatccctcttccccagaatgcctggtatc

SEQ ID NO: 105034 - DNA, 911 bp, Artificial Sequence
  derived and/or modified sequence
aattgtgcgctcacagcgctggcgcgagcccacgaagaggtacgattccggagaatcgcgaggcagagcgggagcgcgcagccaggtggaaactaattctaagccagactgctggagatcaccctgttctagtgtgtggaggcttccaccaggagacaggttctcactatgttgcccacgctggtctcaaattccttggctcaagtgatcctcccatcttggcctccaaaagtgccgggattacaagcatgagcaactgtgcctggccctgaaaaggcgcattggagtgactgtctggcatcaccaagatgacactccacgccacccggggggctgcactcctctcttgggtgaacagtctacacgtggctgaccctgtggaggctgtgctgcagctccaggactgcagcatcttcatcaagatcattgacagaatccatggcactgaagagggacagcaaatcttgaagcagccggtgtcagagagactggactttgtgtgcagttttctgcagaaaaatcgaaaacatccctcttccccagaatgcctggtatctgcacagaaggtgctagagggatcagagctggaactggcgaagatgaccatgctgctcttataccactctaccatgagctccaaaagtcccagggactgggaacagtttgaatataaaattcaggctgagttggctgtcattcttaaatttgtgctggaccatgaggacgggctaaaccttaatgaggacctagagaacttcctacagaaagctcctgtgccttctacctgttctagcacattccctgaagagctctccccacctagccaccaggccaagagggagattcgcttcctagagctacagaaggttgcctcctcttccagtgggaacaactttctctcaggttctcca

SEQ ID NO: 105035 - DNA, 792 bp, Artificial Sequence
  derived and/or modified sequence
gagagatggacagattattactgctgccttaaactctgggtggaaaacagagcgaagggggagtgtccggttgatcccagtttgtcaggcaggccactgcgcattggagtgactgtctggcatcaccaagatgacactccacgccacccggggggctgcactcctctcttgggtgaacagtctacacgtggctgaccctgtggaggctgtgctgcagctccaggactgcagcatcttcatcaagatcattgacagaatccatggcactgaagagggacagcaaatcttgaagcagccggtgtcagagagactggactttgtgtgcagttttctgcagaaaaatcgaaaacatccctcttccccagaatgcctggtatctgcacagaaggtgctagagggatcagagctggaactggcgaagatgaccatgctgctcttataccactctaccatgagctccaaaagtcccagggactgggaacagtttgaatataaaattcaggctgagttggctgtcattcttaaatttgtgctggaccatgaggacgggctaaaccttaatgaggacctagagaacttcctacagaaagctcctgtgccttctacctgttctagcacattccctgaagagctctccccacctagccaccaggccaagagggagattcgcttcctagagctacagaaggttgcctcctcttccagtgggaacaactttctctcaggttctccagcttctcccatgggtgatatcctgcagaccccacagttccagatgagacggctgaagaa

SEQ ID NO: 105036 - DNA, 280 bp, Artificial Sequence
  derived and/or modified sequence
gcgctcacagcgctggcgcgagcccacgaagaggtacgattccggagaatcgcgaggcagagcgggagcgcgcagccaggcgcattggagtgactgtctggcatcaccaagatgacactccacgccacccggggggctgcactcctctcttgggtgaacagtctacacgtggctgaccctgtggaggctgtgctgcagctccaggactgcagcatcttcatcaagatcattgacagaatccatggcactgaagagggacagcaaatcttgaagcagccgg

SEQ ID NO: 105037 - DNA, 2940 bp, Artificial Sequence
  derived and/or modified sequence
atgaccctgcatgccacccggggagccgctctcctgtcatgggtaaactctcttcacgtcgccgatcctgtggaggcggtgctgcaactgcaggactgtagtatatttattaagatcattgatagaatacacgggacggaagaaggacagcaaatcttgaaacaacccgtgtctgagcgtctggatttcgtatgctcatttctgcaaaagaacaggaaacacccatcaagtcccgaatgtttggtttctgcacagaaggtgcttgagggttcagagttggagctcgcgaagatgaccatgttgctgctctatcatagcactatgagttccaagtcccctagagattgggagcagtttgagtacaaaattcaagccgagctggcagttatccttaagtttgttctggaccatgaggacggactaaacttgaacgaggacctggagaatttcctgcaaaaggcaccagttccaagcacctgtagtagtacttttcccgaagagctgagccctccttcccaccaggctaaaagagagataaggttcctggaacttcaaaaagtggccagttcctcctctggtaacaattttctgtccgggtccccagcatctcccatgggcgacattttacagacgccccagtttcagatgaggcgccttaagaaacaactggccgacgaacgctcaaatcgagacgaattggagctggaacttgctgagaaccggaaactactgaccgaaaaggatgcacagatcgctatgatgcaacagagaatcgacagactggccctcctaaatgagaagcaagctgcatcgcctctcgaacccaaggaactggaggagctgcgggacaagaacgaatctttgacaatgcgtctccacgagacgcttaagcagtgccaagacttaaagactgagaaaagccagatggacagaaaaatcaatcagttatccgaggagaatggcgacctgtctttcaaactgagggagtttgctagccacttacagcagctacaggacgcgctgaacgaactcacagaagaacactcaaaagctacccaggagtggctggagaagcaggctcagctggagaaggagttatccgctgctttgcaggacaagaagtgcctggaggaaaagaatgaaattctccagggaaaactgtcccagttagaggagcatctttcacagcttcaggacaatccacctcaagagaagggagaggtgctgggagatgtgctgcaggtcgaagagctctctaaaaagctggctgacagtgaccaggctagtaaagtccagcagcagaagctgaaggcagtgcaggcgcaggggggagagagtcaacaggaggcccagcggctccaggcccagttgaacgaattacaggcacagctgtctcagaaggaacaggccgctgaacattataagctacagatggagaaggctaaaactcattacgatgctaaaaagcagcagaaccaggagctccaagaacaattaaggtcactggagcagttgcagaaagaaaataaggagctgcgggcagaggctgagcggttaggtcacgaactgcagcaggcaggactcaaaacaaaagaggccgagcagacttgcaggcacctgaccgcacaagtgcgaagcctcgaagcccaagtggctcacgccgatcagcagctccgcgacctgggtaagttccaagtggctacagatgcgctgaagtcaagagagccacaggctaagccacagctagacctctctattgacagcctagacctgtcatgcgaagagggaacacctctgagtatcacatccaagctacccaggacccagcccgacggtacatcagtgcccggtgaacctgcatccccaattagtcagcgtctgcctcccaaagtggagtcgctggaatcattatattttacccccatcccggctcgatctcaggcccctctggagtcttccttagactcgctgggagacgttttcctcgacagcgggaggaaaactcggagcgccaggcggcgtacaacgcagataattaatatcactatgactaaaaagctggatgtcgaggaacctgattctgcaaattctagcttctattcaacaagaagcgccccagctagtcaggcctctcttcgagcgacctcatctacgcagtctttggctcggctcggctctcccgattatggaaattcagccttgctgtccctgccaggataccgtcctacaacgcggtccagcgcgagaaggtcccaggccggtgtttccagcggagctccaccgggacggaattccttttatatggggacgtgtcaggatgagcccgagcagctcgacgactggaaccggattgctgaattgcaacagcggaatagagtgtgtccgccacaccttaagacttgctacccccttgagtcaaggcccagcctcagtctggggacgatcaccgacgaggaaatgaagactggggatccccaggaaactcttcgacgagcctcaatgcagccaattcagatagctgagggaaccggcatcacaactcggcagcagagaaaaagggtgagcctggagcctcaccaaggcccaggcactcccgaaagtaagaaagcaacaagttgcttcccacgcccaatgacaccacgcgacaggcacgaagggcgaaaacagtcgactactgaggcacagaagaaagctgcaccggcatctactaagcaggctgatcggcgacagtcgatggcatttagtatcctgaacacaccaaaaaagctcgggaattcgctactccgcagaggggcaagtaagaaggccctttccaaggccagcccgaacactcggtccggcacacgcaggtccccaagaattgcgactaccaccgcgtccgccgctactgccgcagcaatcggcgcaaccccgcgagcaaaggggaaggcaaagcactag

SEQ ID NO: 105038 - DNA, 6305 bp, Artificial Sequence
  derived and/or modified sequence
atgacccttcatgcaactaggggtgcagctttactttcgtgggttaactcattacacgttgctgatcctgtggaggccgtcttgcagctccaagactgcagcatcttcataaagatcattgacagaatacatggaactgaggaagggcagcagattctgaagcagccagtgagtgaaaggcttgacttcgtgtgtagtttcttacagaagaatcggaaacatccaagttcacccgagtgtctagttagtgcccaaaaagtgctcgaaggatcagaactagaacttgcgaaaatgaccatgcttctactttaccattcaacaatgtccagtaagtccccccgtgactgggaacagttcgagtataagattcaggcagagttagcggtcatccttaagtttgtgcttgatcacgaagatggcctgaacttaaatgaggatctggagaactttcttcagaaagctccagtcccgtccacatgcagtagtacattccccgaggaactgagcccaccgagtcatcaagccaagagggagattcgcttcctggagctgcagaaagtcgcaagctcttcttccggcaacaattttctgagcggcagcccagcttccccaatgggtgacattctgcaaactccacagttccagatgcgtcggttaaaaaaacagttggctgatgagcgcagcaatcgggatgaactagagctggagctggcggagaacagaaaacttttaaccgaaaaggacgcacaaatagccatgatgcagcagcgtattgatcggttagcgctccttaatgaaaaacaagctgccagtcccctggaaccgaaagaactggaggagctgcgggataaaaacgagagccttacgatgcgtctccacgaaactctgaaacagtgccaggatcttaagacggagaaatcccagatggacagaaaaatcaaccagctgtcggaggagaatggggatctttctttcaagctgcgcgagtttgctagccacttgcagcagttgcaagatgccctgaatgagctgactgaagaacattctaaggccacccaggaatggctcgagaaacaggctcaacttgagaaagaactgagtgccgcactgcaggataaaaaatgcttagaggagaagaacgagatcctgcagggcaaactctcccagctggaggagcacttgtctcaattgcaggataatccacctcaagagaaaggcgaggtccttggcgacgttctgcagttagagacactgaaacaggaagctgcaacactggcggctaacaatacccagctccaggccagagtggagatgctggagacagaacgaggacagcaggaggcaaaactgttggcagaacgcggacatttcgaggaagaaaaacagcaacttagttccctgataaccgatcttcagtctagtattagcaacctgtcacaggccaaggaggagctcgagcaggcgtcgcaggcccatggcgcacgtctgaccgctcaagtggcaagcttaacatctgagcttaccactcttaacgccacaattcaacagcaggatcaggagcttgcaggcttaaagcagcaggccaaggagaaacaggcccagctggcacagactctgcagcagcaagagcaggcttcacagggactgcggcaccaagtggaacaactgagctcatctttaaagcagaaagagcaacaactcaaggaggtggcagagaaacaagaagcgacccgccaagaccacgcgcaacagctggcgacagccgctgaagagcgtgaagcatctcttcgcgagcgcgatgccgctttgaagcagctggaagctctggaaaaggagaaggctgcgaagctggaaattttgcagcagcagctgcaggtcgccaacgaagcacgcgactcagcccaaacaagtgtcacacaggctcaacgcgaaaaagccgaactgtccagaaaagtggaggagctccaagcctgtgttgaaacagcccgtcaggagcagcatgaggcacaggcgcaggtcgccgaactggaactccagcttaggtccgaacagcagaaggccacagagaaggagcgggtggcacaggaaaaagaccagctacaggaacagctccaagctctcaaagagtcactcaaagtgactaaaggcagcctggaggaggagaagcgcagagccgctgatgcccttgaggaacagcaacgttgcatttctgagctgaaggcagagaccagaagtctagtggaacaacacaagagagagagaaaggaactcgaggaagagagggctggcaggaaggggctggaagcgcgtttgcaacagctcggagaggcacaccaggctgagactgaggtactccgcagagaactcgccgaggccatggctgcccagcacaccgccgagtcagagtgcgagcagctggtgaaggaagtggctgcatggcgcgaacgctatgaggattcacaacaggaagaagcccagtatggagcaatgttccaagaacaacttatgaccctaaaggaagaatgcgagaaagctcggcaggaactccaggaagcgaaggagaaggtggctggcatcgagtctcacagtgaactccagatcagcaggcagcagaacgagctggccgagttgcatgccaatttggcaagagcactccagcaagttcaagagaaggaggtgagagcccagaagctagccgacgatttaagcaccctacaggaaaaaatggctgccacttcgaaggaggttgctcgcctggagactctcgtgcgtaaagccggtgagcagcaagagaccgcctctagggagctagtaaaggagccagccagagcaggggataggcagccagagtggttagaggaacagcagggcagacagttttgttccacacaagctgccctgcaggctatggagcgagaagcggagcagatgggtaatgaactggagaggctgcgcgctgctctgatggaatcccagggacaacagcaggaggaaaggggacagcaagagagagaagtggcgcgtctcactcaagagagagggcgagcccaggccgaccttgctctggagaaagcagctcgagctgagttggaaatgaggttacagaacgcactgaatgagcagcgagtggaattcgccacactgcaagaggccttggcccatgcactcactgagaaggagggtaaggaccaggagcttgccaaactgaggggattggaggcagcccagattaaggaactggaggaactgcgccagaccgtgaaacagttaaaagagcagctggccaagaaggaaaaagaacacgcttcaggcagcggggctcagtctgaagctgctgggagaaccgagcctacaggccctaaattggaagcattgagagcggaggtgagcaaattggagcagcaatgtcaaaaacagcaagaacaagccgactccctggagcgttcacttgaagcagaaagagccagcagagctgagcgcgactccgccctggagaccctgcagggccagttggaggaaaaagcccaggaactcggacactcccagtcagccctcgctagcgcacagcgcgaactggctgctttccgtaccaaggtgcaggaccactctaaagctgaagatgaatggaaggcacaggtagccagaggaagacaggaggcagagcgtaagaattctctgatttcttcgttggaggaggaggtctcgatccttaacaggcaggtcttggagaaggaaggtgagtccaaggagttaaagcgtctggttatggcagaaagcgagaaaagccaaaaactggaggagaggctaagactactgcaggccgagaccgcctcgaattcagctagagctgctgagagatcttctgccctcagagaagaggtccagagcttacgcgaagaagccgagaagcagcgcgttgcctctgagaatctgcggcaggaactgacctcacaggccgagagggccgaggaactgggccaggagctgaaggcatggcaggaaaagtttttccagaaggagcaggctctttctacattacagctcgagcacacctcaacgcaggccctggtatcagagctgttgcccgctaagcatctgtgccagcagttgcaggcggagcaggctgcagcggaaaaaaggcaccgcgaagaactcgaacagagtaaacaggcagccggaggactgcgggctgagcttcttagagcacagagggagctgggtgagctgataccgctgcgtcagaaagtggctgagcaggagagaaccgctcagcagcttcgggcagagaaggcaagttatgccgaacaattgtctatgctcaagaaggctcacggtcttctggctgaagagaacagaggtcttggagaaagggccaacctgggcagacaatttctggaggtggagctcgatcaggcgagagagaagtatgtgcaggagctggctgccgttcgggctgatgccgagacccgcctggccgaggtacagagggaagcccagtccaccgctcgcgaactggaggttatgaccgctaagtatgagggtgcgaaggttaaagttcttgaggagaggcagaggttccaagaggaaagacagaagctgaccgcgcaagtggaagaactctctaagaagctggctgatagcgatcaggccagtaaggtgcagcagcaaaaattaaaggcagttcaggcccaaggaggggagtctcaacaggaggcccagagactgcaggcccagctcaatgaactacaagctcagttgagtcaaaaagagcaggccgctgaacactacaagttgcagatggagaaggcgaaaactcattacgacgctaagaaacaacaaaaccaagagctacaggagcaactcaggagtctcgagcagctacagaaagagaacaaggaactacgtgccgaggctgagagacttggtcatgaactgcagcaggccggattgaaaacaaaggaggccgaacaaacctgccggcacctcactgcccaggtgaggtctcttgaggctcaagtggcccacgccgatcaacagctccgggatctgggcaagttccaggtagcaaccgatgcactaaagtctcgggagcctcaggccaagcctcagctggatctgtcaatcgacagcctcgacctcagctgcgaggaaggaacgccacttagcatcaccagcaagttgcctaggacacagcctgacgggacatcagtgcccggagagcctgcttcccctatctctcagaggctgccacctaaagtagaatccctcgagtccctttacttcacacccatccctgcgagaagtcaggcccctcttgagtcttccctggactcacttggggatgtgttcctggatagtggcagaaaaaccagatctgcccgacgccgaacaacccagatcattaacattaccatgaccaaaaaactagatgtggaagagcccgacagcgccaacagtagcttctactctacgaggtcagctcctgcttcccaagcctccttacgtgcaacttcttccacacagtcactggctagactggggtcccccgattatggcaactcagcccttctgtcgctccccggatatcggcctaccaccaggtcttcagcgcgacgctcccaagcgggtgtctcaagcggtgcccctcctggccgaaactcgttttatatgggcacttgtcaagacgagcctgaacagctggacgattggaataggatcgcagagcttcagcaacgaaatcgagtttgcccccctcacctgaagacatgctatccactcgaaagtcgaccgtcgctatccctcggcaccatcaccgatgaagagatgaaaacaggggaccctcaggagaccctccgacgagcgtcgatgcaacctattcagattgctgaggggaccggcataacaacaagacaacagcgtaaacgggtgtctctcgaacctcaccaaggaccaggaactcctgagtctaagaaggccactagttgcttccccagacccatgactcctagagatagacacgaaggcagaaaacagtctactaccgaggcacagaaaaaagccgcacctgcatctaccaagcaggctgataggaggcagtccatggcattcagcattctcaatacgcccaaaaagcttggcaacagtctgctgcgaaggggcgcaagcaagaaggcactgagtaaagcgtctcctaatactcggagcgggacccggaggtccccaaggattgccacgacaacagctagtgccgctaccgcagcggcaattggcgctacgcctagggccaaggggaaagcaaaacacta

SEQ ID NO: 105039 - DNA, 4994 bp, Artificial Sequence
  derived and/or modified sequence
atgctggaaacggagcgtggccagcaggaggccaagttgcttgcagaacgcggacactttgaggaggaaaagcagcagttgtctagtctgattaccgatttgcagtcctctattagtaatctgtcccaagcaaaagaggagctcgagcaggcatcacaggcccatggtgccagattgaccgcgcaggttgcttctttaacgagcgagttgacgacgctgaacgcaactattcagcaacaggaccaggagctcgccggtttaaaacagcaggccaaagagaagcaggcccaactggcacagacgctccagcagcaagagcaggccagtcagggacttcgccatcaggtggagcagctgagtagcagcctaaaacagaaggagcagcagctgaaggaagtggccgagaaacaagaagccactcgacaggaccatgctcagcaacttgccacagcagccgaggagcgcgaagctagcctgcgagagcgagacgctgctctcaagcagttggaggccctggaaaaggagaaagctgccaaactggaaattctgcaacagcaactgcaggtggccaacgaggctagggattcagcccagaccagcgttacgcaggcccagcgtgagaaagctgaattgagcaggaaagtcgaggagctgcaggcctgcgtcgagacagccagacaggaacagcatgaggcacaagcccaggtggctgaactggagttgcagctgcgatcagaacagcagaaggccaccgaaaaggagagagtggcccaagagaaggaccagctgcaggaacagctgcaggcactcaaggaatcattaaaagtgaccaaagggagcctggaggaggaaaagaggagggccgctgatgctctcgaggaacagcagcggtgtatctctgagctgaaagccgaaacccgctctctcgtcgaacagcataagcgggaaagaaaggagctggaggaggagcgggctggcagaaagggccttgaggccagactccagcagctaggcgaggcacaccaggccgagaccgaggtgctccgcagagaactggctgaggctatggcagctcagcacactgcagagagcgagtgtgaacaactcgttaaggaggtcgccgcatggcgcgaacgatacgaggactctcagcaggaagaggctcagtatggcgctatgttccaagagcagctgatgaccttgaaagaagaatgtgagaaggccaggcaagagttgcaggaggctaaagaaaaggtcgcgggaattgaaagtcacagtgagcttcagatctcacgacagcaaaatgagctggccgagctgcatgcaaacctggccagagcgttacagcaggttcaggaaaaggaggtgcgagcccagaaactagctgacgacctgtctacccttcaggagaaaatggccgcaacttctaaagaggtcgcaaggctcgaaacgcttgtgcgtaaggcgggtgagcagcaggagacggcctctagagagctagtgaaggagccggcaagagcaggcgatagacagcccgagtggttggaggagcagcaggggcgtcagttttgtagcacccaagcagcactccaggctatggaaagagaggcagagcagatggggaacgaactagaaagattacgagcagccttgatggagtcccagggccagcaacaggaggagcgaggacagcaggaacgggaggtggcgcgtctgactcaagaaagggggcgtgctcaggctgacctcgcactcgaaaaagccgctcgggcagaattagagatgaggcttcagaatgcactgaatgaacagcgcgtggagtttgctacactgcaagaggcactggcccacgccctcaccgaaaaagaagggaaagatcaggaactagccaagctgcgaggactggaagcggctcagattaaggagctggaggaactgagacaaactgtcaaacagctgaaggagcagcttgctaagaaggaaaaagagcacgcgtctgggtctggcgcacaaagcgaggccgcaggcagaactgaaccaaccggacctaagctcgaggcactacgggctgaggtgagcaaactggagcagcagtgtcagaaacagcaggaacaggcagacagcttagaaaggtcactcgaagccgaaagagcctcgagagcagaaagagactccgccctggagaccctgcaaggccaactggaggaaaaagcccaggaattaggacactctcagtcagcactggccagcgcgcagagggagctggccgctttcagaaccaaggtccaggatcattcaaaagcagaggacgaatggaaagcgcaagtggctagaggcagacaggaagctgagcgtaagaattctttgatcagctctctggaggaggaagtgtccatcctcaaccgtcaggttctggagaaggagggggaatctaaggaacttaagaggttggtcatggcggagagcgaaaagtctcagaagctggaggaaagactgcgtcttcttcaagccgagactgcctctaacagcgctcgtgctgcagaacggtcaagcgcgctcagagaggaagttcaatccttgagagaagaagcggaaaagcagagggtcgctagcgagaatctgcgacaagagttgaccagtcaggcggaacgggctgaggagctcgggcaggagctcaaggcttggcaggagaagttcttccagaaagaacaggcgctctctaccctacagttagaacacacctcaactcaggctcttgtgtctgagcttctacctgcaaaacatctgtgtcaacagctccaggcggaacaggctgccgctgaaaagcggcaccgcgaagagttggagcaaagtaagcaggctgctgggggacttcgggcagagctactcagggcacaacgggagctgggcgaactgattccgctccggcagaaggtggcagagcaagaacggaccgcacagcaactcagagccgagaaggcaagttacgctgagcagctctcaatgctgaaaaaagcccatggcttgcttgccgaagagaataggggcctgggcgagcgggctaatctgggcaggcagtttctggaggtggaactcgaccaggctagagaaaagtacgtgcaggagttggccgctgtgcgggcagacgcagaaacccggctggctgaagtgcagagggaggctcagagcaccgctcgggagctggaggtgatgaccgccaagtatgaaggtgctaaagtcaaagtactggaagaacgtcagcgctttcaggaggagaggcaaaaattgactgcccaggtggaggagctgagtaagaaactggcggatagcgaccaggctagtaaggtgcaacagcagaagctcaaagctgttcaggctcagggtggcgagagtcagcaggaggcccagcgcctccaggctcagttaaatgaactgcaagctcagctgtctcaaaaggagcaagctgcagagcactataaactgcagatggaaaaagccaaaacccattacgacgcaaaaaagcaacagaatcaggaactgcaagagcagttacggagcctcgaacagttgcagaaagaaaacaaagaactccgcgcagaggcggagcggttgggacatgagctccagcaagctgggcttaaaaccaaggaagctgagcagacatgcaggcatctcaccgcccaggtccgcagccttgaggcccaggtggcccacgcagatcagcagctgagggatcttggaaagttccaggttgccaccgacgctttgaagagccgggaaccccaggctaagccacagttggacctgtcaattgactccttggatctgagctgtgaagagggcactcccctaagtatcacatctaaactgccccgaactcaacccgatggaacctctgttcctggcgaaccagcatcaccgatatcgcagcggctgccacctaaggtggaatctctggaatctctgtatttcacaccaattcctgcccgtagccaagcacctctggaaagtagcttggactcgctgggagatgtctttctcgatagtgggaggaagaccagatctgcccgtcgaaggactacccagattattaatatcactatgaccaaaaagcttgacgtagaagagccggatagcgctaacagcagcttctactctaccaggtccgccccagctagtcaggcttccctacgggctactagttccacacaatccctagctaggctggggtcacctgattatggtaatagcgcccttctgtcactgcctggctacagacctacaaccaggagctccgcccgacggtctcaggctggcgtgtcctcgggcgctcccccaggaagaaactccttctacatgggtacctgtcaagatgaaccagaacagctggacgattggaaccgcatcgctgaactgcagcagaggaatcgggtctgccctccacacctaaaaacttgctatcccttggagtcccgaccatcactgtcattgggaacaattacagatgaggaaatgaaaaccggagatccacaggagactctaaggcgcgcaagtatgcagccaatccagatcgcggaggggacaggaatcacaacacgtcagcaaagaaagagagtgtcattggagccacatcaggggcctggcacccccgaaagcaagaaagctacctcctgttttcctcggcctatgacacccagagaccgtcacgaaggtaggaaacagagtaccactgaggctcagaagaaggcggcacccgcttccaccaagcaagccgatcggagacaatcaatggccttctccattctaaatacacccaaaaaactggggaacagcctgttaagaagaggggcttccaagaaagcactctccaaggccagcccaaacacccgctcaggcactaggcgttcccctcgcatcgctacgaccaccgcgagcgccgctactgcagccgcaataggagccactccacgggcaaaggggaaggcaaagcacta

SEQ ID NO: 105040 - DNA, 606 bp, Artificial Sequence
  derived and/or modified sequence
atgactcttcatgccactagaggagcagctttgttaagctgggtgaatagcttgcacgtcgctgatccggttgaggctgttctacaattacaggattgttcgatattcatcaagattattgatcgaatccacggtaccgaggaggggcaacaaatattgaagcaacccgtaagtgagagacttgactttgtctgttctttcctccaaaaaaacagaaagcatccgtcctcaccagagtgtttggtgagcgcacagaaggtgttggaaggatctgagttggagcttgccaaaatgaccatgctgctgctgtatcactctactatgagcagtaaatcccctcgggactgggaacagttcgaatacaagattcaggcagagctagccgtaatactgaagttcgtccttgatcatgaagatgggctgaacctgaacgaagacctggagaatttcctgcagaaggccccagtgccatctacctgttcttctacctttcccgaagaactctcaccacctagtcatcaagctaaaagggagatcagattcttggaactgcagaaagtcgcttcttcctcttcaggcaataatttcttgagcggctccccatag

SEQ ID NO: 105041 - DNA, 663 bp, Artificial Sequence
  derived and/or modified sequence
atgaccttgcatgcaactcgcggtgccgcactgttgtcttgggtgaatagtctgcacgtggcggacccagtggaggccgtgctgcaactacaagactgttctatcttcattaagattatcgaccgcatccatgggacagaagagggtcagcagatactaaaacagcccgtaagcgaaagactggacttcgtgtgctcgttcttacaaaagaatagaaagcatcccagcagtcctgaatgtttagtgagcgcccagaaggtcctcgaggggtccgagcttgaattagctaagatgacaatgttgttgctgtatcacagcaccatgagctctaaatctccaagagattgggaacagttcgagtacaagattcaggccgaactggccgtgatactgaagtttgtgctggatcatgaagatggcctgaatctgaatgaagatcttgagaatttccttcagaaagccccagtcccctccacctgttcctccacctttcccgaagagctgagtccaccaagtcaccaggctaaacgggaaatcagatttcttgaattgcagaaggttgcctctagtagcagcggcaacaatttcctaagcgggtccccagctagccccatgggggatatactgcagactccccagtttcagatgagacggctgaagtag

SEQ ID NO: 105042 - DNA, 2940 bp, Artificial Sequence
  derived and/or modified sequence
atgaccctgcacgccaccagaggcgccgccctgctgagctgggtgaacagcctgcacgtggccgaccccgtggaggccgtgctgcagctgcaggactgcagcatcttcatcaagatcatcgacagaatccacggcaccgaggagggccagcagatcctgaagcagcccgtgagcgagagactggacttcgtgtgcagcttcctgcagaagaacagaaagcaccccagcagccccgagtgcctggtgagcgcccagaaggtgctggagggcagcgagctggagctggccaagatgaccatgctgctgctgtaccacagcaccatgagcagcaagagccccagagactgggagcagttcgagtacaagatccaggccgagctggccgtgatcctgaagttcgtgctggaccacgaggacggcctgaacctgaacgaggacctggagaacttcctgcagaaggcccccgtgcccagcacctgcagcagcaccttccccgaggagctgagcccccccagccaccaggccaagagagagatcagattcctggagctgcagaaggtggccagcagcagcagcggcaacaacttcctgagcggcagccccgccagccccatgggcgacatcctgcagaccccccagttccagatgagaagactgaagaagcagctggccgacgagagaagcaacagagacgagctggagctggagctggccgagaacagaaagctgctgaccgagaaggacgcccagatcgccatgatgcagcagagaatcgacagactggccctgctgaacgagaagcaggccgccagccccctggagcccaaggagctggaggagctgagagacaagaacgagagcctgaccatgagactgcacgagaccctgaagcagtgccaggacctgaagaccgagaagagccagatggacagaaagatcaaccagctgagcgaggagaacggcgacctgagcttcaagctgagagagttcgccagccacctgcagcagctgcaggacgccctgaacgagctgaccgaggagcacagcaaggccacccaggagtggctggagaagcaggcccagctggagaaggagctgagcgccgccctgcaggacaagaagtgcctggaggagaagaacgagatcctgcagggcaagctgagccagctggaggagcacctgagccagctgcaggacaaccccccccaggagaagggcgaggtgctgggcgacgtgctgcaggtggaggagctgagcaagaagctggccgacagcgaccaggccagcaaggtgcagcagcagaagctgaaggccgtgcaggcccagggcggcgagagccagcaggaggcccagagactgcaggcccagctgaacgagctgcaggcccagctgagccagaaggagcaggccgccgagcactacaagctgcagatggagaaggccaagacccactacgacgccaagaagcagcagaaccaggagctgcaggagcagctgagaagcctggagcagctgcagaaggagaacaaggagctgagagccgaggccgagagactgggccacgagctgcagcaggccggcctgaagaccaaggaggccgagcagacctgcagacacctgaccgcccaggtgagaagcctggaggcccaggtggcccacgccgaccagcagctgagagacctgggcaagttccaggtggccaccgacgccctgaagagcagagagccccaggccaagccccagctggacctgagcatcgacagcctggacctgagctgcgaggagggcacccccctgagcatcaccagcaagctgcccagaacccagcccgacggcaccagcgtgcccggcgagcccgccagccccatcagccagagactgccccccaaggtggagagcctggagagcctgtacttcacccccatccccgccagaagccaggcccccctggagagcagcctggacagcctgggcgacgtgttcctggacagcggcagaaagaccagaagcgccagaagaagaaccacccagatcatcaacatcaccatgaccaagaagctggacgtggaggagcccgacagcgccaacagcagcttctacagcaccagaagcgcccccgccagccaggccagcctgagagccaccagcagcacccagagcctggccagactgggcagccccgactacggcaacagcgccctgctgagcctgcccggctacagacccaccaccagaagcagcgccagaagaagccaggccggcgtgagcagcggcgccccccccggcagaaacagcttctacatgggcacctgccaggacgagcccgagcagctggacgactggaacagaatcgccgagctgcagcagagaaacagagtgtgccccccccacctgaagacctgctaccccctggagagcagacccagcctgagcctgggcaccatcaccgacgaggagatgaagaccggcgacccccaggagaccctgagaagagccagcatgcagcccatccagatcgccgagggcaccggcatcaccaccagacagcagagaaagagagtgagcctggagccccaccagggccccggcacccccgagagcaagaaggccaccagctgcttccccagacccatgacccccagagacagacacgagggcagaaagcagagcaccaccgaggcccagaagaaggccgcccccgccagcaccaagcaggccgacagaagacagagcatggccttcagcatcctgaacacccccaagaagctgggcaacagcctgctgagaagaggcgccagcaagaaggccctgagcaaggccagccccaacaccagaagcggcaccagaagaagccccagaatcgccaccaccaccgccagcgccgccaccgccgccgccatcggcgccacccccagagccaagggcaaggccaagcactag

SEQ ID NO: 105043 - DNA, 6306 bp, Artificial Sequence
  derived and/or modified sequence
atgaccctgcacgccaccagaggcgccgccctgctgagctgggtgaacagcctgcacgtggccgaccccgtggaggccgtgctgcagctgcaggactgcagcatcttcatcaagatcatcgacagaatccacggcaccgaggagggccagcagatcctgaagcagcccgtgagcgagagactggacttcgtgtgcagcttcctgcagaagaacagaaagcaccccagcagccccgagtgcctggtgagcgcccagaaggtgctggagggcagcgagctggagctggccaagatgaccatgctgctgctgtaccacagcaccatgagcagcaagagccccagagactgggagcagttcgagtacaagatccaggccgagctggccgtgatcctgaagttcgtgctggaccacgaggacggcctgaacctgaacgaggacctggagaacttcctgcagaaggcccccgtgcccagcacctgcagcagcaccttccccgaggagctgagcccccccagccaccaggccaagagagagatcagattcctggagctgcagaaggtggccagcagcagcagcggcaacaacttcctgagcggcagccccgccagccccatgggcgacatcctgcagaccccccagttccagatgagaagactgaagaagcagctggccgacgagagaagcaacagagacgagctggagctggagctggccgagaacagaaagctgctgaccgagaaggacgcccagatcgccatgatgcagcagagaatcgacagactggccctgctgaacgagaagcaggccgccagccccctggagcccaaggagctggaggagctgagagacaagaacgagagcctgaccatgagactgcacgagaccctgaagcagtgccaggacctgaagaccgagaagagccagatggacagaaagatcaaccagctgagcgaggagaacggcgacctgagcttcaagctgagagagttcgccagccacctgcagcagctgcaggacgccctgaacgagctgaccgaggagcacagcaaggccacccaggagtggctggagaagcaggcccagctggagaaggagctgagcgccgccctgcaggacaagaagtgcctggaggagaagaacgagatcctgcagggcaagctgagccagctggaggagcacctgagccagctgcaggacaaccccccccaggagaagggcgaggtgctgggcgacgtgctgcagctggagaccctgaagcaggaggccgccaccctggccgccaacaacacccagctgcaggccagagtggagatgctggagaccgagagaggccagcaggaggccaagctgctggccgagagaggccacttcgaggaggagaagcagcagctgagcagcctgatcaccgacctgcagagcagcatcagcaacctgagccaggccaaggaggagctggagcaggccagccaggcccacggcgccagactgaccgcccaggtggccagcctgaccagcgagctgaccaccctgaacgccaccatccagcagcaggaccaggagctggccggcctgaagcagcaggccaaggagaagcaggcccagctggcccagaccctgcagcagcaggagcaggccagccagggcctgagacaccaggtggagcagctgagcagcagcctgaagcagaaggagcagcagctgaaggaggtggccgagaagcaggaggccaccagacaggaccacgcccagcagctggccaccgccgccgaggagagagaggccagcctgagagagagagacgccgccctgaagcagctggaggccctggagaaggagaaggccgccaagctggagatcctgcagcagcagctgcaggtggccaacgaggccagagacagcgcccagaccagcgtgacccaggcccagagagagaaggccgagctgagcagaaaggtggaggagctgcaggcctgcgtggagaccgccagacaggagcagcacgaggcccaggcccaggtggccgagctggagctgcagctgagaagcgagcagcagaaggccaccgagaaggagagagtggcccaggagaaggaccagctgcaggagcagctgcaggccctgaaggagagcctgaaggtgaccaagggcagcctggaggaggagaagagaagagccgccgacgccctggaggagcagcagagatgcatcagcgagctgaaggccgagaccagaagcctggtggagcagcacaagagagagagaaaggagctggaggaggagagagccggcagaaagggcctggaggccagactgcagcagctgggcgaggcccaccaggccgagaccgaggtgctgagaagagagctggccgaggccatggccgcccagcacaccgccgagagcgagtgcgagcagctggtgaaggaggtggccgcctggagagagagatacgaggacagccagcaggaggaggcccagtacggcgccatgttccaggagcagctgatgaccctgaaggaggagtgcgagaaggccagacaggagctgcaggaggccaaggagaaggtggccggcatcgagagccacagcgagctgcagatcagcagacagcagaacgagctggccgagctgcacgccaacctggccagagccctgcagcaggtgcaggagaaggaggtgagagcccagaagctggccgacgacctgagcaccctgcaggagaagatggccgccaccagcaaggaggtggccagactggagaccctggtgagaaaggccggcgagcagcaggagaccgccagcagagagctggtgaaggagcccgccagagccggcgacagacagcccgagtggctggaggagcagcagggcagacagttctgcagcacccaggccgccctgcaggccatggagagagaggccgagcagatgggcaacgagctggagagactgagagccgccctgatggagagccagggccagcagcaggaggagagaggccagcaggagagagaggtggccagactgacccaggagagaggcagagcccaggccgacctggccctggagaaggccgccagagccgagctggagatgagactgcagaacgccctgaacgagcagagagtggagttcgccaccctgcaggaggccctggcccacgccctgaccgagaaggagggcaaggaccaggagctggccaagctgagaggcctggaggccgcccagatcaaggagctggaggagctgagacagaccgtgaagcagctgaaggagcagctggccaagaaggagaaggagcacgccagcggcagcggcgcccagagcgaggccgccggcagaaccgagcccaccggccccaagctggaggccctgagagccgaggtgagcaagctggagcagcagtgccagaagcagcaggagcaggccgacagcctggagagaagcctggaggccgagagagccagcagagccgagagagacagcgccctggagaccctgcagggccagctggaggagaaggcccaggagctgggccacagccagagcgccctggccagcgcccagagagagctggccgccttcagaaccaaggtgcaggaccacagcaaggccgaggacgagtggaaggcccaggtggccagaggcagacaggaggccgagagaaagaacagcctgatcagcagcctggaggaggaggtgagcatcctgaacagacaggtgctggagaaggagggcgagagcaaggagctgaagagactggtgatggccgagagcgagaagagccagaagctggaggagagactgagactgctgcaggccgagaccgccagcaacagcgccagagccgccgagagaagcagcgccctgagagaggaggtgcagagcctgagagaggaggccgagaagcagagagtggccagcgagaacctgagacaggagctgaccagccaggccgagagagccgaggagctgggccaggagctgaaggcctggcaggagaagttcttccagaaggagcaggccctgagcaccctgcagctggagcacaccagcacccaggccctggtgagcgagctgctgcccgccaagcacctgtgccagcagctgcaggccgagcaggccgccgccgagaagagacacagagaggagctggagcagagcaagcaggccgccggcggcctgagagccgagctgctgagagcccagagagagctgggcgagctgatccccctgagacagaaggtggccgagcaggagagaaccgcccagcagctgagagccgagaaggccagctacgccgagcagctgagcatgctgaagaaggcccacggcctgctggccgaggagaacagaggcctgggcgagagagccaacctgggcagacagttcctggaggtggagctggaccaggccagagagaagtacgtgcaggagctggccgccgtgagagccgacgccgagaccagactggccgaggtgcagagagaggcccagagcaccgccagagagctggaggtgatgaccgccaagtacgagggcgccaaggtgaaggtgctggaggagagacagagattccaggaggagagacagaagctgaccgcccaggtggaggagctgagcaagaagctggccgacagcgaccaggccagcaaggtgcagcagcagaagctgaaggccgtgcaggcccagggcggcgagagccagcaggaggcccagagactgcaggcccagctgaacgagctgcaggcccagctgagccagaaggagcaggccgccgagcactacaagctgcagatggagaaggccaagacccactacgacgccaagaagcagcagaaccaggagctgcaggagcagctgagaagcctggagcagctgcagaaggagaacaaggagctgagagccgaggccgagagactgggccacgagctgcagcaggccggcctgaagaccaaggaggccgagcagacctgcagacacctgaccgcccaggtgagaagcctggaggcccaggtggcccacgccgaccagcagctgagagacctgggcaagttccaggtggccaccgacgccctgaagagcagagagccccaggccaagccccagctggacctgagcatcgacagcctggacctgagctgcgaggagggcacccccctgagcatcaccagcaagctgcccagaacccagcccgacggcaccagcgtgcccggcgagcccgccagccccatcagccagagactgccccccaaggtggagagcctggagagcctgtacttcacccccatccccgccagaagccaggcccccctggagagcagcctggacagcctgggcgacgtgttcctggacagcggcagaaagaccagaagcgccagaagaagaaccacccagatcatcaacatcaccatgaccaagaagctggacgtggaggagcccgacagcgccaacagcagcttctacagcaccagaagcgcccccgccagccaggccagcctgagagccaccagcagcacccagagcctggccagactgggcagccccgactacggcaacagcgccctgctgagcctgcccggctacagacccaccaccagaagcagcgccagaagaagccaggccggcgtgagcagcggcgccccccccggcagaaacagcttctacatgggcacctgccaggacgagcccgagcagctggacgactggaacagaatcgccgagctgcagcagagaaacagagtgtgccccccccacctgaagacctgctaccccctggagagcagacccagcctgagcctgggcaccatcaccgacgaggagatgaagaccggcgacccccaggagaccctgagaagagccagcatgcagcccatccagatcgccgagggcaccggcatcaccaccagacagcagagaaagagagtgagcctggagccccaccagggccccggcacccccgagagcaagaaggccaccagctgcttccccagacccatgacccccagagacagacacgagggcagaaagcagagcaccaccgaggcccagaagaaggccgcccccgccagcaccaagcaggccgacagaagacagagcatggccttcagcatcctgaacacccccaagaagctgggcaacagcctgctgagaagaggcgccagcaagaaggccctgagcaaggccagccccaacaccagaagcggcaccagaagaagccccagaatcgccaccaccaccgccagcgccgccaccgccgccgccatcggcgccacccccagagccaagggcaaggccaagcactag

SEQ ID NO: 105044 - DNA, 4995 bp, Artificial Sequence
  derived and/or modified sequence
atgctggagaccgagagaggccagcaggaggccaagctgctggccgagagaggccacttcgaggaggagaagcagcagctgagcagcctgatcaccgacctgcagagcagcatcagcaacctgagccaggccaaggaggagctggagcaggccagccaggcccacggcgccagactgaccgcccaggtggccagcctgaccagcgagctgaccaccctgaacgccaccatccagcagcaggaccaggagctggccggcctgaagcagcaggccaaggagaagcaggcccagctggcccagaccctgcagcagcaggagcaggccagccagggcctgagacaccaggtggagcagctgagcagcagcctgaagcagaaggagcagcagctgaaggaggtggccgagaagcaggaggccaccagacaggaccacgcccagcagctggccaccgccgccgaggagagagaggccagcctgagagagagagacgccgccctgaagcagctggaggccctggagaaggagaaggccgccaagctggagatcctgcagcagcagctgcaggtggccaacgaggccagagacagcgcccagaccagcgtgacccaggcccagagagagaaggccgagctgagcagaaaggtggaggagctgcaggcctgcgtggagaccgccagacaggagcagcacgaggcccaggcccaggtggccgagctggagctgcagctgagaagcgagcagcagaaggccaccgagaaggagagagtggcccaggagaaggaccagctgcaggagcagctgcaggccctgaaggagagcctgaaggtgaccaagggcagcctggaggaggagaagagaagagccgccgacgccctggaggagcagcagagatgcatcagcgagctgaaggccgagaccagaagcctggtggagcagcacaagagagagagaaaggagctggaggaggagagagccggcagaaagggcctggaggccagactgcagcagctgggcgaggcccaccaggccgagaccgaggtgctgagaagagagctggccgaggccatggccgcccagcacaccgccgagagcgagtgcgagcagctggtgaaggaggtggccgcctggagagagagatacgaggacagccagcaggaggaggcccagtacggcgccatgttccaggagcagctgatgaccctgaaggaggagtgcgagaaggccagacaggagctgcaggaggccaaggagaaggtggccggcatcgagagccacagcgagctgcagatcagcagacagcagaacgagctggccgagctgcacgccaacctggccagagccctgcagcaggtgcaggagaaggaggtgagagcccagaagctggccgacgacctgagcaccctgcaggagaagatggccgccaccagcaaggaggtggccagactggagaccctggtgagaaaggccggcgagcagcaggagaccgccagcagagagctggtgaaggagcccgccagagccggcgacagacagcccgagtggctggaggagcagcagggcagacagttctgcagcacccaggccgccctgcaggccatggagagagaggccgagcagatgggcaacgagctggagagactgagagccgccctgatggagagccagggccagcagcaggaggagagaggccagcaggagagagaggtggccagactgacccaggagagaggcagagcccaggccgacctggccctggagaaggccgccagagccgagctggagatgagactgcagaacgccctgaacgagcagagagtggagttcgccaccctgcaggaggccctggcccacgccctgaccgagaaggagggcaaggaccaggagctggccaagctgagaggcctggaggccgcccagatcaaggagctggaggagctgagacagaccgtgaagcagctgaaggagcagctggccaagaaggagaaggagcacgccagcggcagcggcgcccagagcgaggccgccggcagaaccgagcccaccggccccaagctggaggccctgagagccgaggtgagcaagctggagcagcagtgccagaagcagcaggagcaggccgacagcctggagagaagcctggaggccgagagagccagcagagccgagagagacagcgccctggagaccctgcagggccagctggaggagaaggcccaggagctgggccacagccagagcgccctggccagcgcccagagagagctggccgccttcagaaccaaggtgcaggaccacagcaaggccgaggacgagtggaaggcccaggtggccagaggcagacaggaggccgagagaaagaacagcctgatcagcagcctggaggaggaggtgagcatcctgaacagacaggtgctggagaaggagggcgagagcaaggagctgaagagactggtgatggccgagagcgagaagagccagaagctggaggagagactgagactgctgcaggccgagaccgccagcaacagcgccagagccgccgagagaagcagcgccctgagagaggaggtgcagagcctgagagaggaggccgagaagcagagagtggccagcgagaacctgagacaggagctgaccagccaggccgagagagccgaggagctgggccaggagctgaaggcctggcaggagaagttcttccagaaggagcaggccctgagcaccctgcagctggagcacaccagcacccaggccctggtgagcgagctgctgcccgccaagcacctgtgccagcagctgcaggccgagcaggccgccgccgagaagagacacagagaggagctggagcagagcaagcaggccgccggcggcctgagagccgagctgctgagagcccagagagagctgggcgagctgatccccctgagacagaaggtggccgagcaggagagaaccgcccagcagctgagagccgagaaggccagctacgccgagcagctgagcatgctgaagaaggcccacggcctgctggccgaggagaacagaggcctgggcgagagagccaacctgggcagacagttcctggaggtggagctggaccaggccagagagaagtacgtgcaggagctggccgccgtgagagccgacgccgagaccagactggccgaggtgcagagagaggcccagagcaccgccagagagctggaggtgatgaccgccaagtacgagggcgccaaggtgaaggtgctggaggagagacagagattccaggaggagagacagaagctgaccgcccaggtggaggagctgagcaagaagctggccgacagcgaccaggccagcaaggtgcagcagcagaagctgaaggccgtgcaggcccagggcggcgagagccagcaggaggcccagagactgcaggcccagctgaacgagctgcaggcccagctgagccagaaggagcaggccgccgagcactacaagctgcagatggagaaggccaagacccactacgacgccaagaagcagcagaaccaggagctgcaggagcagctgagaagcctggagcagctgcagaaggagaacaaggagctgagagccgaggccgagagactgggccacgagctgcagcaggccggcctgaagaccaaggaggccgagcagacctgcagacacctgaccgcccaggtgagaagcctggaggcccaggtggcccacgccgaccagcagctgagagacctgggcaagttccaggtggccaccgacgccctgaagagcagagagccccaggccaagccccagctggacctgagcatcgacagcctggacctgagctgcgaggagggcacccccctgagcatcaccagcaagctgcccagaacccagcccgacggcaccagcgtgcccggcgagcccgccagccccatcagccagagactgccccccaaggtggagagcctggagagcctgtacttcacccccatccccgccagaagccaggcccccctggagagcagcctggacagcctgggcgacgtgttcctggacagcggcagaaagaccagaagcgccagaagaagaaccacccagatcatcaacatcaccatgaccaagaagctggacgtggaggagcccgacagcgccaacagcagcttctacagcaccagaagcgcccccgccagccaggccagcctgagagccaccagcagcacccagagcctggccagactgggcagccccgactacggcaacagcgccctgctgagcctgcccggctacagacccaccaccagaagcagcgccagaagaagccaggccggcgtgagcagcggcgccccccccggcagaaacagcttctacatgggcacctgccaggacgagcccgagcagctggacgactggaacagaatcgccgagctgcagcagagaaacagagtgtgccccccccacctgaagacctgctaccccctggagagcagacccagcctgagcctgggcaccatcaccgacgaggagatgaagaccggcgacccccaggagaccctgagaagagccagcatgcagcccatccagatcgccgagggcaccggcatcaccaccagacagcagagaaagagagtgagcctggagccccaccagggccccggcacccccgagagcaagaaggccaccagctgcttccccagacccatgacccccagagacagacacgagggcagaaagcagagcaccaccgaggcccagaagaaggccgcccccgccagcaccaagcaggccgacagaagacagagcatggccttcagcatcctgaacacccccaagaagctgggcaacagcctgctgagaagaggcgccagcaagaaggccctgagcaaggccagccccaacaccagaagcggcaccagaagaagccccagaatcgccaccaccaccgccagcgccgccaccgccgccgccatcggcgccacccccagagccaagggcaaggccaagcactag

SEQ ID NO: 105045 - DNA, 606 bp, Artificial Sequence
  derived and/or modified sequence
atgaccctgcacgccaccagaggcgccgccctgctgagctgggtgaacagcctgcacgtggccgaccccgtggaggccgtgctgcagctgcaggactgcagcatcttcatcaagatcatcgacagaatccacggcaccgaggagggccagcagatcctgaagcagcccgtgagcgagagactggacttcgtgtgcagcttcctgcagaagaacagaaagcaccccagcagccccgagtgcctggtgagcgcccagaaggtgctggagggcagcgagctggagctggccaagatgaccatgctgctgctgtaccacagcaccatgagcagcaagagccccagagactgggagcagttcgagtacaagatccaggccgagctggccgtgatcctgaagttcgtgctggaccacgaggacggcctgaacctgaacgaggacctggagaacttcctgcagaaggcccccgtgcccagcacctgcagcagcaccttccccgaggagctgagcccccccagccaccaggccaagagagagatcagattcctggagctgcagaaggtggccagcagcagcagcggcaacaacttcctgagcggcagcccctag

SEQ ID NO: 105046 - DNA, 663 bp, Artificial Sequence
  derived and/or modified sequence
atgaccctgcacgccaccagaggcgccgccctgctgagctgggtgaacagcctgcacgtggccgaccccgtggaggccgtgctgcagctgcaggactgcagcatcttcatcaagatcatcgacagaatccacggcaccgaggagggccagcagatcctgaagcagcccgtgagcgagagactggacttcgtgtgcagcttcctgcagaagaacagaaagcaccccagcagccccgagtgcctggtgagcgcccagaaggtgctggagggcagcgagctggagctggccaagatgaccatgctgctgctgtaccacagcaccatgagcagcaagagccccagagactgggagcagttcgagtacaagatccaggccgagctggccgtgatcctgaagttcgtgctggaccacgaggacggcctgaacctgaacgaggacctggagaacttcctgcagaaggcccccgtgcccagcacctgcagcagcaccttccccgaggagctgagcccccccagccaccaggccaagagagagatcagattcctggagctgcagaaggtggccagcagcagcagcggcaacaacttcctgagcggcagccccgccagccccatgggcgacatcctgcagaccccccagttccagatgagaagactgaagtag

SEQ ID NO: 105047 - DNA, 969 bp, Artificial Sequence
  derived and/or modified sequence
atgtacagaagaatccacgaggccatcatccagagcccccccatcgactacttcgacgtgttcaaggagagcaaggagcagaacttctacggcagccaggagagcatcatcgccctgtgcacccacctgcagcagctgatcagaaccatcgaggacctggacgagaaccagctgaaggacgagttcttcaagctgctgcagatcagcctgtggggcaacaagtgcgacctgagcctgagcggcggcgagagcagcagccagaacaccaacgtgctgaacagcctggaggacctgaagcccttcatcctgctgaacgacatggagcacctgtggagcctgctgagcaactgcaagaagaccagagagaaggccagcgccaccagagtgtacatcgtgctggacaacagcggcttcgagctggtgaccgacctgatcctggccgacttcctgctgagcagcgagctggccaccgaggtgcacttctacggcaagaccatcccctggttcgtgagcgacaccaccatccacgacttcaactggctgatcgagcaggtgaagcacagcaaccacaagtggatgagcaagtgcggcgccgactgggaggagtacatcaagatgggcaagtgggtgtaccacaaccacatcttctggaccctgccccacgagtactgcgccatgccccaggtggcccccgacctgtacgccgagctgcagaaggcccacctgatcctgttcaagggcgacctgaactacagaaagctgaccggcgacagaaagtgggagttcagcgtgcccttccaccaggccctgaacggcttccaccccgcccccctgtgcaccatcagaaccctgaaggccgagatccaggtgggcctgcagcccggccagggcgagcagctgctggccagcgagcccagctggtggaccaccggcaagtacggcatcttccagtacgacggccccctgtag

SEQ ID NO: 105048 - DNA, 969 bp, Artificial Sequence
  derived and/or modified sequence
atgtatcggcgcattcatgaagcaataatacagtcccccccaatcgactacttcgacgtatttaaagaatccaaagagcagaatttctatggcagccaggaatccattatcgccttgtgtacccacctccaacagctgataagaacaatcgaggacctggatgaaaaccagctcaaggacgaattcttcaagctgctgcagataagtttgtggggcaataaatgcgatttatcactttcagggggagaatcatctagccagaacacgaacgtgctaaactccttggaggacttgaagccctttatattgctgaatgacatggagcacctgtggtcactgctgagcaattgtaagaagacaagagagaaggccagcgccaccagggtgtatatcgtcctggataatagtggattcgaactcgtaaccgatctcattctggcagatttcctgctctcttcggagcttgctaccgaggtgcatttctatgggaaaacaattccatggttcgtctcagacacgacaatccacgatttcaactggctgatcgaacaggtgaaacattcaaaccataagtggatgtctaaatgcggagcagattgggaggagtacataaaaatggggaaatgggtctaccataaccacattttctggacgctcccccatgagtactgcgcaatgccccaggtagctcctgacctctatgctgaattgcagaaagcccaccttattctgtttaaaggggatctgaattacaggaagctaacaggggatagaaaatgggaattttccgttccatttcatcaggccctgaatggctttcatcctgcccctctttgcactatccggaccctcaaagcggaaatccaggttggcctgcaaccaggccagggagagcaattactagcctctgagcctagttggtggaccactggcaagtatggcatttttcagtatgacggcccactgtag

SEQ ID NO: 105049 - DNA, 969 bp, Artificial Sequence
  derived and/or modified sequence
atgtaccgccgcatccacgaggccatcatccagagcccccccatcgactactttgatgtgttcaaggagagcaaggagcagaacttctacggcagccaggagagcatcatcgccctgtgcacccacctgcagcagctgatccgcaccatcgaggacctggatgagaaccagctgaaggatgagttcttcaagctgctgcagatcagcctgtggggcaacaagtgtgacctgagcctgagcggcggggagagcagcagccagaacaccaacgtgctgaacagcctggaggacctgaagcccttcatcctgctgaatgacatggagcacctgtggagcctgctgagcaactgcaagaagacccgggagaaggccagcgccaccagggtgtacatcgtgctggacaacagcggctttgagctggtgacagacctgatcctggccgacttcctgctgagcagcgagctggccacagaggtgcacttctacggcaagaccatcccctggtttgtgtctgacaccaccatccatgacttcaactggctgattgagcaggtgaagcacagcaaccacaagtggatgagcaaatgtggggctgactgggaggagtacatcaagatgggcaagtgggtgtaccacaaccacatcttctggaccctgccccatgagtactgtgccatgccccaggtggccccagacctgtatgcagagctgcagaaggcccacctgatcctcttcaagggggacctgaactacaggaagctgactggagacaggaagtgggagttctctgtgcccttccaccaggccctgaatggcttccacccagcccccctgtgcaccatccgcaccctgaaggccgagatccaggtgggcctgcagcccggccagggcgagcagctgctggccagcgagcccagctggtggaccaccgggaagtatggcatcttccagtatgatggccccctgtag

SEQ ID NO: 105050 - DNA, 969 bp, Artificial Sequence
  derived and/or modified sequence
atgtaccggcggatccacgaggccatcatccagagcccccccatcgactactttgacgtgttcaaagagtcaaaggagcagaatttctacggcagtcaggaaagcataatagccctgtgcactcatctccaacagctgattagaaccatcgaagacctggatgaaaaccaacttaaggatgaatttttcaaactattgcagatcagcttgtggggcaacaaatgcgatctgtccctctccgggggcgagagctctagtcagaatacaaatgttctcaatagcctggaagaccttaaaccctttatcttactcaacgatatggaacacctgtggtccctgctgagtaattgtaagaagactcgtgaaaaagcatccgcgaccagggtatatatcgttctggataatagtggcttcgaactggtaaccgatcttatcctcgcggacttcctgctgagctccgaattggccactgaggtccacttttacgggaagaccatcccctggtttgtcagcgacaccaccatccacgattttaactggttgatcgagcaagtgaagcatagcaatcataagtggatgtccaagtgcggagcagactgggaagaatacattaaaatggggaaatgggtataccataatcacatcttctggaccctgcctcatgaatattgtgccatgccacaggtcgctcccgacctgtatgcagagcttcagaaagcccatttgatacttttcaagggcgacctgaactacaggaaactaacaggagatagaaaatgggaattcagcgtacccttccatcaggccctcaacggattccatcctgcccctttgtgtaccattcggacactgaaagcagaaattcaggtcggcttgcagcccggacagggggagcagctcctagcgtccgagccatcttggtggactacaggaaaatacgggatcttccaatacgatggaccactctag

SEQ ID NO: 105051 - DNA, 969 bp, Artificial Sequence
  derived and/or modified sequence
atgtatcggaggatccacgaggccattattcaatccccccctattgactatttcgacgtgtttaaggaatcaaaagaacagaacttttacgggtcacaagaaagtattattgccctctgtacccatctgcagcaactaatcagaaccattgaggacctggatgagaaccagctcaaagacgagttttttaaactcctgcagatttctttatggggaaataaatgcgatctctctctgtccgggggtgagagtagttcccagaacacaaacgtgctgaacagcctggaagatctcaagccatttatcctgcttaacgatatggagcatctctggagcctgcttagtaattgtaaaaagacaagagaaaaagcaagcgcgacaagagtttacatcgtgctcgacaacagtggattcgagctggtgacagacttgatccttgcagattttctgttaagctccgagctagcaacggaggtccacttctatggcaaaaccataccctggtttgtctcagacaccaccatccacgactttaactggcttatcgagcaagtaaagcacagcaatcacaaatggatgagcaagtgtggcgctgattgggaggagtacatcaagatgggtaaatgggtttaccacaatcatatcttctggaccctcccacatgagtactgtgccatgcctcaagttgcgcctgacttgtatgctgaactgcaaaaggcccatctgatacttttcaaaggcgacctcaattacaggaagctgacaggcgaccgcaaatgggaattctctgtgccattccatcaggcacttaatggattccaccccgcacctctttgcaccattagaactcttaaagcagaaattcaggtgggccttcagccgggtcagggggaacagctcctggctagtgagccctcttggtggaccacagggaaatacggcattttccaatatgacggccctttatag

SEQ ID NO: 105052 - protein, 745 aa, Artificial Sequence
  derived and/or modified sequence
MKGFKLSCTASNSNRSTPACSPILRKRSRSPTPQNQDGDTMVEKGSDHSSDKSPSTPEQGVQRSCSSQSGRSGGKNSKSHKRLSKKSQSWYNVLSPTYKQRNEDFRKLFKQLPDTERLIVDYSCALQRDILLQGRLYLSENWICFYSNIFRWETLLTVRLKDICSMTKEKTARLIPNAIQVCTDSEKHFFTSFGARDRTYMMMFRLWQNALLEKPLCPKELWHFVHQCYGNELGLTSDDEDYVPPDDDFNTMGYCEEIPVEENEVNDSSSKSSIETKPDASPQLPKKSITNSTLTSTGSSEAPVSFDGLPLEEEALEGDGSLEKELAIDNIMGEKIEMIAPVNSPSLDFNDNEDIPTELSDSSDTHDEGEVQAFYEDLSGRQYVNEVFNFSVDKLYDLLFTNSPFQRDFMEQRRFSDIIFHPWKKEENGNQSRVILYTITLTNPLAPKTATVRETQTMYKASQESECYVIDAEVLTHDVPYHDYFYTINRYTLTRVARNKSRLRVSTELRYRKQPWGLVKTFIEKNFWSGLEDYFRHLESELAKTESTYLAEMHRQSPKEKASKTTTVRRRKRPHAHLRVPHLEEVMSPVTTPTDEDVGHRIKHVAGSTQTRHIPEDTPNGFHLQSVSKLLLVISCVVSFSLVLLVILNMMLFYKLWMLEYTTQTLTAWQGLRLQERLPQSQTEWAQLLESQQKYHDTELQKWREIIKSSVMLLDQMKDSLINLQNGIRSRDYTSESEEKRNRYH

SEQ ID NO: 105053 - DNA, 2238 bp, Artificial Sequence
  derived and/or modified sequence
atgaagggcttcaagctgagctgcaccgccagcaacagcaacagaagcacccccgcctgcagccccatcctgagaaagagaagcagaagccccaccccccagaaccaggacggcgacaccatggtggagaagggcagcgaccacagcagcgacaagagccccagcacccccgagcagggcgtgcagagaagctgcagcagccagagcggcagaagcggcggcaagaacagcaagagccacaagagactgagcaagaagagccagagctggtacaacgtgctgagccccacctacaagcagagaaacgaggacttcagaaagctgttcaagcagctgcccgacaccgagagactgatcgtggactacagctgcgccctgcagagagacatcctgctgcagggcagactgtacctgagcgagaactggatctgcttctacagcaacatcttcagatgggagaccctgctgaccgtgagactgaaggacatctgcagcatgaccaaggagaagaccgccagactgatccccaacgccatccaggtgtgcaccgacagcgagaagcacttcttcaccagcttcggcgccagagacagaacctacatgatgatgttcagactgtggcagaacgccctgctggagaagcccctgtgccccaaggagctgtggcacttcgtgcaccagtgctacggcaacgagctgggcctgaccagcgacgacgaggactacgtgccccccgacgacgacttcaacaccatgggctactgcgaggagatccccgtggaggagaacgaggtgaacgacagcagcagcaagagcagcatcgagaccaagcccgacgccagcccccagctgcccaagaagagcatcaccaacagcaccctgaccagcaccggcagcagcgaggcccccgtgagcttcgacggcctgcccctggaggaggaggccctggagggcgacggcagcctggagaaggagctggccatcgacaacatcatgggcgagaagatcgagatgatcgcccccgtgaacagccccagcctggacttcaacgacaacgaggacatccccaccgagctgagcgacagcagcgacacccacgacgagggcgaggtgcaggccttctacgaggacctgagcggcagacagtacgtgaacgaggtgttcaacttcagcgtggacaagctgtacgacctgctgttcaccaacagccccttccagagagacttcatggagcagagaagattcagcgacatcatcttccacccctggaagaaggaggagaacggcaaccagagcagagtgatcctgtacaccatcaccctgaccaaccccctggcccccaagaccgccaccgtgagagagacccagaccatgtacaaggccagccaggagagcgagtgctacgtgatcgacgccgaggtgctgacccacgacgtgccctaccacgactacttctacaccatcaacagatacaccctgaccagagtggccagaaacaagagcagactgagagtgagcaccgagctgagatacagaaagcagccctggggcctggtgaagaccttcatcgagaagaacttctggagcggcctggaggactacttcagacacctggagagcgagctggccaagaccgagagcacctacctggccgagatgcacagacagagccccaaggagaaggccagcaagaccaccaccgtgagaagaagaaagagaccccacgcccacctgagagtgccccacctggaggaggtgatgagccccgtgaccacccccaccgacgaggacgtgggccacagaatcaagcacgtggccggcagcacccagaccagacacatccccgaggacacccccaacggcttccacctgcagagcgtgagcaagctgctgctggtgatcagctgcgtggtgagcttcagcctggtgctgctggtgatcctgaacatgatgctgttctacaagctgtggatgctggagtacaccacccagaccctgaccgcctggcagggcctgagactgcaggagagactgccccagagccagaccgagtgggcccagctgctggagagccagcagaagtaccacgacaccgagctgcagaagtggagagagatcatcaagagcagcgtgatgctgctggaccagatgaaggacagcctgatcaacctgcagaacggcatcagaagcagagactacaccagcgagagcgaggagaagagaaacagataccactag

SEQ ID NO: 105054 - DNA, 2238 bp, Artificial Sequence
  derived and/or modified sequence
atgaagggttttaagttgtcttgcacagcctccaattcgaatagaagcacccctgcttgctccccaattctccgcaaacgcagcaggtcccctactccacagaatcaggatggggacaccatggttgagaaaggatcagatcattcttccgacaagtccccatccacgcctgagcagggtgtccaacggagttgctcctcgcaatccgggagatcaggtgggaagaacagtaaatcccacaaacggctgagcaagaaatctcagagctggtataatgtgctgtctccaacgtacaaacaacggaacgaggactttcgcaagctgttcaaacagttgcccgacaccgaaagactgatcgtcgattactcctgtgccctccagcgagatatcctgctgcagggcagactttatttgagcgagaactggatttgcttctactctaacattttcaggtgggagacactcctgacagtccggctgaaggacatttgcagcatgaccaaggaaaaaacagcaaggcttatcccaaacgcgattcaggtctgcacagactccgagaagcatttttttacatcgttcggcgcccgcgacaggacctacatgatgatgtttagactgtggcagaatgctctgttggagaaaccgctttgccctaaggagctgtggcactttgtccaccaatgttacggaaatgaacttggccttacgtcagacgacgaagattacgtaccccccgacgacgattttaatacgatgggttactgtgaagaaatccctgtggaggagaacgaagtgaatgattcctcttcaaagtcatctatcgagactaaacctgacgctagcccccagctgccaaagaaatctatcacaaattccaccttgacatctacaggctcttccgaagcccccgtgtcatttgatggcttgcccctggaagaggaggccttagaaggtgatggttctctagaaaaagagttggccatcgataacatcatgggggagaagattgagatgattgcccctgtcaatagtccatcactggatttcaatgacaacgaggatatcccaacggagttatcggattcgagcgatactcatgatgagggagaagtccaggccttttatgaggacctgagcgggcggcagtatgtgaacgaggtgttcaactttagtgtcgacaagctctacgacctcctctttaccaactctcctttccagagggactttatggaacagaggcggttctcagacatcatttttcacccttggaagaaggaggaaaatggaaaccaatctcgtgtgattctctatacaatcaccctgacaaaccccctagcacccaagacggcgacggtccgggagacccagaccatgtataaggcatctcaagagagcgaatgttatgtgattgacgccgaggtgttgacccacgatgtgccctaccacgattatttctatacgatcaaccgatacaccctaacaagagtcgctaggaacaagagcagactgcgggtttctacggaattgaggtaccgtaaacaaccgtggggactggtcaaaaccttcattgagaagaacttctggtctggcctggaggattactttaggcatttggagagtgagcttgcaaaaactgagtctacatatttggcagaaatgcatcggcaaagcccgaaagaaaaggcctccaaaactactactgtgcggcgccgaaagcgccctcatgcccacctccgtgtcccccacttggaggaagtgatgagcccagtgaccacacctacagatgaagatgttggccacaggattaaacacgtggcagggagtacgcagacgagacatattcccgaggatactccaaacgggttccatctgcagagtgtgagcaagttactcctggtgatctcatgtgttgtttcattttccctggtgctgttggtgattcttaatatgatgctcttctataaattgtggatgttagaatataccacccagactctcactgcttggcagggactcaggttgcaggagcgacttcctcagtcacagacagagtgggcccaactgctggaatctcagcaaaagtatcacgacaccgaattgcagaaatggagagaaatcattaaaagttccgtgatgttgctggaccagatgaaagattcgctgatcaacctgcaaaatggaataaggagccgagattacactagcgagagcgaggaaaaacgaaaccgctaccactag

SEQ ID NO: 105055 - DNA, 2805 bp, Artificial Sequence
  derived and/or modified sequence
agattatatggagctgcgggagctgccgcctgggggaagagaggtgcagcttctgctaggtttgtgctctcctcccagggtctccttggcttccttccccaaagcagctcagagctggtatgaggtgagggtggggggcagccggccagcctggctgttgacggcaactccagggcttgtttcgcgcagccttgccagcattacccatcctcatcagaaactggcagcggcagccacagctcgggcaggcggctccagccccaggctggatttgcagaatctgtcctttgcctccaagcccagctttcagctgggagagggggaagaaggggcagtggcagcagttcttctggctctttctccctttctctctttctctttctgtgttcaagtcacattacatgggattctgttcttttgggacttcgtcatcttttccaatatgtcctgggacctccggagctgtaacggggatgctaaggacacggtcagtggattatcgtgactgtactaatgaaaggattcaagctctcctgcactgccagtaactccaaccgcagcacgccggcctgctcgcccatcctccggaagcggtctcgctcgccaaccccgcagaaccaggacggagacaccatggtggagaagggctcagatcactcctcggacaagtccccgtccacaccggagcagggcgtgcagcgcagctgctcctcccagtccggccggagcggcggcaagaattccaagtctcacaagcgcctctcaaaaaaaagccagagttggtataatgtgttaagccccacctacaagcagagaaatgaagacttcagaaagctctttaagcagcttccagacacggagcgcctcattgttgattactcatgtgcactccaaagagacattctccttcagggccgactctacctctctgaaaattggatctgcttctacagcaacatcttccgctgggaaactctgctgacagtccgtttgaaagacatctgttccatgactaaagaaaaaacagctcgcctcattcccaatgccatccaagtttgcactgattcagaaaagcacttcttcacttcgtttggggcccgggataggacatatatgatgatgttccggctctggcagaatgctctccttgaaaagcctctgtgtcccaaggagctctggcactttgttcaccagtgctatgggaacgaattgggcctgaccagtgatgacgaggactacgtgccccctgacgacgacttcaacacaatgggatactgtgaagagatccctgtggaagagaatgaagtgaatgacagctcatccaagagcagcatagagaccaagccagatgccagtccacagctgcccaagaaatccatcaccaacagcacactaacatccacagggagcagtgaggcccccgtctcgtttgatgggctgcccctggaggaagaggcgctggagggagacgggtccctggaaaaggagctcgccattgacaacatcatgggggagaagattgagatgatcgctcctgtgaactccccttcactggacttcaatgacaatgaggacatccccactgagctcagtgactcttccgacacacacgatgaaggagaggtccaggccttctatgaggacctgagtggccggcagtacgtgaatgaagtcttcaacttcagcgtggacaagctctatgacctcctcttcaccaactcgcccttccagcgggatttcatggagcagcggcgcttctctgatatcatcttccatccatggaaaaaggaggagaatggaaaccagagccgagtgattctttacaccatcacccttaccaaccctctggctcccaaaactgccactgtcagggagacacagaccatgtacaaggcgagccaggagagtgaatgttacgtgatagatgccgaagtcctcacccacgacgtgccctaccatgactacttctacacaatcaatcgctacacgctcacccgtgtggctcggaacaagagccgactcagggtctccacagagctgcgctatcgaaaacagccctgggggttagtgaaaacgttcatcgagaagaacttctggagtgggctggaggactacttccgccatttagagagcgagctggccaaaacggagagcacttatttggctgagatgcacagacaatctcccaaagagaaggccagcaagactacaacggtgcggaggaggaagcgtccccatgcccacctgcgagtccctcacctggaagaggtgatgagcccggtcaccacgcccacagatgaggatgtgggccacaggatcaaacatgtggcaggttccacacagacgcggcatatcccggaggacacccccaacggtttccacctgcagagcgtgtccaagctgctgctggttatcagctgtgtggtctccttcagtctggtgctgctggtcatccttaacatgatgctcttctacaaactctggatgttggaatacaccacgcagaccctcactgcctggcagggtctaaggctccaagaaaggttaccccagtctcagacagaatgggcccagctcttagagtcccaacaaaagtaccacgatactgagctccaaaaatggagggaaatcatcaaatcctcagtgatgctccttgaccagatgaaggactcgctcatcaaccttcagaacggcatcaggtcccgcgactacacgtcggaaagtgaagaaaagaggaatcgctatcattgacaaggcaggaacagggtggctgcaagaggcctgtgcaatacatgtacatagacc

SEQ ID NO: 105056 - DNA, 2238 bp, Artificial Sequence
  derived and/or modified sequence
atgaagggcttcaagctgagctgcacagccagcaacagcaacagaagcaccccagcctgcagccccatcctgaggaagaggagccgcagccccaccccccagaaccaggatggagacaccatggtggagaagggcagtgaccacagcagtgacaagagccccagcaccccagagcagggcgtgcagaggagctgcagcagccagagcggccgcagcggcggcaagaacagcaagagccacaagaggctgagcaagaagagccagagctggtacaacgtgctgagccccacctacaagcagagaaatgaagacttcaggaagctgttcaagcagctgcctgacacagagcggctgattgtggactacagctgtgccctgcagagggacatcctgctgcagggccgcctgtacctgtctgagaactggatctgcttctacagcaacatcttccgctgggagaccctgctgactgtgcggctgaaggacatctgcagcatgaccaaggagaagacagcccggctcatccccaatgccatccaggtgtgcacagattctgagaagcacttcttcaccagctttggagcccgggacaggacctacatgatgatgttccggctgtggcagaatgccctgctggagaagcccctgtgccccaaggagctgtggcactttgtgcaccagtgctatggaaatgagctgggcctgaccagtgatgatgaggactatgtgcccccagatgatgacttcaacaccatgggctactgtgaggagatccctgtggaggagaatgaggtgaatgacagcagcagcaagagcagcattgagaccaagccagatgccagcccccagctgcccaagaagagcatcaccaacagcaccctgaccagcacaggcagcagcgaggcccctgtgtcctttgatggcctgcccctggaggaggaggccctggagggagatggcagcctggagaaggagctggccatcgacaacatcatgggagagaagattgagatgattgcccctgtgaacagccccagcctggacttcaatgacaatgaagacatccccacagagctgagtgacagcagtgacacccatgatgaaggagaggtgcaggccttctatgaggacctgagcggccggcagtatgtgaatgaggtgttcaacttctctgtggacaagctgtatgacctgctcttcaccaacagccccttccagagggacttcatggagcagaggcgcttcagtgacatcatcttccacccctggaagaaggaggagaatggaaaccagagcagggtcatcctgtacaccatcaccctgaccaaccccctggcccccaagacagccaccgtgcgggagacccagaccatgtacaaggccagccaggagagcgagtgctacgtgattgatgctgaggtgctgacccatgatgtgccctaccatgactacttctacaccatcaaccgctacaccctgaccagggtggccaggaacaagagccggctgcgggtgtccacagagctgcgctacaggaagcagccctggggcctggtgaagaccttcatcgagaagaacttctggagcggcctggaggactacttccgccacctggagagcgagctggccaagacagagagcacctacctggccgagatgcaccggcagagccccaaggagaaggccagcaagaccaccaccgtgagaagaaggaagaggcctcatgcccacctgcgggtgccccacctggaggaggtgatgagccctgtgaccacccccacagatgaagatgtgggccaccgcatcaagcacgtggccggcagcacccagaccaggcacatccctgaggacacccccaacggcttccacctgcagagcgtgtccaagctgctgctggtgatcagctgtgtggtgtccttcagcctggtgctgctggtgatcctgaacatgatgctgttctacaagctgtggatgctggagtacaccacccagaccctgacagcctggcagggcctgcggctgcaggagcggctgccccagagccagacagagtgggcccagctgctggagagccagcagaagtaccatgacacagagctgcagaagtggagggagatcatcaagagctctgtgatgctgctggaccagatgaaggacagcctcatcaacctgcagaatggcatccgcagccgggactacaccagcgagagcgaggagaagaggaaccgctaccactag

SEQ ID NO: 105057 - DNA, 2238 bp, Artificial Sequence
  derived and/or modified sequence
atgaagggcttcaagctgagctgcaccgccagcaacagcaaccggagcacacccgcctgctctccaatcctgaggaaacggtcccggagtcccactccccagaaccaggatggcgacacaatggtcgagaaaggcagcgatcactcatcagataagagcccttccactccagaacagggggtgcagaggagctgcagcagccagtcaggtcgctcgggtggtaagaacagcaagagtcacaagaggttaagcaagaaatcacagtcgtggtataacgtgctgagccctacatacaagcagagaaacgaggatttccggaagctgtttaaacagcttccggataccgaaaggctgattgtggactatagttgtgctctgcaaagggatattctactgcagggtcggctgtatttaagcgaaaactggatctgcttttactctaacatctttcgatgggagaccctattgacagtgcggctcaaggatatctgttcaatgacgaaagagaaaacggcccggctgatccctaacgcaatccaggtgtgcaccgacagcgagaagcatttctttacctctttcggagcgagggacaggacctacatgatgatgttccggctgtggcaaaacgcgctgctagaaaaacctctttgccctaaggagctgtggcatttcgtacatcagtgttacgggaacgagctgggcctcaccagtgacgacgaggattatgtgcctcccgatgatgattttaataccatggggtactgtgaagagattccagtggaggaaaacgaagtgaatgactcgtcatcaaagagttccatagagacaaagcctgatgcatctccccagctcccaaaaaaatccattaccaactctaccctcaccagtacaggctcatccgaggctcccgttagcttcgacggccttccactggaggaagaagccctcgagggcgatggcagcctggaaaaggaactggcgatcgataacataatgggcgagaagatcgaaatgattgcgcctgtgaactccccttccctagactttaacgacaatgaggatatccctactgagctgtcggattctagcgacacgcatgacgagggtgaggtgcaggccttttatgaagacctaagcggacgtcagtacgtcaacgaagtctttaacttctctgtggacaagctttatgacctgctgtttacaaactcaccattccagcgagatttcatggagcaaagacggttctctgatattatttttcacccatggaaaaaagaggaaaatggcaatcagagcagagtgatcctatataccatcacccttactaaccccctggcacccaagaccgccacagtcagggagacccagaccatgtacaaagcttcacaggagtccgagtgctacgtgattgatgccgaagtgctgacccatgatgtcccatatcacgactacttttataccattaatcgctacaccctgacacgagttgcccgcaacaagtcccggttacgggtcagcactgagctgcggtaccggaagcagccctggggactggtgaagactttcatcgagaaaaacttctggagcggcctggaagactattttaggcatctggaatccgaactggcgaagacagagagcacctatttggccgagatgcatcgccagagccccaaggagaaagccagcaaaacgaccactgtgaggcgaaggaaaaggccccatgctcatctcagagttcctcacctggaagaagtgatgagtcccgtgacaactccaaccgatgaagatgtgggacacagaataaagcacgtagcagggtccacccaaacacggcacatacccgaagacacgcccaacggtttccacctccagagtgtgagtaagctgctgctcgtcataagttgtgtggttagtttctcactcgtcctattggtgatcctgaacatgatgctgttctacaagctctggatgctagagtacactactcagacgctgaccgcgtggcaaggcttgcggctgcaggaacgcctccctcagtctcagacggagtgggcccagctgttggaaagtcaacaaaagtatcatgacacagaactgcaaaaatggcgagaaattatcaagagttctgtgatgctgctcgatcaaatgaaagattctctaatcaatctgcagaatgggattagaagcagagactacacttcagagagcgaagaaaagcgcaataggtaccattag

SEQ ID NO: 105058 - DNA, 2238 bp, Artificial Sequence
  derived and/or modified sequence
atgaaaggctttaaattgtcatgtacagcatcgaattcaaataggtcgactcccgcttgcagtcccattcttcgcaagaggtccagaagccccactcctcaaaatcaggatggggacaccatggtggaaaagggatccgatcactctagtgacaagagcccctcgacacccgaacaaggcgtacaaaggtcttgctccagtcaatctggaagatccggtgggaaaaattcaaagtcgcacaagaggttaagcaagaagtcccaatcctggtataacgttctgtccccgacatacaagcagcgcaacgaagatttccgcaaactgttcaagcaactgcctgataccgagaggttaatcgtcgactacagctgtgccctacagagggacatcctgttgcagggtaggctctacttaagcgagaattggatttgtttttactctaacatctttagatgggaaactctacttaccgttcggctcaaggacatctgttccatgaccaaagagaagacagcaagacttattccaaatgcaattcaagtgtgcacagacagcgaaaaacactttttcacttcctttggtgctcgtgataggacctacatgatgatgtttagactgtggcagaatgctctcctcgagaagccactctgtccaaaagaactgtggcatttcgttcatcagtgttacggcaacgaattgggcctaacctcagatgatgaagactacgtcccccctgacgatgacttcaacacaatgggctactgtgaggagataccagtcgaggaaaacgaagtgaatgatagcagcagtaagtcttccattgaaaccaagcctgacgcatcaccccaactaccaaaaaaatccataacaaactcaaccctcaccagcacgggttcatcagaggctcccgtgtcttttgatgggctacccttggaggaggaggccctagagggagatggaagcctggagaaggagttggccatagacaacattatgggcgaaaaaatcgagatgattgcccctgttaacagtccaagcttagatttcaacgataatgaggacattccaaccgaactgagcgactcctctgatacccacgacgaaggcgaggtgcaggctttctatgaagacttgtcggggcgtcagtacgtaaatgaagtcttcaatttctcagtggataaactctatgatctgctatttaccaattcgccttttcaacgcgactttatggaacaacggcgtttctccgacatcatatttcatccatggaagaaagaagagaacgggaaccagtccagggtgatcctgtacactataactctaaccaatcccttggctcccaagacagcaaccgtcagagaaacccaaacaatgtacaaggcaagccaggaatctgagtgctacgtgatcgacgccgaggtgctaactcacgatgtaccttatcatgactacttttacaccatcaatcgatatacgctcactagagtggccagaaacaagagtcggttgagagtctctactgagctccgatacagaaaacaaccttggggtctggtcaagaccttcatagagaagaatttctggtccggcctagaagattattttcggcacctggagtcagagcttgctaagacggagagcacgtatttagccgagatgcaccgacaatctccaaaggagaaagcatcaaaaacaaccacagtcaggagaaggaagagaccccacgcccatttgcgggtgccgcacctggaggaggtgatgtctcctgttacaacaccaaccgatgaggatgttggacaccgtatcaagcatgtcgccggatccacacagacgcgccacattcctgaggacacccccaacgggttccaccttcagagtgtcagcaagctgctgctggtaatttcttgcgtcgtgagcttttcattggtgctattggtgatactgaacatgatgctgttctacaagctttggatgctggagtacacaactcagacactgacagcgtggcagggactgagattacaggaaagactcccgcagtcacagacagagtgggcccaactactggagagccaacaaaaataccacgacaccgagctacagaagtggcgggagatcattaagtcgagtgttatgcttctcgatcaaatgaaggactccctgataaatttgcaaaacggaatccggtcgcgcgattatacatctgagtctgaggagaagagaaatcgctatcactag

SEQ ID NO: 105059 - protein, 598 aa, Artificial Sequence
  derived and/or modified sequence
MTSCDESKRFREENTVVSSDPTKTAARDIIDYESDVEPETKRLKLAASEDHCSPSEETPSQSKQIRTPLVESVQEAKAQLTTPAFPVEGWQCSLCTYINNSELPYCEMCETPQGSAVMQIDSLNHIQDKNEKDDSQKDTSKKVQTISDCEKQALAQSEPGQLADSKEETPKIEKEDGLTSQPEQWKSSDTLPVYDTLMFCASRNTDRIHIYTKDGKQMSCNFIPLDIKLDLWEDLPASFQLKQYRSLILRFVREWSSLTAMKQRIIRKSGQLFCSPILALEEITKQQTKQNCTKRYITKEDVAVASMDKVKNVGGHVRLITKESRPRDPFTKKLLEDGACVPFLNPYTVQADLTVKPSTSKGYLQAVDNEGNPLCLRCQQPTCQTKQACKANSWDSRFCSLKCQEEFWIRSNNSYLRAKVFETEHGVCQLCNVNAQELFLRLRDAPKSQRKNLLYATWTSKLPLEQLNEMIRNPGEGHFWQVDHIKPVYGGGGQCSLDNLQTLCTVCHKERTARQAKERSQVRRQSLASKHGSDITRFLVKKKLHESHKVTGAEQGLQVSGLPDSAAPEGGAAHTNDQRRCQRMKQPLTEVQILSHSS

SEQ ID NO: 105060 - protein, 368 aa, Artificial Sequence
  derived and/or modified sequence
MGLGKTIQAIGITYFYKEEWPLLIVVPSSLRYPWTEEIEKWIPELSPEEINVIQNKTDVRRMSTSKVTVLGYGLLTADAKTLIDALNNQNFKVVIVDESHYMKSRNATRSRILLPIVQKARRAILLTGTPALGRPEELFMQIEALFPQKFGRWTDYAKRYCNAHIRYFGKRPQWDCRGASNLNELHQLLSDIMIRRLKTEVLTQLPPKVRQRIPFDLPSAAAKELNTSFEEWEKIMRTPNSGAMETVMGLITRMFKQTAIAKAGAVKDYIKMMLQNDSLKFLVFAHHLSMLQACTEAVIENKTRYIRIDGSVSSSERIHLVNQFQKDPDTRVAILSIQAAGQDLYDKVAWGKRTLVSGLFMECFCFVP

SEQ ID NO: 105061 - protein, 1077 aa, Artificial Sequence
  derived and/or modified sequence
MPRVHNIKKSLTPHISCVTNESDNLLDFLPDRLRAKLLPFQKDGIIFALKRNGRCMVADEMGLGKTIQAIGITYFYKEEWPLLIVVPSSLRYPWTEEIEKWIPELSPEEINVIQNKTDVRRMSTSKVTVLGYGLLTADAKTLIDALNNQNFKVVIVDESHYMKSRNATRSRILLPIVQKARRAILLTGTPALGRPEELFMQIEALFPQKFGRWTDYAKRYCNAHIRYFGKRPQWDCRGASNLNELHQLLSDIMIRRLKTEVLTQLPPKVRQRIPFDLPSAAAKELNTSFEEWEKIMRTPNSGAMETVMGLITRMFKQTAIAKAGAVKDYIKMMLQNDSLKFLVFAHHLSMLQACTEAVIENKTRYIRIDGSVSSSERIHLVNQFQKDPDTRVAILSIQAAGQGLTFTAASHVVFAELYWDPGHIKQAEDRAHRIGQCSSVNIHYLIANGTLDTLMWGMLNRKAQVTGSTLNGRKEKIQAEEGDKEKWDFLQFAEAWTPNDSSEELRKEALFTHFEKEKQHDIRSFFVPQPKKRQLMTSCDESKRFREENTVVSSDPTKTAARDIIDYESDVEPETKRLKLAASEDHCSPSEETPSQSKQIRTPLVESVQEAKAQLTTPAFPVEGWQCSLCTYINNSELPYCEMCETPQGSAVMQIDSLNHIQDKNEKDDSQKDTSKKVQTISDCEKQALAQSEPGQLADSKEETPKIEKEDGLTSQPEQWKSSDTLPVYDTLMFCASRNTDRIHIYTKDGKQMSCNFIPLDIKLDLWEDLPASFQLKQYRSLILRFVREWSSLTAMKQRIIRKSGQLFCSPILALEEITKQQTKQNCTKRYITKEDVAVASMDKVKNVGGHVRLITKESRPRDPFTKKLLEDGACVPFLNPYTVQADLTVKPSTSKGYLQAVDNEGNPLCLRCQQPTCQTKQACKANSWDSRFCSLKCQEEFWIRSNNSYLRAKVFETEHGVCQLCNVNAQELFLRLRDAPKSQRKNLLYATWTSKLPLEQLNEMIRNPGEGHFWQVDHIKPVYGGGGQCSLDNLQTLCTVCHKERTARQAKERSQVRRQSLASKHGSDITRFLVKK

SEQ ID NO: 105062 - protein, 598 aa, Artificial Sequence
  derived and/or modified sequence
MTSCDESKRFREENTVVSSDPTKTAARDIIDYESDVEPETKRLKLAASEDHCSPSEETPSQSKQIRTPLVESVQEAKAQLTTPAFPVEGWQCSLCTYINNSELPYCEMCETPQGSAVMQIDSLNHIQDKNEKDDSQKDTSKKVQTISDCEKQALAQSEPGQLADSKEETPKIEKEDGLTSQPEQWKSSDTLPVYDTLMFCASRNTDRIHIYTKDGKQMSCNFIPLDIKLDLWEDLPASFQLKQYRSLILRFVREWSSLTAMKQRIIRKSGQLFCSPILALEEITKQQTKQNCTKRYITKEDVAVASMDKVKNVGGHVRLITKESRPRDPFTKKLLEDGACVPFLNPYTVQADLTVKPSTSKGYLQAVDNEGNPLCLRCQQPTCQTKQACKANSWDSRFCSLKCQEEFWIRSNNSYLRAKVFETEHGVCQLCNVNAQELFLRLRDAPKSQRKNLLYATWTSKLPLEQLNEMIRNPGEGHFWQVDHIKPVYGGGGQCSLDNLQTLCTVCHKERTARQAKERSQVRRQSLASKHGSDITRFLETSKLHESHKVTGAEQGLQVSGLPDSAAPEGGAAHTNDQRRCQRMKQPLTEVQILSHSS

SEQ ID NO: 105063 - protein, 1077 aa, Artificial Sequence
  derived and/or modified sequence
MPRVHNIKKSLTPHISCVTNESDNLLDFLPDRLRAKLLPFQKDGIIFALKRNGSRIDCDQMGLGKTIQAIGITYFYKEEWPLLIVVPSSLRYPWTEEIEKWIPELSPEEINVIQNKTDVRRMSTSKVTVLGYGLLTADAKTLIDALNNQNFKVVIVDESHYMKSRNATRSRILLPIVQKARRAILLTGTPALGRPEELFMQIEALFPQKFGRWTDYAKRYCNAHIRYFGKRPQWDCRGASNLNELHQLLSDIMIRRLKTEVLTQLPPKVRQRIPFDLPSAAAKELNTSFEEWEKIMRTPNSGAMETVMGLITRMFKQTAIAKAGAVKDYIKMMLQNDSLKFLVFAHHLSMLQACTEAVIENKTRYIRIDGSVSSSERIHLVNQFQKDPDTRVAILSIQAAGQGLTFTAASHVVFAELYWDPGHIKQAEDRAHRIGQCSSVNIHYLIANGTLDTLMWGMLNRKAQVTGSTLNGRKEKIQAEEGDKEKWDFLQFAEAWTPNDSSEELRKEALFTHFEKEKQHDIRSFFVPQPKKRQLMTSCDESKRFREENTVVSSDPTKTAARDIIDYESDVEPETKRLKLAASEDHCSPSEETPSQSKQIRTPLVESVQEAKAQLTTPAFPVEGWQCSLCTYINNSELPYCEMCETPQGSAVMQIDSLNHIQDKNEKDDSQKDTSKKVQTISDCEKQALAQSEPGQLADSKEETPKIEKEDGLTSQPEQWKSSDTLPVYDTLMFCASRNTDRIHIYTKDGKQMSCNFIPLDIKLDLWEDLPASFQLKQYRSLILRFVREWSSLTAMKQRIIRKSGQLFCSPILALEEITKQQTKQNCTKRYITKEDVAVASMDKVKNVGGHVRLITKESRPRDPFTKKLLEDGACVPFLNPYTVQADLTVKPSTSKGYLQAVDNEGNPLCLRCQQPTCQTKQACKANSWDSRFCSLKCQEEFWIRSNNSYLRAKVFETEHGVCQLCNVNAQELFLRLRDAPKSQRKNLLYATWTSKLPLEQLNEMIRNPGEGHFWQVDHIKPVYGGGGQCSLDNLQTLCTVCHKERTARQAKERSQVRRQSLASKHGSDITRFLVKK

SEQ ID NO: 105064 - protein, 597 aa, Artificial Sequence
  derived and/or modified sequence
MTSCDESKRFREENTVVSSDPTKTAARDIIDYESDVEPETKRLKLAASEDHCSPSEETPSQSKQIRTPLVESVQEAKAQLTTPAFPVEGWQCSLCTYINNSELPYCEMCETPQGSAVMQIDSLNHIQDKNEKDDSQKDTSKKVQTISDCEKQALAQSEPGQLADSKEETPKIEKEDGLTSQPEQWKSSDTLPVYDTLMFCASRNTDRIHIYTKDGKQMSCNFIPLDIKLDLWEDLPASFQLKQYRSLILRFVREWSSLTAMKQRIIRKSGQLFCSPILALEEITKQQTKQNCTKRYITKEDVAVASMDKVKNVGGHVRLITKESRPRDPFTKKLLEDGACVPFLNPYTVQADLTVKPSTSKGYLQAVDNEGNPLCLRCQQPTCQTKQACKANSWDSRFCSLKCQEEFWIRSNNSYLRAKVFETEHGVCQLCNVNAQELFLRLRDAPKSQRKNLLYATWTSKLPLEQLNEMIRNPGEGHFWQVDHIKPVYGGGGQCSLDNLQTLCTVCHKERTARQAKERSQVRRQSLASKHGSDITRFLVKKLHESHKVTGAEQGLQVSGLPDSAAPEGGAAHTNDQRRCQRMKQPLTEVQILSHSS

SEQ ID NO: 105065 - DNA, 1797 bp, Artificial Sequence
  derived and/or modified sequence
atgaccagctgcgacgagagcaagagattcagagaggagaacaccgtggtgagcagcgaccccaccaagaccgccgccagagacatcatcgactacgagagcgacgtggagcccgagaccaagagactgaagctggccgccagcgaggaccactgcagccccagcgaggagacccccagccagagcaagcagatcagaacccccctggtggagagcgtgcaggaggccaaggcccagctgaccacccccgccttccccgtggagggctggcagtgcagcctgtgcacctacatcaacaacagcgagctgccctactgcgagatgtgcgagaccccccagggcagcgccgtgatgcagatcgacagcctgaaccacatccaggacaagaacgagaaggacgacagccagaaggacaccagcaagaaggtgcagaccatcagcgactgcgagaagcaggccctggcccagagcgagcccggccagctggccgacagcaaggaggagacccccaagatcgagaaggaggacggcctgaccagccagcccgagcagtggaagagcagcgacaccctgcccgtgtacgacaccctgatgttctgcgccagcagaaacaccgacagaatccacatctacaccaaggacggcaagcagatgagctgcaacttcatccccctggacatcaagctggacctgtgggaggacctgcccgccagcttccagctgaagcagtacagaagcctgatcctgagattcgtgagagagtggagcagcctgaccgccatgaagcagagaatcatcagaaagagcggccagctgttctgcagccccatcctggccctggaggagatcaccaagcagcagaccaagcagaactgcaccaagagatacatcaccaaggaggacgtggccgtggccagcatggacaaggtgaagaacgtgggcggccacgtgagactgatcaccaaggagagcagacccagagaccccttcaccaagaagctgctggaggacggcgcctgcgtgcccttcctgaacccctacaccgtgcaggccgacctgaccgtgaagcccagcaccagcaagggctacctgcaggccgtggacaacgagggcaaccccctgtgcctgagatgccagcagcccacctgccagaccaagcaggcctgcaaggccaacagctgggacagcagattctgcagcctgaagtgccaggaggagttctggatcagaagcaacaacagctacctgagagccaaggtgttcgagaccgagcacggcgtgtgccagctgtgcaacgtgaacgcccaggagctgttcctgagactgagagacgcccccaagagccagagaaagaacctgctgtacgccacctggaccagcaagctgcccctggagcagctgaacgagatgatcagaaaccccggcgagggccacttctggcaggtggaccacatcaagcccgtgtacggcggcggcggccagtgcagcctggacaacctgcagaccctgtgcaccgtgtgccacaaggagagaaccgccagacaggccaaggagagaagccaggtgagaagacagagcctggccagcaagcacggcagcgacatcaccagattcctggtgaagaagaagctgcacgagagccacaaggtgaccggcgccgagcagggcctgcaggtgagcggcctgcccgacagcgccgcccccgagggcggcgccgcccacaccaacgaccagagaagatgccagagaatgaagcagcccctgaccgaggtgcagatcctgagccacagcagctag

SEQ ID NO: 105066 - DNA, 3234 bp, Artificial Sequence
  derived and/or modified sequence
atgcccagagtgcacaacatcaagaagagcctgaccccccacatcagctgcgtgaccaacgagagcgacaacctgctggacttcctgcccgacagactgagagccaagctgctgcccttccagaaggacggcatcatcttcgccctgaagagaaacggcagatgcatggtggccgacgagatgggcctgggcaagaccatccaggccatcggcatcacctacttctacaaggaggagtggcccctgctgatcgtggtgcccagcagcctgagatacccctggaccgaggagatcgagaagtggatccccgagctgagccccgaggagatcaacgtgatccagaacaagaccgacgtgagaagaatgagcaccagcaaggtgaccgtgctgggctacggcctgctgaccgccgacgccaagaccctgatcgacgccctgaacaaccagaacttcaaggtggtgatcgtggacgagagccactacatgaagagcagaaacgccaccagaagcagaatcctgctgcccatcgtgcagaaggccagaagagccatcctgctgaccggcacccccgccctgggcagacccgaggagctgttcatgcagatcgaggccctgttcccccagaagttcggcagatggaccgactacgccaagagatactgcaacgcccacatcagatacttcggcaagagaccccagtgggactgcagaggcgccagcaacctgaacgagctgcaccagctgctgagcgacatcatgatcagaagactgaagaccgaggtgctgacccagctgccccccaaggtgagacagagaatccccttcgacctgcccagcgccgccgccaaggagctgaacaccagcttcgaggagtgggagaagatcatgagaacccccaacagcggcgccatggagaccgtgatgggcctgatcaccagaatgttcaagcagaccgccatcgccaaggccggcgccgtgaaggactacatcaagatgatgctgcagaacgacagcctgaagttcctggtgttcgcccaccacctgagcatgctgcaggcctgcaccgaggccgtgatcgagaacaagaccagatacatcagaatcgacggcagcgtgagcagcagcgagagaatccacctggtgaaccagttccagaaggaccccgacaccagagtggccatcctgagcatccaggccgccggccagggcctgaccttcaccgccgccagccacgtggtgttcgccgagctgtactgggaccccggccacatcaagcaggccgaggacagagcccacagaatcggccagtgcagcagcgtgaacatccactacctgatcgccaacggcaccctggacaccctgatgtggggcatgctgaacagaaaggcccaggtgaccggcagcaccctgaacggcagaaaggagaagatccaggccgaggagggcgacaaggagaagtgggacttcctgcagttcgccgaggcctggacccccaacgacagcagcgaggagctgagaaaggaggccctgttcacccacttcgagaaggagaagcagcacgacatcagaagcttcttcgtgccccagcccaagaagagacagctgatgaccagctgcgacgagagcaagagattcagagaggagaacaccgtggtgagcagcgaccccaccaagaccgccgccagagacatcatcgactacgagagcgacgtggagcccgagaccaagagactgaagctggccgccagcgaggaccactgcagccccagcgaggagacccccagccagagcaagcagatcagaacccccctggtggagagcgtgcaggaggccaaggcccagctgaccacccccgccttccccgtggagggctggcagtgcagcctgtgcacctacatcaacaacagcgagctgccctactgcgagatgtgcgagaccccccagggcagcgccgtgatgcagatcgacagcctgaaccacatccaggacaagaacgagaaggacgacagccagaaggacaccagcaagaaggtgcagaccatcagcgactgcgagaagcaggccctggcccagagcgagcccggccagctggccgacagcaaggaggagacccccaagatcgagaaggaggacggcctgaccagccagcccgagcagtggaagagcagcgacaccctgcccgtgtacgacaccctgatgttctgcgccagcagaaacaccgacagaatccacatctacaccaaggacggcaagcagatgagctgcaacttcatccccctggacatcaagctggacctgtgggaggacctgcccgccagcttccagctgaagcagtacagaagcctgatcctgagattcgtgagagagtggagcagcctgaccgccatgaagcagagaatcatcagaaagagcggccagctgttctgcagccccatcctggccctggaggagatcaccaagcagcagaccaagcagaactgcaccaagagatacatcaccaaggaggacgtggccgtggccagcatggacaaggtgaagaacgtgggcggccacgtgagactgatcaccaaggagagcagacccagagaccccttcaccaagaagctgctggaggacggcgcctgcgtgcccttcctgaacccctacaccgtgcaggccgacctgaccgtgaagcccagcaccagcaagggctacctgcaggccgtggacaacgagggcaaccccctgtgcctgagatgccagcagcccacctgccagaccaagcaggcctgcaaggccaacagctgggacagcagattctgcagcctgaagtgccaggaggagttctggatcagaagcaacaacagctacctgagagccaaggtgttcgagaccgagcacggcgtgtgccagctgtgcaacgtgaacgcccaggagctgttcctgagactgagagacgcccccaagagccagagaaagaacctgctgtacgccacctggaccagcaagctgcccctggagcagctgaacgagatgatcagaaaccccggcgagggccacttctggcaggtggaccacatcaagcccgtgtacggcggcggcggccagtgcagcctggacaacctgcagaccctgtgcaccgtgtgccacaaggagagaaccgccagacaggccaaggagagaagccaggtgagaagacagagcctggccagcaagcacggcagcgacatcaccagattcctggtgaagaagtag

SEQ ID NO: 105067 - DNA, 1797 bp, Artificial Sequence
  derived and/or modified sequence
atgaccagctgcgacgagagcaagagattcagagaggagaacaccgtggtgagcagcgaccccaccaagaccgccgccagagacatcatcgactacgagagcgacgtggagcccgagaccaagagactgaagctggccgccagcgaggaccactgcagccccagcgaggagacccccagccagagcaagcagatcagaacccccctggtggagagcgtgcaggaggccaaggcccagctgaccacccccgccttccccgtggagggctggcagtgcagcctgtgcacctacatcaacaacagcgagctgccctactgcgagatgtgcgagaccccccagggcagcgccgtgatgcagatcgacagcctgaaccacatccaggacaagaacgagaaggacgacagccagaaggacaccagcaagaaggtgcagaccatcagcgactgcgagaagcaggccctggcccagagcgagcccggccagctggccgacagcaaggaggagacccccaagatcgagaaggaggacggcctgaccagccagcccgagcagtggaagagcagcgacaccctgcccgtgtacgacaccctgatgttctgcgccagcagaaacaccgacagaatccacatctacaccaaggacggcaagcagatgagctgcaacttcatccccctggacatcaagctggacctgtgggaggacctgcccgccagcttccagctgaagcagtacagaagcctgatcctgagattcgtgagagagtggagcagcctgaccgccatgaagcagagaatcatcagaaagagcggccagctgttctgcagccccatcctggccctggaggagatcaccaagcagcagaccaagcagaactgcaccaagagatacatcaccaaggaggacgtggccgtggccagcatggacaaggtgaagaacgtgggcggccacgtgagactgatcaccaaggagagcagacccagagaccccttcaccaagaagctgctggaggacggcgcctgcgtgcccttcctgaacccctacaccgtgcaggccgacctgaccgtgaagcccagcaccagcaagggctacctgcaggccgtggacaacgagggcaaccccctgtgcctgagatgccagcagcccacctgccagaccaagcaggcctgcaaggccaacagctgggacagcagattctgcagcctgaagtgccaggaggagttctggatcagaagcaacaacagctacctgagagccaaggtgttcgagaccgagcacggcgtgtgccagctgtgcaacgtgaacgcccaggagctgttcctgagactgagagacgcccccaagagccagagaaagaacctgctgtacgccacctggaccagcaagctgcccctggagcagctgaacgagatgatcagaaaccccggcgagggccacttctggcaggtggaccacatcaagcccgtgtacggcggcggcggccagtgcagcctggacaacctgcagaccctgtgcaccgtgtgccacaaggagagaaccgccagacaggccaaggagagaagccaggtgagaagacagagcctggccagcaagcacggcagcgacatcaccagattcctggagaccagcaagctgcacgagagccacaaggtgaccggcgccgagcagggcctgcaggtgagcggcctgcccgacagcgccgcccccgagggcggcgccgcccacaccaacgaccagagaagatgccagagaatgaagcagcccctgaccgaggtgcagatcctgagccacagcagctag

SEQ ID NO: 105068 - DNA, 3234 bp, Artificial Sequence
  derived and/or modified sequence
atgcccagagtgcacaacatcaagaagagcctgaccccccacatcagctgcgtgaccaacgagagcgacaacctgctggacttcctgcccgacagactgagagccaagctgctgcccttccagaaggacggcatcatcttcgccctgaagagaaacggcagcagaatcgactgcgaccagatgggcctgggcaagaccatccaggccatcggcatcacctacttctacaaggaggagtggcccctgctgatcgtggtgcccagcagcctgagatacccctggaccgaggagatcgagaagtggatccccgagctgagccccgaggagatcaacgtgatccagaacaagaccgacgtgagaagaatgagcaccagcaaggtgaccgtgctgggctacggcctgctgaccgccgacgccaagaccctgatcgacgccctgaacaaccagaacttcaaggtggtgatcgtggacgagagccactacatgaagagcagaaacgccaccagaagcagaatcctgctgcccatcgtgcagaaggccagaagagccatcctgctgaccggcacccccgccctgggcagacccgaggagctgttcatgcagatcgaggccctgttcccccagaagttcggcagatggaccgactacgccaagagatactgcaacgcccacatcagatacttcggcaagagaccccagtgggactgcagaggcgccagcaacctgaacgagctgcaccagctgctgagcgacatcatgatcagaagactgaagaccgaggtgctgacccagctgccccccaaggtgagacagagaatccccttcgacctgcccagcgccgccgccaaggagctgaacaccagcttcgaggagtgggagaagatcatgagaacccccaacagcggcgccatggagaccgtgatgggcctgatcaccagaatgttcaagcagaccgccatcgccaaggccggcgccgtgaaggactacatcaagatgatgctgcagaacgacagcctgaagttcctggtgttcgcccaccacctgagcatgctgcaggcctgcaccgaggccgtgatcgagaacaagaccagatacatcagaatcgacggcagcgtgagcagcagcgagagaatccacctggtgaaccagttccagaaggaccccgacaccagagtggccatcctgagcatccaggccgccggccagggcctgaccttcaccgccgccagccacgtggtgttcgccgagctgtactgggaccccggccacatcaagcaggccgaggacagagcccacagaatcggccagtgcagcagcgtgaacatccactacctgatcgccaacggcaccctggacaccctgatgtggggcatgctgaacagaaaggcccaggtgaccggcagcaccctgaacggcagaaaggagaagatccaggccgaggagggcgacaaggagaagtgggacttcctgcagttcgccgaggcctggacccccaacgacagcagcgaggagctgagaaaggaggccctgttcacccacttcgagaaggagaagcagcacgacatcagaagcttcttcgtgccccagcccaagaagagacagctgatgaccagctgcgacgagagcaagagattcagagaggagaacaccgtggtgagcagcgaccccaccaagaccgccgccagagacatcatcgactacgagagcgacgtggagcccgagaccaagagactgaagctggccgccagcgaggaccactgcagccccagcgaggagacccccagccagagcaagcagatcagaacccccctggtggagagcgtgcaggaggccaaggcccagctgaccacccccgccttccccgtggagggctggcagtgcagcctgtgcacctacatcaacaacagcgagctgccctactgcgagatgtgcgagaccccccagggcagcgccgtgatgcagatcgacagcctgaaccacatccaggacaagaacgagaaggacgacagccagaaggacaccagcaagaaggtgcagaccatcagcgactgcgagaagcaggccctggcccagagcgagcccggccagctggccgacagcaaggaggagacccccaagatcgagaaggaggacggcctgaccagccagcccgagcagtggaagagcagcgacaccctgcccgtgtacgacaccctgatgttctgcgccagcagaaacaccgacagaatccacatctacaccaaggacggcaagcagatgagctgcaacttcatccccctggacatcaagctggacctgtgggaggacctgcccgccagcttccagctgaagcagtacagaagcctgatcctgagattcgtgagagagtggagcagcctgaccgccatgaagcagagaatcatcagaaagagcggccagctgttctgcagccccatcctggccctggaggagatcaccaagcagcagaccaagcagaactgcaccaagagatacatcaccaaggaggacgtggccgtggccagcatggacaaggtgaagaacgtgggcggccacgtgagactgatcaccaaggagagcagacccagagaccccttcaccaagaagctgctggaggacggcgcctgcgtgcccttcctgaacccctacaccgtgcaggccgacctgaccgtgaagcccagcaccagcaagggctacctgcaggccgtggacaacgagggcaaccccctgtgcctgagatgccagcagcccacctgccagaccaagcaggcctgcaaggccaacagctgggacagcagattctgcagcctgaagtgccaggaggagttctggatcagaagcaacaacagctacctgagagccaaggtgttcgagaccgagcacggcgtgtgccagctgtgcaacgtgaacgcccaggagctgttcctgagactgagagacgcccccaagagccagagaaagaacctgctgtacgccacctggaccagcaagctgcccctggagcagctgaacgagatgatcagaaaccccggcgagggccacttctggcaggtggaccacatcaagcccgtgtacggcggcggcggccagtgcagcctggacaacctgcagaccctgtgcaccgtgtgccacaaggagagaaccgccagacaggccaaggagagaagccaggtgagaagacagagcctggccagcaagcacggcagcgacatcaccagattcctggtgaagaagtag

SEQ ID NO: 105069 - DNA, 1794 bp, Artificial Sequence
  derived and/or modified sequence
atgaccagctgcgacgagagcaagagattcagagaggagaacaccgtggtgagcagcgaccccaccaagaccgccgccagagacatcatcgactacgagagcgacgtggagcccgagaccaagagactgaagctggccgccagcgaggaccactgcagccccagcgaggagacccccagccagagcaagcagatcagaacccccctggtggagagcgtgcaggaggccaaggcccagctgaccacccccgccttccccgtggagggctggcagtgcagcctgtgcacctacatcaacaacagcgagctgccctactgcgagatgtgcgagaccccccagggcagcgccgtgatgcagatcgacagcctgaaccacatccaggacaagaacgagaaggacgacagccagaaggacaccagcaagaaggtgcagaccatcagcgactgcgagaagcaggccctggcccagagcgagcccggccagctggccgacagcaaggaggagacccccaagatcgagaaggaggacggcctgaccagccagcccgagcagtggaagagcagcgacaccctgcccgtgtacgacaccctgatgttctgcgccagcagaaacaccgacagaatccacatctacaccaaggacggcaagcagatgagctgcaacttcatccccctggacatcaagctggacctgtgggaggacctgcccgccagcttccagctgaagcagtacagaagcctgatcctgagattcgtgagagagtggagcagcctgaccgccatgaagcagagaatcatcagaaagagcggccagctgttctgcagccccatcctggccctggaggagatcaccaagcagcagaccaagcagaactgcaccaagagatacatcaccaaggaggacgtggccgtggccagcatggacaaggtgaagaacgtgggcggccacgtgagactgatcaccaaggagagcagacccagagaccccttcaccaagaagctgctggaggacggcgcctgcgtgcccttcctgaacccctacaccgtgcaggccgacctgaccgtgaagcccagcaccagcaagggctacctgcaggccgtggacaacgagggcaaccccctgtgcctgagatgccagcagcccacctgccagaccaagcaggcctgcaaggccaacagctgggacagcagattctgcagcctgaagtgccaggaggagttctggatcagaagcaacaacagctacctgagagccaaggtgttcgagaccgagcacggcgtgtgccagctgtgcaacgtgaacgcccaggagctgttcctgagactgagagacgcccccaagagccagagaaagaacctgctgtacgccacctggaccagcaagctgcccctggagcagctgaacgagatgatcagaaaccccggcgagggccacttctggcaggtggaccacatcaagcccgtgtacggcggcggcggccagtgcagcctggacaacctgcagaccctgtgcaccgtgtgccacaaggagagaaccgccagacaggccaaggagagaagccaggtgagaagacagagcctggccagcaagcacggcagcgacatcaccagattcctggtgaagaagctgcacgagagccacaaggtgaccggcgccgagcagggcctgcaggtgagcggcctgcccgacagcgccgcccccgagggcggcgccgcccacaccaacgaccagagaagatgccagagaatgaagcagcccctgaccgaggtgcagatcctgagccacagcagctag

SEQ ID NO: 105070 - DNA, 1797 bp, Artificial Sequence
  derived and/or modified sequence
atgacgtcctgtgacgaatctaaaaggtttcgggaggaaaacaccgtcgtgagctcggaccctacaaaaaccgccgcgcgggatattatcgactacgagtcagacgttgagccagagaccaaaaggttaaagctggcagctagcgaagatcactgctccccatccgaggagaccccatctcagtccaagcagatcaggacaccccttgttgagtccgtacaggaagccaaggcacagttgactaccccggccttcccagtcgaaggctggcaatgcagtctatgcacttacatcaacaattccgaactgccgtattgcgaaatgtgcgagacacctcagggatccgcagtgatgcaaattgattccttgaaccatatccaggataaaaacgagaaggacgactcacagaaagacacatctaaaaaagtgcagacaatctcggattgtgagaaacaggctctggcacagtctgagcctggacagctcgccgactcaaaggaagaaacccccaagatcgagaaggaagatggcctcactagccagccagaacaatggaagagcagcgacacacttcctgtgtatgacactctgatgttttgtgctagccgtaataccgatcgcatccacatttatacaaaagatggcaagcaaatgtcatgcaactttatccctttggacattaagttggatctctgggaggacctgcccgcctcttttcagttaaagcagtacaggagtctgattctgaggttcgtccgggagtggtcttctctgacagctatgaaacagaggattattaggaagagcgggcagttgttttgctctccaatcctggctctcgaagagatcactaaacagcagactaagcagaactgcacaaagagatacattactaaggaggacgtcgcggtggcttccatggacaaggtgaagaacgtgggcggccacgttcgcctgattacaaaggagtcccgccctagggacccttttactaagaagctcctagaggacggtgcttgtgttcctttcctcaatccttacaccgtccaggcagatctcacggtgaagccctcaacgtcgaaaggttatctacaagccgttgacaacgagggaaatcctctctgccttagatgtcagcagccaacctgccagacaaaacaggcatgcaaagctaacagctgggattctcggttctgctcactcaaatgtcaggaagaattttggatcagatcgaataattcctacctccgggctaaggtcttcgagacagaacacggcgtgtgtcagctttgcaacgtgaacgctcaggaactgttccttaggttgagggatgcccctaaaagccagcgcaaaaacctcctttatgctacctggacaagtaaattaccacttgagcagttgaacgagatgataagaaatccgggcgagggccacttttggcaagtggaccacataaaacccgtctacggcgggggaggacagtgttctctcgataacttgcagaccctgtgcaccgtgtgtcataaggaacgcacagccaggcaggccaaggagagaagccaggtgagaaggcaatctctggcttccaagcacggctcagatattacacgatttcttgtgaaaaagaagctccatgaatcccacaaagtgacgggcgcagagcaaggcttacaagtatccggtctgccagattcggctgctccagagggaggggcggcccacactaacgaccagagacgctgtcagcgtatgaaacaaccactgaccgaagtgcaaattctcagccactcctcgtag

SEQ ID NO: 105071 - DNA, 3234 bp, Artificial Sequence
  derived and/or modified sequence
atgccccgagtacataatattaagaagagccttacaccccacattagctgtgtcacaaacgagtccgacaatctgctagatttcttacctgaccgcctccgagccaagctcctcccatttcagaaagacgggattattttcgcccttaagcggaatgggcggtgtatggtggccgatgagatgggcctcggtaagaccatccaagccatagggattacgtatttttacaaggaggaatggccattactgatcgtggtgccatccagtctgaggtacccctggactgaggagatcgagaaatggattcccgaattaagccccgaggagatcaatgtcatccagaataaaacagatgtgagacgcatgagcacatccaaagtgactgtcctcggctacggcttacttactgctgacgcgaagacccttattgacgctctgaataaccagaactttaaagtagtgatcgtggacgaaagccattacatgaaatcccgaaatgccacccgatccaggatattgttacccatcgtgcagaaagcgaggagagccatcttgctaacaggcactcccgcactggggaggcctgaggagctgtttatgcaaattgaagccctctttcctcaaaagttcgggcggtggaccgactacgcgaagcgctattgtaatgcccacatccgttatttcggaaagaggcctcaatgggactgtcgcggcgcatccaaccttaacgaactgcaccagcttttgtcggacatcatgattagacgccttaaaaccgaagttttgacccagcttcctcccaaggtcagacagaggattcccttcgatctaccatcggccgccgcaaaagaattgaatacatcttttgaggagtgggagaagatcatgagaaccccaaacagtggagcaatggagaccgtgatgggattgatcacccgaatgttcaaacagaccgctatcgccaaagcaggtgccgtgaaggactacatcaagatgatgctgcagaacgattctctgaaattcctggtgttcgctcatcatttatcaatgctccaggcctgtaccgaggctgtaattgaaaacaaaacaaggtacatacgcatcgatgggtcagtgagcagctctgagcgaatacaccttgtgaatcagttccagaaggatcccgacacaagggtggctatactttctatccaggccgcaggacagggcctcacattcactgcagcttcccatgtggtattcgcggaactctattgggacccagggcacattaaacaagctgaggatagagcacaccgaattggccaatgttcgagcgttaacattcactatcttattgctaatggtactctggatacactcatgtggggaatgctgaacagaaaggcccaggtgacaggttccaccctcaacggtaggaaggagaagattcaagcagaagagggtgataaggagaagtgggattttctacagtttgcggaagcctggacccccaatgacagctctgaggagcttcggaaggaagctctcttcacccatttcgaaaaggagaagcagcatgatatcaggagcttctttgtcccacagcctaagaaacgacagctgatgacttcctgcgacgagagcaagagatttcgcgaggagaacactgtggtgtcatccgaccccacaaaaacagcggcgcgagatatcatcgactacgagtcagatgttgaacccgagacgaaaagactcaagctggctgcgtcagaggaccactgcagcccttccgaggaaacacctagtcagagtaaacagattcggacaccattggtggagtccgttcaggaagcgaaggcacagctcacgaccccagctttcccagtggaggggtggcaatgcagcttgtgcacttacataaacaactctgaattgccctactgtgaaatgtgtgaaaccccgcagggcagcgctgtgatgcaaatagatagtctgaaccacatacaggataaaaacgagaaagacgatagccagaaggacacatcaaaaaaggtgcagacaatcagtgattgtgaaaagcaggcattggcacagagtgagccaggccaactggccgacagtaaggaggagacccctaagatagagaaagaagatggcttgacctcacagcccgagcagtggaaaagttccgacaccctgcccgtatacgacacattaatgttctgcgccagccgcaatacggacagaatacacatttacaccaaagacggaaaacaaatgtcgtgcaacttcatccccctggatattaaactggatctctgggaggatctccccgcctcatttcagctgaagcagtacaggagcctcatcctaaggtttgtccgagaatggagctcactcactgcgatgaagcaaagaatcatccgaaagagtggacagcttttctgcagcccaatcctggccctcgaagaaataaccaagcagcagaccaagcaaaactgcactaagcggtatatcaccaaggaggatgttgctgtggccagcatggacaaggttaagaacgtagggggacacgtccggctcatcactaaggagtcacgaccgagagacccgttcaccaagaaactcttagaggacggggcgtgtgttccatttttgaatccatataccgtgcaggccgacctgacagttaagcctagcacgtctaaaggctacctacaggcggtggataatgaaggcaatcctctgtgtctgagatgtcagcagcctacatgtcaaactaaacaggcctgtaaggcaaactcttgggacagccggttttgttctctcaaatgtcaagaagagttttggatccgatctaacaactcatacctgcgggccaaagtctttgagactgaacatggcgtctgtcagctgtgtaacgttaacgctcaagaactttttctgcgcctgagggacgcacccaagagccagagaaaaaatctgctttacgcgacttggaccagcaaattgcctctcgaacagctcaatgagatgatccgaaaccccggcgaaggacacttctggcaagtggaccatatcaagccagtgtacggaggtggtggacaatgcagtctggataatttgcagacactgtgtacagtctgccacaaagaacggacagcccgccaagctaaagagaggagccaggtccgcaggcagagtctcgccagcaagcatggaagcgacattacccggttcctagtaaagaagtag

SEQ ID NO: 105072 - DNA, 1797 bp, Artificial Sequence
  derived and/or modified sequence
atgacttcctgcgatgaatcgaaaaggttcagagaagagaatacggtggtgtcatccgatcccacgaagacggccgcaagggacatcatcgactatgagtccgatgtggagcctgaaacgaagcgtctgaaactagcagcgagtgaagatcactgtagcccttccgaagagacaccttcacaaagcaagcagattaggactccattagtggagtcagtgcaggaagccaaagcacagctgacaacccctgcatttccagttgagggatggcagtgttcactctgtacctatatcaacaatagcgagttgccttactgtgaaatgtgcgaaacccctcagggcagcgccgtgatgcagatcgattcactgaaccatatccaggacaagaacgaaaaggatgacagccagaaggatacttccaagaaagttcagacaatcagcgattgtgaaaaacaggccctggcccagagtgaacctggtcaactggccgattcaaaggaggaaacaccgaaaatcgaaaaggaggatggcctgaccagccaacccgaacagtggaagagttctgataccctgccggtatatgacacactcatgttttgtgctagtagaaatactgatcgcattcacatttacactaaagatggaaagcagatgagctgtaattttattccactcgacatcaagctggatctctgggaggatctccctgcatcctttcagctcaaacagtaccggagtcttatcctgaggttcgtgagagagtggtcatccctgacagcgatgaagcagagaattattcgcaaatccggacaactgttttgctctccaatcttagcccttgaggagataacaaaacagcaaaccaagcaaaattgtaccaaaaggtatatcactaaagaggatgtggcggtggccagtatggacaaagtcaagaatgtggggggtcatgtccggctgattaccaaggagtctaggcctagggatccgttcacaaaaaagctactggaagacggagcttgcgtcccattcctaaacccctacaccgtacaggcagatcttacagtgaaaccatcaacatcaaagggatacctgcaggcagttgataatgaaggtaatccactctgcctgagatgtcagcaacccacctgtcagacgaagcaggcctgtaaggccaacagttgggatagtcgcttttgttcactcaagtgccaggaggaattctggatccgatcgaataactcatacctgagggcaaaggtttttgagacggagcacggggtctgtcagctctgtaatgtgaatgcccaagagctgtttcttagactgcgggatgcccccaagtctcaaaggaaaaacttgctctacgccacttggacgtcaaagctccctctggaacagctgaacgagatgatccgaaacccgggcgagggccatttctggcaggtagaccacattaagcccgtttacggggggggagggcagtgttcgttagacaatctacagaccctgtgcactgtgtgccacaaggagcgcaccgccagacaggccaaggaaagatcacaggtgcggcggcagagcctggcttctaagcacggcagtgacatcacccgctttttggaaacatcaaagctgcatgagagccacaaagtgactggcgcagagcagggtctccaggtatccggcctgccagactccgccgctccggagggcggtgccgcacacaccaacgatcaacggcgttgccaacgcatgaagcagccgctaacagaggtgcaaatcctgtcgcactcaagctag

SEQ ID NO: 105073 - DNA, 3234 bp, Artificial Sequence
  derived and/or modified sequence
atgccacgcgtgcacaacataaagaaaagcctgaccccccacatcagttgtgtgacaaatgaatctgataacttacttgattttcttcccgatcggttacgcgcgaagttgctccctttccagaaagatggaatcatcttcgcactcaagcggaatggaagccgaatcgattgtgaccagatggggcttggaaagaccatacaggcaatcggcataacctatttttataaggaggagtggcctctgctgattgtcgtgccgtcatcactacgctacccttggaccgaggaaattgaaaaatggataccagagctgtctcccgaagaaattaatgtcatacagaacaagacagacgtgcggcgtatgagcacttccaaagtgacagtcctgggttacggcctgcttactgccgatgcgaaaacgctcatcgatgccctgaacaaccaaaactttaaggtagttattgtggacgagtctcactacatgaaatcccgcaacgccactaggagccgaatcctgttacccattgtgcaaaaagcccgccgggctatcctattgaccggtaccccagccctaggccgccctgaggagcttttcatgcaaatagaggcacttttccctcagaagtttggacggtggaccgactacgccaagcggtattgtaacgcccacatcagatactttgggaaacggccccaatgggactgtagaggcgcctctaatttaaatgaacttcaccaactgctgtctgacatcatgatccggcgtcttaagaccgaagtgctcactcaattgccccccaaggttagacagcggatcccttttgacctaccatcagccgcagccaaagagctgaacacctcttttgaggagtgggagaaaatcatgagaaccccaaactccggcgccatggaaactgtaatgggactaatcacgcgaatgttcaaacagacggcgatagcaaaggcgggggcggtcaaggactatatcaagatgatgctgcagaacgactccctgaagtttttagtttttgcccatcacctttctatgcttcaggcctgcacagaagcagtcatcgagaacaaaactcggtacattcgaatagacggtagcgtgagctcctctgaacgtatccatctggtgaatcagttccagaaggatccggatacccgcgtcgccatcctctctatccaggcagcgggccagggactcacattcacagcagcgagtcatgttgtcttcgccgaactctactgggatcccgggcacataaaacaagcagaggaccgggcacacagaatagggcagtgttcttccgtgaacatccattatttaatcgcgaacggaaccctggatactttgatgtgggggatgcttaaccggaaagcacaggtgaccggttcaaccttgaacgggagaaaggaaaagatccaagctgaggagggtgacaaagagaagtgggactttttgcagttcgcagaggcttggacaccaaacgacagtagcgaggaattacggaaggaagccctcttcacccacttcgagaaagagaaacagcatgacatcaggtctttcttcgtgcctcagcccaagaaacgtcagctgatgacctcatgtgatgaaagtaagagatttcgcgaggagaatactgtcgtcagcagtgaccccactaaaacagcagcacgggatattatagactacgagagtgatgtggagcccgaaactaagcggcttaagcttgctgcgtcagaagatcactgctctccaagtgaggaaacaccttcccagagtaaacagattcgtaccccactcgtagagagtgtccaggaagctaaggctcagttaactaccccagcattcccggtggagggatggcagtgctccttatgcacatatatcaataacagtgagctgccatactgcgaaatgtgcgagactccgcagggatccgcggtgatgcagatcgactcgctcaatcacatccaggataaaaatgagaaggatgatagccagaaggacacctcgaagaaagtccagacaattagcgattgtgagaaacaggcactggctcaaagcgagcctggacagctcgctgactctaaagaggagactccaaagattgaaaaggaggacggtctcacatctcagcccgagcagtggaagtctagcgatacccttcctgtctacgatacactcatgttctgcgctagccggaacactgatcgcatacacatatatactaaggatggtaaacagatgtcctgcaacttcatccctcttgacataaagctggacctgtgggaagatcttcccgcatccttccagctgaaacagtaccggtcgctgattcttcgttttgttagagaatggtcgagtctaacggctatgaagcaacggatcatccgcaaaagcggccagctattttgcagtccaatcctggccttggaagaaatcaccaagcagcagacaaagcaaaactgcaccaagagatatataacaaaggaggacgtcgctgtggcatctatggataaggtgaagaatgtgggcggacatgtccggctcatcacaaaggagtccagacctagggatccatttaccaagaaactgctggaagatggggcctgtgtgcctttcctgaacccttacaccgtgcaggccgacctcacagtcaaaccatctacttccaaggggtatttgcaggccgtggataacgaaggaaacccgctgtgcctcaggtgccagcagcccacatgtcagactaagcaggcgtgcaaagctaattcttgggattcccggttctgttccctcaagtgccaagaggagttttggattcgaagcaacaacagctatctgagagcgaaagtgttcgagactgagcacggagtctgtcaactgtgcaatgtaaacgcacaggagttgtttcttcgcttgagggacgcccccaagtctcaacgaaaaaacctcctctacgccacatggaccagcaaattaccgttggaacagctcaatgaaatgattcggaatccaggcgagggacacttttggcaagtggatcacatcaaacctgtgtatgggggaggaggacagtgcagtctggacaatttgcagacactgtgtacagtatgtcataaggagcgcaccgcgagacaggctaaagagagaagccaggtgcgtagacagtccctcgcctccaagcacggatctgatattacccgctttctggtgaaaaagtag

SEQ ID NO: 105074 - DNA, 1794 bp, Artificial Sequence
  derived and/or modified sequence
atgacatcctgcgatgaaagcaagcggtttcgcgaggagaatacagtggtttcgtccgatcccacaaagactgccgctagagatatcatcgactatgaaagcgacgtggaaccagaaactaaaagactcaagctagccgcatccgaggatcattgttcaccgtccgaagagactccttctcagtcaaagcagatccgcactcctctggtggaatccgttcaagaggctaaggcccagctgacaacccctgccttcccggtggaaggctggcagtgttctctatgcacttatatcaataatagtgagctcccatattgtgagatgtgcgaaactccacagggatccgccgtgatgcagatcgactccctaaaccacatccaggataagaatgaaaaggatgatagtcagaaagacacgtcaaagaaggttcagaccatctccgactgcgagaagcaagccctcgcacagagcgaacccgggcagctcgccgattccaaggaggaaaccccaaaaatcgagaaggaagacgggctgacaagccagcccgaacagtggaagtcctccgataccctgcccgtttatgatactctgatgttttgcgctagtaggaacactgaccgaatccacatctatacgaaagacggaaaacagatgagttgtaattttatccctcttgacatcaagcttgatctttgggaggatttgccggcatccttccagctgaaacagtaccgatcactgatcctgcgcttcgtccgagaatggagcagcctaacggcaatgaaacaaaggatcatcagaaaaagtgggcaactcttctgctcgccgattctggccctcgaggaaataactaagcaacaaacgaagcaaaattgtacgaagaggtacattaccaaggaggatgtagctgtggctagtatggacaaggtgaaaaacgtagggggccatgtaagacttatcaccaaggaaagcagacctagagacccctttacaaagaagctgcttgaagacggggcctgtgtgccatttctcaatccatacactgtccaggccgatctgacagtgaaacctagtacatccaagggctacttacaggccgtggacaacgaaggaaaccccttgtgcctgcggtgccagcagccaacttgccagacgaaacaggcttgtaaggctaactcatgggattcacggttctgttccttaaaatgccaagaggagttttggattagaagcaacaactcctatttacgggcaaaggtcttcgaaaccgagcacggagtctgtcagctctgcaacgtgaacgctcaggaactctttctgcgcttgcgcgatgcccccaaatcccagcggaagaatctgctctacgccacatggacctcaaagctgccgctagaacaactcaatgagatgatccggaacccgggagaaggtcacttctggcaggtggaccatatcaaacctgtgtacggaggcgggggtcagtgctctttagacaatctgcaaaccctatgtacagtgtgccacaaggaacgcacagctcggcaggcaaaagagcgcagccaggtccgaaggcagtcattggcttctaaacatggctccgatatcacacgttttttggtgaaaaagctgcatgagagccataaagtcactggagcagagcagggacttcaggtgtcagggttaccggactcagctgctcccgaaggaggagccgcgcatacaaacgaccagcgaaggtgccagaggatgaagcagccgctgaccgaggtccagattctgtcacattcaagctag

SEQ ID NO: 105075 - DNA, 1797 bp, Artificial Sequence
  derived and/or modified sequence
atgaccagctgtgatgagagcaagcgcttccgggaggagaacacagtggtgtccagtgaccccaccaagacagctgcccgggacatcatcgactatgaaagtgatgtggagcctgagaccaagaggctgaagctggccgccagcgaggaccactgcagccccagcgaggagacccccagccagagcaagcagatccgcacccccctggtggagagcgtgcaggaggccaaggcccagctgaccaccccagccttccctgtggagggctggcagtgcagcctgtgcacctacatcaacaacagcgagctgccctactgtgagatgtgtgagaccccccagggcagcgctgtgatgcagattgacagcctgaaccacatccaggacaagaatgagaaggatgacagccagaaggacaccagcaagaaggtgcagaccatcagtgactgtgagaagcaggccctggcccagagcgagcccggccagctggccgacagcaaggaggagacccccaagattgagaaggaggatggcctgaccagccagcctgagcagtggaagagcagtgacaccctgcctgtgtatgacaccctgatgttctgtgccagcaggaacacagaccgcatccacatctacaccaaggatggcaagcagatgagctgcaacttcatccccctggacatcaagctggacctgtgggaggacctgcctgccagcttccagctgaagcagtaccgcagcctcatcctgcgctttgtgcgggagtggagcagcctgacagccatgaagcagaggatcatcaggaagagcggccagctgttctgcagccccatcctggccctggaggagatcaccaagcagcagaccaagcagaactgcaccaagcgctacatcaccaaggaggatgtggccgtggcctccatggacaaggtgaagaatgtgggcggccacgtgcggctcatcaccaaggagagccggccccgggaccccttcaccaagaagctgctggaggatggagcctgtgtgcccttcctgaacccctacacagtgcaggccgacctgactgtgaagcccagcaccagcaagggctacctgcaggccgtggacaatgaaggcaaccccctgtgcctgcgctgccagcagcccacctgccagaccaagcaggcctgcaaggccaacagctgggacagccgcttctgcagcctgaagtgccaggaggagttctggatccgcagcaacaacagctacctgcgggccaaggtgtttgaaacagaacatggagtgtgccagctgtgcaatgtgaatgcccaggagctgttcctgcggctgagagatgcccccaagagccagaggaagaacctgctgtatgccacctggaccagcaagctgcccctggagcagctgaatgagatgatccggaaccctggagagggccacttctggcaggtggaccacatcaagcctgtgtatggaggcggcggccagtgcagcctggacaacctgcagaccctgtgcaccgtgtgccacaaggagaggacagcccggcaggccaaggagaggagccaggtgcggcggcagagcctggccagcaagcacggcagtgacatcacccgcttcctggtgaagaagaagctgcacgagagccacaaggtgactggagctgagcagggcctgcaggtgtctggcctgcctgattctgctgcccctgagggcggggccgcccacaccaatgaccagaggcgctgccagaggatgaagcagcccctgacagaggtgcagatcctgagccacagcagctag

SEQ ID NO: 105076 - DNA, 3234 bp, Artificial Sequence
  derived and/or modified sequence
atgccccgggtgcacaacatcaagaagagcctgaccccccacatcagctgtgtgaccaatgaaagtgacaacctgctggacttcctgcctgaccggctgcgggccaagctgctgcccttccagaaggatggcatcatctttgccctgaagagaaatggccgctgcatggtggctgatgagatgggcctgggcaagaccatccaggccatcggcatcacctacttctacaaggaggagtggcccctgctgattgtggtgcccagcagcctgcgctacccctggacagaggagattgagaagtggatccctgagctgagccctgaggagatcaacgtcatccagaacaagacagatgtgcggaggatgagcaccagcaaggtgacagtgctgggctacggcctgctgacagcagatgccaagaccctgattgatgccctgaacaaccagaacttcaaggtggtgattgtggatgagagccactacatgaagagcagaaatgccaccaggagccgcatcctgctgcccatcgtgcagaaggcccggcgggccatcctgctgaccggcaccccagccctgggccggcctgaggagctgttcatgcagatcgaggccctcttcccccagaagtttggccgctggacagattatgccaagcgctactgcaatgcccacatccgctactttgggaagaggccccagtgggactgccgcggggccagcaacctgaatgagctgcaccagctgctgagtgacatcatgatccggcggctgaagacagaggtgctgacccagctgccccccaaggtgcggcagaggatcccctttgacctgcccagcgctgctgccaaggagctgaacaccagctttgaggagtgggagaagatcatgaggacccccaacagcggggccatggagaccgtgatgggcctcatcaccaggatgttcaagcagacagccatcgccaaggccggggctgtgaaggactacatcaagatgatgctgcagaatgacagcctgaagttcctggtgtttgcccaccacctgtccatgctgcaggcctgcacagaagctgtgattgagaacaagacccgctacatcagaattgatggctctgtgagcagcagcgagcgcatccacctggtgaaccagttccagaaggaccctgacaccagggtggccatcctgagcatccaggccgccggccagggcctgaccttcaccgctgccagccacgtggtgtttgctgagctgtactgggaccccggccacatcaagcaggccgaggaccgggcccaccgcatcggccagtgcagctctgtgaacatccactacctgattgccaacggcaccctggacaccctgatgtggggcatgctgaacaggaaggcccaggtgacaggcagcaccctgaatggaaggaaggagaagatccaggccgaggagggggacaaggagaagtgggacttcctgcagtttgctgaggcctggaccccaaatgacagcagcgaggagctgaggaaggaggccctcttcacccactttgagaaggagaagcagcacgacatccgctccttctttgtgccccagcccaagaagaggcagctgatgaccagctgtgatgagagcaagcgcttccgggaggagaacacagtggtgtccagtgaccccaccaagacagctgcccgggacatcattgattatgaaagtgatgtggagcctgagaccaagaggctgaagctggccgccagcgaggaccactgcagccccagcgaggagacccccagccagagcaagcagatccgcacccccctggtggagagcgtgcaggaggccaaggcccagctgaccaccccagccttccctgtggagggctggcagtgcagcctgtgcacctacatcaacaacagcgagctgccctactgtgagatgtgtgagaccccccagggcagcgctgtgatgcagattgacagcctgaaccacatccaggacaagaatgagaaggatgacagccagaaggacaccagcaagaaggtgcagaccatcagtgactgtgagaagcaggccctggcccagagcgagcccggccagctggccgacagcaaggaggagacccccaagattgagaaggaggatggcctgaccagccagcctgagcagtggaagagcagtgacaccctgcctgtgtatgacaccctgatgttctgtgccagcaggaacacagaccgcatccacatctacaccaaggatggcaagcagatgagctgcaacttcatccccctggacatcaagctggacctgtgggaggacctgcctgccagcttccagctgaagcagtaccgcagcctcatcctgcgctttgtgcgggagtggagcagcctgacagccatgaagcagaggatcatcaggaagagcggccagctgttctgcagccccatcctggccctggaggagatcaccaagcagcagaccaagcagaactgcaccaagcgctacatcaccaaggaggatgtggccgtggcctccatggacaaggtgaagaatgtgggcggccacgtgcggctcatcaccaaggagagccggccccgggaccccttcaccaagaagctgctggaggatggagcctgtgtgcccttcctgaacccctacacagtgcaggccgacctgactgtgaagcccagcaccagcaagggctacctgcaggccgtggacaatgaaggcaaccccctgtgcctgcgctgccagcagcccacctgccagaccaagcaggcctgcaaggccaacagctgggacagccgcttctgcagcctgaagtgccaggaggagttctggatccgcagcaacaacagctacctgcgggccaaggtgtttgaaacagagcacggcgtgtgccagctgtgcaatgtgaatgcccaggagctgttcctgcggctgagagatgcccccaagagccagaggaagaacctgctgtatgccacctggaccagcaagctgcccctggagcagctgaatgagatgatcagaaatcctggagagggccacttctggcaggtggaccacatcaagcctgtgtatggaggcggcggccagtgcagcctggacaacctgcagaccctgtgcaccgtgtgccacaaggagaggacagcccggcaggccaaggagaggagccaggtgcggcggcagagcctggccagcaagcacggcagtgacatcacccgcttcctggtgaagaagtag

SEQ ID NO: 105077 - DNA, 1797 bp, Artificial Sequence
  derived and/or modified sequence
atgaccagctgtgatgagagcaagcgcttccgggaggagaacacagtggtgtccagtgaccccaccaagacagctgcccgggacatcatcgactatgaaagtgatgtggagcctgagaccaagaggctgaagctggccgccagcgaggaccactgcagccccagcgaggagacccccagccagagcaagcagatccgcacccccctggtggagagcgtgcaggaggccaaggcccagctgaccaccccagccttccctgtggagggctggcagtgcagcctgtgcacctacatcaacaacagcgagctgccctactgtgagatgtgtgagaccccccagggcagcgctgtgatgcagattgacagcctgaaccacatccaggacaagaatgagaaggatgacagccagaaggacaccagcaagaaggtgcagaccatcagtgactgtgagaagcaggccctggcccagagcgagcccggccagctggccgacagcaaggaggagacccccaagattgagaaggaggatggcctgaccagccagcctgagcagtggaagagcagtgacaccctgcctgtgtatgacaccctgatgttctgtgccagcaggaacacagaccgcatccacatctacaccaaggatggcaagcagatgagctgcaacttcatccccctggacatcaagctggacctgtgggaggacctgcctgccagcttccagctgaagcagtaccgcagcctcatcctgcgctttgtgcgggagtggagcagcctgacagccatgaagcagaggatcatcaggaagagcggccagctgttctgcagccccatcctggccctggaggagatcaccaagcagcagaccaagcagaactgcaccaagcgctacatcaccaaggaggatgtggccgtggcctccatggacaaggtgaagaatgtgggcggccacgtgcggctcatcaccaaggagagccggccccgggaccccttcaccaagaagctgctggaggatggagcctgtgtgcccttcctgaacccctacacagtgcaggccgacctgactgtgaagcccagcaccagcaagggctacctgcaggccgtggacaatgaaggcaaccccctgtgcctgcgctgccagcagcccacctgccagaccaagcaggcctgcaaggccaacagctgggacagccgcttctgcagcctgaagtgccaggaggagttctggatccgcagcaacaacagctacctgcgggccaaggtgtttgaaacagaacatggagtgtgccagctgtgcaatgtgaatgcccaggagctgttcctgcggctgagagatgcccccaagagccagaggaagaacctgctgtatgccacctggaccagcaagctgcccctggagcagctgaatgagatgatccggaaccctggagagggccacttctggcaggtggaccacatcaagcctgtgtatggaggcggcggccagtgcagcctggacaacctgcagaccctgtgcaccgtgtgccacaaggagaggacagcccggcaggccaaggagaggagccaggtgcggcggcagagcctggccagcaagcacggcagtgacatcacccgcttcctggagaccagcaagctgcacgagagccacaaggtgactggagctgagcagggcctgcaggtgtctggcctgcctgattctgctgcccctgagggcggggccgcccacaccaatgaccagaggcgctgccagaggatgaagcagcccctgacagaggtgcagatcctgagccacagcagctag

SEQ ID NO: 105078 - DNA, 3234 bp, Artificial Sequence
  derived and/or modified sequence
atgccccgggtgcacaacatcaagaagagcctgaccccccacatcagctgtgtgaccaatgaaagtgacaacctgctggacttcctgcctgaccggctgcgggccaagctgctgcccttccagaaggatggcatcatctttgccctgaagagaaatggcagcagaattgactgtgaccagatgggcctgggcaagaccatccaggccatcggcatcacctacttctacaaggaggagtggcccctgctgattgtggtgcccagcagcctgcgctacccctggacagaggagattgagaagtggatccctgagctgagccctgaggagatcaacgtcatccagaacaagacagatgtgcggaggatgagcaccagcaaggtgacagtgctgggctacggcctgctgacagcagatgccaagaccctgattgatgccctgaacaaccagaacttcaaggtggtgattgtggatgagagccactacatgaagagcagaaatgccaccaggagccgcatcctgctgcccatcgtgcagaaggcccggcgggccatcctgctgaccggcaccccagccctgggccggcctgaggagctgttcatgcagatcgaggccctcttcccccagaagtttggccgctggacagattatgccaagcgctactgcaatgcccacatccgctactttgggaagaggccccagtgggactgccgcggggccagcaacctgaatgagctgcaccagctgctgagtgacatcatgatccggcggctgaagacagaggtgctgacccagctgccccccaaggtgcggcagaggatcccctttgacctgcccagcgctgctgccaaggagctgaacaccagctttgaggagtgggagaagatcatgaggacccccaacagcggggccatggagaccgtgatgggcctcatcaccaggatgttcaagcagacagccatcgccaaggccggggctgtgaaggactacatcaagatgatgctgcagaatgacagcctgaagttcctggtgtttgcccaccacctgtccatgctgcaggcctgcacagaagctgtgattgagaacaagacccgctacatcagaattgatggctctgtgagcagcagcgagcgcatccacctggtgaaccagttccagaaggaccctgacaccagggtggccatcctgagcatccaggccgccggccagggcctgaccttcaccgctgccagccacgtggtgtttgctgagctgtactgggaccccggccacatcaagcaggccgaggaccgggcccaccgcatcggccagtgcagctctgtgaacatccactacctgattgccaacggcaccctggacaccctgatgtggggcatgctgaacaggaaggcccaggtgacaggcagcaccctgaatggaaggaaggagaagatccaggccgaggagggggacaaggagaagtgggacttcctgcagtttgctgaggcctggaccccaaatgacagcagcgaggagctgaggaaggaggccctcttcacccactttgagaaggagaagcagcacgacatccgctccttctttgtgccccagcccaagaagaggcagctgatgaccagctgtgatgagagcaagcgcttccgggaggagaacacagtggtgtccagtgaccccaccaagacagctgcccgggacatcattgattatgaaagtgatgtggagcctgagaccaagaggctgaagctggccgccagcgaggaccactgcagccccagcgaggagacccccagccagagcaagcagatccgcacccccctggtggagagcgtgcaggaggccaaggcccagctgaccaccccagccttccctgtggagggctggcagtgcagcctgtgcacctacatcaacaacagcgagctgccctactgtgagatgtgtgagaccccccagggcagcgctgtgatgcagattgacagcctgaaccacatccaggacaagaatgagaaggatgacagccagaaggacaccagcaagaaggtgcagaccatcagtgactgtgagaagcaggccctggcccagagcgagcccggccagctggccgacagcaaggaggagacccccaagattgagaaggaggatggcctgaccagccagcctgagcagtggaagagcagtgacaccctgcctgtgtatgacaccctgatgttctgtgccagcaggaacacagaccgcatccacatctacaccaaggatggcaagcagatgagctgcaacttcatccccctggacatcaagctggacctgtgggaggacctgcctgccagcttccagctgaagcagtaccgcagcctcatcctgcgctttgtgcgggagtggagcagcctgacagccatgaagcagaggatcatcaggaagagcggccagctgttctgcagccccatcctggccctggaggagatcaccaagcagcagaccaagcagaactgcaccaagcgctacatcaccaaggaggatgtggccgtggcctccatggacaaggtgaagaatgtgggcggccacgtgcggctcatcaccaaggagagccggccccgggaccccttcaccaagaagctgctggaggatggagcctgtgtgcccttcctgaacccctacacagtgcaggccgacctgactgtgaagcccagcaccagcaagggctacctgcaggccgtggacaatgaaggcaaccccctgtgcctgcgctgccagcagcccacctgccagaccaagcaggcctgcaaggccaacagctgggacagccgcttctgcagcctgaagtgccaggaggagttctggatccgcagcaacaacagctacctgcgggccaaggtgtttgaaacagagcacggcgtgtgccagctgtgcaatgtgaatgcccaggagctgttcctgcggctgagagatgcccccaagagccagaggaagaacctgctgtatgccacctggaccagcaagctgcccctggagcagctgaatgagatgatcagaaatcctggagagggccacttctggcaggtggaccacatcaagcctgtgtatggaggcggcggccagtgcagcctggacaacctgcagaccctgtgcaccgtgtgccacaaggagaggacagcccggcaggccaaggagaggagccaggtgcggcggcagagcctggccagcaagcacggcagtgacatcacccgcttcctggtgaagaagtag

SEQ ID NO: 105079 - DNA, 1794 bp, Artificial Sequence
  derived and/or modified sequence
atgaccagctgtgatgagagcaagcgcttccgggaggagaacacagtggtgtccagtgaccccaccaagacagctgcccgggacatcatcgactatgaaagtgatgtggagcctgagaccaagaggctgaagctggccgccagcgaggaccactgcagccccagcgaggagacccccagccagagcaagcagatccgcacccccctggtggagagcgtgcaggaggccaaggcccagctgaccaccccagccttccctgtggagggctggcagtgcagcctgtgcacctacatcaacaacagcgagctgccctactgtgagatgtgtgagaccccccagggcagcgctgtgatgcagattgacagcctgaaccacatccaggacaagaatgagaaggatgacagccagaaggacaccagcaagaaggtgcagaccatcagtgactgtgagaagcaggccctggcccagagcgagcccggccagctggccgacagcaaggaggagacccccaagattgagaaggaggatggcctgaccagccagcctgagcagtggaagagcagtgacaccctgcctgtgtatgacaccctgatgttctgtgccagcaggaacacagaccgcatccacatctacaccaaggatggcaagcagatgagctgcaacttcatccccctggacatcaagctggacctgtgggaggacctgcctgccagcttccagctgaagcagtaccgcagcctcatcctgcgctttgtgcgggagtggagcagcctgacagccatgaagcagaggatcatcaggaagagcggccagctgttctgcagccccatcctggccctggaggagatcaccaagcagcagaccaagcagaactgcaccaagcgctacatcaccaaggaggatgtggccgtggcctccatggacaaggtgaagaatgtgggcggccacgtgcggctcatcaccaaggagagccggccccgggaccccttcaccaagaagctgctggaggatggagcctgtgtgcccttcctgaacccctacacagtgcaggccgacctgactgtgaagcccagcaccagcaagggctacctgcaggccgtggacaatgaaggcaaccccctgtgcctgcgctgccagcagcccacctgccagaccaagcaggcctgcaaggccaacagctgggacagccgcttctgcagcctgaagtgccaggaggagttctggatccgcagcaacaacagctacctgcgggccaaggtgtttgaaacagaacatggagtgtgccagctgtgcaatgtgaatgcccaggagctgttcctgcggctgagagatgcccccaagagccagaggaagaacctgctgtatgccacctggaccagcaagctgcccctggagcagctgaatgagatgatccggaaccctggagagggccacttctggcaggtggaccacatcaagcctgtgtatggaggcggcggccagtgcagcctggacaacctgcagaccctgtgcaccgtgtgccacaaggagaggacagcccggcaggccaaggagaggagccaggtgcggcggcagagcctggccagcaagcacggcagtgacatcacccgcttcctggtgaagaagctgcacgagagccacaaggtgactggagctgagcagggcctgcaggtgtctggcctgcctgacagcgctgcccctgagggcggggccgcccacaccaatgaccagaggcgctgccagaggatgaagcagcccctgacagaggtgcagatcctgagccacagcagctag

SEQ ID NO: 105080 - DNA, 1797 bp, Artificial Sequence
  derived and/or modified sequence
atgaccagctgcgacgagagcaagcggttccgggaggagaacaccgttgtgtcgagtgaccccacaaagaccgctgcccgggacatcattgattatgagtcagatgtcgaacccgagaccaaacggcttaaactcgcagcaagtgaggaccactgctctccaagcgaggaaacaccatcgcagagcaaacagatccgcaccccgctggtcgagtctgttcaggaagcgaaagcccagctgaccacacccgctttcccagtggagggctggcagtgctccctgtgtacatacattaacaactccgagctgccttactgcgaaatgtgtgagacaccacagggtagcgcagtaatgcaaattgacagtcttaaccatatccaggacaaaaatgagaaggatgactcccagaaggacacaagcaaaaaggtgcaaacaatttccgactgcgagaaacaggccctagcccagagtgagcccggccaattggcagacagcaaagaagagactccaaagatcgaaaaagaggacggccttacctctcagcctgagcagtggaaatcttctgatacgcttcctgtctatgacaccttgatgttctgcgctagccggaacacagatagaatccacatttacaccaaagacggtaagcagatgtcttgcaatttcattccattggacatcaagctggacctatgggaagatcttcctgcgagctttcagctgaagcaataccggtcactcattcttcgattcgtccgagaatggtccagtctgacagctatgaaacagagaatcattcggaagagtggccagctgttttgtagtcctattttagccctggaggagattacaaaacagcagactaagcagaactgcaccaagaggtacatcactaaggaagatgtcgcagtggcaagcatggacaaggttaaaaatgtgggcggccacgttcgactgatcacgaaggagtctaggccccgcgacccttttaccaaaaagctcttagaagatggggcttgcgttcctttcctgaacccgtacactgttcaggcagacctgaccgtcaagcccagcacaagcaaaggatatctccaggcagtggacaatgaaggcaaccccctttgtttgcgttgccagcagccgacgtgccagaccaagcaggcttgtaaagctaattcctgggactcaagattctgcagcctcaaatgccaagaggaattctggattcgttcgaacaatagttatctgagagctaaagtatttgagacggagcatggggtgtgtcagttgtgcaatgtgaacgctcaggagctgtttctgcgccttcgagacgctccaaaatcccaaagaaaaaacctgttatacgcaacctggacgtcaaagttgccgttggagcagctcaacgagatgatccgcaatccgggagaaggtcacttctggcaggttgaccacataaagcctgtgtatggggggggcggtcagtgctctctggacaatctgcaaactctgtgcaccgtgtgtcataaggagcggactgctcgccaggcaaaagaaagatcacaggttcgccggcagtctttggcaagcaagcacggtagtgacattaccaggtttctggttaagaaaaagctgcatgaaagccacaaagtcaccggcgctgagcagggactccaggtctccggcctgcccgactccgcagccccagaaggcggtgcagcgcatacaaacgatcagagacggtgccaacgaatgaagcagcccctgacggaggtgcagattctgagccactcatcatag

SEQ ID NO: 105081 - DNA, 3234 bp, Artificial Sequence
  derived and/or modified sequence
atgccccgggtgcacaacatcaagaagagcctgaccccccacatcagttgtgtgactaatgagagtgataaccttctggattttctgcccgatcgattgcgagctaagttgctcccgttccagaaagacggcatcatctttgctctgaagcggaatgggcgttgtatggtggctgacgagatgggactgggtaaaactattcaggccattggaattacttatttctataaggaagagtggcctctgctcatagtcgtcccttcaagcttgcgctacccctggacggaggagattgagaaatggattcctgaattgagccccgaagaaatcaatgttatccagaacaaaacagacgtgaggcgcatgtccacctccaaggttaccgtgctcgggtatggtcttttaacggccgacgctaagactttaattgatgctctgaataaccagaatttcaaagtcgtcattgttgacgaatcccattatatgaaaagtcggaatgcaaccagatctcggatactacttcctattgttcagaaggctagacgggccatcctcctgacaggcacacccgccctcggtaggccagaggagttgttcatgcagatagaggcactctttccccaaaaattcggtagatggaccgattacgccaaacgatattgcaatgcacatatcagatattttggaaagcggcctcagtgggattgtcgtggggctagtaacctgaatgagttgcatcaactgctgtcggatatcatgatacgcagacttaaaaccgaggtcctcacccagcttccaccaaaagttcggcagcgtattccgttcgacctccccagtgccgccgccaaggagctgaatacatccttcgaggagtgggaaaaaattatgagaaccccaaacagcggcgccatggaaaccgtgatgggcctcataacgagaatgtttaaacagacagcgattgctaaagctggcgccgtgaaggattacattaaaatgatgctacagaatgatagcctcaagttcctagtgtttgcccatcacctgtcaatgctgcaagcttgtactgaagcagttatcgaaaacaagactaggtatatacgtattgacggtagcgtatcaagttcagaacgcatccacttggtgaatcaattccagaaggatcctgatacacgcgtggctattctgagcattcaagctgccgggcaaggcctaaccttcaccgcagcgagccatgtagtttttgcagaactctattgggatccagggcacatcaaacaggcagaagacagagcgcaccgtatagggcagtgtagcagcgtgaatatacactatctgattgcgaacggaacgctggataccctgatgtggggcatgttgaataggaaagcccaagtgaccggctcaaccctcaacggaagaaaggaaaagatccaggctgaggaaggagataaggagaagtgggacttcctgcagtttgccgaggcatggacccccaatgactcatccgaggaactgcgcaaagaagcattgttcacccactttgaaaaagagaaacagcatgacatccgatcattctttgtcccacagcccaagaaacgtcagctcatgacaagttgcgatgaatcgaaacgctttcgcgaggagaataccgtcgtgtccagtgaccctactaaaaccgctgcccgggacatcattgattacgagtcggatgtcgagccagaaacaaagcgccttaaactagctgcttctgaagaccactgctcgccctccgaggaaaccccaagccagtcaaagcagataagaacacctctagtcgaatccgttcaggaggccaaggctcagctgacaacccccgccttcccggtggaagggtggcagtgctctctctgcacttacataaataacagtgagctgccctactgcgagatgtgtgagactccgcagggatccgcagtgatgcagatcgactcactgaaccatattcaagataagaatgaaaaggatgactcacagaaagacacttccaaaaaggtccagaccataagcgattgcgaaaaacaggccttagcccagtctgaacctggccagttagccgattccaaggaggaaaccccaaagatcgaaaaggaagacggactcacgagtcagcccgagcagtggaagtcttctgataccctcccggtttacgatacactcatgttttgcgcttcccgtaacacagatcgtattcacatttacaccaaagatggaaaacagatgagttgtaattttatccctctagatataaaacttgacttatgggaagatctgcctgcatcatttcagctgaaacagtataggtcgctgattttgagattcgtgcgtgagtggtccagtttaactgcaatgaagcagcgcattattcggaaatccggccagctgttctgttccccaattctcgcgctcgaggagattaccaagcagcagacaaagcagaattgcactaagaggtacattacaaaggaggacgtcgctgtggcaagtatggacaaagtgaaaaacgtaggaggtcatgtgaggctcatcacaaaggaatcccgacccagagatccctttacgaagaagctgctcgaagacggcgcctgtgttccttttctcaatccttacaccgtccaggctgacctgacggtgaagccgagtacatcaaaagggtaccttcaggccgtagacaacgaaggaaacccgctgtgtctcaggtgccagcaaccgacttgtcaaactaagcaggcgtgtaaggctaattcatgggactcccgtttctgcagcctcaaatgtcaagaagagttctggatccgctccaacaatagttacctgagggccaaggtgtttgaaaccgagcatggcgtgtgtcagctctgcaacgtaaacgcccaggaactgttcctgaggctccgcgacgctcccaaaagccagcggaagaatctgttgtacgcaacctggacctccaagctccctctcgaacaactgaacgagatgatacgtaatccaggggaggggcatttttggcaagttgatcacattaaaccagtgtatggaggagggggtcagtgctctctggacaatctccaaactctttgtaccgtgtgccataaggagaggaccgccagacaggcaaaggagcggtcgcaggtccgtcgccagtctttagcatccaagcatgggtccgatattactagattcctagtgaagaaatag

SEQ ID NO: 105082 - DNA, 1797 bp, Artificial Sequence
  derived and/or modified sequence
atgaccagctgcgacgagagcaagcggttccgggaggagaacaccgtggttagctccgacccgactaagactgcagcgcgcgacatcatcgactacgagtcagacgttgagccagaaaccaagcgtctgaaattagctgcatctgaggaccattgtagcccctccgaggagactccatcacagagcaagcagatcaggacgcccctggtggagagcgtgcaggaggccaaagcacagctgacaaccccggcattccctgtggagggatggcagtgttcactgtgcacctatatcaataatagcgagctgccttattgtgaaatgtgcgagactccacagggcagcgctgtgatgcaaattgacagcttaaaccatatccaggataagaatgaaaaggatgacagccagaaggatacgagcaagaaggtgcagaccatctctgattgcgaaaagcaggctttggcccagtccgaacctggacagcttgccgatagtaaggaagaaacccccaaaattgagaaagaagacggcctgactagtcagcctgaacaatggaagtcctcagacacacttccagtctatgacacactcatgttctgcgctagccgcaacaccgatcggattcacatttataccaaggatggcaagcagatgtcttgtaacttcatcccgctggatattaagctggatttatgggaggacctgccagcatccttccagcttaagcagtatcgttcgttgattttacgcttcgtgagggagtggagctcactgaccgccatgaaacagaggatcatacgaaagagtggacagcttttctgcagcccgattctcgccttagaggaaatcaccaagcagcaaaccaagcagaattgtactaagagatacataactaaggaagatgtggctgtggcttcaatggacaaggtgaaaaacgtgggaggtcacgtaaggctgattaccaaggagtcacgaccccgggatcccttcacaaagaagctgttagaggatggtgcctgtgtaccttttcttaatccctacactgtgcaggccgatctcacagtgaagccatccaccagcaaagggtatctgcaagcggttgataatgaaggtaatccgttgtgtctacgatgccaacaacccacatgccagacaaagcaggcatgtaaggcaaacagctgggattccaggttttgctcactcaagtgccaagaggaattctggatccgctctaataatagctacttacgcgctaaggtctttgagaccgaacatggcgtctgccagctgtgcaatgtcaacgcccaggagctcttcctgagacttagggatgctcctaagtctcaaagaaagaacttactgtatgccacatggacttccaaattgccactcgaacagttaaacgaaatgatccggaatccgggagaaggtcatttctggcaggttgaccacatcaaacccgtgtatggggggggcggccagtgctctctggataacttacagacactgtgcacagtatgccacaaagaacgcacagcccgccaggccaaggaacgcagccaggtaagaaggcagagtctggcatcaaagcatggctcggatattaccaggttcttggagacatctaaactgcacgagtcccacaaggtcactggcgctgagcaaggactccaggtgagtggtctgcctgacagcgccgctccagagggtggagcagcccacacaaatgatcaacgacgctgtcagaggatgaaacagcccctcaccgaagttcagatactctcccatagctcctag

SEQ ID NO: 105083 - DNA, 3234 bp, Artificial Sequence
  derived and/or modified sequence
atgccccgggtgcacaacatcaagaagagcctgaccccccacatctcatgcgtcacaaacgaaagtgataatttgctggacttcctccccgatcggctgcgagctaagcttctgccattccaaaaggatggcatcatctttgcactcaaaagaaatggttcacgaatcgattgcgaccagatggggctcgggaagacaattcaggctattgggatcacctacttttataaggaggaatggccactgttaattgtcgtgcccagctctctgcgctacccctggaccgaggagatcgaaaagtggattccggagttgagtcctgaagagatcaacgtcattcaaaacaaaacagacgtgagacgtatgagcacttcgaaggtgacagtattgggctacggcctcctgaccgcggacgctaaaaccctcattgacgctctgaacaaccagaactttaaggtggttatagttgatgagtctcactatatgaaaagtcgaaatgctactcggtcccgaatcctcttacctatagttcagaaggcccggagagccatactcctgacgggtactccagctctgggacgaccagaagaactttttatgcagatcgaagccctgttcccccagaaatttggaaggtggacagattacgccaaacgatactgtaacgcccatatccgatattttggaaagcgaccacagtgggactgcagaggcgcttccaacctgaatgagctgcaccagcttctatcagacattatgataaggcgccttaaaaccgaagtgctgacccaactacctcctaaagtgaggcagaggatcccttttgatcttcccagtgccgcagctaaggagctcaacacctcattcgaagagtgggaaaagattatgagaactcccaacagtggggccatggaaacagtaatggggctgatcacgcgcatgttcaagcagaccgctattgctaaagccggcgctgttaaggattacataaaaatgatgctgcaaaacgattcccttaagtttcttgtgttcgcccaccatctctccatgctgcaagcctgtacagaagcggtgattgaaaacaaaacaagatacattcgaatcgatggcagtgtgtcaagctccgagcggatacatctggtcaaccaatttcagaaagatcccgatactcgagttgcaattctgagcatccaagctgccggacagggcctgactttcaccgctgcctcacacgtcgtgtttgcagagctctactgggacccgggccatattaagcaggctgaagaccgagcccaccggatagggcagtgttcatcggtgaatatccactacctgatcgctaatggcactctggacactctcatgtggggaatgttgaaccgcaaggcccaggtgactggttctactctaaatggtcgaaaagagaaaatacaggcggaagaaggagataaagaaaagtgggatttcctgcagttcgctgaagcgtggacgccaaacgattcatccgaggaacttcgaaaagaggctctatttacccactttgagaaggaaaagcaacacgatatccggagtttcttcgttcctcagccaaagaagcgccagctcatgactagctgtgacgaaagtaaaagattcagggaagaaaacacggtagtgagcagcgatcctacgaagactgccgcccgggacatcattgactatgaatccgacgtggaacctgaaaccaaacgcctcaagctagccgcttcagaggatcattgctcccccagtgaggagaccccaagtcagtctaaacagattcgcacgccgcttgtggaaagcgtccaggaagcgaaagcgcagctgactacccccgcgttccccgtggagggatggcaatgtagtttgtgtacatacataaacaacagcgaactcccttactgcgaaatgtgtgagactccacaggggtctgctgtcatgcagatcgacagtttgaaccatattcaagacaaaaatgaaaaggatgactctcagaaggataccagtaaaaaagttcagaccatatcagattgcgaaaaacaggctctggcacagtccgagcctgggcagttggccgattcgaaggaagagacccccaaaatcgaaaaagaggacggactgacttctcaacctgagcaatggaaatcttcagacactctgccggtatacgataccttgatgttttgcgcatcaagaaacacagacagaattcacatttacactaaggatggcaagcaaatgtcgtgtaattttattcccctggatataaaactggatctatgggaggacctgcctgcctcatttcaactgaaacagtatcggagcctcatcttaaggtttgtgagggagtggagcagtttaacagcaatgaagcagcggataattcgcaagtcgggacagctcttttgttcccctatcctagctctggaggaaatcaccaagcagcaaactaagcaaaactgcaccaaaagatatatcactaaggaagatgtggccgtagcctctatggacaaggtcaaaaatgtgggtggtcacgtccgcttgataaccaaggagtctagacccagagaccctttcacgaagaaactcctcgaggacggggcgtgcgtaccctttcttaacccttatactgtccaagcggacttgacggtcaagcctagcacctccaaaggatatctgcaggcggtagacaatgagggtaaccctttatgcctcagatgtcagcagccgacctgccaaaccaagcaggcatgcaaggcgaatagctgggatagcaggttctgctcattgaagtgccaagaagagttttggatcagatcaaataattcttacttacgagccaaggtgtttgagactgaacacggtgtgtgccagttatgtaacgtaaacgcccaagagctgtttctgcgcctgagagacgcgcctaagtcccagcgcaagaacctactttacgctacgtggacgagcaagctacctctggaacaacttaacgagatgatccggaatccgggagagggacacttctggcaggtggaccacatcaagcccgtctacggcggtggcgggcagtgttctctggacaatctccagacattatgcaccgtttgtcacaaagaaaggacagcccggcaagccaaggaaagatcccaggtgaggcgccagtcactcgcttctaaacacggttccgatataacacggtttctggtgaaaaagtag

SEQ ID NO: 105084 - DNA, 1794 bp, Artificial Sequence
  derived and/or modified sequence
atgaccagctgcgacgagagcaagcggttccgggaggagaacaccgtggtaagcagcgaccccaccaaaacagccgcccgcgacattattgattacgagagcgatgtcgagcccgaaacaaagagattaaagctggcggcaagtgaagaccactgttctccatcagaggagaccccaagccaaagcaaacagattaggacgccgcttgtcgagagtgtgcaggaggcgaaggcccaattgaccacacccgcttttccagtggaggggtggcagtgcagcttgtgcacatatattaataatagtgaactgccttactgtgaaatgtgcgagactccacaggggtccgccgtcatgcagatagacagcttgaatcatattcaggataaaaatgagaaagatgactcacagaaggacacgagtaagaaagtgcaaaccatctcagactgcgaaaaacaagctctcgcacaatcagagccaggccaactggcagactcaaaggaagagaccccgaaaattgagaaggaagatgggctgacttcccagccagaacagtggaagagcagcgatacgcttcctgtgtacgataccctgatgttctgcgcgagccggaacaccgaccgcatccacatttacaccaaagatggcaagcagatgtcttgcaactttatccccctcgatattaagttagacctttgggaagatctcccagccagtttccagctgaagcagtatagaagtctgatcctcaggtttgtgcgagagtggtcctccctgaccgcaatgaagcagcggattattaggaagagcggtcaactgttctgtagcccaattctggcactggaggaaataactaaacaacagactaagcaaaattgcacaaaacgctatatcaccaaggaagacgtggcagtagcttctatggataaggtcaagaatgtcggagggcatgtcagactgatcactaaggaaagccggccgcgcgacccgtttaccaaaaagctgctcgaagacggtgcatgcgtgcctttcctgaatccctacactgtgcaagctgatctgacagtgaagccttcaacgtctaaaggctatctgcaggccgtcgataacgaaggaaatccactgtgcttgcgctgccagcagccaacctgtcaaacgaagcaggcctgcaaagcaaacagctgggacagcaggttctgcagtcttaaatgtcaagaggaattctggatcaggtccaacaactcctatctgcgcgcaaaggtgtttgaaacggagcacggtgtatgccagctgtgtaacgttaacgctcaggaactcttcctgagactccgggacgcgcccaaatcgcagcgcaaaaatttgctgtatgccacctggacatcgaaactgccactcgaacagcttaatgaaatgattaggaaccccggcgagggccatttttggcaggtggaccacattaaaccagtatacgggggcggggggcagtgctcgttagataacttacagaccttatgtactgtttgccacaaagaacggacggcccgccaagctaaggagaggtctcaggtcaggagacaaagtctcgcaagtaaacacgggtccgatatcacccgattcctggttaagaaattgcatgagtctcacaaggtaaccggggccgaacaggggctgcaggtgtcagggctgcctgactcagctgcacctgaaggaggagcagcgcatacaaacgaccagcggcggtgccaaagaatgaagcagcctctgaccgaggtacagatcctgagtcactcatcctag

SEQ ID NO: 105085 - DNA, 1797 bp, Artificial Sequence
  derived and/or modified sequence
atgacttcctgcgacgagtccaaacggtttcgcgaggagaatacagtcgtgagcagcgacccaaccaagacagccgctagagatattatagattacgaatccgacgtcgaaccggagactaagcggctcaagcttgctgcaagcgaagatcattgttcaccctccgaggagacaccttctcagagtaagcagatccggacacccctggtggagtcagtgcaggaagcaaaggctcaactcacaacacccgcatttccagtggaaggctggcagtgctcattgtgcacctatattaataactctgaactcccctactgtgagatgtgcgagacaccccagggatccgccgtgatgcagatcgacagcctgaatcatattcaggataaaaacgaaaaggacgacagccaaaaggatacctcaaagaaagtgcagaccataagtgattgtgagaaacaggccctcgcccagagcgaaccgggtcagttggccgattcaaaagaggaaactcccaaaatcgagaaggaagatggactgacctctcagcctgaacagtggaaaagctctgacaccctgccagtgtacgacactttaatgttttgtgctagcagaaacacagaccgcattcacatctacacaaaggatggcaagcagatgtcatgcaattttatcccactcgatatcaagctggacctttgggaggacctgcccgctagcttccagttaaagcagtatcggagtctgatcctacggttcgtgagggagtggtcaagtctcactgcaatgaagcaaagaatcattcgcaaatccggtcagctgttctgttccccgattctggcactggaagagattaccaaacagcagaccaagcagaattgcactaaacggtacatcacaaaggaggatgttgctgttgcttccatggacaaagtcaaaaatgtaggtggacacgtgcggctgataacaaaggagtcccggcctcgggatccctttaccaagaaattgctggaagatggcgcttgtgttccattcctgaacccttatacagtacaagccgacctcacagtgaagccatcaacatccaaggggtatctacaggcagtagacaatgaaggcaacccactgtgtcttcgctgccaacagccaacatgccagacgaagcaggcctgtaaggcaaattcctgggattcccgattctgttccctgaagtgtcaagaagagttctggatcagatctaataatagctaccttagagcaaaagtgtttgagactgaacacggggtctgccagctatgtaacgtcaacgcccaagagctgtttcttcgcctgagggatgcccctaaaagccaaaggaagaaccttctgtacgcaacatggacctctaagctgccgttggaacagcttaatgaaatgattcgcaatccaggggaaggccatttctggcaggtggaccatattaaaccggtgtatggaggcggtgggcagtgctcactagacaacctccagacactctgcaccgtttgccacaaggagcgaactgccagacaggccaaggagagatcacaagtgaggagacaaagtctagctagcaagcatggctccgatatcactcggtttctcgtcaaaaagaaactccatgagtcacataaggtcactggtgctgagcagggcctgcaggtgagcgggctgcccgacagcgcggcaccagaaggtggcgctgcacatactaatgatcaacgcagatgtcaaagaatgaagcagcccttgacagaagtccaaatcctctctcattcttcgtag

SEQ ID NO: 105086 - DNA, 3234 bp, Artificial Sequence
  derived and/or modified sequence
atgccacgcgttcataacatcaaaaaatctctgaccccacacatttcttgcgttactaacgagtcagataatttgctggacttcctgcccgaccgcttgagagctaaactactcccgttccagaaagacggaatcatatttgcattgaagaggaatggtagatgcatggtggccgatgagatgggcctaggaaagaccatacaggcaattgggattacatatttctataaagaagagtggccgctgctgatcgtcgtgccatcatccttgaggtatccatggaccgaagaaatcgagaaatggatacctgaattatctccagaagagatcaacgtaattcaaaataagactgacgtgcgccgtatgagtaccagtaaagtcaccgtgctaggttacgggcttctgacagccgatgccaaaacactgatcgatgcgctcaataaccagaacttcaaagtggtcatcgtggacgagagtcactacatgaagagcaggaacgccacccggtcccgaattctcctgccgattgtacagaaagccagaagagctattctcctcacaggcacacctgccctgggtcgtcctgaagagctgttcatgcaaattgaagctctgttccctcaaaaattcgggaggtggacggattacgcaaaacgatactgtaatgctcatatccgatacttcgggaagcgaccccagtgggactgcaggggtgcatcaaacttgaatgagctgcaccagctgctgagcgacataatgatacgtcggcttaaaaccgaggttttaacccagctgcctcccaaggtccggcaacgtatacccttcgatctgccttcagccgctgcgaaagaactgaacactagtttcgaggagtgggaaaagatcatgagaaccccaaactccggcgcaatggaaaccgtgatgggtctgattacaaggatgttcaaacagaccgcaatcgcaaaagctggagccgtcaaagactatatcaaaatgatgctccagaatgacagtctaaagtttcttgtgtttgctcatcatctgtctatgttgcaagcgtgcactgaagcagtcatcgaaaacaaaacccgctatattagaattgatggctctgtcagcagtagcgagcggatccacctggtcaatcagtttcagaaggatcctgatacccgggttgctattctgtctatccaagctgctgggcaagggctcaccttcacggcggctagccacgtagtctttgctgagctgtattgggatcctggccacattaaacaggctgaagacagagcacatcgaatcggtcagtgctcatctgtcaatatccattatctcatcgctaacgggactttagatacattaatgtgggggatgctgaatagaaaggcgcaagtgaccggtagcactttaaacgggcgtaaggagaagattcaggccgaggagggcgataaggaaaagtgggacttcctgcagttcgcagaggcctggacccccaatgattcaagtgaggagttgcgcaaggaagcattattcacacatttcgaaaaggaaaaacagcatgatattagaagcttctttgttccacagccgaaaaaaagacagttgatgacctcttgtgatgaaagcaaaagatttcgcgaggagaataccgtagtcagctccgatccgaccaaaaccgctgcacgcgacatcattgattatgagtcagatgtcgaacccgaaacaaaaaggttgaaactggcagcgagcgaggatcattgctctccaagtgaggagacgcccagccagagcaagcagatccgcacaccgcttgtggagagcgtacaggaggcgaaggctcagttgaccacccccgctttcccggttgagggctggcaatgctcactttgcacctatatcaacaacagcgagctgccctattgtgaaatgtgcgagactcctcaggggtctgccgtaatgcagatagactctctcaatcatatacaagacaaaaacgagaaggatgactctcagaaggacacttctaaaaaggttcaaacgatcagtgattgcgagaagcaggccctggcacagtctgagcctggccagctggcggacagcaaagaggagacacctaagatcgagaaagaggacgggctaacatcgcagccagagcagtggaagtcgagtgacaccctgcctgtgtatgacactctgatgttctgcgcatcgcggaacacggatcgaatccatatttataccaaagatgggaagcagatgtcatgtaactttatcccacttgatatcaaattggacctgtgggaggatctccctgcctccttccaactaaagcaatacaggagcctgatactccgctttgtgagagaatggagctctctgacagctatgaagcaaaggatcatccgcaagagcgggcagctgttctgctcacccatcctggccctggaggagatcaccaaacagcagaccaaacagaactgtaccaagagatatatcaccaaagaggacgtcgcggtggccagcatggacaaggttaaaaatgtcggcggacacgtgcgactgataaccaaggagtcgagacctcgggatcctttcaccaaaaagctgctcgaggatggagcctgcgtgccttttctgaacccctacacagtacaggccgatttaactgtgaaaccctcaacaagcaagggctacctccaggccgtggataatgagggcaatccattgtgcctgagatgccagcaacccacttgccagaccaagcaagcatgcaaggccaacagctgggattcgaggttttgcagcctgaaatgtcaggaagagttctggattcgttccaataattcatacctgagggccaaggtgttcgagaccgaacacggagtgtgtcaactgtgcaacgtgaatgcccaggaattgtttctgcggttgagagatgctccaaaaagccagcggaaaaacctattgtatgcaacctggaccagtaagctgcctctcgaacagttgaatgaaatgatcaggaatccaggggaggggcacttttggcaggtggatcatataaaaccagtctacggaggcggtggccagtgcagcttggataatctgcagactctgtgtacagtctgtcataaggagagaaccgcgagacaggctaaggaaaggagccaggtgaggaggcagtcgctagctagcaagcacggatccgacattactagattcctggtcaaaaaatag

SEQ ID NO: 105087 - DNA, 1797 bp, Artificial Sequence
  derived and/or modified sequence
atgacctcttgtgatgagagtaagaggtttcgcgaagagaatacagtggtatccagcgatcccaccaagaccgccgctcgcgatattattgactacgagtctgacgtcgaaccggagactaagcgcctcaaacttgctgcctccgaagatcactgcagcccatccgaggaaactccaagccaatcaaaacaaataaggacccctcttgtggagtccgtacaggaagccaaagctcagctgacaactccagctttccctgtagaaggttggcaatgttctttatgcacctatattaataattccgaactgccctactgtgaaatgtgcgaaaccccccagggaagcgcagttatgcagatcgatagtttaaaccacatccaagacaaaaatgaaaaggatgattcccagaaagatacatccaagaaggtgcagacaattagcgattgcgaaaagcaggccctggcccagagcgaaccaggccagctcgctgactccaaagaagagactcctaaaatcgagaaagaggacggtctcacttcgcagcccgagcagtggaaatcctctgataccctgccggtatacgataccctaatgttttgcgcttctaggaatactgaccgcattcacatctatacaaaggacggaaagcagatgtcctgtaacttcatccctcttgacatcaaacttgacctgtgggaggacctgcctgctagcttccagctgaagcagtacagatctctgatactccggtttgtacgtgagtggagcagcctgaccgctatgaaacagcggatcatcaggaaaagcgggcagctgttctgcagtccaatcttagcactggaggagataactaagcaacagactaagcagaattgtaccaaacggtacatcaccaaggaggacgtagcagttgctagcatggataaggttaagaatgtgggtggccacgtcaggctaataacgaaagagtcgcggcctagggacccattcacgaagaagctgcttgaggacggcgcttgtgtccctttcttgaatccttataccgtccaggccgatctgactgtgaaacccagcacatccaaaggatatctgcaggccgtcgataacgagggtaacccactgtgcctgcgatgccagcagcctacctgccagaccaagcaagcatgcaaggccaacagctgggactccaggttctgttccctgaaatgccaggaggaattctggatcaggtcgaataactcttaccttcgagccaaagttttcgagacagaacacggggtgtgccagctgtgtaatgtaaatgctcaagagttgttcttgcggcttcgtgatgcgccaaagtcacagcgaaaaaacctgttgtatgcaacatggacaagcaagttgcctctcgaacaactcaacgaaatgattagaaacccaggagagggccacttctggcaggttgatcatatcaagcccgtgtatggaggcggtggccaatgcagtcttgacaaccttcagacgctctgtacagtttgtcataaggagcgaactgctcgtcaggcgaaggagagaagtcaggtgcggaggcagtctcttgctagcaagcatggctccgatatcaccaggttcctggagacatctaaactacacgagtcacataaggttacaggggcagaacagggtctacaggtttccggacttccggattcagcagccccagaaggcggagcggcacatacgaacgatcagagacggtgtcagcgcatgaaacaacccctaacagaggtgcagatactgtcccacagcagctag

SEQ ID NO: 105088 - DNA, 3234 bp, Artificial Sequence
  derived and/or modified sequence
atgcccagggtgcacaatatcaaaaaaagcctgaccccgcatatctcttgcgtgactaatgaatcagataacctacttgactttcttcctgatagactgagggctaaacttctgccatttcagaaggacggaatcatcttcgctcttaagaggaacggtagtcggattgactgcgatcagatgggcctcggtaagacaattcaggcgatcggaattacttacttctataaggaggagtggccactccttattgtagtgcccagctcattaaggtacccgtggaccgaggagatcgagaaatggataccagaacttagtcctgaggagattaatgtcatccagaataaaaccgacgtgcgccgaatgtccacatctaaggtgactgtgttgggctacggcttactgactgcagatgccaagactctgatcgacgctctgaacaaccagaacttcaaggtggttattgtcgacgagtctcactatatgaaaagtagaaacgccaccaggagtcggattcttctcccaattgttcagaaagccaggcgggctatccttctgactggaacaccagcactaggtcgccctgaagaactgtttatgcaaatcgaagctctctttccccaaaaattcggaagatggacagattacgcaaaacgatactgtaatgcccacatcaggtatttcggaaaacgcccacaatgggattgtagaggtgcttcaaacctcaatgagctccaccagctgctctcagacattatgatccggcgactgaaaaccgaggtgctcacccaattaccacctaaggtccgacaaaggatcccattcgatctaccaagcgcagcagccaaggagttgaatacatccttcgaagagtgggaaaagatcatgaggactcccaattccggcgctatggagacagtaatggggctcataacacgcatgtttaagcagacggccatcgccaaggccggtgccgtcaaggactacatcaagatgatgttacagaacgactctttaaagtttctagtgttcgctcatcacttaagtatgcttcaggcctgtacagaggccgttatcgaaaataagacccgttacattcgtatagacggatccgtctcctcttccgaacggatacaccttgtcaaccagtttcagaaagatcccgatactcgcgtcgcaatcctgtcaattcaggcggcaggacagggccttactttcactgctgcaagccacgtggttttcgcggagttgtactgggacccaggacatattaagcaggcagaggaccgggctcaccgtattgggcaatgctccagtgtgaatatccactacctgatcgcaaacggcacccttgacaccttgatgtgggggatgcttaacaggaaagctcaagtgaccggatccaccctaaatggaagaaaggaaaaaattcaggctgaagagggagataaggagaaatgggatttcctgcagttcgccgaggcatggacacccaatgactcctctgaggaactcagaaaggaggcgctctttacccattttgagaaggagaagcaacatgacatcaggtcgttctttgtgccgcagccgaagaagaggcaactgatgacatcttgcgatgagtctaagaggtttcgtgaggagaacacggtcgtctcctctgaccctaccaaaaccgctgcccgagacatcattgattacgagtctgacgtggagcccgagacaaaacgtctaaagctggcggcttctgaagatcattgttctcctagtgaggagacaccaagccagtctaaacagatcaggacaccgctcgtggagtcggtccaagaagccaaggctcaactgactacccccgcttttcctgtggaggggtggcagtgttccctgtgcacttacattaataattccgaattaccatattgtgagatgtgcgagaccccccaggggtccgccgtcatgcagattgacagtcttaaccacatccaggacaagaatgagaaggacgactctcagaaggatacaagcaagaaagttcaaaccatttccgactgcgagaagcaggccctcgctcagtctgagcccggacagctcgcagatagcaaggaagagacacccaagatagagaaagaagatggcttaacctctcagcccgaacagtggaagagctccgacacactaccagtttatgacaccttgatgttctgcgcctctaggaatacggatagaattcatatttacacaaaggacggcaaacaaatgtcatgcaatttcattcctctggatattaaactagacctgtgggaagatctgccagccagcttccagctgaaacagtacaggtccttgatactgcggtttgttagagagtggtctagccttaccgccatgaagcagcgcattatccgcaaatctggccagcttttctgcagtcccattctggcactggaagagataacaaagcagcagacaaaacaaaactgtaccaagcgctacattactaaggaagacgtagccgtcgccagtatggataaggtaaaaaatgtggggggtcacgtgcgtctgattactaaggagagccgaccaagagatccctttacgaaaaagttactggaggatggcgcatgcgttccttttctcaacccttatacagtgcaagccgacttgaccgttaaaccatctacatcaaaaggttacctacaggctgtcgataacgaaggcaatcccctgtgcctgcgctgccagcagcccacgtgtcagacaaaacaggcatgtaaagcaaactcgtgggacagtcgcttctgctccttaaagtgccaggaggaattctggatccgctctaacaactcgtaccttcgcgctaaagtttttgagactgagcatggcgtgtgtcagctttgtaatgtgaatgcacaggaacttttcttgcgtctgagggatgcaccgaagtcgcagcgtaaaaaccttctctacgcaacatggacatccaaactccctctggagcagcttaacgagatgattagaaacccaggggaagggcatttctggcaggtggaccacattaaacctgtgtacggcggtggaggacagtgctccctggataacctgcaaactctctgcactgtatgtcacaaggagcgcacagccagacaggcaaaggagaggtcccaagtcaggcggcagtcgctggcatcgaagcatggaagtgacataacccggtttctggtgaaaaaatag

SEQ ID NO: 105089 - DNA, 1794 bp, Artificial Sequence
  derived and/or modified sequence
atgacaagctgcgatgaatccaagcgttttcgtgaagagaatacagtggtctcttctgaccccacaaagacggcagctcgcgacatcattgactatgagtctgacgtggagcccgagaccaaaagactgaagcttgctgcatctgaggaccattgctctcccagcgaagagacaccaagtcagtccaagcagatccggactcccctagtcgagtctgtgcaagaggccaaggcgcagctcaccacaccggcatttccagtggaaggatggcagtgctccttgtgtacctacattaataacagcgagttgccatattgcgaaatgtgcgaaactccacagggctcggctgtcatgcagattgactccctgaatcatattcaggataaaaacgaaaaagacgatagccaaaaagatacctctaaaaaggtgcaaaccatctccgactgcgagaaacaggccctggctcagtccgaacctgggcagcttgcagactctaaagaggaaactccgaagatcgaaaaggaagatggtctcacttcccagccagaacagtggaagtcaagtgacacgctcccggtatacgacaccctgatgttttgcgcgtcccgtaacactgatcgcatccatatctacacaaaagatggaaaacagatgtcctgcaacttcatcccactggatattaagttggatctatgggaggacctgcctgcctcctttcaattgaaacagtatcgatccctgattttgagattcgtaagggagtggagttctctgaccgcaatgaagcagaggatcattaggaaatctggacaattgttctgtagccccatcttagcactcgaggagatcaccaagcagcagactaagcagaattgtaccaagcgatacataacgaaggaggacgttgcagtcgcctctatggataaggtgaaaaatgttggaggccacgtcaggttaataactaaggaaagcagacccagagacccttttacaaaaaagcttttagaggatggcgcttgcgtgcctttcttaaacccctacacagtgcaagcagacctaacggtcaagccaagtactagcaagggttacctccaagccgtggacaatgagggtaaccccctgtgtttgcgatgtcagcagcctacctgtcagactaagcaggcatgcaaggccaacagttgggactcaaggttttgctctttgaaatgccaagaggaattctggattcgatctaacaattcatatctacgggcaaaggtgtttgagactgagcacggtgtgtgtcagctgtgcaacgtgaatgcacaggaactcttcttgcggctgcgcgacgcccctaaatcccagcggaagaatttgctctacgccacctggactagcaaactgccactcgagcagctgaacgaaatgattcgaaacccgggagagggccacttttggcaggtcgatcacattaagcctgtgtatggtggtggtggtcagtgtagtctcgataaccttcagaccttgtgtaccgtgtgccacaaagaaaggacagcaaggcaggctaaagagagaagccaagtgcggagacagtctctggccagcaaacacggctctgatattactagattcctggttaagaagctgcatgaaagtcacaaggtgaccggcgcagaacagggcctgcaagttagcggattgccagattctgccgctccggaagggggagcggctcacaccaatgaccagagacgatgccagagaatgaagcagccattgaccgaggtgcagattcttagccactccagctag

SEQ ID NO: 105090 - DNA, 3519 bp, Artificial Sequence
  derived and/or modified sequence
ccaatggtaaaactaggaggacagccattttgcccacttgtaaaagagctaccttttcccacgagttggagcctgaggtgcggagtttcgtgagtttttactgactcgaggatcatcatgcctagggttcataacataaaaaagtctcttacacctcacatttcttgtgtgacaaatgaatctgataatctgctggattttttgcctgacagactaagagcaaagctacttccattccagaaagatggcatcatttttgccctcaaaagaaatggcaggtgtatggtggctgatgaaatgggtctaggaaagacaatccaggcaattggaattacttacttctataaagaggaatggcctctgttaatagtggtcccttcgtctctgaggtacccttggacagaagaaattgaaaaatggatcccagagctaagtccagaagaaatcaatgttattcagaataaaactgatgttaggagaatgtcgaccagtaaagtgacagttctgggttatggtctcttaaccgcagatgcaaagactttgatagatgcactgaataatcagaacttcaaagtagttatagtggatgaatcacactacatgaaatccagaaatgcaactcgcagcaggattttattgccaatagtacagaaagccagacgagccattcttcttacaggaacaccagctttaggaaggcctgaagagctttttatgcagattgaagctctctttccacaaaaatttggaagatggaccgactatgcaaaaagatactgtaatgcacacatcagatattttggtaaaagacctcagtgggattgtagaggggcatcaaatcttaatgaacttcaccagctattaagtgacataatgattagaagattaaagactgaagttttaacccagctaccccctaaagtcagacagcgtattccatttgatcttccatcagcagctgccaaggaattgaataccagctttgaagagtgggaaaaaataatgagaactccaaattcaggtgccatggagacagtcatggggttgataactcgcatgtttaaacaaactgctattgccaaggcaggtgctgtaaaggattatattaagatgatgcttcagaatgattcgcttaaatttctggtttttgctcaccatttaagcatgctccaagcttgcacagaagcagtcatcgaaaataagactcgttacattaggatagatggaagtgtttcatcttcagaaagaatacatctggttaatcagtttcaaaaggatcctgacactcgcgtggctatcctaagcattcaggctgctggccagggattaacatttactgcagcaagtcatgttgtatttgctgagttgtactgggaccctggacatataaaacaagcagaagaccgagctcacagaattggccagtgcagttctgtgaatattcactaccttattgcaaatggaaccctagacacccttatgtggggaatgttgaatcgcaaggctcaagttacagggagcacactgaacggtaggaaagaaaaaattcaggctgaggaaggtgataaggaaaaatgggatttcctgcagtttgctgaagcttggactccaaatgacagttctgaagagttaaggaaggaagctttgttcactcacttcgaaaaagaaaaacagcatgatattcgatcattttttgtaccacaacctaaaaaaagacagttgatgacctcctgtgacgaatcaaagagattccgggaggaaaatactgtagtgtcatcagaccctacaaaaacagctgcaagagatatcatcgattatgaaagtgatgttgaacctgaaacgaaaagattgaaattggctgcctcggaagaccactgcagtccgtcggaagagacaccatcccagtccaagcaaatccgaactccactcgtggaaagtgtacaggaggccaaggcccagttaaccaccccagcctttcctgtagagggctggcaatgtagtctctgcacctatatcaataattcagagttaccttattgtgaaatgtgtgagactcctcaaggcagtgctgttatgcaaatagatagcctcaaccatatccaggataaaaacgagaaggatgattctcagaaagacacctccaaaaaggttcaaactatctcagactgtgaaaaacaagcccttgcacagtcagaacctggccagttggctgacagcaaggaagaaacaccaaaaattgagaaagaagacggacttacatcccagccagaacagtggaagagttcagacactttgccagtgtatgacaccttaatgttctgtgcaagtaggaatactgaccggattcacatctatactaaggatggaaaacagatgagctgtaatttcattcctctggatataaaattagacctttgggaagatttaccagcaagctttcagctgaaacaatatcgctcactgattttgagatttgttcgagaatggagtagtctaactgccatgaagcaaaggataatcaggaaaagtggacagctattctgtagcccaattcttgctttggaagagatcacaaagcaacaaaccaaacaaaattgcaccaaaagatacataaccaaagaagatgttgccgtagcctcaatggacaaagtgaagaatgttgggggccatgtccgtctgatcacaaaggagtccaggccacgggatcctttcacaaaaaaacttcttgaagatggagcctgtgtcccatttctaaatccatacacagtccaggcagatctcactgtgaagccctctacatccaaaggctatttgcaagctgtggataatgaaggaaatccactttgccttcgctgtcagcaacccacttgccagactaagcaagcatgtaaagcgaactcttgggattcacggttttgctctctgaaatgtcaggaagagttttggattcgatctaataacagttacctgagagccaaagtatttgaaactgaacatggtgtgtgtcagctctgtaatgtgaacgcacaagaactctttttacgtctgagagatgcccctaaaagtcagaggaagaatcttctgtatgctacctggacttcaaagctcccattagaacagctaaatgaaatgataagaaacccaggggaaggacatttctggcaggtggatcacatcaagccagtgtatgggggaggaggacagtgttccctggacaacctgcagactctctgcacagtctgtcacaaagagagaactgccagacaagctaaggaaagaagccaggtgagaagacaatctctagcatcaaagcatggatcagacatcacacgatttttggtaaagaagaaactgcatgaatcacacaaggtaacaggtgccgagcaaggtctgcaggtttctggattgccagatagtgcagcacctgaaggaggtgcagcgcacacaaatgatcagcgcaggtgtcaaaggatgaagcagccacttacagaagtgcaaatcctcagccactcatcttaa

SEQ ID NO: 105091 - DNA, 6820 bp, Artificial Sequence
  derived and/or modified sequence
cccttttcgcaaccctaacgggagagaagtgatggaagaagggtagccggaagagtttcctcaaaataccataggggttttaaattattagtacgtatttaaactcatctactttcacgttgtcccgttgaacgtcacttccgcttaggggcggacacgtcccaaacctgtggcgggagttggagattctgcggcgaatacgccaggatcatcatgcctagggttcataacataaaaaagtctcttacacctcacatttcttgtgtgacaaatgaatctgataatctgctggattttttgcctgacagactaagagcaaagctacttccattccagaaagatggcatcatttttgccctcaaaagaaatggcaggtgtatggtggctgatgaaatgggtctaggaaagacaatccaggcaattggaattacttacttctataaagaggaatggcctctgttaatagtggtcccttcgtctctgaggtacccttggacagaagaaattgaaaaatggatcccagagctaagtccagaagaaatcaatgttattcagaataaaactgatgttaggagaatgtcgaccagtaaagtgacagttctgggttatggtctcttaaccgcagatgcaaagactttgatagatgcactgaataatcagaacttcaaagtagttatagtggatgaatcacactacatgaaatccagaaatgcaactcgcagcaggattttattgccaatagtacagaaagccagacgagccattcttcttacaggaacaccagctttaggaaggcctgaagagctttttatgcagattgaagctctctttccacaaaaatttggaagatggaccgactatgcaaaaagatactgtaatgcacacatcagatattttggtaaaagacctcagtgggattgtagaggggcatcaaatcttaatgaacttcaccagctattaagtgacataatgattagaagattaaagactgaagttttaacccagctaccccctaaagtcagacagcgtattccatttgatcttccatcagcagctgccaaggaattgaataccagctttgaagagtgggaaaaaataatgagaactccaaattcaggtgccatggagacagtcatggggttgataactcgcatgtttaaacaaactgctattgccaaggcaggtgctgtaaaggattatattaagatgatgcttcagaatgattcgcttaaatttctggtttttgctcaccatttaagcatgctccaagcttgcacagaagcagtcatcgaaaataagactcgttacattaggatagatggaagtgtttcatcttcagaaagaatacatctggttaatcagtttcaaaaggatcctgacactcgcgtggctatcctaagcattcaggctgctggccagggattaacatttactgcagcaagtcatgttgtatttgctgagttgtactgggaccctggacatataaaacaagcagaagaccgagctcacagaattggccagtgcagttctgtgaatattcactaccttattgcaaatggaaccctagacacccttatgtggggaatgttgaatcgcaaggctcaagttacagggagcacactgaacggtaggaaagaaaaaattcaggctgaggaaggtgataaggaaaaatgggatttcctgcagtttgctgaagcttggactccaaatgacagttctgaagagttaaggaaggaagctttgttcactcacttcgaaaaagaaaaacagcatgatattcgatcattttttgtaccacaacctaaaaaaagacagttgatgacctcctgtgacgaatcaaagagattccgggaggaaaatactgtagtgtcatcagaccctacaaaaacagctgcaagagatatcatcgattatgaaagtgatgttgaacctgaaacgaaaagattgaaattggctgcctcggaagaccactgcagtccgtcggaagagacaccatcccagtccaagcaaatccgaactccactcgtggaaagtgtacaggaggccaaggcccagttaaccaccccagcctttcctgtagagggctggcaatgtagtctctgcacctatatcaataattcagagttaccttattgtgaaatgtgtgagactcctcaaggcagtgctgttatgcaaatagatagcctcaaccatatccaggataaaaacgagaaggatgattctcagaaagacacctccaaaaaggttcaaactatctcagactgtgaaaaacaagcccttgcacagtcagaacctggccagttggctgacagcaaggaagaaacaccaaaaattgagaaagaagacggacttacatcccagccagaacagtggaagagttcagacactttgccagtgtatgacaccttaatgttctgtgcaagtaggaatactgaccggattcacatctatactaaggatggaaaacagatgagctgtaatttcattcctctggatataaaattagacctttgggaagatttaccagcaagctttcagctgaaacaatatcgctcactgattttgagatttgttcgagaatggagtagtctaactgccatgaagcaaaggataatcaggaaaagtggacagctattctgtagcccaattcttgctttggaagagatcacaaagcaacaaaccaaacaaaattgcaccaaaagatacataaccaaagaagatgttgccgtagcctcaatggacaaagtgaagaatgttgggggccatgtccgtctgatcacaaaggagtccaggccacgggatcctttcacaaaaaaacttcttgaagatggagcctgtgtcccatttctaaatccatacacagtccaggcagatctcactgtgaagccctctacatccaaaggctatttgcaagctgtggataatgaaggaaatccactttgccttcgctgtcagcaacccacttgccagactaagcaagcatgtaaagcgaactcttgggattcacggttttgctctctgaaatgtcaggaagagttttggattcgatctaataacagttacctgagagccaaagtatttgaaactgaacatggtgtgtgtcagctctgtaatgtgaacgcacaagaactctttttacgtctgagagatgcccctaaaagtcagaggaagaatcttctgtatgctacctggacttcaaagctcccattagaacagctaaatgaaatgataagaaacccaggggaaggacatttctggcaggtggatcacatcaagccagtgtatgggggaggaggacagtgttccctggacaacctgcagactctctgcacagtctgtcacaaagagagaactgccagacaagctaaggaaagaagccaggtgagaagacaatctctagcatcaaagcatggatcagacatcacacgatttttggtaaagaagtaaagtagaaaaatatatgaatgaatgacaaatggtttacatgtggaagactttaatacagaagttttccatgtttgtttaatatatcgagagtaaaaattttcagaacaaaaatcaagaattcaaattctcttctactaattacttttagtattaaatacattttgaaagtacttaacagaaactaagatacaatactgaatatttctgtggtctttttgatttgattcagactcgcaattatgtttcagcaatgttttgtaaagctctttacccctaatatgcctaatcactgtattgtgcatagattgtgtttaaaaaatgtactctcaattacctaaaaatgcttctggattagtattgttctggactgtcataggtatgagtggaacattgcaaaaccttatgggaaatttcagacgcaaatcattatttgggaattctgggccaagcatgaccagcctgcttaggattcaagagagactgtccactaaatacctccagaatgagctaggggcacacattttgggtgttgcttttcttgctttatttcttagctagtcatctttatcaaaaatatccttttcaaaatgaggtacctatggtgtttgtggacaatttgggggttctgtgtaaagtaattgttaaaactattaaataactgaaaacataaaatgtaaaatgccacttaagcttgattttttagatctttttttaaaaaatgaataaaactaggcttactgttggctgggcgcggtggctcacgcatgtaatcccagcactttgggaggccaaagcgggtggatcatgaggtcaggagatagatcgagaccatcctggctaatacggtgaaaccccatctctactaaaaatacaaaaaattagccgggcatggtgttgtgcacgtgtaatctcagatactcgggaggctgaggcaggagaattgcttgaacccgggaagcagaggttgcagtgagccgagatcacgccattgaactccagcctgggcgacagagcgagactccgtctcaaacaaacaaacaaacaaaaaaaaaaactaagcgtactatcaaaatacactttgtcttctggttctcattttctgtttttaaaaccctgtgttattaaaggtatgtttctggtacttattttaaaaagagtgatgatgacaaaacactttataataaggcataatcagatggttatatgcatttaaatatacaataataacattaaaatgtaattgacataaaataagagtgacgatgaaacaaacccagggcctagtcctgcaatatgtcagaatcatgagggcaaagagtcagaactatacaaaatacaggaccgaggaagaattacattcccaaaagggagctgtttgtaaatactattaggacatatacctctttagtttgagcattttcccacgttaattaatagctagtgttttacaacataaaggacttgtttttagaaagattatacaatcaaagattatacaaccacagttgttcctcagtttctatttcattgtatgagatcaagtcatgttggttattttataaatgaagttgggctttctttggcctcctttctgcttagttggtcaggtgctctttgcagttttctgcctcatttccaaggtaacctaggatttgtcacggttgagagccaagaagcaggcacgctgcctttcctccagcatggggttttgcaagcgaggtctaagtaggtcaaatttgaggggaacttgctcttcagatcacactaaggtgataattctaaggagaaagttctcagatgtaagaactgtgtgatggtttgaggtgaaacaatccatgaagataggctcagtctataccaggtttcagaattctgactaattaaaaatgccgtaaggagcattgagcatttgctgtacaggacactgactggcccgtccccatcccttcctgacatgtctcagagctttgtgtcctgccttcccctaatttggtctgcattacttgtggggcacattgagatgaagggttctgagacagaaaataaagatagagattgatctaataaccgagaccgaaagggcatcttgaggactgttctttcctcctcacaatctgaaacagaagctccccactatgtattgcaaatgggaggttatgacagagggacacagaaagtgtcagagcaagtggcagatcctgagtgcagaaggaagtgcagatgccccaggaagaagacagctgctgccactcaggagatggagatggagtgaaaacacaggtgggtacaatgagtgtaaaaggataggcctggctctgaaaagactcagagaagctgcaagatacagtttaggctaagaaaacaacaacaaaaaagggctctggccaggtatgatggcacttgcttgtagtcctagctacacaggaggctgaggtaggagggtcacttaagcccaggggttcatgaccagcctgggtaacacagcaaggccccatctcaaaaaagaaaaaaggctctgggtccagggaacagagctgggaagtggtaggtgacgaaggaactcgcttacgatagggaaccatatgaaaatatgcctgtgggtaggggtagggtggggaggacttccggagcatggtgggctcacacactcaaaccttgcacagccagcatcaggctggcctgccttcctgttcccgtcactgggtgacattgatcccagacacattctgatgactagtaaagttgcttttagtagccccagagccaggaggaataattcatatggaatttttaaagacgcccactcttggcgttaattacagcccaacgtacatttcttggggagattttcctgtgacaagtgaataccctctacattttcttaactggatgggaaaaggattttatgcccatacatcttgctaataaaccaaatcccttcttcagattcttgagtgaaacatttaaaatgtagtttctttagaaataaaagtatgaggcattttaaattatatgacagacaaaaaagtcaatgctcttgagctctttacagtaaataggttgtgtttactcataggatacagaatcatggatatcaaacatcaaaaataaattataaaaataatgtctcattttctgttgcatattattagcctgtctctcattccaccatttgttcttttgaactggaaaattgtgggctcctagtcactgcactaatctatctgaatatccaactaccagaaagggtttatcccatctcaagtttgtcagttgctttatatcgttaagggtgtttttgccaccctggttgtgttcataattaccattgagaaatgtcactgttattaaaatacattctgtgttccaacta

SEQ ID NO: 105092 - DNA, 2572 bp, Artificial Sequence
  derived and/or modified sequence
gtcacctgggagcttttctggggctgtcaactggaacaccgcaggatttctccatgtggcctgggtttcctcataccaatggtggctaggttcccaagttcgaaaaagaaaaacagcatgatattcgatcattttttgtaccacaacctaaaaaaagacagttgatgacctcctgtgacgaatcaaagagattccgggaggaaaatactgtagtgtcatcagaccctacaaaaacagctgcaagagatatcatcgattatgaaagtgatgttgaacctgaaacgaaaagattgaaattggctgcctcggaagaccactgcagtccgtcggaagagacaccatcccagtccaagcaaatccgaactccactcgtggaaagtgtacaggaggccaaggcccagttaaccaccccagcctttcctgtagagggctggcaatgtagtctctgcacctatatcaataattcagagttaccttattgtgaaatgtgtgagactcctcaaggcagtgctgttatgcaaatagatagcctcaaccatatccaggataaaaacgagaaggatgattctcagaaagacacctccaaaaaggttcaaactatctcagactgtgaaaaacaagcccttgcacagtcagaacctggccagttggctgacagcaaggaagaaacaccaaaaattgagaaagaagacggacttacatcccagccagaacagtggaagagttcagacactttgccagtgtatgacaccttaatgttctgtgcaagtaggaatactgaccggattcacatctatactaaggatggaaaacagatgagctgtaatttcattcctctggatataaaattagacctttgggaagatttaccagcaagctttcagctgaaacaatatcgctcactgattttgagatttgttcgagaatggagtagtctaactgccatgaagcaaaggataatcaggaaaagtggacagctattctgtagcccaattcttgctttggaagagatcacaaagcaacaaaccaaacaaaattgcaccaaaagatacataaccaaagaagatgttgccgtagcctcaatggacaaagtgaagaatgttgggggccatgtccgtctgatcacaaaggagtccaggccacgggatcctttcacaaaaaaacttcttgaagatggagcctgtgtcccatttctaaatccatacacagtccaggcagatctcactgtgaagccctctacatccaaaggctatttgcaagctgtggataatgaaggaaatccactttgccttcgctgtcagcaacccacttgccagactaagcaagcatgtaaagcgaactcttgggattcacggttttgctctctgaaatgtcaggaagagttttggattcgatctaataacagttacctgagagccaaagtatttgaaactgaacatggtgtgtgtcagctctgtaatgtgaacgcacaagaactctttttacgtctgagagatgcccctaaaagtcagaggaagaatcttctgtatgctacctggacttcaaagctcccattagaacagctaaatgaaatgataagaaacccaggggaaggacatttctggcaggtggatcacatcaagccagtgtatgggggaggaggacagtgttccctggacaacctgcagactctctgcacagtctgtcacaaagagagaactgccagacaagctaaggaaagaagccaggtgagaagacaatctctagcatcaaagcatggatcagacatcacacgatttttggaaacctcaaagctgcatgaatcacacaaggtaacaggtgccgagcaaggtctgcaggtttctggattgccagatagtgcagcacctgaaggaggtgcagcgcacacaaatgatcagcgcaggtgtcaaaggatgaagcagccacttacagaagtgcaaatcctcagccactcatcttaatccttaacaagacagcactccagataggcagccacgaccccaaaggcttctggaaccaaactgattaaagttttactcagtggatagttctatagaattaatgatgatgtatgccaaaaacctttcagtgattctaacttcaagcttggaaaaaaagacgaggcttcccagtgtttgtggtggtggatctgcctggttctcaatttgacaccctaagcgatcatactcaagaatagtacagatgtgtggaatacgccaatacctttaactacagacatcatgttctcaagataaaagcctttaaaacaaaaagccatcgtaggtatcaagtcaacatgaaattggaatgcaaaattaatactgctgaggatttccttcatatcccatgctgtttaactatctcttccacagtcctagaatcaatcttttttaattaagagacagggtctgtctttgttacccaggctggagtacagtggtgtcatcaaagctcagtgcagcctccaactcctgggctcaatactcttgcctcagcctcctcttcctgagtagctgcaactacagacacatgccccaatactcagctaatttttaaatttttgtggagatga

SEQ ID NO: 105093 - DNA, 3687 bp, Artificial Sequence
  derived and/or modified sequence
ccaatggtaaaactaggaggacagccattttgcccacttgtaaaagagctaccttttcccacgagttggagcctgaggtgcggagtttcgtgagtttttactgactcgaggatcatcatgcctagggttcataacataaaaaagtctcttacacctcacatttcttgtgtgacaaatgaatctgataatctgctggattttttgcctgacagactaagagcaaagctacttccattccagaaagatggcatcatttttgccctcaaaagaaatggcagtagaattgattgtgaccaaatgggtctaggaaagacaatccaggcaattggaattacttacttctataaagaggaatggcctctgttaatagtggtcccttcgtctctgaggtacccttggacagaagaaattgaaaaatggatcccagagctaagtccagaagaaatcaatgttattcagaataaaactgatgttaggagaatgtcgaccagtaaagtgacagttctgggttatggtctcttaaccgcagatgcaaagactttgatagatgcactgaataatcagaacttcaaagtagttatagtggatgaatcacactacatgaaatccagaaatgcaactcgcagcaggattttattgccaatagtacagaaagccagacgagccattcttcttacaggaacaccagctttaggaaggcctgaagagctttttatgcagattgaagctctctttccacaaaaatttggaagatggaccgactatgcaaaaagatactgtaatgcacacatcagatattttggtaaaagacctcagtgggattgtagaggggcatcaaatcttaatgaacttcaccagctattaagtgacataatgattagaagattaaagactgaagttttaacccagctaccccctaaagtcagacagcgtattccatttgatcttccatcagcagctgccaaggaattgaataccagctttgaagagtgggaaaaaataatgagaactccaaattcaggtgccatggagacagtcatggggttgataactcgcatgtttaaacaaactgctattgccaaggcaggtgctgtaaaggattatattaagatgatgcttcagaatgattcgcttaaatttctggtttttgctcaccatttaagcatgctccaagcttgcacagaagcagtcatcgaaaataagactcgttacattaggatagatggaagtgtttcatcttcagaaagaatacatctggttaatcagtttcaaaaggatcctgacactcgcgtggctatcctaagcattcaggctgctggccagggattaacatttactgcagcaagtcatgttgtatttgctgagttgtactgggaccctggacatataaaacaagcagaagaccgagctcacagaattggccagtgcagttctgtgaatattcactaccttattgcaaatggaaccctagacacccttatgtggggaatgttgaatcgcaaggctcaagttacagggagcacactgaacggtaggaaagaaaaaattcaggctgaggaaggtgataaggaaaaatgggatttcctgcagtttgctgaagcttggactccaaatgacagttctgaagagttaaggaaggaagctttgttcactcacttcgaaaaagaaaaacagcatgatattcgatcattttttgtaccacaacctaaaaaaagacagttgatgacctcctgtgacgaatcaaagagattccgggaggaaaatactgtagtgtcatcagaccctacaaaaacagctgcaagagatatcatcgattatgaaagtgatgttgaacctgaaacgaaaagattgaaattggctgcctcggaagaccactgcagtccgtcggaagagacaccatcccagtccaagcaaatccgaactccactcgtggaaagtgtacaggaggccaaggcccagttaaccaccccagcctttcctgtagagggctggcaatgtagtctctgcacctatatcaataattcagagttaccttattgtgaaatgtgtgagactcctcaaggcagtgctgttatgcaaatagatagcctcaaccatatccaggataaaaacgagaaggatgattctcagaaagacacctccaaaaaggttcaaactatctcagactgtgaaaaacaagcccttgcacagtcagaacctggccagttggctgacagcaaggaagaaacaccaaaaattgagaaagaagacggacttacatcccagccagaacagtggaagagttcagacactttgccagtgtatgacaccttaatgttctgtgcaagtaggaatactgaccggattcacatctatactaaggatggaaaacagatgagctgtaatttcattcctctggatataaaattagacctttgggaagatttaccagcaagctttcagctgaaacaatatcgctcactgattttgagatttgttcgagaatggagtagtctaactgccatgaagcaaaggataatcaggaaaagtggacagctattctgtagcccaattcttgctttggaagagatcacaaagcaacaaaccaaacaaaattgcaccaaaagatacataaccaaagaagatgttgccgtagcctcaatggacaaagtgaagaatgttgggggccatgtccgtctgatcacaaaggagtccaggccacgggatcctttcacaaaaaaacttcttgaagatggagcctgtgtcccatttctaaatccatacacagtccaggcagatctcactgtgaagccctctacatccaaaggctatttgcaagctgtggataatgaaggaaatccactttgccttcgctgtcagcaacccacttgccagactaagcaagcatgtaaagcgaactcttgggattcacggttttgctctctgaaatgtcaggaagagttttggattcgatctaataacagttacctgagagccaaagtatttgaaactgaacatggtgtgtgtcagctctgtaatgtgaacgcacaagaactctttttacgtctgagagatgcccctaaaagtcagaggaagaatcttctgtatgctacctggacttcaaagctcccattagaacagctaaatgaaatgataagaaacccaggggaaggacatttctggcaggtggatcacatcaagccagtgtatgggggaggaggacagtgttccctggacaacctgcagactctctgcacagtctgtcacaaagagagaactgccagacaagctaaggaaagaagccaggtgagaagacaatctctagcatcaaagcatggatcagacatcacacgatttttggtaaagaagtaaagtagaaaaatatatgaatgaatgacaaatggtttacatgtggaagactttaatacagaagttttccatgtttgtttaatatatcgagagtaaaaattttcagaacaaaaatcaagaattcaaattctcttctactaattacttttagtattaaatacattttgaaagtacttaacagaaactaagatacaatactgaatatttctgtggtctttttgatttgattcagactcgcaattatgtttcagcaatgttttgtaaagctctttacccctaatatgcctaatcactgtattgtgcatagattgtgtttaaaaaatgtactctcaattacct

SEQ ID NO: 105094 - DNA, 2491 bp, Artificial Sequence
  derived and/or modified sequence
actactgtttgcttttcctagttcgaaaaagaaaaacagcatgatattcgatcattttttgtaccacaacctaaaaaaagacagttgatgacctcctgtgacgaatcaaagagattccgggaggaaaatactgtagtgtcatcagaccctacaaaaacagctgcaagagatatcatcgattatgaaagtgatgttgaacctgaaacgaaaagattgaaattggctgcctcggaagaccactgcagtccgtcggaagagacaccatcccagtccaagcaaatccgaactccactcgtggaaagtgtacaggaggccaaggcccagttaaccaccccagcctttcctgtagagggctggcaatgtagtctctgcacctatatcaataattcagagttaccttattgtgaaatgtgtgagactcctcaaggcagtgctgttatgcaaatagatagcctcaaccatatccaggataaaaacgagaaggatgattctcagaaagacacctccaaaaaggttcaaactatctcagactgtgaaaaacaagcccttgcacagtcagaacctggccagttggctgacagcaaggaagaaacaccaaaaattgagaaagaagacggacttacatcccagccagaacagtggaagagttcagacactttgccagtgtatgacaccttaatgttctgtgcaagtaggaatactgaccggattcacatctatactaaggatggaaaacagatgagctgtaatttcattcctctggatataaaattagacctttgggaagatttaccagcaagctttcagctgaaacaatatcgctcactgattttgagatttgttcgagaatggagtagtctaactgccatgaagcaaaggataatcaggaaaagtggacagctattctgtagcccaattcttgctttggaagagatcacaaagcaacaaaccaaacaaaattgcaccaaaagatacataaccaaagaagatgttgccgtagcctcaatggacaaagtgaagaatgttgggggccatgtccgtctgatcacaaaggagtccaggccacgggatcctttcacaaaaaaacttcttgaagatggagcctgtgtcccatttctaaatccatacacagtccaggcagatctcactgtgaagccctctacatccaaaggctatttgcaagctgtggataatgaaggaaatccactttgccttcgctgtcagcaacccacttgccagactaagcaagcatgtaaagcgaactcttgggattcacggttttgctctctgaaatgtcaggaagagttttggattcgatctaataacagttacctgagagccaaagtatttgaaactgaacatggtgtgtgtcagctctgtaatgtgaacgcacaagaactctttttacgtctgagagatgcccctaaaagtcagaggaagaatcttctgtatgctacctggacttcaaagctcccattagaacagctaaatgaaatgataagaaacccaggggaaggacatttctggcaggtggatcacatcaagccagtgtatgggggaggaggacagtgttccctggacaacctgcagactctctgcacagtctgtcacaaagagagaactgccagacaagctaaggaaagaagccaggtgagaagacaatctctagcatcaaagcatggatcagacatcacacgatttttggtaaagaagctgcatgaatcacacaaggtaacaggtgccgagcaaggtctgcaggtttctggattgccagatagtgcagcacctgaaggaggtgcagcgcacacaaatgatcagcgcaggtgtcaaaggatgaagcagccacttacagaagtgcaaatcctcagccactcatcttaatccttaacaagacagcactccagataggcagccacgaccccaaaggcttctggaaccaaactgattaaagttttactcagtggatagttctatagaattaatgatgatgtatgccaaaaacctttcagtgattctaacttcaagcttggaaaaaaagacgaggcttcccagtgtttgtggtggtggatctgcctggttctcaatttgacaccctaagcgatcatactcaagaatagtacagatgtgtggaatacgccaatacctttaactacagacatcatgttctcaagataaaagcctttaaaacaaaaagccatcgtaggtatcaagtcaacatgaaattggaatgcaaaattaatactgctgaggatttccttcatatcccatgctgtttaactatctcttccacagtcctagaatcaatcttttttaattaagagacagggtctgtctttgttacccaggctggagtacagtggtgtcatcaaagctcagtgcagcctccaactcctgggctcaatactcttgcctcagcctcctcttcctgagtagctgcaactacagacacatgccccaatactcagctaatttttaaatttttgtggagatg

SEQ ID NO: 105095 - protein, 403 aa, Artificial Sequence
  derived and/or modified sequence
MKQRKGQGSGGSRGRKKRGLSDISPSTSLPPLVEGQLRCFLKLTVNRVIWKIAKPPTCVLVRVRWWGETSDGTLFCPRDALQTEPKAVRTTTRYAIRCGPKQFTSYLTDMAVLVLEVITKLDGLPIGRVQINGLAQLSPTHQINGFFTIVSSTSKKLGELQVSLALEPLSETYDSYHPLPTTDMTENVLLSKQGFRENTEPSSTQFQVPSRPRDIHTIKIDGKELAANSSRSTTPRGKDHVCFAENPDTIKDSSFGLQHSLNSGQSLESVTLKGRAPRKQMSLLNSSEFQPQIRTVAKSHSDSCILSSNNLPTKDLLSALLEQGNKLRNAMVISAMKSSPETSMLLDQVHPLLMKILLEHQHRSEPFLGIGLKTTLKITSSLQLRIHFGDMTQKLIPELYSCY

SEQ ID NO: 105096 - protein, 1861 aa, Artificial Sequence
  derived and/or modified sequence
MKQRKGQGSGGSRGRKKRGLSDISPSTSLPPLVEGQLRCFLKLTVNRVIWKIAKPPTCVLVRVRWWGETSDGTLFCPRDALQTEPKAVRTTTRYAIRCGPKQFTSYLTDMAVLVLEVITKLDGLPIGRVQINGLAQLSPTHQINGFFTIVSSTSKKLGELQVSLALEPLSETYDSYHPLPTTDMTENVLLSKQGFRENTEPSSTQFQVPSRPRDIHTIKIDGKELAANSSRSTTPRGKDHVCFAENPDTIKDSSFGLQHSLNSGQSLESVTLKGRAPRKQMSLLNSSEFQPQIRTVAKSHSDSCILSSNNLPTKDLLSALLEQGNKLRNAMVISAMKSSPETSMLLDQVHPPINEDSLRASTQIRAFSRNRFKDHIEDHLLPSTENTFWRHDTKADTRAIQLLLGSAELSQGNFWDGLGSPPDSPSPGSDVYCISELNDPQYDQSLLENLFYTAPKSDTSISDFLSEEDDIVPSKKISQSTALARSSKVLESSDHKLKKRSAGKRNRNLVEQQMLSETPEDAQTMTLSVDRLALLGRTHSVRIIIETMGVPPDSPQMTPGKKSYAGPPPKVTTAKKRTFFVEYHFPVGFSESGLGKTALITEVVRLASSKITDGKVKFQQRFVFPVQFGGPMIEHWWNSNLTFQIYVKKTPQKKPEVIGSVSLSLRAVIQSELLSFSDQLPVQQENGQSPFGPLKVTMELITDNKDFTGINTKLSGNTHYTPLCAPTSPNKALPELNQDMTCTKNPQNLNQIHEETAKKAQNLVLPNRKSPSPVAPHPSTFVATPASHNLVNQTNGTTKESALLLHVLLMVPDGKDFISGESEKQSPCNVYLNCKLFSTEEVTRSVIAWGTTQPVFNFSQVIPVSLSSKYLERLKNNVMVIETWNKVRSPGQDKLLGLVKLPLHQFYMSFKDAKISRLLLDAQYPVVAVDSYMPVIDVFSGHQNGSLRVFLAMGSSNQIMALQRLKNEEGTLPPFSPRPAHFLDQPTAASVAMAEDRGNGLMEHCFEIHIEMVKGLAPLQATVWGEADCYVQYYFPVQHSQSSVLKGPEFLENGITLKPFRTATTLCVPDPIFNSEHHHSLLLPAEVPVQRLLLSAFSAQGLVPGGGVQFEIWCRYYYPNVRDQKVAKGTLPLSRICAMVTTQHREDVGIQTFNLPLTPRIENRKELRNQSSGLLDVGLRYRRSPRTAEGVLAARTVSISVQIIRACGLQAAAKALAEREPALQFSATVGVNASVTTHLSFLPQGEQRRTHPVACSFCPEFSHHVEFTCNLVTQHCSGEACFLAELLEFAEVIFAVYHENTKSASDIISIESCKEYLLGVVKVPTKELLIKRSGITGWYPIILPEDGGLPHGLELMQKIVGGLEHLGWSFENSLKDFVRMDEGEPATVTISTPRLWLPIHCVLLAGHNHIHKNTYCYLRYKFYDHEAFWTPLKKPKESVNKKQIMVTFKASKRAEVTRGPSLLWYFREERLEIQVWRAYGNDSVERPHQTDSWIGSAYVDLARLGERSARTLTVSGVYPLFGRNASNLSGAALRVHVVLSSLSSHLEPTHELDSMDCSSHSESEQLPRRNDEVQLSPPEVISCHQKSPASTQVPCSSTTAEVRLTQEGPADLDGTFAVSILVERAMHLSLKGSPLTERKVSIPSCCVSFATADESSPVYTQVVENTDSPIWNFQQQSRLSKELLLDPQQTLVFKVWHKGDEERVIGFASVDLSPLLSGFQFVCGWYNITDFSGECQGQIKVAVSPLESLIHFKEERQARRGVETSKSLIPIYSPFSFPASDTYAAFSSHMARQTLDQLAHASSKELDFSSPGRSDTTRSQASRHEEHVQNIRRFHESLHLQGEAPLPCDDKLTTSPLSSQT

SEQ ID NO: 105097 - protein, 2353 aa, Artificial Sequence
  derived and/or modified sequence
MKQRKGQGSGGSRGRKKRGLSDISPSTSLPPLVEGQLRCFLKLTVNRVIWKIAKPPTCVLVRVRWWGETSDGTLFCPRDALQTEPKAVRTTTRYAIRCGPKQFTSYLTDMAVLVLEVITKLDGLPIGRVQINGLAQLSPTHQINGFFTIVSSTSKKLGELQVSLALEPLSETYDSYHPLPTTDMTENVLLSKQGFRENTEPSSTQFQVPSRPRDIHTIKIDGKELAANSSRSTTPRGKDHVCFAENPDTIKDSSFGLQHSLNSGQSLESVTLKGRAPRKQMSLLNSSEFQPQIRTVAKSHSDSCILSSNNLPTKDLLSALLEQGNKLRNAMVISAMKSSPETSMLLDQVHPPINEDSLRASTQIRAFSRNRFKDHIEDHLLPSTENTFWRHDTKADTRAIQLLLGSAELSQGNFWDGLGSPPDSPSPGSDVYCISELNDPQYDQSLLENLFYTAPKSDTSISDFLSEEDDIVPSKKISQSTALARSSKVLESSDHKLKKRSAGKRNRNLVEQQMLSETPEDAQTMTLSVDRLALLGRTHSVRIIIETMGVPPDSPQMTPGKKSYAGPPPKVTTAKKRTFFVEYHFPVGFSESGLGKTALITEVVRLASSKITDGKVKFQQRFVFPVQFGGPMIEHWWNSNLTFQIYVKKTPQKKPEVIGSVSLSLRAVIQSELLSFSDQLPVQQENGQSPFGPLKVTMELITDNKDFTGINTKLSGNTHYTPLCAPTSPNKALPELNQDMTCTKNPQNLNQIHEETAKKAQNLVLPNRKSPSPVAPHPSTFVATPASHNLVNQTNGTTKESALLLHVLLMVPDGKDFISGESEKQSPCNVYLNCKLFSTEEVTRSVIAWGTTQPVFNFSQVIPVSLSSKYLERLKNNVMVIETWNKVRSPGQDKLLGLVKLPLHQFYMSFKDAKISRLLLDAQYPVVAVDSYMPVIDVFSGHQNGSLRVFLAMGSSNQIMALQRLKNEEGTLPPFSPRPAHFLDQPTAASVAMAEDRGNGLMEHCFEIHIEMVKGLAPLQATVWGEADCYVQYYFPVQHSQSSVLKGPEFLENGITLKPFRTATTLCVPDPIFNSEHHHSLLLPAEVPVQRLLLSAFSAQGLVPGGGVQFEIWCRYYYPNVRDQKVAKGTLPLSRICAMVTTQHREDVGIQTFNLPLTPRIENRKELRNQSSGLLDVGLRYRRSPRTAEGVLAARTVSISVQIIRACGLQAAAKALAEREPALQFSATVGVNASVTTHLSFLPQGEQRRTHPVACSFCPEFSHHVEFTCNLVTQHCSGEACFLAELLEFAEVIFAVYHENTKSASDIISIESCKEYLLGVVKVPTKELLIKRSGITGWYPIILPEDGGLPHGLELMQKIVGGLELSISFTHRGDRERVLEAAEHLGWSFENSLKDFVRMDEGEPATVTISTPRLWLPIHCVLLAGHNHIHKNTYCYLRYKFYDHEAFWTPLKKPKESVNKKQIMVTFKASKRAEVTRGPSLLWYFREERLEIQVWRAYGNDSVERPHQTDSWIGSAYVDLARLGERSARTLTVSGVYPLFGRNASNLSGAALRVHVVLSSLSSHLEPTHELDSMDCSSHSESEQLPRRNDEVQLSPPEVISCHQKSPASTQVPCSSTTAEVRLTQEGPADLDGTFAVSILVERAMHLSLKGSPLTERKVSIPSCCVSFATADESSPVYTQVVENTDSPIWNFQQQSRLSKELLLDPQQTLVFKVWHKGDEERVIGFASVDLSPLLSGFQFVCGWYNITDFSGECQGQIKVAVSPLESLIHFKEERQARRGVETSKSLIPIYSPFSFPASDTYAAFSSHMARQTLDQLAHASSKELDFSSPGRSDTTRSQASRHEEHVQNIRRFHESLHLQGEAPLPCDDKLTTSPLSSQTSILTSLRKNLSELDQIQRYFRQKLTKPFLPLSPQTQTAISQHQESCRDHLGPGASSLDPGSQCILEKSSNLVLQVSSLITDLQTITRDSQAALSSHRARSRSNKATTLPDAQDTEALQERCTMPDEPLVRAPDKGTDSPSPPPLEETSNGGRMLHESLRHAVPITRMQSSEDTEAGPAYSDEDYEEDIIEPRTLNEITTVTDKTSPWSSVISDTSEVISPQPDEVQREGPSCPSPGPFCREELMVKSSFLSSPERAVNPHLPRQGSPSQSLVACECEASKARVGGESASANPQPIPCPTLSGAQQSSTFVGWSSPQTDQNKEPKSEAPAENEAATSELGDSADSFKKLPLNLASQSRRENHKGPPIDSSDIRQRQVTTGSETSTKQSLLLPGPIVVPNFFLPPQQLEASLRMLSLSATLPPAATTDQDKSEATRGALSQRPCRPRPNSLPLNLPEEETLRIARIFSSQYSQKD

SEQ ID NO: 105098 - DNA, 7062 bp, Artificial Sequence
  derived and/or modified sequence
atgaagcagagaaagggccagggcagcggcggcagcagaggcagaaagaagagaggcctgagcgacatcagccccagcaccagcctgccccccctggtggagggccagctgagatgcttcctgaagctgaccgtgaacagagtgatctggaagatcgccaagccccccacctgcgtgctggtgagagtgagatggtggggcgagaccagcgacggcaccctgttctgccccagagacgccctgcagaccgagcccaaggccgtgagaaccaccaccagatacgccatcagatgcggccccaagcagttcaccagctacctgaccgacatggccgtgctggtgctggaggtgatcaccaagctggacggcctgcccatcggcagagtgcagatcaacggcctggcccagctgagccccacccaccagatcaacggcttcttcaccatcgtgagcagcaccagcaagaagctgggcgagctgcaggtgagcctggccctggagcccctgagcgagacctacgacagctaccaccccctgcccaccaccgacatgaccgagaacgtgctgctgagcaagcagggcttcagagagaacaccgagcccagcagcacccagttccaggtgcccagcagacccagagacatccacaccatcaagatcgacggcaaggagctggccgccaacagcagcagaagcaccacccccagaggcaaggaccacgtgtgcttcgccgagaaccccgacaccatcaaggacagcagcttcggcctgcagcacagcctgaacagcggccagagcctggagagcgtgaccctgaagggcagagcccccagaaagcagatgagcctgctgaacagcagcgagttccagccccagatcagaaccgtggccaagagccacagcgacagctgcatcctgagcagcaacaacctgcccaccaaggacctgctgagcgccctgctggagcagggcaacaagctgagaaacgccatggtgatcagcgccatgaagagcagccccgagaccagcatgctgctggaccaggtgcacccccccatcaacgaggacagcctgagagccagcacccagatcagagccttcagcagaaacagattcaaggaccacatcgaggaccacctgctgcccagcaccgagaacaccttctggagacacgacaccaaggccgacaccagagccatccagctgctgctgggcagcgccgagctgagccagggcaacttctgggacggcctgggcagcccccccgacagccccagccccggcagcgacgtgtactgcatcagcgagctgaacgacccccagtacgaccagagcctgctggagaacctgttctacaccgcccccaagagcgacaccagcatcagcgacttcctgagcgaggaggacgacatcgtgcccagcaagaagatcagccagagcaccgccctggccagaagcagcaaggtgctggagagcagcgaccacaagctgaagaagagaagcgccggcaagagaaacagaaacctggtggagcagcagatgctgagcgagacccccgaggacgcccagaccatgaccctgagcgtggacagactggccctgctgggcagaacccacagcgtgagaatcatcatcgagaccatgggcgtgccccccgacagcccccagatgacccccggcaagaagagctacgccggccccccccccaaggtgaccaccgccaagaagagaaccttcttcgtggagtaccacttccccgtgggcttcagcgagagcggcctgggcaagaccgccctgatcaccgaggtggtgagactggccagcagcaagatcaccgacggcaaggtgaagttccagcagagattcgtgttccccgtgcagttcggcggccccatgatcgagcactggtggaacagcaacctgaccttccagatctacgtgaagaagaccccccagaagaagcccgaggtgatcggcagcgtgagcctgagcctgagagccgtgatccagagcgagctgctgagcttcagcgaccagctgcccgtgcagcaggagaacggccagagccccttcggccccctgaaggtgaccatggagctgatcaccgacaacaaggacttcaccggcatcaacaccaagctgagcggcaacacccactacacccccctgtgcgcccccaccagccccaacaaggccctgcccgagctgaaccaggacatgacctgcaccaagaacccccagaacctgaaccagatccacgaggagaccgccaagaaggcccagaacctggtgctgcccaacagaaagagccccagccccgtggccccccaccccagcaccttcgtggccacccccgccagccacaacctggtgaaccagaccaacggcaccaccaaggagagcgccctgctgctgcacgtgctgctgatggtgcccgacggcaaggacttcatcagcggcgagagcgagaagcagagcccctgcaacgtgtacctgaactgcaagctgttcagcaccgaggaggtgaccagaagcgtgatcgcctggggcaccacccagcccgtgttcaacttcagccaggtgatccccgtgagcctgagcagcaagtacctggagagactgaagaacaacgtgatggtgatcgagacctggaacaaggtgagaagccccggccaggacaagctgctgggcctggtgaagctgcccctgcaccagttctacatgagcttcaaggacgccaagatcagcagactgctgctggacgcccagtaccccgtggtggccgtggacagctacatgcccgtgatcgacgtgttcagcggccaccagaacggcagcctgagagtgttcctggccatgggcagcagcaaccagatcatggccctgcagagactgaagaacgaggagggcaccctgccccccttcagccccagacccgcccacttcctggaccagcccaccgccgccagcgtggccatggccgaggacagaggcaacggcctgatggagcactgcttcgagatccacatcgagatggtgaagggcctggcccccctgcaggccaccgtgtggggcgaggccgactgctacgtgcagtactacttccccgtgcagcacagccagagcagcgtgctgaagggccccgagttcctggagaacggcatcaccctgaagcccttcagaaccgccaccaccctgtgcgtgcccgaccccatcttcaacagcgagcaccaccacagcctgctgctgcccgccgaggtgcccgtgcagagactgctgctgagcgccttcagcgcccagggcctggtgcccggcggcggcgtgcagttcgagatctggtgcagatactactaccccaacgtgagagaccagaaggtggccaagggcaccctgcccctgagcagaatctgcgccatggtgaccacccagcacagagaggacgtgggcatccagaccttcaacctgcccctgacccccagaatcgagaacagaaaggagctgagaaaccagagcagcggcctgctggacgtgggcctgagatacagaagaagccccagaaccgccgagggcgtgctggccgccagaaccgtgagcatcagcgtgcagatcatcagagcctgcggcctgcaggccgccgccaaggccctggccgagagagagcccgccctgcagttcagcgccaccgtgggcgtgaacgccagcgtgaccacccacctgagcttcctgccccagggcgagcagagaagaacccaccccgtggcctgcagcttctgccccgagttcagccaccacgtggagttcacctgcaacctggtgacccagcactgcagcggcgaggcctgcttcctggccgagctgctggagttcgccgaggtgatcttcgccgtgtaccacgagaacaccaagagcgccagcgacatcatcagcatcgagagctgcaaggagtacctgctgggcgtggtgaaggtgcccaccaaggagctgctgatcaagagaagcggcatcaccggctggtaccccatcatcctgcccgaggacggcggcctgccccacggcctggagctgatgcagaagatcgtgggcggcctggagctgagcatcagcttcacccacagaggcgacagagagagagtgctggaggccgccgagcacctgggctggagcttcgagaacagcctgaaggacttcgtgagaatggacgagggcgagcccgccaccgtgaccatcagcacccccagactgtggctgcccatccactgcgtgctgctggccggccacaaccacatccacaagaacacctactgctacctgagatacaagttctacgaccacgaggccttctggacccccctgaagaagcccaaggagagcgtgaacaagaagcagatcatggtgaccttcaaggccagcaagagagccgaggtgaccagaggccccagcctgctgtggtacttcagagaggagagactggagatccaggtgtggagagcctacggcaacgacagcgtggagagaccccaccagaccgacagctggatcggcagcgcctacgtggacctggccagactgggcgagagaagcgccagaaccctgaccgtgagcggcgtgtaccccctgttcggcagaaacgccagcaacctgagcggcgccgccctgagagtgcacgtggtgctgagcagcctgagcagccacctggagcccacccacgagctggacagcatggactgcagcagccacagcgagagcgagcagctgcccagaagaaacgacgaggtgcagctgagcccccccgaggtgatcagctgccaccagaagagccccgccagcacccaggtgccctgcagcagcaccaccgccgaggtgagactgacccaggagggccccgccgacctggacggcaccttcgccgtgagcatcctggtggagagagccatgcacctgagcctgaagggcagccccctgaccgagagaaaggtgagcatccccagctgctgcgtgagcttcgccaccgccgacgagagcagccccgtgtacacccaggtggtggagaacaccgacagccccatctggaacttccagcagcagagcagactgagcaaggagctgctgctggacccccagcagaccctggtgttcaaggtgtggcacaagggcgacgaggagagagtgatcggcttcgccagcgtggacctgagccccctgctgagcggcttccagttcgtgtgcggctggtacaacatcaccgacttcagcggcgagtgccagggccagatcaaggtggccgtgagccccctggagagcctgatccacttcaaggaggagagacaggccagaagaggcgtggagaccagcaagagcctgatccccatctacagccccttcagcttccccgccagcgacacctacgccgccttcagcagccacatggccagacagaccctggaccagctggcccacgccagcagcaaggagctggacttcagcagccccggcagaagcgacaccaccagaagccaggccagcagacacgaggagcacgtgcagaacatcagaagattccacgagagcctgcacctgcagggcgaggcccccctgccctgcgacgacaagctgaccaccagccccctgagcagccagaccagcatcctgaccagcctgagaaagaacctgagcgagctggaccagatccagagatacttcagacagaagctgaccaagcccttcctgcccctgagcccccagacccagaccgccatcagccagcaccaggagagctgcagagaccacctgggccccggcgccagcagcctggaccccggcagccagtgcatcctggagaagagcagcaacctggtgctgcaggtgagcagcctgatcaccgacctgcagaccatcaccagagacagccaggccgccctgagcagccacagagccagaagcagaagcaacaaggccaccaccctgcccgacgcccaggacaccgaggccctgcaggagagatgcaccatgcccgacgagcccctggtgagagcccccgacaagggcaccgacagccccagccccccccccctggaggagaccagcaacggcggcagaatgctgcacgagagcctgagacacgccgtgcccatcaccagaatgcagagcagcgaggacaccgaggccggccccgcctacagcgacgaggactacgaggaggacatcatcgagcccagaaccctgaacgagatcaccaccgtgaccgacaagaccagcccctggagcagcgtgatcagcgacaccagcgaggtgatcagcccccagcccgacgaggtgcagagagagggccccagctgccccagccccggccccttctgcagagaggagctgatggtgaagagcagcttcctgagcagccccgagagagccgtgaacccccacctgcccagacagggcagccccagccagagcctggtggcctgcgagtgcgaggccagcaaggccagagtgggcggcgagagcgccagcgccaacccccagcccatcccctgccccaccctgagcggcgcccagcagagcagcaccttcgtgggctggagcagcccccagaccgaccagaacaaggagcccaagagcgaggcccccgccgagaacgaggccgccaccagcgagctgggcgacagcgccgacagcttcaagaagctgcccctgaacctggccagccagagcagaagagagaaccacaagggcccccccatcgacagcagcgacatcagacagagacaggtgaccaccggcagcgagaccagcaccaagcagagcctgctgctgcccggccccatcgtggtgcccaacttcttcctgcccccccagcagctggaggccagcctgagaatgctgagcctgagcgccaccctgccccccgccgccaccaccgaccaggacaagagcgaggccaccagaggcgccctgagccagagaccctgcagacccagacccaacagcctgcccctgaacctgcccgaggaggagaccctgagaatcgccagaatcttcagcagccagtacagccagaaggactag

SEQ ID NO: 105099 - DNA, 7289 bp, Artificial Sequence
  derived and/or modified sequence
aaagcgtcctgggtattgtagtgtattggagggaaggcgtcttggcgccttctcttcgcaccgttttccggagactgttagaggaagagtcgctttttcctgcctcccaggctgcccagcggcgccggttgccggggaacgcaggcgccgtggggagggatggcgggaggatactgcttaggtgctggagacggagttgagctggtgaagaagagctcgggctcatcatgaaacaacgaaaaggccaagggtctgggggcagccgtgggcgcaaaaaaagaggtttaagtgacatttctccatctacaagcctgccacctctggttgaaggccagctacgctgttttctaaaacttactgttaatagagtcatatggaagattgcaaagcctcccacttgtgtacttgtccgagtgagatggtggggagaaacatcagatggaaccctcttttgtcccagggatgcattgcagactgaaccaaaagctgtgagaacaactacacgttacgctattcgttgtggtccaaaacagtttacctcttatctaacagatatggctgtgctggtgctggaagtaatcaccaaacttgatggtcttccaattggtagagttcagatcaatggactagctcaactttctccaacccatcaaatcaatggattttttaccattgtttcatcaacgtctaagaaacttggagaactccaggtctcacttgccctggaacctctgtcagaaacttacgacagctaccatccacttcctaccactgacatgacagaaaatgtgcttttatctaagcagggattcagagagaatactgaacccagcagtacccagtttcaggttccatcaaggcctcgcgacatacataccatcaaaattgatggaaaagagttagcagccaacagcagtagatcaaccactccgaggggaaaagaccatgtatgctttgcagagaaccctgatacaataaaggattcttcctttggactacagcacagtcttaattcaggacagagtttagagtctgtaactctgaaaggcagagctccacggaagcagatgtcccttctgaacagttctgaattccagcctcaaattagaacagttgccaagagtcacagtgactcatgcattctttcttcaaacaacctccctaccaaggatcttctttcagctctgttagaacaaggcaataaactgcgtaatgccatggtgatttctgcaatgaaatcaagcccagagaccagcatgttgttggaccaagttcatcctcctattaatgaagattctcttagagcatcaacacagatcagagccttttctaggaatcggtttaaagaccacattgaagatcacctcctcccttcaactgagaatacattttggagacatgacacaaaagctgataccagagctatacagctgctattaggcagtgctgaattatcccaaggcaatttctgggatgggctaggctctcctccagattccccatctcctgggagtgatgtgtattgcatcagtgagctgaatgaccctcagtatgaccagagtcttctggagaatttattttatacagcacctaaatctgataccagcatcagtgatttcctcagtgaagaggatgatatcgtcccttctaaaaaaataagccagtcaacagctcttgccagatcatctaaggttctggagtcaagtgatcataagctgaagaagaggtcagcaggcaagagaaatagaaatttggttgaacaacagatgctctcagaaactccagaagatgcccaaacgatgacactaagtgtggatagactggcccttttgggtagaacacattcagtcagaatcatcatcgaaaccatgggagttcctccagatagtcctcagatgacccctggcaaaaaaagctatgctggtccaccacctaaggtgactacagcaaaaaagcgcactttctttgtagaatatcactttcctgtgggcttttcggaaagcggattgggaaagacagctttgatcactgaggttgttcgactcgcctccagtaaaattacagatggaaaggtgaagttccagcagcgatttgtgtttccagtacagtttggtggcccaatgatagagcactggtggaattccaacctcactttccaaatttatgtaaagaaaactccacagaaaaagccagaagtcattggatctgtgtcactttctttgcgagctgtcattcaatcagagctgctttctttcagtgatcagcttccagtgcaacaagaaaatggtcagtctccatttggccccctcaaggtaaccatggagcttattacagataacaaagatttcactggtatcaatactaagttaagtggcaacacccattataccccactttgtgctcctacaagtccaaataaggcactaccagaacttaaccaagatatgacctgtaccaaaaatccacaaaacttaaaccaaattcatgaggaaactgcaaagaaagcacagaacttggtgctccccaaccgaaagtcaccaagccctgtagcaccacatccttcaaccttcgtagctacgccagcctcccataatttagtcaatcagacaaatgggacaacaaaagagagtgctttgctgttgcatgtgctgttgatggtgccagatgggaaagattttattagtggagaatctgagaaacaatcaccatgcaatgtttatttaaattgtaaactcttcagcacagaggaagtcaccagatctgtcatcgcatggggcacaacacaaccggtctttaacttttctcaggtgattcctgtctctctgtcttccaaatacctggaaaggcttaagaacaatgtgatggtaattgaaacttggaataaggtgcggagcccaggacaggacaagctgctcgggctggtgaaacttcccctccaccagttttacatgtcattcaaagatgctaagatttctcgcctgctgctggatgcccagtacccagttgttgctgtcgacagctacatgcctgtgattgatgtgttttcaggccaccaaaatgggagtcttcgagtctttttagctatgggttcttcaaatcaaataatggcactacaaagattaaagaatgaagaaggaacactccctcccttcagccctaggccagcccatttcctggaccagccaactgcagcatctgttgctatggcagaggaccgaggaaatggactgatggagcactgctttgagatccatatagagatggttaaagggctagcccctcttcaggcaacagtctggggagaagcagattgttatgtccagtactactttccagttcaacactctcaatccagtgtgctgaaaggacctgagttccttgaaaatggaattactctgaagcccttcagaactgcaaccacactctgtgttccagatcccatctttaatagtgaacaccatcactctctcctgttgccagctgaggttccagtgcaaaggctcctactaagtgctttctctgcacagggcctcgtgcctggaggtggagtccagtttgaaatctggtgcagatactattatcctaatgtgagagaccagaaggtcgccaaaggaaccttgccattatcaaggatctgtgctatggtaaccacccagcatcgtgaggatgtgggaatacagacctttaatctccctttaacccccaggattgagaacaggaaagaattgaggaaccagtcatcaggtttactggatgtgggcctaaggtacaggcgtagtccaagaacagcagagggagttcttgctgcccgaactgtttccatctcagtccagattatcagagcctgtggtctgcaagcagcagccaaggctttggctgaacgggaacccgctctacagtttagtgccacagtcggggtcaatgcctctgtcaccactcatctctccttcctgccccagggagaacagcgccgaacccaccctgtggcctgttctttctgccctgagttctcccatcacgttgagttcacatgtaacttggtgactcagcactgtagtggagaggcctgtttcctagcagagttgttggagtttgcagaagttatttttgctgtctatcatgaaaataccaagtcagcaagtgatataatcagtattgagtcatgcaaagagtatctgcttggagtagtaaaagttccaacaaaagagctgctgatcaagagatctgggatcacaggatggtatcctatcattttaccagaagacgggggcctacctcatggcctggagctcatgcagaagatcgtgggtggtctggagctttcgatttccttcacgcatcgtggagatagagaacgggtgttggaagctgctgagcatttgggctggagctttgagaacagcctgaaagattttgtcagaatggatgaaggggagccagccactgtcaccatctccaccccaaggctgtggctgcccatccattgtgtgctgcttgctggccacaaccacattcataagaatacatattgctaccttcgctacaagttctatgatcatgaagccttttggacccctctcaagaagcctaaggaatctgtaaacaaaaagcagattatggtcactttcaaggcatccaaaagagcagaagtcaccaggggcccatcactgctttggtacttcagggaggagaggctagagatccaagtgtggcgagcttatggcaatgacagtgtggagagaccccatcagacagacagctggattggctcagcctatgtggacctggccagacttggggagaggtcagcgaggacgctaactgtcagtggtgtgtatcctctgtttggacgaaatgcttccaacctctcaggagctgccttgcgagttcatgtggttctttcctctctttcctcacaccttgagcccactcatgagctggactccatggactgcagcagccacagtgagtctgagcagctccccagaaggaatgatgaggtccagctctctccaccagaagtcatctcctgccaccagaagtctcctgcctccacccaggtcccctgcagcagcaccacagctgaagtccgcctgacgcaggagggccctgctgatttggatggaacgtttgcagtcagcatcctagtagaaagagcaatgcacttgagcttgaaagggagccccttgacagagcggaaagtatcgatacccagttgttgtgtatcctttgcaacagccgatgagtcatctcctgtatacacccaagtggttgaaaacacagattcccccatctggaattttcaacagcagtcaaggctatcaaaagagctgcttctggacccacaacaaaccctggtcttcaaagtttggcataaaggagatgaggagagggtgattggctttgcctcggtggacctctccccacttctctctggcttccagtttgtctgtggctggtacaacatcacagacttcagtggagagtgccaggggcagataaaagttgctgtctcccctttggagagtttgatacacttcaaagaagaaaggcaagcaaggcgtggagtggagacctcaaaatcactgatcccaatatacagtcccttttccttccctgcctctgatacgtatgctgcattctccagccacatggcaaggcagaccctagaccaacttgctcatgcctcctcaaaggagcttgatttctcctctcctgggagaagtgataccacaagaagccaagcatcacgccatgaagagcatgtgcagaacattcgccggtttcatgaatccctgcatcttcagggagaggcacccttgccatgtgatgacaaactgaccacatcacctttgtcctcccaaacctccattctgacttctctcaggaagaatctgagtgagcttgatcagattcagaggtacttccgccagaagctcaccaagcctttcctacccctcagccctcagactcaaacggccatctcacagcaccaggagagctgtagggaccatcttgggccaggtgccagcagcctagaccctgggagccagtgtatcctggagaaatccagtaacctggtgttgcaagtcagctccttaatcacagatctgcagactatcaccagggattcgcaagcagctttgagttctcaccgagccaggagtagaagcaacaaggccaccaccctcccagatgctcaggacacagaagcactgcaagaacgatgcacaatgccagatgagccattggtaagagctccagataaaggcacagattccccatcaccccctcctctcgaagagacttcaaatggaggaagaatgctccatgagtccctgaggcatgcagtacccattacaaggatgcagagcagtgaagacactgaggcaggcccagcctacagtgatgaggactatgaagaagacatcattgagcccaggaccttaaatgagatcaccacggtgacagacaaaactagcccttggtctagtgtcatatcagacacaagtgaggtcatcagccctcagcctgacgaggtgcagagggaaggcccctcttgtccttctccagggcctttctgcagagaggagcttatggtcaaaagtagctttctctccagcccagaaagggctgtcaacccccacctgcctaggcagggttctcctagccaaagtcttgttgcttgtgagtgtgaggcctctaaggccagggttggtggcgagtctgcctcagccaaccctcagcccatcccatgcccaacactctcaggagctcaacagagcagcacgtttgttggatggagctcaccacagacagatcagaacaaggagcccaagtcagaggccccagctgagaatgaagctgccaccagtgagctcggtgactctgctgatagcttcaagaagttgccgctaaatctagcctcccagagcagaagggaaaaccataagggaccacccatcgactcctctgacatcaggcagaggcaggtgacaactggatcagagacgtccacaaagcagagcctcctgctcccagggcccattgtggtgcccaacttctttttgcctccccagcagttggaggcttccctgcggatgctttcactctcagcaactttgccaccagcagccacaacagatcaggacaagagcgaagccaccaggggagctctctcccaaaggccttgtcgccccagacctaactcgctccccctcaacctgcctgaggaagaaactctcaggattgcacggatattttcttctcagtactcccagaaagactga

SEQ ID NO: 105100 - DNA, 7062 bp, Artificial Sequence
  derived and/or modified sequence
atgaaacagagaaaaggacagggtagcggcggttcacgcggtagaaagaagagagggttatcagatatttcgccaagcacatctttacctcccctggtggaaggccaattaaggtgttttctcaaactcaccgtcaacagggtgatctggaaaatcgctaaacctccgacctgcgtccttgtccgcgtgagatggtggggagagaccagcgacggcactttgttttgcccgcgcgatgctctgcagaccgagcccaaagcagtaagaaccaccacacggtacgccatccgctgtggcccaaaacaattcacttcttacttgaccgacatggcggtactggtgctcgaggttatcacaaaactggatggcctccccatcggtagagtgcagatcaacggattagcgcagctgtctccaactcaccagataaacggtttcttcaccattgtatcttccacaagtaaaaagctgggcgaactgcaggtatctctggcacttgagcccctgagcgaaacctacgactcttaccacccgttgccaaccactgacatgaccgagaatgtactgttgtctaagcagggttttcgcgagaatacagagcccagtagcacccagtttcaagtaccctccagacctagggacattcacactatcaagatcgatgggaaggagttagccgctaactcttctaggtccaccacgccccgtggaaaagatcacgtgtgtttcgccgagaaccctgacaccattaaagactccagctttgggcttcagcattccctcaactccggacagagcttggaatctgtaactctcaaaggaagggcgccccgcaaacaaatgtcactcctaaatagttctgaattccaaccgcagatacgcaccgtggccaaatcacactcagacagttgcatattgagctcaaataacctaccaactaaggacctactgagcgccttgctggagcagggaaacaaactaaggaacgcaatggtgatctcagccatgaagtctagccccgagacctccatgctgctggaccaggtgcacccacccattaacgaggactcactacgcgcgtccacccaaatcagagccttcagtcggaaccgcttcaaagatcacatcgaagaccatctgctaccctcaaccgaaaacactttttggcggcacgacactaaggcggatacccgcgcaatccagctactgctggggagtgctgagctctctcagggtaacttttgggacggccttggttcacctccagactctccgtctcctggatccgatgtatactgcatctcagagctgaacgatccacagtacgatcagtcattattggagaacttgttttatactgcaccaaagagtgacaccagcatctctgacttcttgtccgaggaagatgatatcgtccccagtaaaaaaatttcacagtctaccgccctagctaggagctccaaagttctcgagagctccgatcacaagcttaagaaacggtcggccggaaagagaaatagaaatttggtcgaacagcagatgctgtcggagacacctgaagacgcacaaaccatgacactgagtgtggaccgcctggcactcctgggaagaactcatagtgttcgcatcatcatcgagacaatgggcgtgcctcccgattctcctcagatgacgccagggaagaagtcctatgcggggcccccacctaaggtcacaactgcaaaaaaaaggacattctttgttgagtatcatttcccggtgggatttagcgaatctgggctcgggaagacagcgctcataacggaggtggttcggctggcctcctcaaagattactgatggaaaagtaaaatttcagcagcgattcgtgtttcctgtgcaatttggtgggccgatgatcgagcactggtggaacagtaacctgaccttccaaatctatgtgaagaaaacaccgcaaaagaaacccgaggtgattggctctgtgagtctctctttgcgtgcagttattcaaagcgaactgctttctttcagtgatcagctacctgtccagcaggagaatggacagtccccttttggcccactaaaagtcacaatggaattgatcacggataataaagactttacaggcattaacaccaagctcagcggaaatacacactatacccctctctgcgccccaacatctcctaataaagctctgccagagttgaatcaggacatgacttgcactaagaatccccaaaaccttaatcaaatccacgaggagaccgcaaagaaggcccagaatctggttttacctaatagaaaaagcccaagccccgtcgctccacacccatccacattcgtggctactccggcaagccataatctggtcaatcaaaccaacggaaccacaaaggaatcggctttactgttgcacgtacttctcatggtcccagatggtaaagactttattagcggcgagagcgaaaagcaatctccatgcaatgtatatttgaactgtaaactgttttctaccgaggaagtaaccagaagcgttattgcctggggaaccacacaaccagtgttcaacttctcgcaagtgatccctgtttctttatctagcaaatacctggagcggctcaaaaacaacgtaatggtcattgaaacttggaacaaggtacgatctcccggacaggacaagctgttaggccttgtcaaactgcctttgcaccagttttacatgagcttcaaagacgcaaagatctctcgcctgctgctggatgctcagtatcccgtggtggccgtcgactcatacatgccagttattgacgtcttcagtggccatcagaacggcagcttaagggttttcctggcaatgggcagttccaatcagattatggcactgcaaagactaaaaaatgaagaagggaccctgccaccttttagcccaagaccagctcatttcctcgatcagccaaccgctgcaagcgtggccatggctgaagatagaggcaacgggttaatggagcactgcttcgagattcacattgagatggtgaagggtctggcgcctctccaggctaccgtgtggggagaggccgattgttacgtgcagtactattttcccgtgcagcacagccagtcctcggtgctgaaaggccctgagttcctcgagaatggaatcacattgaaacctttccgcacggcaacaacattatgcgtgccagatccaatatttaattctgagcatcaccactccttgctgttgcccgcagaagtgcctgttcagagacttctactgtcagcgtttagcgctcagggactggtgcctggcggtggtgtccagttcgagatctggtgcaggtactattatcctaatgtcagggatcagaaagtggcaaaaggcacactccccctctcccgcatttgtgcgatggtcacaactcaacatagggaggatgtgggtattcagacctttaacctacctctaaccccaaggattgagaatagaaaagagcttagaaaccaatcaagcggcctgttggatgtgggactgcgatacaggcggagcccgcgcacagctgagggagttctcgccgcccggaccgttagcatcagtgtccaaattattcgcgcatgcggactgcaggccgccgctaaggcattagccgagagggaacctgcccttcagttctctgccacagtgggggtcaacgcatcggtgacaacacacctgtcttttttgcctcaaggggaacagcggcggacccatccagtggcatgctctttctgcccagagttttcacaccatgttgagttcacctgtaatctcgttacgcagcattgctccggggaagcctgctttctggctgagctgttggaatttgcggaggtaatcttcgcagtttatcatgaaaatacgaagagtgcctccgacatcattagtatcgagtcctgtaaggaatatctgctgggggtcgttaaagtgccaacgaaggagttgctcatcaagaggagtggcataaccggctggtacccgattattctgcccgaagacggcggcctgcctcatggactggagttgatgcagaaaatcgtgggggggttagagctgagcatctccttcacacacaggggtgatcgggaacgggtattggaagctgccgaacacctcggatggagctttgagaacagtctcaaagactttgttcgaatggatgagggcgagcctgcaaccgtgaccatctctacaccccgtttgtggttacccatccattgtgtcctgcttgccgggcataatcacattcacaagaatacttattgttatctgcggtataagttctatgaccacgaggccttttggacaccactgaagaagcccaaagagagcgtcaacaaaaagcagattatggtgacattcaaagcatcaaaaagggcggaagtgactagaggcccgtcacttctttggtactttcgggaggagcgactcgagatccaagtgtggcgggcgtacggtaacgattccgtggagaggcctcatcagacagatagttggatcggcagtgcttatgtagatttggcccggctgggagagcgatctgctcggactcttactgtgtctggtgtgtaccctctgtttggaaggaatgctagcaacttatcaggcgctgcactgagagtacatgtagtacttagctccctgtcctcacatcttgagccaacgcacgagctagactccatggattgcagtagccactccgaatcagagcaactccccagaagaaacgacgaggtgcagttatctccgcctgaagtgatcagttgtcaccagaagtctcctgcctctactcaagtcccctgtagcagcaccaccgctgaagtgaggcttacccaggaaggccccgccgatctggatggaactttcgcggtaagcattctcgtggaaagagctatgcacctgtcccttaagggtagtcccctcaccgagagaaaggtctccataccatcctgctgtgtctcattcgcaacggctgacgagagctccccagtttacacacaggtggtagaaaacactgactccccaatttggaactttcagcagcagtccaggctgagtaaagaattactgctggatccccagcagaccttggtcttcaaagtctggcacaagggggatgaggagagggtcatcgggttcgcatccgtggacctctccccactgctcagtggatttcagtttgtatgtgggtggtataatatcactgatttctcaggcgagtgccagggccaaattaaagttgccgtcagcccgctggaatctctcatccactttaaggaggaacgccaggccagacgcggcgttgagacttcaaaatctctgattcctatctactccccattctccttcccagctagcgatacctatgccgcgttttcaagtcacatggcccgccagaccctcgatcagctggctcacgcgtcttcaaaggaactcgatttctcctcaccaggaaggtctgacactactcgttcacaggcctctcgacatgaggagcatgttcagaatatcaggaggtttcacgagtccttacatctacagggcgaagctcccctcccttgtgacgacaagttaacgacttctcccctcagttcccagaccagcatcctgacctccttgagaaagaatttgagcgaacttgaccaaattcagcggtatttcagacaaaagttgacaaaaccattcctgcccctctccccacagactcaaactgcaatctcacaacaccaggaatcatgcagggatcatctgggtcctggtgcgtctagtctggacccgggaagccagtgtatcctagaaaaaagctccaatctcgtgcttcaggtttccagtctgatcacggatctgcagaccatcactcgcgacagtcaggctgcactaagtagtcacagagccagatctcggagcaacaaagcaaccaccctgcctgacgctcaggataccgaagcactccaggagcgttgcactatgcccgacgagcctcttgtgcgggctcctgataagggcacagactccccctctccgccaccactggaggagacttcgaatgggggaagaatgttgcacgagagtctgcgacacgcagtcccaattacgcggatgcagagcagcgaggacacagaagcgggccccgcatattctgatgaggactatgaggaggatatcattgaaccccggaccctgaacgagatcaccaccgtcaccgataaaactagcccatggtcctccgttatttcagacacctccgaagtcattagccctcaacctgatgaggttcagagggagggaccctcatgcccctcccccggacctttttgccgagaggagctcatggtgaagtcctcattccttagtagcccagagagagcagttaatccacacctgcctaggcagggcagcccctcccagtccctggtagcatgcgagtgcgaagcttccaaggcacgggtaggaggcgagtccgcctctgcgaatcctcagccgattccttgtcctactctcagcggggcccaacaatcaagcacatttgtcgggtggagctcgcctcagacagaccaaaacaaggaacccaaatcagaagcacccgcggaaaacgaggccgcaaccagcgagctgggcgactcggctgacagctttaagaagctgccactgaatctggcaagccagtcaagacgggaaaatcacaaaggtcctcctattgatagctcagatatccgacagcggcaagtgacaactggctccgagacttctacaaagcagtcccttctgttaccaggccccatcgtggtgccaaacttctttctcccccctcagcagctggaagcctcactgaggatgctcagtctcagtgccaccctgccaccagctgcaacaactgaccaagacaaatcagaagccactaggggcgcactgagccagagaccgtgtagacctcgccctaacagcctgcctctgaacctgcccgaggaggagacactgcgaattgctcgtattttttcatctcagtacagtcagaaagactag

SEQ ID NO: 105101 - DNA, 7062 bp, Artificial Sequence
  derived and/or modified sequence
atgaagcagaggaagggccagggcagcggcggcagccggggcaggaagaagaggggcctgagtgacatcagccccagcaccagcctgccccccctggtggagggccagctgcgctgcttcctgaagctgactgtgaacagagtcatctggaagatcgccaagccacccacctgtgtgctggtgcgggtgcgctggtggggcgagaccagtgatggcaccctcttctgccccagagatgccctgcagacagagcccaaggctgtgaggaccaccaccaggtatgccatccgctgtggccccaagcagttcaccagctacctgacagacatggctgtgctggtgctggaggtgatcaccaagctggatggcctgcccatcggccgggtgcagatcaatggcctggcccagctgagccccacccaccagatcaatggcttcttcaccatcgtgagcagcaccagcaagaagctgggggagctgcaggtgtccctggccctggagcccctgtctgagacctatgacagctaccaccccctgcccaccacagacatgacagaaaatgtgctgctgagcaagcagggcttcagagaaaatacagagcccagcagcacccagttccaggtgcccagccggccccgggacatccacaccatcaagattgatggcaaggagctggccgccaacagcagccgcagcaccaccccccggggcaaggaccacgtgtgctttgctgaaaatccagacaccatcaaggacagcagctttggcctgcagcacagcctgaacagcggccagagcctggagagcgtgaccctgaagggccgggcccccaggaagcagatgagcctgctgaacagcagcgagttccagccccagatcagaacagtggccaagagccacagcgacagctgcatcctgagcagcaacaacctgcccaccaaggacctgctgagcgccctgctggagcagggcaacaagctgagaaatgccatggtgatcagcgccatgaagagcagccctgagacctccatgctgctggaccaggtgcacccccccatcaatgaagacagcctgcgggccagcacccagatccgggccttcagcaggaaccgcttcaaggaccacatcgaggaccacctgctgcccagcacagagaacaccttctggaggcatgacaccaaggctgacacccgggccatccagctgctgctgggcagcgctgagctgagccagggcaacttctgggatggcctgggcagccccccagacagccccagccctggcagtgatgtgtactgcatcagcgagctgaatgacccccagtatgaccagagcctgctggagaacctcttctacacagcccccaagagtgacaccagcatcagtgacttcctgtctgaggaggatgacatcgtgcccagcaagaagatcagccagagcacagccctggcccggagcagcaaggtgctggagagcagtgaccacaagctgaagaagaggtctgctgggaagaggaacagaaacctggtggagcagcagatgctgtctgagaccccagaagatgcccagaccatgaccctgtctgtggaccggctggccctgctgggccgcacccacagcgtgcgcatcatcatcgagaccatgggcgtgcccccagacagcccccagatgaccccaggcaagaagagctatgccggccccccacccaaggtgaccacagccaagaagaggaccttctttgtggagtaccacttccctgtgggcttcagcgagagcggcctgggcaagacagccctgatcacagaggtggtgcggctggccagcagcaagatcacagatggcaaggtgaagttccagcagagatttgtgtttcctgtgcagtttggaggccccatgattgagcactggtggaacagcaacctgaccttccagatctacgtgaagaagaccccccagaagaagccagaggtgattggctctgtgtccctgagcctgcgggctgtgatccagagcgagctgctgtccttcagtgaccagctgcctgtgcagcaggagaatggccagagccccttcggccccctgaaggtgaccatggagctgatcacagacaacaaggacttcaccggcatcaacaccaagctgagcggcaacacccactacacccccctgtgtgcccccaccagccccaacaaggccctgcctgagctgaaccaggacatgacctgcaccaagaacccccagaacctgaaccagatccacgaggagacagccaagaaggcccagaacctggtgctgcccaacaggaagagccccagccctgtggccccccaccccagcacctttgtggccaccccagccagccacaacctggtgaaccagaccaacggcaccaccaaggagagcgccctgctgctgcacgtgctgctgatggtgcctgatggcaaggacttcatctctggagagagcgagaagcagagcccctgcaatgtgtacctgaactgcaagctgttcagcacagaggaggtgaccaggtctgtgattgcctggggcaccacccagcccgtcttcaacttcagccaggtgattcctgtgtccctgagcagcaagtacctggagcggctgaagaacaacgtgatggtgattgagacctggaacaaggtgcgcagccctggccaggacaagctgctgggcctggtgaagctgcccctgcaccagttctacatgtccttcaaggatgccaagatcagccggctgctgctggatgcccagtaccctgtggtggccgtggacagctacatgcctgtgattgatgtgttcagcggccaccagaatggcagcctgcgggtcttcctggccatgggcagcagcaaccagatcatggccctgcagaggctgaagaatgaggagggcaccctgccccccttcagccccaggcctgcccacttcctggaccagcccacagctgcctctgtggccatggctgaagatagaggaaatggcctgatggagcactgctttgagatccacatcgagatggtgaagggcctggcccccctgcaggccaccgtgtggggcgaggccgactgctacgtgcagtactacttccctgtgcagcacagccagagctctgtgctgaagggccctgagttcctggagaatggcatcaccctgaagcccttcagaacagccaccaccctgtgtgtgcctgaccccatcttcaacagcgagcaccaccacagcctgctgctgcctgctgaggtgcctgtgcagaggctgctgctgagcgccttcagcgcccagggcctggtgcctgggggcggcgtgcagtttgagatctggtgccgctactactaccccaacgtgcgggaccagaaggtggccaagggcaccctgcccctgagccgcatctgtgccatggtgaccacccagcaccgggaggatgtgggcatccagaccttcaacctgcccctgaccccaagaattgagaacaggaaggagctgaggaaccagagcagcggcctgctggatgtgggcctgcgctaccgccgcagccccaggacagctgagggcgtgctggccgccaggacagtgtccatctctgtgcagatcatccgggcctgtggcctgcaggccgccgccaaggccctggccgagcgggagcccgccctgcagttcagcgccaccgtgggcgtgaatgcctctgtgaccacccacctgtccttcctgccccagggcgagcagaggaggacccaccctgtggcctgcagcttctgcccagagttcagccaccacgtggagttcacctgcaacctggtgacccagcactgcagcggggaggcctgcttcctggccgagctgctggagtttgctgaggtgatctttgctgtgtaccacgagaacaccaagagcgccagtgacatcatcagcattgagagctgcaaggagtacctgctgggcgtggtgaaggtgcccaccaaggagctgctgatcaagaggagcggcatcaccggctggtaccccatcatcctgcctgaagatggcggcctgccccacggcctggagctgatgcagaagatcgtgggcggcctggagctgagcatctccttcacccacagaggagaccgggagcgggtgctggaggccgctgagcacctgggctggagctttgagaacagcctgaaggactttgtgaggatggatgaaggagagcccgccaccgtgaccatcagcaccccccggctgtggctgcccatccactgtgtgctgctggccggccacaaccacatccacaagaacacctactgctacctgcgctacaagttctatgaccacgaggccttctggacccccctgaagaagcccaaggagagcgtgaacaagaagcagatcatggtgaccttcaaggccagcaagagagctgaggtgacccggggccccagcctgctgtggtacttccgggaggagcggctggagatccaggtgtggagggcctatggaaatgacagcgtggagcggccccaccagacagacagctggattggcagcgcctacgtggacctggcccggctgggggagaggtctgcccggaccctgactgtgtctggagtgtaccccctgtttggaagaaatgccagcaacctgagcggggccgccctgcgggtgcacgtggtgctgagcagcctgagcagccacctggagcccacccatgagctggacagcatggactgcagcagccacagcgagagcgagcagctgcccaggagaaatgatgaggtgcagctgagccccccagaggtgatcagctgccaccagaagagccctgccagcacccaggtgccctgcagcagcaccacagctgaggtgcggctgacccaggagggccctgctgacctggatggcacctttgctgtgtccatcctggtggagcgggccatgcacctgagcctgaagggcagccccctgacagagaggaaggtgtccatccccagctgctgcgtgtcctttgccacagcagatgagagcagccctgtgtacacccaggtggtggagaacacagacagccccatctggaacttccagcagcagagccggctgagcaaggagctgctgctggacccccagcagaccctggtgttcaaggtgtggcacaagggagatgaggagagggtcatcggctttgcctctgtggacctgagccccctgctgagcggcttccagtttgtgtgtggctggtacaacatcacagacttctctggagagtgccagggccagatcaaggtggccgtgagccccctggagagcctcatccacttcaaggaggagcggcaggcccggcggggcgtggagaccagcaagagcctcatccccatctacagccccttctccttccctgccagtgacacctatgctgccttcagcagccacatggcccggcagaccctggaccagctggcccacgccagcagcaaggagctggacttcagcagccctggccgcagtgacaccaccaggagccaggccagcagacatgaggagcacgtgcagaacatccgccgcttccacgagagcctgcacctgcagggcgaggcccccctgccctgtgatgacaagctgaccaccagccccctgagcagccagaccagcatcctgaccagcctgaggaagaacctgtctgagctggaccagatccagcgctacttccggcagaagctgaccaagcccttcctgcccctgagcccccagacccagacagccatcagccagcaccaggagagctgccgggaccacctgggccctggggccagcagcctggaccccggcagccagtgcatcctggagaagagcagcaacctggtgctgcaggtgagcagcctcatcacagacctgcagaccatcacccgggacagccaggccgccctgagcagccaccgggcccggagccgcagcaacaaggccaccaccctgcctgatgcccaggacacagaggccctgcaggagcgctgcaccatgccagatgagcccctggtgcgggccccagacaagggcacagacagccccagccccccacccctggaggagaccagcaatggaggccgcatgctgcacgagagcctgcggcatgctgtgcccatcaccaggatgcagagcagcgaggacacagaagctggccctgcctacagtgatgaggactatgaggaggacatcatcgagcccaggaccctgaatgagatcaccaccgtgacagacaagaccagcccctggagcagcgtcatcagtgacaccagcgaggtgatcagcccccagccagatgaggtgcagcgggagggccccagctgccccagccctggccccttctgccgggaggagctgatggtgaagagcagcttcctgagcagccctgagagagctgtgaacccccacctgccccggcagggcagccccagccagagcctggtggcctgtgaatgtgaggccagcaaggcccgggtgggcggggagagcgccagcgccaacccccagcccatcccctgccccaccctgagcggggcccagcagagcagcacctttgtgggctggagcagcccccagacagaccagaacaaggagcccaagtctgaggccccagcagaaaatgaagctgccaccagcgagctgggggacagcgctgacagcttcaagaagctgcccctgaacctggccagccagagcagaagagagaaccacaagggcccccccatcgacagcagtgacatccggcagaggcaggtgaccaccggcagcgagaccagcaccaagcagagcctgctgctgcccggccccatcgtggtgcccaacttcttcctgcccccccagcagctggaggccagcctgaggatgctgagcctgagcgccaccctgcccccagctgccaccacagaccaggacaagtctgaggccaccaggggggccctgagccagaggccctgccggccccggcccaacagcctgcccctgaacctgcctgaggaggagaccctgagaattgcccgcatcttcagcagccagtacagccagaaggactag

SEQ ID NO: 105102 - DNA, 7062 bp, Artificial Sequence
  derived and/or modified sequence
atgaagcagcggaagggccagggcagcggcggcagccggggccggaaaaaacgcggtttgtccgatatctcccctagcaccagcctccctcccctagtagagggccagcttcgatgctttctcaagctaaccgtgaacagggtcatctggaaaattgccaagcctcctacatgtgtcctcgtgcgggtgagatggtggggcgagacttctgatggaactctgttttgcccaagagacgcccttcagacggaaccaaaggccgtacggactactacccgctacgccataagatgcggccccaagcagtttacatcgtatttaacagatatggctgtgctcgtgctggaagtaatcactaaacttgacggcttacctataggcagagtccagatcaacggcctcgcacagctgagtccaacgcaccagatcaacggctttttcacaatcgtgagttctactagtaagaaactgggggagctgcaggtgagcctagcattggaaccgctgagcgaaacctacgactcataccatccactaccaacgaccgacatgacggaaaacgtcttgttgtcgaaacagggcttcagggaaaataccgagccctcaagcacacagttccaggttccctcgaggcccagggacatccacacaattaagattgatggcaaggagctagctgctaatagctcccgcagcactacgccgaggggcaaggaccacgtgtgcttcgcagagaaccctgataccatcaaggactcatctttcggcctgcagcattcattaaacagcggccagagtctcgaatctgtgactttgaaagggcgcgctcccagaaaacagatgtcgctcctcaacagctcggagttccagcctcaaatccgcactgtggccaaatcccattcagactcctgcatcctgagttctaataacttacctacaaaagatctgctcagtgccctcctggaacagggaaacaagttgcggaacgcaatggtgatcagtgccatgaagtcatcacctgaaacttcaatgctcttagatcaagtacacccgcccatcaacgaggactccctgcgggcctctacccaaattagggccttttcccgaaatcgctttaaggaccacatcgaagatcacctgctcccatccacagaaaatacattctggcggcacgacacaaaggcggacacacgtgctatccaactcctcctgggaagtgccgaactgtcccaaggcaatttctgggatggtctgggctccccgcccgattcacccagcccagggtcggatgtctattgcattagcgagctgaatgatccccagtacgaccagtccctcctagaaaacctgttttatactgcccctaagagcgacacctcgatttctgacttcttgagcgaggaggatgacattgttcctagtaagaagatctctcagagtaccgctctagccaggtcctctaaggtgttagaatctagtgatcacaagctcaagaaaaggtcagccgggaagcgcaaccgaaacctcgtggagcagcagatgctttcagagaccccggaggatgcccagaccatgactctgtcagtggatcggctcgccctccttggcagaacacacagtgtgagaatcataattgaaacaatgggagtcccccccgacagcccccaaatgacgccagggaagaaatcttatgctggcccccctccaaaggtgaccactgccaagaaacgcacctttttcgtggagtaccacttcccagtcggtttctccgagtctgggttaggtaaaacagctctgattactgaggtcgtgcgccttgctagtagtaagattacagatggtaaggtaaagtttcagcaaaggttcgtatttcccgtccagttcggtggccctatgattgagcattggtggaacagcaatctgacctttcaaatctatgtgaagaagactccacaaaaaaagccagaggttattggctcggtctctctgtcactacgtgcagtaattcaatcagagcttttgagctttagtgaccagctgcctgtgcagcaggagaatggccaatctcccttcggtccactaaaggtcacaatggagctgataacagataacaaagatttcacaggaatcaacaccaaactgtcggggaatacccattatacacccctctgcgctccaacttcgcctaacaaagctctgccagaacttaatcaggacatgacatgcaccaagaatcctcaaaatttgaatcagatccacgaagagacggccaagaaagctcagaacttggtgttacctaacagaaagagcccaagtccagttgcaccccatccatccacgttcgtcgcgactcccgcttcgcacaatctggttaatcagaccaacgggaccacaaaggagagcgctttgctgctccatgtgctgctgatggtccctgacggcaaggacttcattagtggagaaagcgagaaacagtctccgtgcaacgtctatttgaactgcaaattattctccaccgaggaagtcactcgatcagtgatcgcctggggcactacccagcctgtgtttaacttctcgcaggtgatccccgtgagtctgtctagtaaatatctggaacgtctgaaaaataacgtaatggtcatcgagacctggaacaaagtgaggagtcccggccaagacaaattactggggctggtcaagctcccgctgcaccaattttacatgagcttcaaggatgcgaaaatcagtcgcttgctgctagacgctcaataccccgtcgttgccgttgacagctacatgccagtgattgatgtgttttccggacaccagaatggcagcctcagagtgtttttggcaatgggatcatccaatcagatcatggcccttcagcgcctgaagaacgaggaaggaacactgccaccgttttcaccacgacccgcacatttcctggatcaacctactgccgcttcggtggcaatggccgaagatcgcggtaacggcctaatggaacattgctttgagattcacattgagatggtgaagggccttgcccctctccaggcaaccgtctggggggaggcagattgttacgtgcagtactactttccggtgcaacacagccagtcctccgtgctgaaagggcctgagttcctcgaaaatgggattactctgaagccctttcggacagccacaactctttgcgtaccagatccaatcttcaatagcgaacatcaccacagccttctcctccctgctgaagttccggttcaacgattgttattgagcgcgttctccgcccaaggcctcgtccccggggggggtgttcagttcgagatttggtgccgctattattatcctaatgtccgcgatcagaaggtcgcgaagggaacactgcccctgtctcgcatctgcgctatggtgacaacacagcaccgggaggacgttgggattcagaccttcaatctgccattgacgcctagaattgagaaccgaaaggagttgaggaaccaatctagcggcctgctcgatgtaggcctgcgttatcgacggtctccccgtaccgcagagggggtgctggcagccagaacagtctcaatatcggtccagattatccgggcatgtgggcttcaagctgcggcgaaggccctggcagaaagagagcccgcgttacagtttagcgccaccgtgggagtgaacgccagtgtcacaacgcatctctcctttctcccccagggagaacagcgcaggacccaccccgtcgcctgttccttctgcccagagtttagtcatcacgtagagttcacttgtaatctggttactcaacattgctcaggggaagcttgctttctggcagagttattggagttcgcagaggtaatatttgcggtgtatcacgagaacacgaagagtgcgtccgacatcatctccatcgaatcttgcaaggagtatcttctcggtgtggtgaaggtgcccacaaaggagctcttgataaaacggtctggtatcacgggttggtaccccatcatactgcctgaagacggaggcctcccacacgggcttgagttgatgcagaaaatcgtcggtggtcttgaactctcaatcagtttcactcaccggggggatagagaacgcgtgttagaggcggccgagcatttaggatggagtttcgaaaattctctgaaggacttcgttagaatggatgagggcgagccagcgacagtcacaatctccacacccaggctctggctgcccattcattgtgttctcttagcaggacacaaccatatccacaagaatacttactgctatctgcggtacaaattttacgatcacgaagccttttggacgcccttaaagaagccgaaagagagcgtgaataagaaacagattatggtgacattcaaggctagcaaacgggctgaggttacaagaggtcctagcctgctgtggtactttcgggaggagcgcttagaaattcaggtctggcgtgcttatggcaatgattccgtggaacgtccccaccagacagactcttggattggatctgcgtacgtagatcttgcaaggctgggggagaggagcgctcggacactcaccgtgtctggggtgtatcccctttttggtagaaatgcctcaaacctatccggcgccgctctgagagtccacgtggttctctctagcctgtcctcacacctcgagcccacgcatgagctggactcgatggactgttcttcacacagtgagtccgaacaattacctaggagaaacgacgaggtgcagctttctccccctgaagtgatcagctgccaccagaagagtccagcaagcactcaagtgccatgctcctccacaactgctgaagtacggctaacccaagaagggcccgctgacttagatggcactttcgcagtgagtatcttggtggaaagggcaatgcatcttagcctgaaggggtcccccctcacggagagaaaggtgtcaatccccagctgttgtgtgtccttcgccactgcagatgagtcatcacctgtgtatacacaggtggtagaaaatacagacagccctatttggaacttccagcagcagagtcgcctgtcaaaggaactgctgctcgacccgcagcagactctcgtgttcaaggtttggcataaaggagacgaggagagagtgatcggattcgcttcagttgacctgagtccactcttgagcgggttccagttcgtctgcggctggtataatatcactgatttctccggcgagtgccaaggtcagatcaaggtagccgtgtcaccgctggaatcactgatccacttcaaagaagagcgacaggcaagaagaggcgtggagacgtcgaaaagcctgattcccatttattcccccttcagcttccccgctagcgatacatacgccgccttctctagtcatatggcccggcagaccctagatcagcttgcccacgctagtagtaaggagctggacttttccagtccaggcagatcggacaccaccagatcacaagcatcccgccacgaggaacacgtgcagaatattcgacgcttccatgaatcactgcacttgcagggcgaagcccctcttccatgtgacgacaaactcaccacttccccattgtcctcgcaaaccagcatcctgacttcactaagaaagaatctgtctgaactggaccaaattcagaggtattttagacagaagctcactaaacccttcctgcctttgtccccacagacccaaactgccatttcacagcaccaagaatcttgtcgcgatcacctggggccgggggcaagcagcctggatcccgggtcgcagtgcatcctggaaaagtcaagcaatctcgttctacaagtgagctccctcatcactgacctgcagaccatcacgcgagactctcaagcagctctgagctctcacagagccagatcccggtccaacaaggcaacaacgctacccgatgcccaggatacagaggccttgcaggagcggtgtactatgccagacgagccccttgtgagggcgccggacaagggtaccgattccccttccccaccccccttagaagaaacaagcaacggcggacgtatgctccatgagagccttagacatgccgtcccaatcactcgtatgcagtcgtcagaggataccgaagccggacctgcctacagcgatgaggattacgaagaagacattattgagcctcgcactttgaatgaaatcactacggtgaccgacaagacatccccatggagtagcgtgatctccgacacatctgaggtgatttcgccgcaacccgacgaggtgcagagggaaggtccctcctgcccatcacccggtcctttttgccgcgaggagctgatggtgaagtctagcttcctgtcttcccccgaacgcgcagttaacccccatctgccgagacaaggctccccgtcccaatcactcgtcgcctgtgaatgtgaggcctccaaggcccgtgtgggtggggagtccgcctccgccaacccccaacctataccctgcccaaccctcagtggagctcagcagagcagtacctttgtgggatggtcgagcccccagacagatcagaataaggaacccaaatcagaggctcccgctgagaacgaggctgcgaccagcgaacttggggactccgctgatagcttcaagaaactgcccctaaaccttgcttcgcagtctagacgggaaaaccataagggaccacctattgactcctctgatattcgccaaaggcaggtcacgaccgggagcgaaacctctaccaaacaatcgctcctcctgccaggccccattgtagtgccgaacttctttttgcccccccagcagctggaagcttctctgcgtatgctctcgctgagcgccaccctgccacctgccgccacaacggatcaggacaagtcggaagctactcggggggctctcagccagcggccatgccgaccaaggcccaattccctgccacttaacttgccagaggaagaaacactcaggatcgcgcgcatcttctcttcacaatatagccaaaaggactag

SEQ ID NO: 105103 - DNA, 7061 bp, Artificial Sequence
  derived and/or modified sequence
atgaagcaacggaagggtcaaggaagcgggggaagccggggtagaaagaaaaggggtttgtcagatatttctccatccacttcgctgccaccactggtggagggccagctgagatgctttctcaagctgacagtgaatcgagtgatctggaaaatcgctaagcccccaacctgcgttttagtccgggttcggtggtggggcgagacgagcgacggcactctcttctgtccccgtgatgccctgcagaccgaaccgaaagcagtgagaacaacaaccagatatgccatacggtgtggacccaagcagtttaccagctacctcaccgatatggctgtgctggtgctcgaagtcataacaaagctggacggactccccattggacgggtccagataaatggtcttgcgcagctgagccctactcatcagattaacggcttcttcaccatagtgtcttcaacatctaaaaagttaggggagctacaggtgagtctcgcattagagcccctgagcgaaacctacgactcgtaccacccattaccgacaaccgacatgaccgaaaacgtgctactgtctaagcaaggttttcgtgaaaatactgagccttccagcacacagttccaggtgccaagtaggccccgagacatccacaccattaagatcgacggtaaagagctagccgctaatagctccaggagcaccacgcccaggggaaaggatcacgtatgcttcgctgagaaccccgatacaatcaaagacagctccttcgggctgcagcattcactgaactcggggcagtcccttgaaagcgtaaccttaaaaggaagggcgcctagaaaacagatgtccctgctcaacagctctgagtttcaaccccaaattagaacagtggccaagtctcattctgattcatgcatcctgtcatctaacaacctcccaaccaaagacctgctgagtgcactgctagaacagggtaataagctgagaaatgccatggtaatatctgcgatgaaaagtagcccagaaactagtatgctcctggaccaggtgcaccctcctatcaatgaagattcccttagggccagtactcaaatccgagccttcagcagaaatagattcaaagaccacatcgaagaccatctgctcccctcgactgaaaacacattttggcgccacgatacaaaggctgacacaagggccattcagctgctcctggggtcagcagaactctcacagggtaatttctgggacggccttggtagtcccccagattccccatctcccggttcagatgtctactgcatctctgagttaaacgatcctcagtatgaccagagtttattagagaatctattctacaccgcgcctaagtctgatacatccatatccgatttcctatccgaggaagacgacattgtcccaagcaagaagatctcacagtccaccgccctcgccaggtcctctaaggttctggagtcaagtgaccacaaactaaagaaacgctcggccggtaagaggaatcgaaatctcgtcgaacaacaaatgttatcagagacacccgaggatgcccagactatgaccttatccgtggatcggctcgccctgctcggcaggactcactctgttagaattatcatcgagaccatgggggtgccaccagattcgcctcagatgacgcctggtaagaagtcttacgcaggaccccctcctaaggtgactactgctaagaagagaacattcttcgtggaatatcatttcccagtggggttcagtgaatcaggccttggtaaaacagccttaataaccgaagtggtcaggctagccagctccaagatcactgatggcaaggtgaagtttcagcaacgttttgtgtttccagtccaattcgggggacccatgatagaacattggtggaattccaatttgacatttcagatttatgtaaagaagacaccacagaagaaaccagaggtgatcggatcagtgagcttgagtttgcgggctgttatccaatccgagctcctgagtttttccgatcagctgcctgttcagcaggagaatggacagtctcctttcgggcctctcaaagttaccatggaattgatcactgacaataaggattttacaggtattaacacaaagctgtccggcaacacccattataccccgttgtgcgcgccaacttccccaaacaaggctcttcccgagctgaaccaggatatgacatgcaccaagaatccccagaatttaaatcaaatccatgaggagacggccaagaaagctcagaatctggtcctgcctaataggaaatcgccatcaccagtggcgccacacccaagcacatttgtggctactcctgcctctcacaatctagtcaaccaaaccaacggcaccaccaaagaatcggccttactactccatgtgctactcatggtgcccgatggtaaagattttatttccggcgagtctgagaaacagagtccctgcaatgtgtacctgaactgtaaattattctccaccgaagaggtgactcgatccgtgatcgcctggggtacaacccaaccagtgttcaatttctcccaggtgatccccgtctcattgtcctctaaataccttgagcgcctcaaaaataatgtgatggttatagaaacgtggaacaaggtgcggagccccggtcaggacaaactgttgggcctggttaagctcccattgcaccagttttatatgtccttcaaggacgccaagatctctcggctgttgttggatgcacagtaccccgtggttgctgtggattcctacatgcctgttattgacgtctttagtggccatcagaacggttctctgagagtcttcttagccatggggagttccaatcagatcatggcactgcagcgacttaaaaacgaggaggggactctgccaccattttctccccgacctgctcattttctcgaccagcctacagctgcatccgtcgccatggcagaggatcgcggtaatggcttaatggagcactgttttgaaatccatatcgaaatggtgaaaggacttgcaccactgcaagctaccgtctggggagaagcagattgctatgttcagtactactttccagttcagcattctcagtcgagtgttctcaagggaccagagttcttggaaaacggaatcacgcttaagcccttcagaaccgccacaactctttgcgtcccagacccaatattcaattccgagcaccatcattccctcctgcttcccgcagaagttcctgtccagagactacttctttcggctttcagtgctcagggcctcgtccccggtggcggagtccagtttgagatatggtgtcgctattactacccaaatgtaagggaccagaaagtcgccaaagggaccctgcctctcagccgcatttgtgcaatggtcaccactcagcatagagaggacgtggggatccaaacatttaatttgcctctgaccccccgtatagagaatagaaaagagctgagaaaccagtcttcaggcctgttggatgtcgggttacggtaccgtagaagccctcgaacagcggagggcgtgcttgcagctcgcactgtctctatcagcgtccagattatccgggcatgcggtctgcaggctgccgcaaaagctctagctgagcgcgagccggcactgcagttctcagccactgtgggcgttaatgcgtccgttacaacacacctgtcgtttctcccacaaggcgagcagaggcgtactcatcccgtggcttgttctttttgccccgagttcagtcatcatgtagagtttacttgtaaccttgtcactcagcattgctcaggagaggcatgtttcctagcagaactattagagttcgcagaggtgatattcgctgtttatcacgaaaatacaaagtcagcctccgacatcattagtatcgaatcctgcaaagagtatctgctcggggtggtcaaggtgcctaccaaagaattactgataaaacggagcggcataacggggtggtatcctatcattctgcccgaggatgggggactgccacacggacttgaactcatgcagaagatcgtgggtggtttagaattaagtatcagcttcactcatcggggagatagggagagagtactcgaggctgcagagcacctgggctggagcttcgaaaatagcctcaaagatttcgtgcgcatggatgagggggagcccgctacagttacaatctctacgcctcggctttggctgcccatccactgtgtcctcctggcagggcataatcatatccataagaacacctattgttacctgagatacaagttttatgaccacgaggctttttggactccgttgaagaaacccaaagagtccgtgaataaaaagcaaatcatggtgacattcaaggcttcaaaaagagccgaagtgactcggggaccttccttgttatggtacttcagagaggaacgcttggagattcaggtatggagggcatacgggaatgattctgtggagcgaccccatcagactgacagttggataggatctgcttacgttgatttggcgagacttggggagagatccgcgcgtaccctcacggtgtcaggagtttatccgttgtttggtcgcaatgccagcaatttatcaggagcagccctgcgtgtgcacgttgttttgagcagtctatcctcgcatctggagcccacccacgagctcgattccatggattgctcatctcattccgagagtgaacagttacccaggcgtaatgatgaggtgcagctgtcgccaccagaggtgattagttgtcaccaaaaatcccctgccagcacccaggtcccatgttcctctacaaccgcagaggtgcgacttacacaggaaggaccggctgaccttgatggaacgtttgccgtcagcatcctggtggaaagggcaatgcatctaagtctcaagggttccccgctgacagagaggaaggtgtcaattcctagctgttgtgtgtctttcgccaccgctgacgaatcaagcccggtgtacacacaagtggtggagaatactgattctccaatttggaattttcaacagcagtctaggctctccaaagaactgctgttggatcctcaacagacattagtgttcaaggtctggcacaaaggcgatgaagagagagttataggcttcgctagcgtcgacctcagtcccctgctgtccggatttcagtttgtttgtggctggtacaacattactgatttttcgggagagtgtcaagggcaaatcaaagtggccgtgagccccctggagtctctgattcatttcaaagaagagaggcaggctagaagaggcgttgagaccagcaaatcactcataccaatttactcacccttctccttccccgcttctgacacatatgcagccttctccagtcacatggcaagacaaacactggatcagttagctcatgcttcaagcaaggagttggatttctcttcccctggacggagcgacaccacaaggagccaggcatcccgtcacgaagaacacgtccaaaatattaggcgttttcacgagtctctgcacctccagggcgaagcgccactcccgtgcgacgacaagcttactacatctccgctgagcagccagacgtccatactcacttcactgaggaaaaacttgagcgagctggatcaaattcaaaggtatttccggcagaaactaacgaagccctttttgccactcagcccacagacccagacggctatttcccagcaccaggagagttgtagggaccatctcggtcccggtgccagttctcttgaccccggtagccagtgtatcctggagaagtcctcgaatttagtactgcaagtttcctctttaatcacggacctccaaactatcacccgcgattctcaagcagccctgtcttctcaccgagcccgatcccgcagcaacaaagccacgactttgccagacgctcaagataccgaagcgttgcaggagcggtgcactatgccagacgagcccttggttagagccccagacaagggaacagatagtccaagtccccctccattggaggaaaccagcaacggcggtcggatgctccatgagtccctgcggcatgccgtgcccattacgaggatgcagtccagcgaggacacggaggccggtccagcctattcagacgaagactatgaagaggacattattgagccacggacattgaatgagattacgaccgtgacggataaaacctctccttggagttcggtcatttccgatacttctgaggtaatttctcctcagccggacgaagttcagagagaagggcctagctgcccctctccaggaccgttttgccgtgaggagctcatggttaaatcaagctttttgagttcacccgagcgcgctgtgaacccacatttgcccagacagggaagtccttcgcaatccctcgttgcctgcgagtgtgaagcatccaaggccagggtcggtggggagtctgcctcagccaacccacagcccataccttgcccaactctcagcggggctcagcagagctcgaccttcgtcggctggagcagtcctcagactgaccaaaataaggagccaaagtcagaggccccagcggaaaacgaagccgcaactagtgaacttggcgatagcgccgatagcttcaagaaactgccgctgaacctggccagccagtcgcgcagagaaaatcacaaggggcctcctatcgatagttccgatattaggcagcggcaagtcactactggttctgagaccagcaccaaacaaagcctgctgctcccaggcccaattgtggtcccaaatttctttcttcctccccagcaactggaggcaagcctgcggatgttgagtctgtctgccaccttgccacccgctgccacaaccgaccaggacaagtctgaagctactaggggcgctttgtcccaaagaccctgtagacccagaccaaactccctgcctctgaacttgccagaagaggagactctccggatagccaggatatttagctcccaatatagccagaaggacta

SEQ ID NO: 105104 - protein, 1649 aa, Artificial Sequence
  derived and/or modified sequence
MDDDSLDELVARSPGPDGHPQVGPADPAGDFEESSVGSSGDSGDDSDSEHGDGTDGEDEGASEEEDLEDRSGSEDSEDDGETLLEVAGTQGKLEAAGSFNSDDDAESCPICLNAFRDQAVGTPENCAHYFCLDCIVEWSKNANSCPVDRTLFKCICIRAQFGGKILRKIPVENTKASEEEEDPTFCEVCGRSDREDRLLLCDGCDAGYHMECLDPPLQEVPVDEWFCPECAAPGVVLAADAGPVSEEEVSLLLADVVPTTSRLRPRAGRTRAIARTRQSERVRATVNRNRISTARRVQHTPGRLGSSLLDEAIEAVATGLSTAVYQRPLTPRTPARRKRKTRRRKKVPGRKKTPSGPSAKSKSSATRSKKRQHRVKKRRGKKVKSEATTRSRIARTLGLRRPVHSSCIPSVLKPVEPSLGLLRADIGAASLSLFGDPYELDPFDSSEELSANPLSPLSAKRRALSRSALQSHQPVARPVSVGLSRRRLPAAVPEPDLEEEPVPDLLGSILSGQSLLMLGSSDVIIHRDGSLSAKRAAPVSFQRNSGSLSRGEEGFKGCLQPRALPSGSPAQGPSGNRPQSTGLSCQGRSRTPARTAGAPVRLDLPAAPGAVQARNLSNGSVPGFRQSHSPWFNGTNKHTLPLASAASKISSRDSKPPCRSVVPGPPLKPAPRRTDISELPRIPKIRRDDGGGRRDAAPAHGQSIEIPSACISRLTGREGTGQPGRGTRAESEASSRVPREPGVHTGSSRPPAPSSHGSLAPLGPSRGKGVGSTFESFRINIPGNMAHSSQLSSPGFCNTFRPVDDKEQRKENPSPLFSIKKTKQLRSEVYDPSDPTGSDSSAPGSSPERSGPGLLPSEITRTISINSPKAQTVQAVRCVTSYTVESIFGTEPEPPLGPSSAMSKLRGAVAAEGASDTEREEPTESQGLAARLRRPSPPEPWDEEDGASCSTFFGSEERTVTCVTVVEPEAPPSPDVLQAATHRVVELRPPSRSRSTSSSRSRKKAKRKRVSREHGRTRSGTRSESRDRSSRSASPSVGEERPRRQRSKAKSRRSSSDRSSSRERAKRKKAKDKSREHRRGPWGHSRRTSRSRSGSPGSSSYEHYESRKKKKRRSASRPRGRECSPTSSLERLCRHKHQRERSHERPDRKESVAWPRDRRKRRSRSPSSEHRAREHRRPRSREKWPQTRSHSPERKGAVREASPAPLAQGEPGREDLPTRLPALGEAHVSPEVATADKAPLQAPPVLEVAAECEPDDLDLDYGDSVEAGHVFDDFSSDAVFIQLDDMSSPPSPESTDSSPERDFPLKPALPPASLAVAAIQREVSLMHDEDPSQPPPLPEGTQEPHLLRPDAAEKAEAPSSPDVAPAGKEDSPSASGRVQEAARPEEVVSQTPLLRSRALVKRVTWNLQESESSAPAEDRAPRAPLHRPQKPREGAWDMEDVAPTGVRQVFSELPFPSHVLPEPGFPDTDPSQVYSPGLPPAPAQPSSIPPCALVSQPTVQFILQGSLPLVGCGAAQTLAPVPAALTPASEPASQATAASNSEEKTPAPRLAAEKTKKEEYMKKLHMQERAVEEVKLAIKPFYQKREVTKEEYKDILRKAVQKICHSKSGEINPVKVANLVKAYVDKYRHMRRHKKPEAGEEPPTQGAEG

SEQ ID NO: 105105 - DNA, 4950 bp, Artificial Sequence
  derived and/or modified sequence
atggacgacgatagcttagacgagctggtggcccgcagccccggacctgatggccacccacaagtgggaccagctgaccccgccggcgatttcgaagagtcctcggttgggtctagtggcgatagcggtgatgattctgattcagagcatggtgatgggaccgatggggaagatgagggagcctcagaggaagaagacctcgaggacagaagtggatccgaggattctgaagacgatggagaaacactgctcgaggtggcagggactcaaggcaagctggaagcagccggcagcttcaatagtgacgacgacgccgagagctgccctatttgtttgaatgccttccgagaccaggctgtgggtaccccagaaaattgtgcacattacttttgcttagactgcatagtggagtggtccaagaacgccaactcttgcccggtggataggacactcttcaagtgcatttgtatccgtgctcagttcgggggcaaaattcttcggaaaatcccagtcgaaaatactaaagcatcagaggaggaggaggaccctactttttgtgaagtatgcggcagatcggacagagaagacaggctgctattatgcgacgggtgcgatgcagggtaccatatggaatgtctggatcccccactccaggaggtccccgtcgatgagtggttctgcccagagtgtgccgcacccggagtcgtgctggcagcagatgccggacctgtttccgaagaagaggtctccctactactcgctgacgtggtgcctaccacgagccggctgagacctagagccggccgaactcgcgcaatcgcacggacaaggcaatctgaacgcgtacgagcaactgtcaataggaatcgcattagcacagccagaagagttcagcatacgccaggaagactaggctcgtcacttctcgacgaggcaattgaggcagtggctactggcctgtcaactgctgtgtaccagagacctttgactccccgcacaccagcacgccgtaagagaaagacgcgacgtcgcaagaaggttcctggtaggaagaaaacacctagtgggccctcggccaaaagcaagtcctcagctacaagatctaaaaagcggcaacatcgagttaaaaaacgccgcggcaaaaaagtcaagagcgaggctaccaccaggtcccgaattgcccgcaccttagggctccgacgtccagtgcacagcagctgcatcccttccgtcctaaagcccgtggaaccttctctggggctgctgcgggctgatattggtgcagcctctctgtccctgtttggtgatccatatgaactagatcctttcgattccagcgaggaactgagtgccaaccccctcagcccactttccgctaaaaggagggcgctgagccggtccgctcttcagtcgcaccagccagtggcaaggcctgtgtcagtgggcctatcacgtcggcggctccctgcagctgtgcccgagccagacctagaagaagaacctgtgccggatcttttgggttcaatccttagtgggcaaagcctgttgatgctcggatcttccgatgtcatcatacatagggatggaagcttatccgctaaacgggccgcgcctgtctcgtttcaaagaaatagcggaagtctcagtaggggcgaagaaggcttcaagggctgcctgcaaccccgcgctctaccaagtgggtccccggctcagggcccaagtggaaaccgtcctcagtccactggcctgagttgtcagggtcgttctcggactcccgctcggacagcaggcgcgccggtacgtcttgacctacctgccgccccgggggcggttcaagcaagaaatctatccaatggttctgtacctggattccgacagtctcactctccctggttcaatggcaccaacaaacacactctgcccctcgcatccgccgcttcaaagatctcaagcagggactccaaacctccttgccgctcagtggtgccaggccctcctcttaaaccggccccccggagaaccgacatctctgagctcccaaggataccgaagatcagaagagatgacggcggtggacgtcgcgacgctgccccagcacatgggcagtctattgaaattccgtccgcttgcatctcccgactcacaggcagggaaggaaccggccagcccggcagaggcacgcgggcagagagcgaggccagtagtcgggttccccgggaacctggggtgcatactggctcctctcggccaccggcccccagctcacatggctccctggctcctctcggtccttctcgcggaaaaggtgtgggatctactttcgaatccttccgtatcaacatacctgggaatatggcacactcctcccagctgagtagtcccggcttctgcaatacatttaggccagtggacgacaaagaacagaggaaagaaaatcctagccccctcttcagcattaagaagacaaagcaactcagaagcgaggtatatgacccttctgatcccactggctccgactcatccgccccgggcagcagccccgagcgctccggaccaggcttgctaccctccgaaatcacacgaacgatttccatcaacagtcccaaggcacaaaccgtccaggcggttagatgcgtaaccagctacacggttgagagtatcttcgggacagaaccagaaccacccctgggaccgtcttcagcaatgtcaaagttgcgcggcgccgtcgcagcagagggcgcatccgataccgaacgggaagagcctaccgaaagccagggcctggcagcacggcttcggaggccatctcccccagaaccttgggatgaggaagatggggcttcctgttcaaccttcttcggatccgaggagagaaccgtgacatgcgttaccgtcgtggagcccgaggccccacctagtcctgacgttctgcaggccgccacgcaccgggttgttgagctgagacctccctctcggagcaggtctacgtcaagttcaaggtcaagaaagaaggctaagaggaaacgcgtgtcgcgcgagcacggccggacccgctccggcactcgcagtgagtccagagatagatcgagtcgctctgcttccccctccgtcggcgaggagcggccccgccggcagagaagcaaggcaaagtcccgccggtcttccagcgaccggtccagctcccgtgagcgtgccaagcgaaaaaaagccaaagacaagagcagggaacataggcgcgggccttgggggcattctagaaggactagtcgcagcaggtcaggctccccaggctcctctagctacgaacattacgagtctcgcaagaaaaagaaaagacgttccgcgtcccggccacggggccgcgagtgctcacccaccagtagcctggagcgcttatgccgccacaagcaccagagggagcgctctcacgaacgtccagataggaaagaaagtgtagcttggccgcgcgatcgcaggaagcggcggagccgatcccccagtagcgagcacagagcgagggagcatcgcagacctagatctagagagaagtggccccagactcgttcccactcacctgagaggaaaggagcggtgcgggaagcgtctcctgctcctctggcacagggggagccaggcagggaagacttacccactcgtctgccagctctgggagaagcccacgtgagccctgaagtggccacagctgataaggcccctctgcaggctcctcctgtgttagaggttgcggctgagtgcgaaccggacgatctggacttggactacggtgactccgtcgaagcggggcatgtgtttgacgacttttcatcagatgcagtcttcattcagctcgacgacatgtcctctccaccttcgcctgagtcaaccgattcttcaccagagcgagacttccctctcaagcctgccctgccgccagcatcactcgctgttgccgctatccaacgcgaagtctccttgatgcacgacgaagacccaagccagcctcctcctttacccgaggggactcaggagcctcacctgctgagacccgatgcagcagaaaaagccgaggcaccatccagcccagacgtggcccctgctggcaaagaagatagccccagcgcctccggcagagtgcaggaagctgcccgtcctgaagaggttgtgtctcagaccccgctgctgcgctcacgggctctggtaaaaagggtgacttggaatctccaggaaagcgagtcctcagcacccgccgaggaccgcgccccaagggctcccctgcacaggccacagaaaccacgcgaaggcgcctgggatatggaagatgtggcccccactggcgtgcgacaggtttttagcgagttaccttttccatctcatgtgctgccagagccaggctttccggacaccgatcctagccaggtttactcccctggcctgcctccggcccctgcccagcccagttctatccctccgtgcgctctggtatcacaacctactgtccagttcatcctccagggatcactgccattggtcggatgtggcgcagctcagacgctggcaccagtgccggccgctctgacccccgcgtccgagcccgcgtcacaagcaactgcagcaagcaatagtgaagagaaaacgccagcgccgaggctggccgccgagaaaactaagaaggaggaatatatgaaaaagctgcatatgcaagaacgtgccgtagaagaggtgaaactggcaataaagccattctatcaaaagcgcgaggtgacaaaagaagaatataaagatattcttaggaaggcagtgcagaaaatttgccactccaaaagtggcgagatcaatcctgtcaaagtggccaacctggtcaaagcatacgtggacaaataccggcatatgcgcaggcataaaaagcccgaggcaggcgaggagcccccaacccagggggctgagggttag

SEQ ID NO: 105106 - DNA, 5523 bp, Artificial Sequence
  derived and/or modified sequence
gagcgcacggcggcggcagaggcggcggcggccgggcctaggagcgactctcggtcgtgcagcggcggcgagcgctcgcgagcggctgcgggacgcgaggtttccggagctgagctcaatgtgcagcaatggatgacgacagcctggatgagcttgtggcccggagcccagggccggatggacacccacaggtcggccctgcggacccggcaggtgactttgaagaaagcagcgtgggcagcagtggggactctggggacgacagtgacagcgagcatggagatggcacagacggagaagacgagggggcgtctgaggaggaagacctggaagacagatctggttccgaggattctgaagacgacggggagacattgctggaggtagcgggtactcaggggaaactggaagccgctggctctttcaattctgatgatgatgcagagagctgcccaatctgtctcaacgcattcagagaccaggccgtggggacgccggagaactgtgcccattacttctgcctggactgcattgtcgaatggtccaagaatgccaattcctgtccagttgatcgaactctatttaagtgcatttgtattcgagctcaatttggtggtaaaatcttaagaaagatcccagtggagaacaccaaagcgagcgaggaggaggaggacccgaccttctgtgaggtgtgcggcaggagcgaccgtgaggacaggcttttgctctgcgacggctgcgatgcggggtaccacatggaatgcttggacccccctctccaggaggtgccggtggacgagtggttctgcccggaatgtgctgcgcctggtgttgtccttgccgctgatgcgggtcccgtgagtgaggaggaggtctccctgctcttggctgatgtggtgcccaccaccagcaggcttcggcctcgagcaggtaggacccgggcgatagccaggacacggcagagtgagagagtgagagcaaccgtgaaccggaaccggatctccacggccaggagggtccagcacacaccagggcgcctcgggtcttccctgctggatgaagccatcgaggctgtggcgactggcctgagcactgccgtgtatcagcgccccctgacgccgcgcactcccgcccgacggaagaggaagacaagaagacggaagaaagtgccgggaagaaagaaaaccccgtccggaccatccgcaaaaagtaagagctcagcgacaagatctaagaaacgccaacatcgagtgaagaagagaagagggaagaaggtaaagagtgaagccaccactcgctctcgaatcgcgcggacgctgggcctgcgcaggcctgttcacagcagctgcatcccgtcagtgttgaagccagtggagccctctttggggctgctgagagcggatattggagctgcctctctgtctctgtttggagatccttatgagctggatcccttcgacagcagtgaagagctttctgcaaaccctctttcccctctgagtgccaagagacgggctctgtcccggtcagccctgcagtcccaccagcccgtggccaggcccgtctccgtggggctttccaggaggcgcctccctgccgcggtgccagagccagacttggaggaggagccagtgcctgacctgctgggcagcatcctgtcgggccagagcctcctgatgctgggcagcagtgatgtcatcatccaccgcgacggctccctcagcgccaagagggcggctccagtttcttttcagcgaaactcaggcagtctgtccagaggggaagaaggattcaagggctgcctgcagccccgagcactgccctccgggagcccggcccaaggcccgtcaggaaacaggccacagagcacagggctcagctgtcaaggcaggtcccgcacccccgcccgcaccgcgggggcgcctgtgaggctggacttgccagcagcccctggggcggttcaggctcggaacttgtcaaatgggagtgtgcctggcttcagacagagccacagcccctggttcaacggcaccaacaagcacaccttgccccttgcctctgccgcgtctaagatctcaagcagagattctaagcccccatgtcgcagtgtggtgccggggcctcccctgaagccagcgcccagaagaacagacatctctgagctacccaggataccaaagatcaggagagatgacggtggtggcagacgggatgcggccccggcccacgggcagagcattgagatccccagtgcctgcatcagccgactgactggcagggagggcaccgggcagccagggcgaggcacacgggcagagagcgaggccagcagcagggtgccccgggagcccggggtgcacacgggcagctcccggcccccagcccccagctcccatggcagtttggccccactgggaccatcaagagggaaaggggtcgggtcgacctttgagagcttccggatcaatattcctggaaacatggcacattccagccagctctccagccctggcttctgtaacacgttccggcctgtggacgataaggagcagaggaaggagaacccctcacccctcttctccatcaagaagacgaagcagctgcggagcgaggtctacgacccatccgaccccaccggctccgactccagcgcccctggcagcagccccgagaggtctggccccggcctcctgccctctgagatcacacgaaccatctccatcaacagcccgaaggcccagacggtgcaggctgtgcgctgcgtcacctcctacacggtggagagcatctttggtacagagcccgaaccccctctcggaccgtcctccgccatgtccaagctccggggtgcagtggctgccgagggggcctctgacacggagcgagaggagcccacagagagccagggcctggctgcccggctgcggaggccatcccccccagagccctgggatgaggaggatggggcgtcttgcagcaccttctttggctctgaggagcggacggtgacctgtgtgactgtcgtggagccggaagccccacccagcccggacgtgctgcaggctgccacccacagagtcgtggagctcaggcccccttcccggtcccgctccacatccagctcccgcagcaggaagaaggccaagaggaagagggtgtccagggagcacggacggacgcgctctgggacgcgctctgaatccagggacaggagctcgaggtcagcgtcaccatcagtgggtgaggagcgccccaggaggcagcggtccaaggccaagagccggcggtcctccagtgaccgctccagcagccgagagcgagctaagaggaagaaagccaaggacaagagcagggagcacaggcggggcccctggggccacagccggaggacgtcccggtcgcggtcggggagccctggcagctcttcctatgagcactatgagagtaggaagaagaagaaaaggagatcagcgtccagacctcggggaagggagtgctcccccaccagcagcctggagaggctctgcaggcacaagcatcagcgggaacgcagccacgagcggccagacaggaaggagagtgtggcgtggccccgagaccggaggaagcggaggtcccggtccccaagctcggagcacagggcacgggagcacaggcggcctcggtcccgtgagaagtggccgcagacccggtcccattccccagagaggaagggggctgtgagggaggcttccccagcgccccttgcacagggggagccagggcgggaagacctccccaccaggttgccagccttgggggaagcacatgtctcgccggaggtggctacggccgacaaggcccccctgcaggctccccctgtcctggaggtggcagctgagtgtgagccggacgacctggacctggattatggcgactccgtggaggccggacacgtctttgatgatttctcaagcgacgccgttttcatccagctcgatgacatgagctcgccaccttctcccgaaagcacagactcttccccggagcgagacttcccactgaagcctgcgttgcccccagccagcctggccgtggccgccatccagagggaggtgtcattgatgcacgatgaagacccttcgcagcccccacccctgccagagggcacccaggagccacatttgctcaggccggacgcggctgagaaggctgaggcacccagttccccggatgtggcgcctgcggggaaggaagacagcccctctgcgagtgggagggtacaggaggcagcccggcctgaggaggtggtttcgcagacccccctgctgcggtccagagccctggtgaagcgggtcacctggaacctgcaggagtcggagagcagcgcccccgccgaggacagagccccccgggcaccacttcacaggccacagaagccccgagaaggagcctgggacatggaggatgtggcccccacaggggtcaggcaggtgttctccgagctgccctttcccagtcacgtgcttccggaacccgggttcccagacacagacccctctcaggtttacagccccggcctgccgcctgccccggcccagccctcaagcatcccaccctgcgcactggtcagccagcccacggtccagttcatccttcaggggagcctgccgctagtgggctgtggggcagcacagaccctggccccagtgcccgctgccctgaccccagcctcagagccagccagtcaagccactgcagccagcaactcggaggagaagaccccggcccccaggctagctgcggagaaaaccaagaaggaggagtacatgaagaagctgcacatgcaggagcgtgctgtggaggaggtgaagctggccatcaagcccttctaccagaagagggaggtgaccaaggaggagtacaaggacatcctgcgcaaggccgtgcagaagatctgccacagcaagagtggagagatcaaccccgtgaaggtggccaacctggtgaaggcgtacgtggacaagtacaggcacatgcgcaggcacaagaaaccagaggccggggaggagccgcccacgcagggggccgagggctgaggccaggcaatcacgggctatgcccggggagctgtcgggagtggcgggaatcggggccatgcccggggagctgtcgggagtggcgggaatcggggccatgcccggggagctgtcgggagtggcgggaaatggggggcatcaccatgcctgccgtcgggttcctgcgctgacacctggtctgtgcacctgtgttgctcacagttgaaaactggacacttttgtatgtatattatagagacactgtttccattctaatttatcaaaaatggattatctttagaaacctcttgattgacttactacttggaagataaagcacttggtgatcaagaggggctcctggtggggtggcgcgtccttgataaatctctaggtggcctcccgccaacagctgctgtgtacctttggctctgaattaggaatatctttactttctcttttccaa

SEQ ID NO: 105107 - DNA, 4950 bp, Artificial Sequence
  derived and/or modified sequence
atggatgatgacagcctggatgagctggtggcccggagccctggcccagatggccacccccaggtgggccctgctgaccctgctggggactttgaggagagctctgtgggcagcagcggggacagcggagatgacagcgacagcgagcacggagatggaacagatggagaagatgagggcgccagcgaggaggaggacctggaggacagaagtggcagcgaggacagtgaagatgatggagagaccctgctggaggtggccggcacccagggcaagctggaggccgccggcagcttcaacagtgatgatgatgctgagagctgccccatctgcctgaatgccttccgggaccaggccgtgggcaccccagagaactgtgcccactacttctgcctggactgcatcgtggagtggagcaagaatgccaacagctgccctgtggacaggaccctcttcaagtgcatctgcatccgggcccagtttggaggcaagatcctgaggaagatccctgtggagaacaccaaggccagcgaggaggaggaggaccccaccttctgtgaggtgtgtggccgcagtgacagagaagatcggctgctgctgtgtgatggctgtgatgctggctaccacatggagtgcctggacccccccctgcaggaggtgcctgtggatgagtggttctgcccagaatgtgccgcccctggggtggtgctggccgcagatgctggccctgtgtctgaggaggaggtgtccctgctgctggctgatgtggtgcccaccaccagccggctgcggcccagggctggccgcacccgggccatcgcccggacccggcagagcgagcgggtgcgggccaccgtgaacagaaaccgcatcagcacagccaggagagtgcagcacaccccaggccgcctgggcagcagcctgctggatgaggccattgaagctgtggccaccggcctgagcacagctgtgtaccagaggcccctgacccccaggaccccagcccggaggaagaggaagaccaggaggaggaagaaggtgcccggcaggaagaagaccccatctggccccagcgccaagagcaagagcagcgccaccaggagcaagaagaggcagcaccgggtgaagaagaggcggggcaagaaggtgaagtctgaggccaccaccaggagcagaattgcccggaccctgggcctgcggcggcctgtgcacagcagctgcatccccagcgtgctgaagcctgtggagcccagcctgggcctgctgcgggctgacatcggggccgccagcctgagcctgtttggagacccctatgagctggacccctttgacagcagcgaggagctgagcgccaaccccctgagccccctgagcgccaagagaagagccctgagccgcagcgccctgcagagccaccagcctgtggcccggcctgtgtctgtgggcctgagcagaagaaggctgcctgctgctgtgcctgagccagacctggaggaggagcctgtgcctgacctgctgggcagcatcctgagcggccagagcctgctgatgctgggcagcagtgatgtgatcatccacagagatggcagcctgagcgccaagagagctgcccctgtgtccttccagagaaattctggcagcctgagcagaggagaggagggcttcaagggctgcctgcagccccgggccctgcccagcggcagccctgcccagggccccagcggcaaccggccccagagcacaggcctgagctgccagggccgcagcaggaccccagccaggacagctggggcccctgtgcggctggacctgcctgctgcccctggagctgtgcaggccaggaacctgagcaatggatctgtgcccggcttccggcagagccacagcccctggttcaacggcaccaacaagcacaccctgcccctggccagcgctgccagcaagatcagcagccgggacagcaagccaccctgccgctctgtggtgcccggcccccccctgaagccagcccccaggagaacagacatcagcgagctgccccgcatccccaagatcagaagagatgatggcggcggcagaagagatgctgccccagcccacggccagagcattgagatccccagcgcctgcatcagccggctgaccggccgggagggcaccggccagcccggccggggcaccagggctgagagcgaggccagcagccgggtgccccgggagcccggggtgcacacaggcagcagccggcccccagcccccagcagccacggcagcctggcccccctgggccccagccggggcaagggcgtgggcagcacctttgagagcttccgcatcaacatccctggcaacatggcccacagcagccagctgagcagccctggcttctgcaacaccttccggcctgtggatgacaaggagcagaggaaagaaaaccccagccccctcttcagcatcaagaagaccaagcagctgcggtctgaggtgtatgaccccagcgaccccaccggcagtgacagcagcgcccctggcagcagccctgagaggagcggccctggcctgctgcccagcgagatcaccaggaccatcagcatcaacagccccaaggcccagacagtgcaggccgtgcgctgtgtgaccagctacacagtggagagcatcttcggcacagagcctgagccccccctgggccccagcagcgccatgagcaagctgcggggagctgtggccgctgagggcgccagtgacacagagcgggaggagcccacagagagccagggcctggccgcccggctgcggcggcccagccccccagagccctgggatgaggaggatggagccagctgcagcaccttctttggaagtgaggagaggacagtgacctgtgtgacagtggtggagcctgaggccccacccagcccagatgtgctgcaggccgccacccaccgggtggtggagctgcggccccccagccgcagccgcagcaccagcagcagccgcagcaggaagaaggccaagaggaagagggtgtcccgggagcacggccgcaccaggagcggcaccaggtctgagagccgggacaggagcagccgcagcgccagccccagcgtgggggaggagcggccccggcggcagaggagcaaggccaagagccgccgcagcagcagtgacaggagcagcagccgggagcgggccaagaggaagaaggccaaggacaagagccgggagcaccggcggggcccctggggccacagcaggaggaccagccgcagccgcagcggcagccctggcagcagcagctatgagcactatgagagcaggaagaagaagaagagaagaagtgccagccggccccggggccgggagtgcagccccaccagcagcctggagcggctgtgccgccacaagcaccagcgggagaggagccatgagaggccagacaggaaggagagcgtggcctggccccgggacaggaggaagagaagaagccgcagccccagcagcgagcaccgggcccgggagcaccggcggcccaggagccgggagaagtggccccagaccaggagccacagccctgagaggaaaggagctgtgcgggaggccagccctgcccccctggcccagggcgagcccggccgggaggacctgcccacccggctgcctgccctgggggaggcccacgtgtccccagaggtggccacagctgacaaggcccccctgcaggcccctcctgtgctggaggtggccgcagaatgtgagccagatgacctggacctggactatggagacagcgtggaggccggccacgtgtttgatgacttcagcagtgatgctgtgttcatccagctggatgacatgagcagcccccccagccctgagagcacagacagcagccctgagcgggacttccccctgaagccagccctgcccccagccagcctggccgtggccgccatccagcgggaggtgtccctgatgcatgatgaggaccccagccagcccccacccctgcctgagggcacccaggagccccacctgctgcggccagatgctgctgagaaggccgaggcccccagcagcccagatgtggccccagctgggaaggaggacagccccagcgccagcggccgggtgcaggaggccgcccggcctgaggaggtggtgtcccagacccccctgctgcggagccgggccctggtgaagagggtgacctggaacctgcaggagagcgagagcagcgccccagcagaagatcgggccccccgggcccccctgcaccggccccagaagccccgggagggcgcctgggacatggaggatgtggcccccaccggggtgcggcaggtgttttctgagctgcccttccccagccacgtgctgcctgagcccggcttcccagacacagaccccagccaggtgtacagccctggcctgcccccagccccagcccagcccagcagcatccccccctgtgccctggtgtcccagcccaccgtgcagttcatcctgcagggcagcctgcccctggtgggctgtggggccgcccagaccctggcccctgtgcctgctgccctgaccccagccagcgagcccgccagccaggccacagctgccagcaacagcgaggagaagaccccagccccccggctggccgctgagaagaccaagaaggaggagtacatgaagaagctgcacatgcaggagagagctgtggaggaggtgaagctggccatcaagcccttctaccagaagcgggaggtgaccaaggaggagtacaaggacatcctgaggaaggctgtgcagaagatctgccacagcaagagcggggagatcaaccctgtgaaggtggccaacctggtgaaggcctacgtggacaagtaccgccacatgagaagacacaagaagccagaggccggggaggagccccccacccagggcgctgagggctag

SEQ ID NO: 105108 - DNA, 4950 bp, Artificial Sequence
  derived and/or modified sequence
atggacgacgacagcctggacgagctggtggcccggagccccggccctgacggccacccgcaagtaggtcccgccgaccccgctggagattttgaggagtcttcagtcggtagcagcggcgattcaggtgatgacagtgatagtgagcacggtgacggaaccgatggagaagacgagggagcctctgaggaagaagacctagaggatcgctccggatctgaggattccgaggacgatggcgagactctgctggaggtggcaggtacacagggcaaactggaggccgccggctcctttaactctgacgatgacgctgaatcatgccccatttgtttaaacgcctttcgggaccaggctgtgggcacgccggaaaattgtgcacactacttctgcctggactgcatcgtcgaatggagcaagaatgcaaacagctgcccagtggatcggacattgtttaagtgcatttgcatcagagcccagtttggaggcaagatccttcggaaaattcctgtcgagaatactaaagcatcagaggaagaagaggatccaactttctgcgaggtgtgtggacgatcagatcgcgaagatcggctgctgctttgcgatgggtgcgatgctggttatcatatggaatgccttgacccccccctccaggaggttccggtggacgaatggttctgccccgagtgcgccgcccctggagttgtgctcgccgctgatgcgggccctgtgtccgaggaagaggtgtcgctactgttggctgacgtggtcccaaccacctcacgcctgcgacctcgggccggccgcacacgggccatagcacgcactaggcagagcgaaagagtcagagccaccgttaataggaatcggattagcacggccagacgggtgcagcacactcccgggcgcttgggctcttctctgctggacgaggcgatcgaggccgttgccaccggcctcagcactgcagtctaccagagaccactgactcctcgtacaccagcgagacgcaaaagaaagactcggcgccgaaaaaaagtccccggtcgcaaaaaaaccccaagtggtccaagcgcaaagtccaagtcctccgcaacacgatcgaagaagagacaacatagagtcaagaagcggagagggaagaaggtaaagtccgaagcgactacgcggagccgtattgccaggaccctcggccttagacgtccagtccactcttcatgcatcccgtccgtgttaaaacccgtggagccttcgttggggctactgcgtgcggacattggcgcggcatcgctctcccttttcggagatccctatgagctcgatcccttcgatagctccgaagaactctccgccaaccccctctcacctttgtcagcaaagagacgggcgcttagccggagtgcgttacagagccatcaaccagtggcgagacctgtctctgtggggctgagtcggcggcggctacccgccgccgtcccagaacctgatctggaagaggagcctgtgccagatcttctaggcagtatcttgtcaggccagtccctgctgatgctgggaagctctgacgtgattatacatcgcgatggaagcctgtccgcaaagcgggccgcccccgttagctttcagaggaatagtgggtcactgtcgagaggcgaagagggatttaaaggttgcctgcagcctcgggcattgccttccgggtccccagcacaaggtccctctgggaatagaccgcaatcaaccgggctgtcctgtcagggtaggtcgcgaacccccgcgaggaccgctggcgcacctgtgcgcctcgacctaccagcagcacccggagccgtgcaggcccgcaatttgagtaatggatccgtgcccggcttccgtcagtctcactctccttggtttaacggcaccaataagcatactcttcctttggccagtgctgcttccaagatttcaagtcgggattctaagccaccctgtagaagcgtggtgcccggaccgcctttaaagcccgctccccgtcgcacggacatctcagaactccctaggatcccgaagattaggagggacgacggaggtggaaggcgggatgctgccccggctcatggccagtctatcgagatcccatcagcctgcatttcgaggctgactggacgagaaggcactggccaacccggaagagggactcgcgctgagtctgaagcatccagccgagtgccacgggaaccaggtgtccatacgggttcgagccgcccacccgcacctagcagtcatggatctctggctccattggggccgtccagaggaaaaggagttggttctacatttgaatcatttagaatcaatatcccaggaaacatggcccattctagccagctctcatcacccgggttctgtaacactttcagacctgtggatgacaaggagcagagaaaagaaaacccttctcctctgtttagcatcaagaaaaccaagcagctgagatcggaggtatacgatccatctgaccccaccggcagtgatagtagcgcccccgggagttctcctgagcgatccggtcccggtctgttgcccagcgagattacccggactatcagtatcaattcacccaaagctcagactgtccaggctgtacgctgtgttacctcctataccgttgagagcatttttgggaccgaacctgaacctcctttgggtccatcatcagccatgtcgaaactcagaggcgcggtagcggccgagggtgcatccgacaccgaaagagaggagcctaccgagtcccaaggactggcggcccggttgcgccgaccctctcccccagagccctgggacgaggaagatggcgctagctgcagtacattttttggatctgaggaaaggactgtgacctgtgtgacagtcgtggagccagaggcccctcccagcccagatgtactgcaggcggctacccatcgagttgtcgagctgcgccccccgagtcgctccaggtccacatcctctagtaggtcaaggaagaaagccaaaagaaaacgagtatcccgtgagcacggtagaaccagatcgggcaccagaagcgaaagcagagacagatcctccaggagtgcttcaccttccgtcggagaggaacgccctcgcaggcagcgtagcaaggccaaaagtcgcagaagctcgtcagaccggagctcttctcgcgagcgagcaaagaggaagaaggcaaaagacaaaagccgtgaacaccggagaggcccttggggacacagtcgcaggacttccagatctcgctctggcagtcctggaagcagcagctacgagcattacgagagcaggaagaagaaaaaaaggcgttccgcaagccggccgagggggagggaatgctccccaacttcctcactggagagactgtgccggcacaagcatcagcgggagcggtcacacgagcggccagatcgcaaagagtctgtggcttggccacgtgaccggagaaagagacggtcgcggtctccgagctcagagcatagagcccgtgaacacagaagacctagatccagagagaagtggcctcaaacaaggtcccactcccccgagagaaagggcgccgtgcgagaggcctctcccgccccccttgcccagggggagcctggtcgggaagatctaccaacaagactgcccgcgctcggtgaggcacacgtgtcacccgaagtggcgactgctgacaaggcacctctccaggcccctccagtcctcgaggtggcagcggagtgcgagcctgatgatttagacctagattacggagattccgtcgaagccgggcatgtattcgacgattttagcagcgatgccgtgttcattcagctcgacgatatgtccagtccccccagccctgaatccaccgacagctcaccagaaagagatttccccctgaagcctgcattaccacctgccagcttagctgtggccgcaatacagcgcgaggtctctcttatgcacgatgaagatccctctcagcccccacccctccctgaaggaactcaagagccccatttgctgcgccccgatgcggccgaaaaggcagaggctccatcatcaccggatgtggctccggctggcaaggaggatagcccttctgcctctgggagagtccaagaggcagcccggccggaagaagtggtttctcagacacccctcttgaggagcagggccctcgttaagagagttacatggaacctccaggaatctgagagcagcgcccccgcggaggacagagctcctcgggcccccctgcatcggccccagaaaccaagggaaggggcctgggacatggaagacgttgcccccaccggtgttaggcaagtgtttagcgagctgcctttcccctcccatgtattgccggagcctggttttcccgacactgatccaagtcaagtgtacagcccaggtctacctccggcccccgcccagcccagcagcatcccgccctgtgcattagtgtcccagccgacggttcagttcattttacagggaagtctgccccttgtgggatgtggagcagctcagacacttgcccctgtgcctgccgccctcacccccgcctctgagccagcgtcccaggccacggctgcttccaactctgaggagaagactcccgcaccgcgattggccgccgaaaagaccaagaaggaagaatacatgaaaaagcttcacatgcaggagcgcgcggttgaggaggtcaagctggcaattaagcctttctatcagaagagggaggtcacaaaagaggaatacaaagacattctgcggaaggcggtgcagaaaatttgtcacagcaaatctggcgagatcaatcccgtgaaggtggcgaacctggtcaaggcatacgtggacaagtaccgacacatgcggaggcataagaagcctgaggctggagaagaaccccctacacagggggccgaggggtag

SEQ ID NO: 105109 - DNA, 4950 bp, Artificial Sequence
  derived and/or modified sequence
atggatgacgattcactggacgagctcgtggccaggtcgccaggtcctgacggccacccacaggttggtccagctgaccccgctggagacttcgaagaaagcagcgtgggctcctctggcgacagcggtgacgacagtgactctgaacatggggatggcacagatggggaggacgagggcgcatccgaagaggaagacctcgaggaccgttcaggatctgaggattccgaggatgatggagagacactactcgaggtggccggtacacaggggaagctcgaggctgcagggtcttttaatagtgatgacgatgccgaaagctgccctatctgcttaaatgccttccgcgatcaggccgtcggcacgcccgaaaattgcgcccactatttctgtctggactgcattgtcgagtggagcaaaaacgcaaacagttgtccagtggatcgcacactttttaaatgtatctgtatacgggcacagttcgggggtaagatccttaggaagatccccgttgaaaatacaaaagcctctgaggaagaggaggatcctacattctgtgaggtgtgtggccgaagcgatcgggaagatcggttgctgctgtgtgacggctgcgacgccggataccacatggaatgtctagatccaccgctgcaggaggtacccgtggacgaatggttctgtcccgaatgtgctgcccctggcgtagtgctggccgcagacgccggaccagtgagcgaggaggaggtcagcttactgttggccgacgtcgttccaacaacatcgcggctgaggccgagagctggacgcacccgcgctatagccaggacccggcagtctgagcgggtgagagccacagttaatagaaacagaatatccaccgcgagacgagttcagcacacccccggtcggctgggttccagcttgctcgacgaagccatcgaggccgtggcgactgggctttccacagctgtataccagagaccacttacaccccgaactcccgcaaggcgaaagcggaaaacacggagacgaaagaaggtgcccggacggaagaaaactccctcaggaccgtccgctaaatcgaagtccagtgctacgagaagtaaaaagcgccaacatagggtcaaaaaacgcagaggaaaaaaagtcaaatccgaagctacaactcgcagcagaattgcgagaaccttggggctgcgcaggccagttcattcatcctgtataccctcggtgctgaaaccagttgagccgtccttgggcctgctgcgcgcagatatcggggctgcctctctgtcgttatttggtgacccgtatgagcttgatccattcgatagcagtgaagaattgtcagctaacccgctgagccctctgagcgccaaacgcagggcgttgtcacggtctgcactccagtctcatcaacctgtcgcacgcccagtcagcgtcggactaagtaggcgccgtcttcccgctgccgtacctgaacccgacctggaggaagagcctgtcccagatctcttgggatcaatcctcagtgggcagagcctcctgatgttggggtcttccgacgttattatccaccgtgacggaagccttagcgctaagcgggctgcacccgtatcattccagcggaattctgggtccctttcacgcggagaagaggggttcaagggctgtctgcagcccagggcgctcccctccggttctccggctcagggcccatctggcaatcgcccacagtcaacaggcttaagctgtcaaggccgtagcaggacacccgcacgcaccgcgggtgcccctgtaaggttagacctgcctgcagcccctggggctgtacaggctcgcaacctgtcaaacggtagcgtgccgggattcagacagagccactctccctggtttaatggcaccaataagcacactcttccactcgcttctgccgcatctaagatctcatctcgggacagcaagcccccttgtaggtcagtggtgcccggacccccacttaagcctgcccctcggaggacagacatctctgaacttccaaggatccccaagatccggagagatgatggcggaggacggcgtgacgccgcacccgctcacggacagagcattgagatcccctccgcatgtatcagtcggctgactggcagagagggaacagggcaacccggaagaggcaccagagccgaatccgaggcttccagcagagtccccagagagccgggtgtacatactggttcttctagaccgccagctccaagttcccacggaagcttggctccactggggcctagtcgtggcaagggggtgggcagtacatttgagtctttccgtattaatatcccaggcaatatggctcattcgtcacagttgtcgagcccaggattctgtaacaccttccggccagtcgatgacaaagaacagagaaaggagaatccaagtcctttgttctctataaagaagaccaaacagctgaggtctgaggtatatgacccctcagatccgacgggttccgactctagtgctccgggatcaagtccggagcggagcgggcctggcctactaccttcggaaattacccgtaccatctctatcaatagtccaaaggcacaaacagtccaagcagtgcggtgcgttacttcatataccgtggagagcatttttggaaccgagcccgagccaccactgggtcccagtagcgcgatgagcaaacttcgcggagccgtggctgctgagggagcctcggacactgaacgcgaagagccgacagaaagccagggtctggccgctagactacggagaccttcgcctccggagccctgggacgaagaagacggtgcctcatgctccactttttttggcagcgaagagagaacggtaacatgtgttactgtggttgagccagaagctcccccttcccccgacgtgctgcaggccgctacacacagggtcgtggaactgcggcctcctagccggtcacgctcaacctcttcctcaaggtctaggaaaaaagccaagcgtaaacgcgtctcccgcgagcatggtaggactcgcagcggaacgcggagtgagagcagagacaggtcctcaagaagcgctagtccctctgtgggcgaggaacgccctcgtaggcagaggtccaaggctaaatctcgtagatcttcttccgatagaagctcttcccgggagagagctaagcgaaagaaggcaaaagacaagtcccgggagcacaggagaggtccctggggccactctaggaggacttctcgatcacggtcgggaagcccagggtccagctcttatgagcattatgagagcaggaagaaaaaaaagcgaaggtctgcctctcgacccagggggagggagtgctcgccaacgagctccctggagcgcctgtgtcggcacaaacaccagagggaacggagtcacgaacggcctgatcgtaaggaatctgttgcatggcccagggatagaagaaaacgccgatccagatccccatcaagtgagcaccgagccagggaacatcgtcggcctcggagtagggaaaagtggccccagacgcgcagccactcccctgagcgaaaaggcgctgtgcgtgaggcctctcccgctcctcttgcccaaggagaacccggacgagaggacctccccaccagactacctgctcttggggaggctcatgtctcccctgaagtggcaacagcagacaaggcgccactccaggcccctccagtgctcgaggtggccgctgagtgtgaaccagacgatctagatctggactatggggactccgttgaagctggtcatgtgttcgatgatttctcgagcgacgccgtgttcatccagcttgacgacatgtctagcccaccctcacctgaatctaccgatagcagccccgaaagagacttccccttgaaacccgctctgcccccagccagtctagccgtggcggctattcaaagggaggtcagcctgatgcacgatgaggacccatcgcaaccgccaccgctacccgagggcacacaggagccacacctgctcagacccgatgccgcagagaaggctgaagccccaagctcacccgatgtggcacccgcaggtaaagaagattcaccttccgcatcaggaagggtacaggaggcagccagacccgaggaggtggtgtctcagactcctctgctgcgatctcgggcacttgtgaagcgggtaacatggaacctgcaggagtccgagtccagtgctccagcagaggaccgggcaccgcgagctcctctccatcgtccgcaaaagccgcgagagggagcttgggacatggaagatgtggcaccaacaggggtcagacaggtgttttccgagttgcccttcccgtcccacgttctccctgagcccggattccctgacactgatcctagccaggtttactctccagggctccctccggcacctgcccagcctagctctattcccccatgtgcgttagtaagccagcctactgttcagttcatactgcagggcagccttcctctggtgggttgtggcgctgcacaaacattggccccagttccagctgcactcacaccggcaagtgaaccagcaagtcaggcgacagcagcaagcaacagcgaggaaaaaacaccagcaccaaggctggccgctgagaaaacgaaaaaagaggagtacatgaagaaacttcacatgcaggaacgcgcagtcgaggaagtgaagctggccataaaacctttctaccagaaacgcgaggtgacgaaggaggaatataaggatattctacgcaaggccgtgcaaaagatctgtcattctaagagtggggagattaatcccgttaaggtggctaacttggtgaaggcatacgtagataaataccgccatatgcggaggcataaaaaacctgaagctggagaggagcctcccacacaaggagcagaaggttag

SEQ ID NO: 105110 - DNA, 4950 bp, Artificial Sequence
  derived and/or modified sequence
atggacgacgacagcctggacgagctggtggccagaagccccggccccgacggccacccccaggtgggccccgccgaccccgccggcgacttcgaggagagcagcgtgggcagcagcggcgacagcggcgacgacagcgacagcgagcacggcgacggcaccgacggcgaggacgagggcgccagcgaggaggaggacctggaggacagaagcggcagcgaggacagcgaggacgacggcgagaccctgctggaggtggccggcacccagggcaagctggaggccgccggcagcttcaacagcgacgacgacgccgagagctgccccatctgcctgaacgccttcagagaccaggccgtgggcacccccgagaactgcgcccactacttctgcctggactgcatcgtggagtggagcaagaacgccaacagctgccccgtggacagaaccctgttcaagtgcatctgcatcagagcccagttcggcggcaagatcctgagaaagatccccgtggagaacaccaaggccagcgaggaggaggaggaccccaccttctgcgaggtgtgcggcagaagcgacagagaggacagactgctgctgtgcgacggctgcgacgccggctaccacatggagtgcctggacccccccctgcaggaggtgcccgtggacgagtggttctgccccgagtgcgccgcccccggcgtggtgctggccgccgacgccggccccgtgagcgaggaggaggtgagcctgctgctggccgacgtggtgcccaccaccagcagactgagacccagagccggcagaaccagagccatcgccagaaccagacagagcgagagagtgagagccaccgtgaacagaaacagaatcagcaccgccagaagagtgcagcacacccccggcagactgggcagcagcctgctggacgaggccatcgaggccgtggccaccggcctgagcaccgccgtgtaccagagacccctgacccccagaacccccgccagaagaaagagaaagaccagaagaagaaagaaggtgcccggcagaaagaagacccccagcggccccagcgccaagagcaagagcagcgccaccagaagcaagaagagacagcacagagtgaagaagagaagaggcaagaaggtgaagagcgaggccaccaccagaagcagaatcgccagaaccctgggcctgagaagacccgtgcacagcagctgcatccccagcgtgctgaagcccgtggagcccagcctgggcctgctgagagccgacatcggcgccgccagcctgagcctgttcggcgacccctacgagctggaccccttcgacagcagcgaggagctgagcgccaaccccctgagccccctgagcgccaagagaagagccctgagcagaagcgccctgcagagccaccagcccgtggccagacccgtgagcgtgggcctgagcagaagaagactgcccgccgccgtgcccgagcccgacctggaggaggagcccgtgcccgacctgctgggcagcatcctgagcggccagagcctgctgatgctgggcagcagcgacgtgatcatccacagagacggcagcctgagcgccaagagagccgcccccgtgagcttccagagaaacagcggcagcctgagcagaggcgaggagggcttcaagggctgcctgcagcccagagccctgcccagcggcagccccgcccagggccccagcggcaacagaccccagagcaccggcctgagctgccagggcagaagcagaacccccgccagaaccgccggcgcccccgtgagactggacctgcccgccgcccccggcgccgtgcaggccagaaacctgagcaacggcagcgtgcccggcttcagacagagccacagcccctggttcaacggcaccaacaagcacaccctgcccctggccagcgccgccagcaagatcagcagcagagacagcaagcccccctgcagaagcgtggtgcccggcccccccctgaagcccgcccccagaagaaccgacatcagcgagctgcccagaatccccaagatcagaagagacgacggcggcggcagaagagacgccgcccccgcccacggccagagcatcgagatccccagcgcctgcatcagcagactgaccggcagagagggcaccggccagcccggcagaggcaccagagccgagagcgaggccagcagcagagtgcccagagagcccggcgtgcacaccggcagcagcagaccccccgcccccagcagccacggcagcctggcccccctgggccccagcagaggcaagggcgtgggcagcaccttcgagagcttcagaatcaacatccccggcaacatggcccacagcagccagctgagcagccccggcttctgcaacaccttcagacccgtggacgacaaggagcagagaaaggagaaccccagccccctgttcagcatcaagaagaccaagcagctgagaagcgaggtgtacgaccccagcgaccccaccggcagcgacagcagcgcccccggcagcagccccgagagaagcggccccggcctgctgcccagcgagatcaccagaaccatcagcatcaacagccccaaggcccagaccgtgcaggccgtgagatgcgtgaccagctacaccgtggagagcatcttcggcaccgagcccgagccccccctgggccccagcagcgccatgagcaagctgagaggcgccgtggccgccgagggcgccagcgacaccgagagagaggagcccaccgagagccagggcctggccgccagactgagaagacccagcccccccgagccctgggacgaggaggacggcgccagctgcagcaccttcttcggcagcgaggagagaaccgtgacctgcgtgaccgtggtggagcccgaggccccccccagccccgacgtgctgcaggccgccacccacagagtggtggagctgagaccccccagcagaagcagaagcaccagcagcagcagaagcagaaagaaggccaagagaaagagagtgagcagagagcacggcagaaccagaagcggcaccagaagcgagagcagagacagaagcagcagaagcgccagccccagcgtgggcgaggagagacccagaagacagagaagcaaggccaagagcagaagaagcagcagcgacagaagcagcagcagagagagagccaagagaaagaaggccaaggacaagagcagagagcacagaagaggcccctggggccacagcagaagaaccagcagaagcagaagcggcagccccggcagcagcagctacgagcactacgagagcagaaagaagaagaagagaagaagcgccagcagacccagaggcagagagtgcagccccaccagcagcctggagagactgtgcagacacaagcaccagagagagagaagccacgagagacccgacagaaaggagagcgtggcctggcccagagacagaagaaagagaagaagcagaagccccagcagcgagcacagagccagagagcacagaagacccagaagcagagagaagtggccccagaccagaagccacagccccgagagaaagggcgccgtgagagaggccagccccgcccccctggcccagggcgagcccggcagagaggacctgcccaccagactgcccgccctgggcgaggcccacgtgagccccgaggtggccaccgccgacaaggcccccctgcaggccccccccgtgctggaggtggccgccgagtgcgagcccgacgacctggacctggactacggcgacagcgtggaggccggccacgtgttcgacgacttcagcagcgacgccgtgttcatccagctggacgacatgagcagcccccccagccccgagagcaccgacagcagccccgagagagacttccccctgaagcccgccctgccccccgccagcctggccgtggccgccatccagagagaggtgagcctgatgcacgacgaggaccccagccagcccccccccctgcccgagggcacccaggagccccacctgctgagacccgacgccgccgagaaggccgaggcccccagcagccccgacgtggcccccgccggcaaggaggacagccccagcgccagcggcagagtgcaggaggccgccagacccgaggaggtggtgagccagacccccctgctgagaagcagagccctggtgaagagagtgacctggaacctgcaggagagcgagagcagcgcccccgccgaggacagagcccccagagcccccctgcacagaccccagaagcccagagagggcgcctgggacatggaggacgtggcccccaccggcgtgagacaggtgttcagcgagctgcccttccccagccacgtgctgcccgagcccggcttccccgacaccgaccccagccaggtgtacagccccggcctgccccccgcccccgcccagcccagcagcatccccccctgcgccctggtgagccagcccaccgtgcagttcatcctgcagggcagcctgcccctggtgggctgcggcgccgcccagaccctggcccccgtgcccgccgccctgacccccgccagcgagcccgccagccaggccaccgccgccagcaacagcgaggagaagacccccgcccccagactggccgccgagaagaccaagaaggaggagtacatgaagaagctgcacatgcaggagagagccgtggaggaggtgaagctggccatcaagcccttctaccagaagagagaggtgaccaaggaggagtacaaggacatcctgagaaaggccgtgcagaagatctgccacagcaagagcggcgagatcaaccccgtgaaggtggccaacctggtgaaggcctacgtggacaagtacagacacatgagaagacacaagaagcccgaggccggcgaggagccccccacccagggcgccgagggctag

SEQ ID NO: 105111 - DNA, 417 bp, Artificial Sequence
  derived and/or modified sequence
atgctggccgtgctggccttccccgtgggcgtgttcgtggtggccgtgttctggatcatctacgcctacgacagagagatgatctaccccaagctgctggacaacttcatccccggctggctgaaccacggcatgcacaccaccgtgctgcccttcatcctgatcgagatgagaaccagccaccaccagtaccccagcagaagcagcggcctgaccgccatctgcaccttcagcgtgggctacatcctgtgggtgtgctgggtgcaccacgtgaccggcatgtgggtgtaccccttcctggagcacatcggccccggcgccagaatcatcttcttcggcagcaccaccatcctgatgaacttcctgtacctgctgggcgaggtgctgaacaactacatctgggacacccagaagtag

SEQ ID NO: 105112 - DNA, 417 bp, Artificial Sequence
  derived and/or modified sequence
atgttggccgttttggcgtttccagtcggggtgtttgtcgtcgctgtcttctggatcatctatgcttatgacagggagatgatctacccgaaattgcttgacaattttatccccggatggctcaaccacggaatgcatacaaccgtgcttccctttattctcatagagatgcgcacatctcatcaccaatatccttctcgctccagtggtctgacggcaatctgtacatttagtgttggctacattctgtgggtatgttgggtgcatcacgtgacaggtatgtgggtgtacccctttctggagcatatcggccctggcgccaggataatctttttcggctccacgaccatccttatgaacttcctatacctcctcggagaggtgttaaacaactatatttgggacacgcagaaatag

SEQ ID NO: 105113 - DNA, 417 bp, Artificial Sequence
  derived and/or modified sequence
atgctggccgtgctggccttccctgtgggcgtgtttgtggtggccgtgttctggatcatctatgcctatgaccgggagatgatctaccccaagctgctggacaacttcatccctggctggctgaaccacggcatgcacaccaccgtgctgcccttcatcctgattgagatgaggaccagccaccaccagtaccccagccgcagcagcggcctgacagccatctgcaccttctctgtgggctacatcctgtgggtgtgctgggtgcaccacgtgacaggcatgtgggtgtaccccttcctggagcacatcggccctggggcccgcatcatcttcttcggcagcaccaccatcctgatgaacttcctgtacctgctgggggaggtgctgaacaactacatctgggacacccagaagtag

SEQ ID NO: 105114 - DNA, 593 bp, Artificial Sequence
  derived and/or modified sequence
gcattgatttctctacggagtagcattcaaatatgtaactgatcatggactccaggttatccaggctgtcttttttggcatctgtgtgctgactgatctttccagtcttctgactcgaggaagtgggaaccaggagcaagagaggcagctcaagaagctcatctctctccgggactggatgttagctgtgttggcctttcctgttggggtttttgttgtagcagtgttctggatcatttatgcctatgacagagagatgatatacccgaagctgctggataattttatcccagggtggctgaatcacggaatgcacacgacggttctgccctttatattaatcgagatgaggacatcgcaccatcagtatcccagcaggagcagcggacttaccgccatatgtaccttctctgttggctatatattatgggtgtgctgggtgcatcatgtaactggcatgtgggtgtaccctttcctggaacacattggcccaggagccagaatcatcttctttgggtctacaaccatcttaatgaacttcctgtacctgctgggagaagttctgaacaactatatctgggatacacagaaaa

SEQ ID NO: 105115 - DNA, 417 bp, Artificial Sequence
  derived and/or modified sequence
atgctggccgtgctggccttccccgtgggcgtgttcgtggtggccgttttttggatcatctacgcatacgatcgtgagatgatctaccccaagctgctcgacaattttatcccagggtggctgaatcacggaatgcatactactgtgctgccattcattctgattgaaatgcggacatctcaccatcaatacccaagccgatcgtccggacttactgctatatgcacttttagtgtggggtacattctgtgggtctgttgggtccatcacgtaacgggtatgtgggtttaccctttcctggagcatattgggccaggagctcggatcattttctttggctccactactatcttaatgaactttctataccttcttggagaggtgctcaataactatatttgggatactcagaagtag

SEQ ID NO: 105116 - DNA, 417 bp, Artificial Sequence
  derived and/or modified sequence
atgctggctgtcctggcgttcccagtaggggtatttgtggtcgctgtcttttggattatctacgcttatgatcgggagatgatttatcctaagctgctggacaattttattccgggatggctgaatcatggcatgcatactacagtcctgccatttatcctcatcgaaatgcgtaccagccaccaccagtacccaagcagatccagtgggctcactgcaatatgtacatttagtgtggggtacatcctctgggtctgttgggtgcatcatgtgaccggtatgtgggtttatcctttcttggaacacataggcccaggggctcgcatcatattttttggttccaccacgattcttatgaattttctttacttactgggagaggttctgaataactacatttgggatacacagaagtag

SEQ ID NO: 105117 - protein, 134 aa, Artificial Sequence
  derived and/or modified sequence
MALVPCQVLRMAILLSYCSILCNYKAIEMPSHQTYGGSWKFLTFIDLVIQAVFFGICVLTDLSSLLTRGSGNQEQERQLKKLISLRDWMLAVLAFPVGVFVVAVFWIIYAYDREMIYPKLLDNFIPGWLNHGML

SEQ ID NO: 105118 - DNA, 144 bp, Artificial Sequence
  derived and/or modified sequence
atggccctggtgccctgccaggtgctgagaatggccatcctgctgagctactgcagcatcctgtgcaactacaaggccatcgagatgcccagccaccagacctacggcggcagctggaagttcctgaccttcatcgacctgtag

SEQ ID NO: 105119 - DNA, 405 bp, Artificial Sequence
  derived and/or modified sequence
atggccctggtgccctgccaggtgctgagaatggccatcctgctgagctactgcagcatcctgtgcaactacaaggccatcgagatgcccagccaccagacctacggcggcagctggaagttcctgaccttcatcgacctggtgatccaggccgtgttcttcggcatctgcgtgctgaccgacctgagcagcctgctgaccagaggcagcggcaaccaggagcaggagagacagctgaagaagctgatcagcctgagagactggatgctggccgtgctggccttccccgtgggcgtgttcgtggtggccgtgttctggatcatctacgcctacgacagagagatgatctaccccaagctgctggacaacttcatccccggctggctgaaccacggcatgctgtag

SEQ ID NO: 105120 - DNA, 144 bp, Artificial Sequence
  derived and/or modified sequence
atggctttggtcccttgtcaggttctccgaatggccatcctgcttagctactgtagcatcctctgtaattacaaagctatcgagatgccgtcccatcagacatacggtggatcctggaagttcttgacgttcatcgacctgtag

SEQ ID NO: 105121 - DNA, 405 bp, Artificial Sequence
  derived and/or modified sequence
atggcacttgtcccgtgccaggttctgcgcatggccattcttttgagctattgtagcattctgtgcaactacaaagcgatcgagatgccaagccaccagacctatggaggcagctggaaatttctgacgttcatcgatcttgtgatccaggccgtgttttttggcatctgtgtgctgactgacttgagcagcctgctgacacggggtagcgggaaccaagagcaggagagacaactgaaaaaactgattagcttgcgggattggatgttggccgttctggcatttccagttggagtcttcgtggtagcagttttctggatcatttacgcctatgacagagagatgatttatcctaagctgctggacaacttcataccaggctggctgaatcatgggatgctgtag

SEQ ID NO: 105122 - DNA, 144 bp, Artificial Sequence
  derived and/or modified sequence
atggccctggtgccctgccaggtgctgaggatggccatcctgctgagctactgcagcatcctgtgcaactacaaggccatcgagatgcccagccaccagacctatggaggctcctggaagttcctgaccttcatcgacctgtag

SEQ ID NO: 105123 - DNA, 405 bp, Artificial Sequence
  derived and/or modified sequence
atggccctggtgccctgccaggtgctgaggatggccatcctgctgagctactgcagcatcctgtgcaactacaaggccatcgagatgcccagccaccagacctatggaggctcctggaagttcctgaccttcatcgacctggtgatccaggccgtgttcttcggcatctgtgtgctgacagacctgagcagcctgctgacccggggcagcggcaaccaggagcaggagcggcagctgaagaagctgatcagcctgcgggactggatgctggccgtgctggccttccctgtgggcgtgtttgtggtggccgtgttctggatcatctatgcctatgaccgggagatgatctaccccaagctgctggacaacttcatccctggctggctgaaccacggcatgctgtag

SEQ ID NO: 105124 - DNA, 559 bp, Artificial Sequence
  derived and/or modified sequence
cagccggtccaggcctctggcgaacatggcgcttgtcccctgccaggtgctgcggatggcaatcctgctgtcttactgctctatcctgtgtaactacaaggccatcgaaatgccctcacaccagacctacggagggagctggaaattcctgacgttcattgatctgtgattgcgtgtgaaggcctggctgcccccgcagcggcaccttctgaaccactcaccgttacctggtagctgggtacccttacctggcaactgggggacaaatggaggtggggcgcagccaggtggtgggctctttggagggggacaccgaactgcttctaagaggtgacacgggaagaatcttcaacaaaagcatcggacctgatcctgaatggcctgagacccattcgccctcaaggtgcttttcagagcacccaccgtgggatgaacttgttgcaactgaaggaaactgggtattgtctagtgatttggaacttcacctgaaagaaccaaatccttctcataagggagagaaagcacctaataaagttgtcttctttgcatctgttttttt

SEQ ID NO: 105125 - DNA, 1620 bp, Artificial Sequence
  derived and/or modified sequence
cccacggcgcccgcccccgcgcgcccggcgcctccctcacgcccgccctccttgccgcccagccggtccaggcctctggcgaacatggcgcttgtcccctgccaggtgctgcggatggcaatcctgctgtcttactgctctatcctgtgtaactacaaggccatcgaaatgccctcacaccagacctacggagggagctggaaattcctgacgttcattgatctggttatccaggctgtcttttttggcatctgtgtgctgactgatctttccagtcttctgactcgaggaagtgggaaccaggagcaagagaggcagctcaagaagctcatctctctccgggactggatgttagctgtgttggcctttcctgttggggtttttgttgtagcagtgttctggatcatttatgcctatgacagagagatgatatacccgaagctgctggataattttatcccagggtggctgaatcacggaatgctatagcaactagattccaccactttgggcttttacacagaactacagtatgatcagcttggttgaagtttggcactcgacactctgctcaattgaagacatatgcacaaaatcacttaccacattttttaacctgtttttcacactgggtaggcctgtaatatttgcataaaaatatgaaaagcaaccttctgcagggagagaaggcaattaaaagatgttgcgacctttctttctgcagcatttcaaagcttaaagttttcttggcacgcttttcaaacgcccatctgactttgaagcaggctgcctctccacagaaagcttgctccagcaatgactaaaggattgacctggtgccatgcatgctgctctgcacaagaaggacatttggaaatgaccttgaagcgaagttttgccaagttgatgaaatacgggccttcaagaagtgccatttctcaagcgatgtacagaagggtatccgcagcattgtcaaaaattaccccttaatttggtgttggatgaacatgaatttttaacctccataaggaatgatacttgctcttgattttattagttgcattttgtaacaggttggaaaaattaggtaatggagaactttggcataccacttttgtttcttttaggtgatttttaaaaaacatttgctgaaggagaggttgatgctcaaagggtacagtgataaatggagagacgggagtttaaaatgaaggataagccgcaaatgaggatgaagttaatggatagagaaaagatgggaggaagaggtatctctctttactcgtaagctgcccatcgatatgatttagactctaggagaggggcgtttctttcctcagtaggcacactcatagagtaaactgttgccgctgtttaaacatgttaattgatgttgacaccagttgttgctatacagttttccattttactgagcgatgtatttatgttgctgcataatgtcgcctgattgcacttctcatgctggtgaagttggctgacatttcaggctctggataacatgaagctgtgctttaaccttatttggaagtcagggttagagtggcactggaaggtctccttcagcttcccttcctgtgacctgcctactataaccctggc

SEQ ID NO: 105126 - DNA, 144 bp, Artificial Sequence
  derived and/or modified sequence
atggccctggtgccctgccaggtgctgcggatggccatcctgctgtcttactgctcgatcctgtgcaactacaaagctatcgagatgccgtcacaccagacctacggagggagctggaagttcttgacgttcattgatctctag

SEQ ID NO: 105127 - DNA, 405 bp, Artificial Sequence
  derived and/or modified sequence
atggccctggtgccctgccaggtgctgcggatggccatcctgctgtcctattgctcaatcctctgcaattataaggcaatcgaaatgccgtcccatcagacttacggtggatcttggaaattcctgacattcatcgacctcgtgatccaagcagtctttttcggcatatgtgttttgaccgacctgtcaagcttgctgacgcgtggctctggaaatcaggagcaagaacgacagctgaagaagctcatttccctgagagattggatgctggctgttcttgcttttcccgtgggcgtcttcgtggtggctgtcttctggatcatatatgcatatgatagggagatgatttatcccaaactgttggataacttcattcctggatggcttaaccacggcatgctgtag

SEQ ID NO: 105128 - DNA, 144 bp, Artificial Sequence
  derived and/or modified sequence
atggccctcgtgccgtgccaggtgctcaggatggccatactgctctcctactgctctattttgtgtaactataaggccatcgaaatgccatctcatcagacatacggcggatcatggaaatttctaacatttattgacctttag

SEQ ID NO: 105129 - DNA, 405 bp, Artificial Sequence
  derived and/or modified sequence
atggcactggtgccgtgccaagttctgcgtatggctatccttctctcgtattgctctatactgtgcaattataaagctattgaaatgcccagccaccagacctatgggggatcttggaaatttctgacattcatagacctggtgatccaggccgtgttcttcggaatttgcgtcctgaccgacctctcttctttattgacgcgaggaagcggaaaccaagaacaggaacgtcaacttaagaagctcatctctctacgcgattggatgctcgcagtgctggcctttcccgttggtgtctttgtcgtcgccgtgttctggatcatttacgcctatgacagggagatgatttaccctaagctgttagataattttattccaggttggcttaaccacgggatgttgtag

SEQ ID NO: 105130 - protein, 47 aa, Artificial Sequence
  derived and/or modified sequence
MALVPCQVLRMAILLSYCSILCNYKAIEMPSHQTYGGSWKFLTFIDL

SEQ ID NO: 105131 - protein, 744 aa, Artificial Sequence
  derived and/or modified sequence
MELCGATRLGYFGRSQFYIALKLVAVAQSGFPLRVESINTVKDLPLPRFVASKNEQESRHAASYSSDSENQGSYSGVIPPPPGRGQVKKGSVSHDTVQPRTSADAQEPASPVVSPQQSPPTSPHTWRKHSRHPSGGNSERPLAGPGPFWSPFGEAQSGSSAGDAVWSGHSPPPPQENWVSFADTPPTSTLLTMHPASVQDQTTVRTVASATTAIEIRRQSSSYDDPWKITDEQRQYYVNQFKTIQPDLNGFIPGSAAKEFFTKSKLPILELSHIWELSDFDKDGALTLDEFCAAFHLVVARKNGYDLPEKLPESLMPKLIDLEDSADVGDQPGEVGYSGSPAEAPPSKSPSMPSLNQTWPELNQSSEQWETFSERSSSSQTLTQFDSNIAPADPDTAIVHPVPIRMTPSKIHMQEMELKRTGSDHTNPTSPLLVKPSDLLEENKINSSVKFASGNTVADGYSSSDSFTSDPEQIGSNVTRQRSHSGTSPDNTAPPPPPPRPQPSHSRSSSLDMNRTFTVTTGQQQAGVVAHPPAVPPRPQPSQAPGPAVHRPVDADGLITHTSTSPQQIPEQPNFADFSQFEVFAASNVNDEQDDEAEKHPEVLPAEKASDPASSLRVAKTDSKTEEKTAASAPANVSKGTTPLAPPPKPVRRRLKSEDELRPEVDEHTQKTGVLAAVLASQPSIPRSVGKDKKAIQASIRRNKETNTVLARLNSELQQQLKDVLEERISLEVQLEQLRPFSHL

SEQ ID NO: 105132 - protein, 796 aa, Artificial Sequence
  derived and/or modified sequence
MEGLTLSDAEQKYYSDLFSYCDIESTKKVVVNGRVLELFRAAQLPNDVVLQIMELCGATRLGYFGRSQFYIALKLVAVAQSGFPLRVESINTVKDLPLPRFVASKNEQESRHAASYSSDSENQGSYSGVIPPPPGRGQVKKGSVSHDTVQPRTSADAQEPASPVVSPQQSPPTSPHTWRKHSRHPSGGNSERPLAGPGPFWSPFGEAQSGSSAGDAVWSGHSPPPPQENWVSFADTPPTSTLLTMHPASVQDQTTVRTVASATTAIEIRRQSSSYDDPWKITDEQRQYYVNQFKTIQPDLNGFIPGSAAKEFFTKSKLPILELSHIWELSDFDKDGALTLDEFCAAFHLVVARKNGYDLPEKLPESLMPKLIDLEDSADVGDQPGEVGYSGSPAEAPPSKSPSMPSLNQTWPELNQSSEQWETFSERSSSSQTLTQFDSNIAPADPDTAIVHPVPIRMTPSKIHMQEMELKRTGSDHTNPTSPLLVKPSDLLEENKINSSVKFASGNTVADGYSSSDSFTSDPEQIGSNVTRQRSHSGTSPDNTAPPPPPPRPQPSHSRSSSLDMNRTFTVTTGQQQAGVVAHPPAVPPRPQPSQAPGPAVHRPVDADGLITHTSTSPQQIPEQPNFADFSQFEVFAASNVNDEQDDEAEKHPEVLPAEKASDPASSLRVAKTDSKTEEKTAASAPANVSKGTTPLAPPPKPVRRRLKSEDELRPEVDEHTQKTGVLAAVLASQPSIPRSVGKDKKAIQASIRRNKETNTVLARLNSELQQQLKDVLEERISLEVQLEQLRPFSHL

SEQ ID NO: 105133 - DNA, 2235 bp, Artificial Sequence
  derived and/or modified sequence
atggagctgtgcggcgccaccagactgggctacttcggcagaagccagttctacatcgccctgaagctggtggccgtggcccagagcggcttccccctgagagtggagagcatcaacaccgtgaaggacctgcccctgcccagattcgtggccagcaagaacgagcaggagagcagacacgccgccagctacagcagcgacagcgagaaccagggcagctacagcggcgtgatcccccccccccccggcagaggccaggtgaagaagggcagcgtgagccacgacaccgtgcagcccagaaccagcgccgacgcccaggagcccgccagccccgtggtgagcccccagcagagcccccccaccagcccccacacctggagaaagcacagcagacaccccagcggcggcaacagcgagagacccctggccggccccggccccttctggagccccttcggcgaggcccagagcggcagcagcgccggcgacgccgtgtggagcggccacagccccccccccccccaggagaactgggtgagcttcgccgacaccccccccaccagcaccctgctgaccatgcaccccgccagcgtgcaggaccagaccaccgtgagaaccgtggccagcgccaccaccgccatcgagatcagaagacagagcagcagctacgacgacccctggaagatcaccgacgagcagagacagtactacgtgaaccagttcaagaccatccagcccgacctgaacggcttcatccccggcagcgccgccaaggagttcttcaccaagagcaagctgcccatcctggagctgagccacatctgggagctgagcgacttcgacaaggacggcgccctgaccctggacgagttctgcgccgccttccacctggtggtggccagaaagaacggctacgacctgcccgagaagctgcccgagagcctgatgcccaagctgatcgacctggaggacagcgccgacgtgggcgaccagcccggcgaggtgggctacagcggcagccccgccgaggccccccccagcaagagccccagcatgcccagcctgaaccagacctggcccgagctgaaccagagcagcgagcagtgggagaccttcagcgagagaagcagcagcagccagaccctgacccagttcgacagcaacatcgcccccgccgaccccgacaccgccatcgtgcaccccgtgcccatcagaatgacccccagcaagatccacatgcaggagatggagctgaagagaaccggcagcgaccacaccaaccccaccagccccctgctggtgaagcccagcgacctgctggaggagaacaagatcaacagcagcgtgaagttcgccagcggcaacaccgtggccgacggctacagcagcagcgacagcttcaccagcgaccccgagcagatcggcagcaacgtgaccagacagagaagccacagcggcaccagccccgacaacaccgccccccccccccccccccccagaccccagcccagccacagcagaagcagcagcctggacatgaacagaaccttcaccgtgaccaccggccagcagcaggccggcgtggtggcccacccccccgccgtgccccccagaccccagcccagccaggcccccggccccgccgtgcacagacccgtggacgccgacggcctgatcacccacaccagcaccagcccccagcagatccccgagcagcccaacttcgccgacttcagccagttcgaggtgttcgccgccagcaacgtgaacgacgagcaggacgacgaggccgagaagcaccccgaggtgctgcccgccgagaaggccagcgaccccgccagcagcctgagagtggccaagaccgacagcaagaccgaggagaagaccgccgccagcgcccccgccaacgtgagcaagggcaccacccccctggcccccccccccaagcccgtgagaagaagactgaagagcgaggacgagctgagacccgaggtggacgagcacacccagaagaccggcgtgctggccgccgtgctggccagccagcccagcatccccagaagcgtgggcaaggacaagaaggccatccaggccagcatcagaagaaacaaggagaccaacaccgtgctggccagactgaacagcgagctgcagcagcagctgaaggacgtgctggaggagagaatcagcctggaggtgcagctggagcagctgagacccttcagccacctgtag

SEQ ID NO: 105134 - DNA, 2391 bp, Artificial Sequence
  derived and/or modified sequence
atggagggcctgaccctgagcgacgccgagcagaagtactacagcgacctgttcagctactgcgacatcgagagcaccaagaaggtggtggtgaacggcagagtgctggagctgttcagagccgcccagctgcccaacgacgtggtgctgcagatcatggagctgtgcggcgccaccagactgggctacttcggcagaagccagttctacatcgccctgaagctggtggccgtggcccagagcggcttccccctgagagtggagagcatcaacaccgtgaaggacctgcccctgcccagattcgtggccagcaagaacgagcaggagagcagacacgccgccagctacagcagcgacagcgagaaccagggcagctacagcggcgtgatcccccccccccccggcagaggccaggtgaagaagggcagcgtgagccacgacaccgtgcagcccagaaccagcgccgacgcccaggagcccgccagccccgtggtgagcccccagcagagcccccccaccagcccccacacctggagaaagcacagcagacaccccagcggcggcaacagcgagagacccctggccggccccggccccttctggagccccttcggcgaggcccagagcggcagcagcgccggcgacgccgtgtggagcggccacagccccccccccccccaggagaactgggtgagcttcgccgacaccccccccaccagcaccctgctgaccatgcaccccgccagcgtgcaggaccagaccaccgtgagaaccgtggccagcgccaccaccgccatcgagatcagaagacagagcagcagctacgacgacccctggaagatcaccgacgagcagagacagtactacgtgaaccagttcaagaccatccagcccgacctgaacggcttcatccccggcagcgccgccaaggagttcttcaccaagagcaagctgcccatcctggagctgagccacatctgggagctgagcgacttcgacaaggacggcgccctgaccctggacgagttctgcgccgccttccacctggtggtggccagaaagaacggctacgacctgcccgagaagctgcccgagagcctgatgcccaagctgatcgacctggaggacagcgccgacgtgggcgaccagcccggcgaggtgggctacagcggcagccccgccgaggccccccccagcaagagccccagcatgcccagcctgaaccagacctggcccgagctgaaccagagcagcgagcagtgggagaccttcagcgagagaagcagcagcagccagaccctgacccagttcgacagcaacatcgcccccgccgaccccgacaccgccatcgtgcaccccgtgcccatcagaatgacccccagcaagatccacatgcaggagatggagctgaagagaaccggcagcgaccacaccaaccccaccagccccctgctggtgaagcccagcgacctgctggaggagaacaagatcaacagcagcgtgaagttcgccagcggcaacaccgtggccgacggctacagcagcagcgacagcttcaccagcgaccccgagcagatcggcagcaacgtgaccagacagagaagccacagcggcaccagccccgacaacaccgccccccccccccccccccccagaccccagcccagccacagcagaagcagcagcctggacatgaacagaaccttcaccgtgaccaccggccagcagcaggccggcgtggtggcccacccccccgccgtgccccccagaccccagcccagccaggcccccggccccgccgtgcacagacccgtggacgccgacggcctgatcacccacaccagcaccagcccccagcagatccccgagcagcccaacttcgccgacttcagccagttcgaggtgttcgccgccagcaacgtgaacgacgagcaggacgacgaggccgagaagcaccccgaggtgctgcccgccgagaaggccagcgaccccgccagcagcctgagagtggccaagaccgacagcaagaccgaggagaagaccgccgccagcgcccccgccaacgtgagcaagggcaccacccccctggcccccccccccaagcccgtgagaagaagactgaagagcgaggacgagctgagacccgaggtggacgagcacacccagaagaccggcgtgctggccgccgtgctggccagccagcccagcatccccagaagcgtgggcaaggacaagaaggccatccaggccagcatcagaagaaacaaggagaccaacaccgtgctggccagactgaacagcgagctgcagcagcagctgaaggacgtgctggaggagagaatcagcctggaggtgcagctggagcagctgagacccttcagccacctgtag

SEQ ID NO: 105135 - DNA, 2235 bp, Artificial Sequence
  derived and/or modified sequence
atggaattgtgcggggccacccgactaggctatttcggaagaagccagttctatatcgcacttaaattggtggctgttgcccagtccggattccccctgagagtggaaagcataaatactgttaaggaccttcctctgccccggttcgtcgctagtaagaacgaacaggagtcccgtcacgcagcttcatacagctccgatagtgagaatcagggatcatatagcggcgttatccctcccccccctggtaggggccaagtgaagaagggttctgtgagtcacgacacagtccagccacgcacatcagccgatgcgcaggagccggctagcccagtcgtgtctccccagcagagcccccctacatcccctcacacctggcggaaacacagcagacatccctcaggcgggaatagtgagaggcccctggctgggccgggtcctttttggtctcccttcggcgaggctcagagtggttcgtctgccggggacgcagtctggtccggtcattcaccaccccctccacaggaaaactgggtctcctttgcagacacaccgccaacctctacacttctgacgatgcaccctgcgagcgttcaagaccagaccactgtacgtacagttgcatcagcgacgacagcgatcgagattcgacggcagagtagttcctatgacgacccctggaaaattacagatgagcagcgtcagtattatgtcaaccaatttaaaacaatacagcccgacctgaacggattcatccctggatcagccgcaaaagagttcttcacaaaatctaagctccctatcttggaactgtcccacatctgggagttgagtgattttgataaggatggggcccttacactcgatgagttctgtgctgcgtttcatttggtggttgctcggaaaaatggctacgatttgccagaaaagctgcctgaatctctcatgcccaagttgatcgatctggaggactctgccgatgtgggggatcagcccggggaggtcggctactccggatctccggccgaggcacctccatctaaatcaccttccatgccctctttgaatcagacatggccggagctgaaccagtctagcgaacagtgggagaccttttctgagcggtcctcatcatcacagacccttactcagttcgattcaaacattgccccagccgacccagacaccgccatcgtgcacccagtacccattaggatgaccccatcaaagattcacatgcaggagatggaactgaagcgcactggtagcgaccatacgaatcctaccagcccactcctcgtcaaaccaagcgatctgctcgaggagaataagataaattcatccgtcaaattcgcatctggtaatacggttgccgatggctactcaagttctgattcatttacatccgaccctgagcagattggatctaacgtgactcgccaacggtcacatagcggaacaagcccagacaacactgcgcccccacctccgccaccaagaccccagcctagccatagtaggtcgagctctctcgacatgaaccggaccttcacagtgacaactggacagcagcaggccggagtggttgcgcacccccctgccgtgcctccaagaccccaaccttcgcaggcccccgggcctgcagttcatcgtcctgtggacgcagacggactgatcacacatactagtacctcaccacagcagataccagaacagcccaactttgccgacttctctcagttcgaggtatttgccgcatcaaatgttaatgatgagcaggatgacgaagcagagaagcacccagaggttctgcctgcggagaaggcaagcgacccagcgtcctccctgagggtggccaagaccgattctaaaacagaggagaaaaccgccgcatccgccccagctaacgtaagcaagggcactactcccctggctcctccccccaagcccgttagacgtagacttaaatctgaagacgagctacggcctgaggtggacgaacacacccaaaagacaggagtgctggcagctgtactggcctcccaacccagcatccccagatccgtcggcaaagataagaaggccattcaggcctccattcgcagaaataaagaaactaatactgttctcgctaggctcaattcagagctgcagcaacagttgaaggatgtccttgaggagcggattagcctcgaagttcaactcgagcagctcagaccgtttagccacctgtag

SEQ ID NO: 105136 - DNA, 2391 bp, Artificial Sequence
  derived and/or modified sequence
atggagggtctcacccttagcgacgccgagcaaaagtactacagcgatttgtttagctactgcgacatcgaatctactaaaaaggttgtcgtgaatggacgcgttcttgagctcttccgagctgcacaactcccaaacgatgttgttcttcaaatcatggaactgtgtggggcaacccgtctgggttacttcggcagaagccaattttatattgctctgaagctggttgccgtcgcacagagcgggttcccgttaagggttgagtccatcaacacagtaaaggatctcccgctgccgagatttgtggccagcaagaacgaacaagagtctcggcacgcagcctcctacagcagcgactcagagaaccagggatcctatagcggagtaattcctcctcccccaggacgaggccaggtcaaaaagggaagcgtgtcccatgacaccgtccagccccgcacttccgcagatgctcaggaaccagcttctcctgttgtctccccacagcagtctccgccaacttcaccacatacctggcgcaaacacagtaggcatccttctggcgggaacagcgaaagaccactggctggccccgggcctttttggtctcccttcggcgaggcacaatctggcagcagcgctggcgacgcggtgtggtcagggcatagcccccccccaccccaggagaattgggtctcatttgctgataccccaccaacctccacattgctgaccatgcatcccgcttctgtccaggatcagacaaccgtgcgcacagtggcatccgccactaccgcgatcgagatccgccgtcaaagcagctcctacgacgacccctggaagataacagacgaacagcgccaatactacgtgaaccagttcaagacaatccagccagatctgaatggctttattccaggatccgcagcaaaagagtttttcactaagtcaaaactgcctatactcgagctctctcacatctgggaactaagcgatttcgacaaggacggcgctctaaccctggacgaattttgcgcagccttccatttggtggttgcccgcaaaaacggatacgacctgccagagaaactaccagagagcctgatgcccaaactcatcgatctggaagactccgccgatgtgggggaccaacccggggaggtagggtactcaggctcccccgctgaagcgccaccctccaaatccccatccatgcctagcctcaatcagacctggcccgagctcaatcagtccagcgaacagtgggaaacgttttctgagagaagttcgtcatcccagacgctgacccaattcgatagcaacatcgcacctgctgaccctgacaccgccattgtccatcccgtgccaattagaatgactccgagcaaaattcatatgcaggagatggagctgaagaggactggcagcgaccacacaaacccaacctccccactgctggtgaaaccctccgacctcttggaagagaacaaaataaacagcagtgtaaagtttgcttcaggcaacacagtggctgacgggtacagtagcagtgattcgttcactagcgatcccgagcagatcgggagcaatgtcactaggcaacggtctcatagtggaacttcccccgataatactgcaccacccccccccccgccccgcccgcagccctctcactctagatcctccagcctggatatgaaccgcacattcaccgtgaccacaggacagcagcaagctggcgtcgtggctcatcctcctgccgtgccaccccgcccacagccatctcaagcccccggccccgcagtccacagacctgtggacgctgacgggttgattacgcatacctccacctccccccagcagatcccagaacaacccaatttcgccgatttcagccagttcgaggtgtttgcagcatccaacgtcaatgacgagcaggacgatgaggccgaaaaacaccccgaagtgttgcctgctgaaaaggctagtgatcccgcctcatcgttgcgggtcgcaaagacagacagtaaaacagaggagaagactgccgcatctgcccccgctaatgttagcaagggcaccactccactggcacccccccctaaaccggttcggcgccggctcaaatcagaggacgagctcaggcctgaagtcgacgagcacacccagaaaacaggcgtgcttgccgccgtcctcgcatcgcagccctctatccctcgatcagtagggaaagataagaaagccattcaggcttccatcagacgcaataaagagactaacaccgtactcgcaaggttgaactcagaattgcagcagcagttgaaggatgtgctggaggagcggatctcactagaggtgcagctggagcagctacgccctttcagccacttgtag

SEQ ID NO: 105137 - DNA, 2235 bp, Artificial Sequence
  derived and/or modified sequence
atggagctgtgtggggccacccggctgggctacttcggccgcagccagttctacatcgccctgaagctggtggccgtggcccagagcggcttccccctgcgggtggagagcatcaacacagtgaaggacctgcccctgcccaggtttgtggccagcaagaatgagcaggagagcagacatgctgccagctacagcagtgacagcgagaaccagggcagctacagcggggtcatccccccacctcctggccggggccaggtgaagaagggctctgtgtcccatgacacagtgcagcccaggaccagcgcagatgcccaggagcccgccagccctgtggtgagcccccagcagagcccccccaccagcccccacacctggaggaagcacagccgccaccccagcggcggcaacagcgagcggcccctggccggccctggccccttctggagcccctttggagaggcccagagcggcagcagcgctggagatgctgtgtggagcggccacagccccccaccaccccaggagaactgggtgtcctttgctgacaccccacccaccagcaccctgctgaccatgcacccagcctctgtgcaggaccagaccaccgtgaggacagtggccagcgccaccacagccatcgagatccggcggcagagcagcagctatgatgacccctggaagatcacagatgagcagaggcagtactacgtgaaccagttcaagaccatccagcctgacctgaatggcttcatccctggcagcgctgccaaggagttcttcaccaagagcaagctgcccatcctggagctgagccacatctgggagctgagtgactttgacaaggatggagccctgaccctggatgagttctgtgccgccttccacctggtggtggccaggaagaatggctatgacctgcctgagaagctgcctgagagcctgatgcccaagctgattgacctggaggacagcgcagatgtgggggaccagcccggggaggtgggctacagcggcagccctgctgaggccccacccagcaagagccccagcatgcccagcctgaaccagacctggccagagctgaaccagagcagcgagcagtgggagaccttcagcgagaggagcagcagcagccagaccctgacccagtttgacagcaacatcgccccagctgaccctgacacagccatcgtgcaccctgtgcccatccgcatgacccccagcaagatccacatgcaggagatggagctgaagaggactggaagtgaccacaccaaccccaccagccccctgctggtgaagcccagcgacctgctggaggagaacaagatcaacagctctgtgaagtttgccagcggcaacacagtggctgatggctacagcagcagtgacagcttcaccagtgaccctgagcagatcggcagcaatgtgacccggcagaggagccacagcggcaccagcccagacaacacagcccctcctcctcctccaccccggccccagcccagccacagccgcagcagcagcctggacatgaacagaaccttcaccgtgaccaccggccagcagcaggccggcgtggtggcccaccccccagctgtgcccccccggccccagcccagccaggcccctggccctgctgtgcacaggcctgtggatgctgatggcctcatcacccacaccagcaccagcccccagcagatccctgagcagcccaactttgctgacttcagccagtttgaggtgtttgctgccagcaatgtgaatgatgagcaggatgatgaagctgagaagcaccctgaggtgctgcctgctgagaaggccagtgaccctgccagcagcctgcgggtggccaagacagacagcaagacagaggagaagacagctgccagcgccccagccaacgtgtccaagggcaccacccccctggcccccccacccaagcctgtgagaagaaggctgaagtcagaagatgagctgcggcctgaggtggatgagcacacccagaagacaggagtgctggccgctgtgctggccagccagcccagcatccccaggtctgtgggcaaggacaagaaggccatccaggccagcatcagaagaaacaaggagaccaacacagtgctggcccggctgaacagcgagctgcagcagcagctgaaggatgtgctggaggagcgcatcagcctggaggtgcagctggagcagctgcggcccttcagccacctgtag

SEQ ID NO: 105138 - DNA, 2391 bp, Artificial Sequence
  derived and/or modified sequence
atggagggcctgaccctgagtgatgctgagcagaagtactacagcgacctcttctcctactgtgacatcgagagcaccaagaaggtggtggtgaatggccgggtgctggagctgttccgggccgcccagctgcccaatgatgtggtgctgcagatcatggagctgtgtggggccacccggctgggctacttcggccgcagccagttctacatcgccctgaagctggtggccgtggcccagagcggcttccccctgcgggtggagagcatcaacacagtgaaggacctgcccctgcccaggtttgtggccagcaagaatgagcaggagagcagacatgctgccagctacagcagtgacagcgagaaccagggcagctacagcggggtcatccccccacctcctggccggggccaggtgaagaagggctctgtgtcccatgacacagtgcagcccaggaccagcgcagatgcccaggagcccgccagccctgtggtgagcccccagcagagcccccccaccagcccccacacctggaggaagcacagccgccaccccagcggcggcaacagcgagcggcccctggccggccctggccccttctggagcccctttggagaggcccagagcggcagcagcgctggagatgctgtgtggagcggccacagccccccaccaccccaggagaactgggtgtcctttgctgacaccccacccaccagcaccctgctgaccatgcacccagcctctgtgcaggaccagaccaccgtgaggacagtggccagcgccaccacagccatcgagatccggcggcagagcagcagctatgatgacccctggaagatcacagatgagcagaggcagtactacgtgaaccagttcaagaccatccagcctgacctgaatggcttcatccctggcagcgctgccaaggagttcttcaccaagagcaagctgcccatcctggagctgagccacatctgggagctgagtgactttgacaaggatggagccctgaccctggatgagttctgtgccgccttccacctggtggtggccaggaagaatggctatgacctgcctgagaagctgcctgagagcctgatgcccaagctgattgacctggaggacagcgcagatgtgggggaccagcccggggaggtgggctacagcggcagccctgctgaggccccacccagcaagagccccagcatgcccagcctgaaccagacctggccagagctgaaccagagcagcgagcagtgggagaccttcagcgagaggagcagcagcagccagaccctgacccagtttgacagcaacatcgccccagctgaccctgacacagccatcgtgcaccctgtgcccatccgcatgacccccagcaagatccacatgcaggagatggagctgaagaggactggaagtgaccacaccaaccccaccagccccctgctggtgaagcccagcgacctgctggaggagaacaagatcaacagctctgtgaagtttgccagcggcaacacagtggctgatggctacagcagcagtgacagcttcaccagtgaccctgagcagatcggcagcaatgtgacccggcagaggagccacagcggcaccagcccagacaacacagcccctcctcctcctccaccccggccccagcccagccacagccgcagcagcagcctggacatgaacagaaccttcaccgtgaccaccggccagcagcaggccggcgtggtggcccaccccccagctgtgcccccccggccccagcccagccaggcccctggccctgctgtgcacaggcctgtggatgctgatggcctcatcacccacaccagcaccagcccccagcagatccctgagcagcccaactttgctgacttcagccagtttgaggtgtttgctgccagcaatgtgaatgatgagcaggatgatgaagctgagaagcaccctgaggtgctgcctgctgagaaggccagtgaccctgccagcagcctgcgggtggccaagacagacagcaagacagaggagaagacagctgccagcgccccagccaacgtgtccaagggcaccacccccctggcccccccacccaagcctgtgagaagaaggctgaagtcagaagatgagctgcggcctgaggtggatgagcacacccagaagacaggagtgctggccgctgtgctggccagccagcccagcatccccaggtctgtgggcaaggacaagaaggccatccaggccagcatcagaagaaacaaggagaccaacacagtgctggcccggctgaacagcgagctgcagcagcagctgaaggatgtgctggaggagcgcatcagcctggaggtgcagctggagcagctgcggcccttcagccacctgtag

SEQ ID NO: 105139 - DNA, 2235 bp, Artificial Sequence
  derived and/or modified sequence
atggagctgtgcggcgccacccggctgggctacttcggccggagccagttttacatagcattgaagctagttgccgtggcccagtcaggcttccccctcagggttgaatcaataaacactgttaaagatttaccacttcccagattcgtagctagcaagaatgagcaggaaagccggcatgccgcgtcctactcatccgatagcgaaaaccaaggatcttactcaggggtaatccccccgcccccgggccggggacaggtcaagaagggcagcgtgtctcatgacaccgtgcagccccgcacaagcgctgacgctcaagagcctgccagccccgttgtgagcccccagcaatcaccacctacaagcccacacacatggagaaagcattcacggcatcctagcgggggcaacagtgagaggcctctggcgggaccgggcccattttggtcaccctttggggaggcacaaagtgggtcctcagccggggacgccgtgtggtccggccactcccctccccctcctcaagagaattgggtgagtttcgcggacaccccccctacttcaaccctcctgacaatgcatccagcatcagtgcaggaccaaacaaccgtgcggactgtggcctccgcaactacggctatagagatcagaagacagtcttcttcctacgatgatccttggaaaattacagacgaacagaggcagtattatgtcaaccagtttaaaacgatccagcctgatctgaacggctttatccccggtagtgcggcgaaagagtttttcaccaagagtaagctgcccatcctggaactgtcacatatctgggagctatctgattttgacaaagatggtgccctgacgcttgacgagttctgtgccgcctttcatctcgtggtggccagaaagaatggctacgatctgccagagaaactgccggagtcgctcatgcccaaactcattgacttggaggattctgctgatgtgggcgatcaaccgggcgaagttggatactctggatcaccagcagaagccccacccagcaaaagtccttcaatgcccagcctgaaccagacctggcctgaactgaatcagagctccgaacagtgggaaacctttagcgaaagaagctcctcttcacaaacattgactcagttcgattctaacatagccccagctgaccctgataccgctatcgtgcatccagtccccatcaggatgacgccatctaagatccacatgcaagaaatggaactgaaacgcaccgggtccgatcacactaatccgaccagcccacttctcgtgaagccatcagacctcctggaagaaaataagatcaacagtagcgtgaagtttgccagtggcaacacagtagccgacgggtacagcagtagcgacagtttcactagcgacccagagcagattgggagcaatgtgacccgccagagaagccatagtggcacgtcaccagataacacagctccacctccacccccacctaggccgcaaccaagccattcccgctcttcatctctcgacatgaatcgcacattcaccgtgacgactgggcagcagcaggcgggtgtggtcgcccatccaccggccgtgcctccaagaccccagccttcccaggcaccaggccccgccgtgcacaggccggtcgatgccgacgggctgatcacccacacatccacaagcccacagcagattcccgaacagcctaacttcgccgactttagccagtttgaggtgttcgccgcctccaatgtgaacgacgaacaggatgacgaggcagagaaacaccccgaggtgcttcccgccgagaaggcatctgatccagcttcaagtctaagagtggcgaagacagacagtaagaccgaagagaaaaccgcagcatcagctccagccaatgtgagcaaggggactacccccctcgctcccccacctaagccggtgcggaggcgcctcaagtccgaggacgagcttcgtccagaggtggacgaacacacacaaaagaccggtgtcctggccgctgttttagcatcccaaccctccatccccaggtctgtcgggaaggacaaaaaagccatccaggcgtcaatccgaaggaataaggaaacgaacacagtcctagcgcgtttaaactcagagttgcagcaacagctgaaagacgtcttggaggagagaatttctctagaggtgcagctggaacagctgaggcctttttctcacctgtag

SEQ ID NO: 105140 - DNA, 2391 bp, Artificial Sequence
  derived and/or modified sequence
atggagggcctgaccctgagcgacgccgagcagaagtactacagcgacctcttctcctactgcgacatcgagagcactaagaaggtggtggtgaatgggagggtcctggaactgtttagagccgcacagctccccaatgatgtggtgctgcaaattatggagttatgtggtgccactcgtctcggatacttcgggagatcgcagttttacatagcgctcaagctcgtggctgtcgcacaatcaggctttccccttcgcgtagaatcaataaatacggtgaaggacctgcccttgccacgatttgtggcgagtaaaaacgagcaggaaagccgacatgcagccagctactctagtgattccgaaaaccagggcagctattctggcgtcatccctccaccacccggccgcgggcaagttaagaagggtagcgtcagccatgacaccgtgcagccacgaaccagtgcagatgctcaggagccagcctctcctgtagtgtctccccagcagagtccacccacctctccgcacacctggcggaaacactcaaggcatccttcgggtgggaacagcgagagacctctcgcaggacctgggccgttctggtcccctttcggggaggcccaatctggctcaagtgcaggtgacgccgtgtggtccggtcacagtccacctcccccacaggagaattgggtatcctttgctgacaccccacccacctctacccttctcacaatgcaccccgcatcagttcaggaccagacgacggtgaggacagtggcctcagcgacgacagcaatcgaaattaggagacagtcgagcagttacgatgacccatggaagattactgatgaacagcggcagtattacgtcaatcagttcaaaacaatccagcccgatttaaatgggtttatcccaggcagtgctgcgaaggagttttttactaaatccaaactcccaatcctcgagctgagtcacatctgggaacttagcgactttgacaaggatggggcattgactcttgatgagttctgtgccgccttccatcttgtcgttgctcggaaaaacggttatgatctgcctgagaagcttcccgagtcattgatgccaaaattgatagacctggaagactctgccgatgtcggcgaccagcctggcgaggttggctatagcggtagccctgccgaagctccaccatccaaatcacccagcatgccgtcactgaaccagacgtggccagaactgaaccaatcctcagaacaatgggagactttcagcgaacgctctagcagctctcagacactcactcagtttgacagcaacattgcacccgccgatccagacactgctattgtccatcccgttcctattcggatgacgccatcaaagatccatatgcaggagatggaattaaaacggacaggctcagaccacaccaatcccacttcccctctgctcgtcaaaccaagcgatctgctcgaggagaataaaattaactcttcggtgaagttcgcctctggcaacacagtcgctgacggatattctagcagcgactcgtttacctctgaccctgagcagatcggaagcaacgttacacgacagaggtctcactcagggacaagccctgataatacagctccaccaccgccacctccgagacctcaacccagccattctagatcgtcatcacttgacatgaatcgtacttttaccgtgaccactggtcaacagcaggccggtgtagtggcacatccaccggcagtgcctccaagaccccagccctcccaagcacccggtcctgcagtccaccggcccgtagacgccgacggcctgataactcacacctccacctccccacagcagattccagaacagcccaactttgctgacttctcccagtttgaggtctttgccgcatccaatgtcaacgatgagcaggacgatgaggcagaaaagcatccagaggtgctgcctgccgagaaagcctccgatcctgccagtagcctgcgcgtggctaagacggactcaaagacagaagaaaagactgccgctagcgcccccgccaatgtgtccaaaggaactactcccctggcgccaccgccaaagcccgtccgaagacgccttaagtccgaggatgaactcaggcctgaagtggatgaacatacgcagaaaacgggtgttctggccgcggttctggcttcacagccgagcataccccgaagtgtgggaaaggataaaaaggcgattcaagcatccatccggagaaataaggaaaccaataccgtgttagcaagactcaatagtgagttgcaacaacagctgaaagacgtactggaagagcgaatttccttggaggtccagttggaacagcttcggcccttctcgcacttgtag

SEQ ID NO: 105141 - DNA, 2235 bp, Artificial Sequence
  derived and/or modified sequence
atggagctgtgtggagccacgcgcctgggatatttcgggagatcacagttctacatcgcattaaaactggttgcagtggctcagtccgggtttcccttacgtgtagaatccatcaataccgtgaaggatttacccctacctcgctttgttgcttcaaaaaatgaacaggaatcgcgccatgccgcaagttattcttcggactcagagaaccaagggtcctactcaggcgtgattcctccccctcccggacgaggccaggtgaaaaaaggctcagttagccatgataccgtgcagccacggacttcagccgatgcacaggagcccgcttctccagtggtctctccgcaacagtccccacccactagtccacacacgtggcggaaacactcccgacacccatctggcggaaactccgagagaccactggctggtcccggacctttttggtctccgtttggcgaggcacagtctggtagttctgcgggtgatgccgtctggtccggacactctcccccacccccacaagagaactgggtcagtttcgctgacacaccaccaaccagcacgcttctcacgatgcaccctgctagcgttcaagaccagacaacagtccgcacagtggcgtccgccactaccgccatagaaattcggcgacagtcaagctcttatgacgatccatggaagattactgacgaacagcgccagtactatgtcaaccaattcaaaactatacagccggatcttaacggatttatacctgggtctgctgcaaaagaattttttacaaagtccaaattgccaattctcgagctgtctcacatctgggagttgtccgactttgacaaggacggcgcactaacgctcgacgaattttgcgctgcctttcacttagtcgtagcgaggaaaaatggctatgatttacctgagaaactgcccgaatccctcatgccgaaattaatcgatctcgaggattcagcagacgtgggcgaccagcccggagaggtgggatacagcggcagccccgctgaggctcccccaagcaaatccccttccatgccctctcttaatcagacatggccagaactgaatcagtcaagcgagcagtgggaaaccttctccgagcgaagtagttcaagccagacgctgactcagttcgactccaatattgcccctgcagaccctgataccgcaatcgtacatccagtacctatcaggatgacaccttctaaaatccatatgcaagagatggaattaaagcgaacaggctccgaccataccaatcccaccagccccttgcttgttaagccctctgatctgctcgaagaaaacaagatcaactcctctgtcaagttcgcatctgggaacactgtggccgatggctactcctcttcagatagctttacatcagacccagaacagattggttcaaatgtgacacgacagaggtctcacagcggaactagccccgacaatactgcccctccaccacctcctccacgcccacagccatctcattccagatcaagctctcttgacatgaatagaacttttacagtaacaactggacagcagcaggccggtgtggtcgcccatccacccgctgtccctccacgtcctcagccatcacaggctccaggtccagccgtgcaccgaccagttgatgccgatgggctgattacccacacctcaacaagcccgcagcaaataccagagcagcccaatttcgcggatttcagtcaatttgaagtgtttgccgcaagcaatgtaaatgatgagcaggacgacgaggccgagaaacaccctgaggtcctgcctgctgaaaaggcctccgacccagcatcttctctcagggtggcaaagacagactcaaaaacagaagagaagacagcagcctcagcccctgctaatgtatccaaaggcaccacccccctcgcaccaccccctaagcctgttagacggaggctgaagtctgaggacgaattgaggcctgaggtggacgagcacacgcaaaaaaccggagtgctggccgctgtgctggccagccagccctctatcccaaggagcgtgggcaaggacaagaaagccatccaagcttccatccgacgcaataaagagacgaacactgtgcttgccagattaaactctgagctgcagcagcagctgaaggatgtgctcgaggagcgcatttctctagaagtacagctcgagcagctccggccattctctcatctttag

SEQ ID NO: 105142 - DNA, 2391 bp, Artificial Sequence
  derived and/or modified sequence
atggaaggcctgactctgtccgatgcggaacagaaatactactctgatctcttctcgtattgcgacatagaaagtactaagaaagtggtcgtcaatggtcgcgttcttgaactgttccgagctgcccagctgcctaatgacgtcgtcctgcagatcatggagctttgtggggctacccgtctcggctatttcgggcgttcccagttttatatcgcgctcaagctggtggctgtcgcccagtccggcttccctttaagagtggaaagcattaataccgtgaaagatctacccctgcctaggttcgtggcgtcaaaaaatgagcaagagtcccggcacgccgcatcgtacagcagcgacagcgaaaaccaggggtcttattccggtgtcatcccccctcctcctggcaggggccaggtgaaaaagggctcagtcagccatgataccgtgcagcctagaacctcagcagacgctcaggaacctgcctcccctgtcgttagtccccagcagtctcccccaactagcccgcatacctggaggaaacacagtagacatccttccggtggcaactccgaaagacccctggctggcccaggaccattttggtcccccttcggagaggctcagagcggatctagcgccggagatgccgtgtggtctggacactcccctccacctcctcaggagaattgggtgtcgtttgccgatacgccgcctacttctaccttgctgactatgcacccagcaagcgtgcaagaccagacgactgtgaggacagtagcttcagccaccacggctatcgaaatacggaggcagagctcttcctatgatgacccttggaagatcacagacgaacaacggcagtattacgtgaatcagttcaagaccatccagcccgacctcaacggctttattcccggatccgccgcaaaagagtttttcacgaagagtaagcttccgatactggaactctcccatatatgggagctcagtgactttgacaaagacggtgctttgactctggacgagttttgcgctgcctttcatcttgtggtggccagaaagaacggctacgacctgccagagaaactaccagagtccctcatgccgaaactaattgacctggaggactctgccgacgttggcgatcaacccggagaggtgggctactccgggagccctgccgaggccccacctagtaagtctccgagtatgcctagcctcaatcagacctggcctgagcttaatcagtccagcgaacagtgggaaacttttagtgaacgcagcagttcgagtcaaaccctgacacagtttgactcaaacattgctcccgcagacccggatacggccatcgtgcatccagtgccgattagaatgacgccaagcaaaatccacatgcaggagatggagcttaagcggacgggcagcgaccacaccaatcccacaagccccctcctcgtgaagccctcggacctcctggaagaaaataaaatcaattcaagtgtaaagttcgcatcgggaaacaccgtggcagatgggtacagctccagtgacagcttcactagcgaccctgaacaaataggatccaatgtgaccagacagcggtcacactcaggcaccagtccagacaacaccgctccacctcccccacctccacgcccacaaccttcacattcaagatcatcctccctggatatgaatcggactttcactgtgactacagggcagcagcaggctggagttgtcgcccacccccctgcagtaccacctaggccacagccctctcaggcacctggccctgcagtccataggcccgttgacgcggatggtcttatcacgcatacttctaccagcccacagcagatccccgagcagcctaacttcgcagacttcagtcagttcgaggtgttcgccgcttctaatgtcaacgatgagcaggacgatgaggccgaaaagcaccctgaagtgctgcctgccgagaaggcatccgatcctgccagctccctgcgggtcgcaaagaccgactccaagaccgaggagaagactgctgcctcagcacccgcaaacgtatccaaaggcactactcccctggccccaccccctaagccggtgagacgacggctcaagagtgaagacgaactgcggcctgaggtcgatgagcatactcagaaaacgggcgtcctggccgcagtcctcgcatcacagccatcaatccctcgctctgtcggcaaagataagaaagccattcaggcctcgatacgcagaaacaaggaaacaaataccgttttagctcggcttaactcagagcttcagcagcagctcaaagacgtcctcgaggagcggataagcttggaagtgcagctggagcagctgcgcccattctctcacctgtag

SEQ ID NO: 105143 - DNA, 2664 bp, Artificial Sequence
  derived and/or modified sequence
actgtaaatggcggcggagggaggcggagcggcggccacgctcagcccagatcccccgaaactttaggttcgaagccccacaactttccgggaagcgctgccgctccggaggcgtggacggaaggggaagccgaggcgggaagtctgggggaatcggcagggagccggggagactcgaacccgcggcgggggcggagtccgccagtgcctcgcgcctccgcggcccccgcctctttctctgcaccctccccgcggccggagccggaggcgaagatggaaggcttaacgctgagcgatgcggagcagaaatactattcagatctcttctcctactgcgacattgagagcaccaagaaggtggtggtcaacgggcgggtgctggagctgttccgggccgcgcagctgccgaacgacgtggtcctacagatcatggagctttgtggtgcaacaagacttggttattttggaagaagtcagttctacattgctttgaaacttgtagctgttgcccagtctggtttccctttaagagtggaaagtataaatacagtaaaggaccttcctctgccaagatttgttgcttcaaagaatgaacaggaatctcgccatgcagcctcatattcttcagattctgaaaatcaagggtcgtattctggtgtaattcccccaccacctggcagggggcaagtgaaaaagggatccgtaagccatgatacggttcagcctcgtacatctgcagatgcacaggaacctgcatccccagtagtttcaccacagcaatccccaccaacttctccacacacatggaggaagcacagccgtcatcccagcggtgggaatagtgagaggcctctcgcgggacctgggccattttggtctccctttggtgaagcacaatcaggttcttctgctggtgatgcagtgtggtcagggcattccccacctccacctcaagaaaactgggtcagttttgcagatactccaccaaccagtactcttttaaccatgcatcctgcttctgtccaggaccagacaacagtacgaactgtagcatcagctacaactgccattgaaattcgtaggcaatccagtagttatgatgatccctggaaaataacagatgaacaaagacagtattatgtaaatcagtttaaaaccattcagcctgatctaaacggatttattccaggatctgcagctaaagagttttttacaaaatcaaaacttcctattcttgaactttctcatatttgggaactctcagactttgataaagatggtgcattgacactggatgagttttgtgctgcttttcatctggtggttgctaggaagaatggctatgatttaccagaaaaacttcctgaaagcttaatgcccaaactgattgatttggaagattcagcagatgttggggatcagccaggtgaggtaggttattcaggctctcctgctgaagctcctccaagcaagtcaccatcgatgccatcactaaaccagacatggcctgagctgaatcagagcagtgagcagtgggagacatttagtgaacgctcttcaagctcacaaactctgacccaatttgattctaacattgcaccagctgatcctgatactgctattgttcatccagttcccattcgtatgactccaagcaaaatccacatgcaggaaatggaacttaaaagaactggcagcgatcatacaaatcccactagcccattacttgtgaaaccatctgaccttttagaagaaaataagataaattcatcggtgaaattcgcttctggtaatactgtagcagatggttacagtagttcagactcttttacttctgacccagaacagatcgggagcaatgtaactcgtcaaaggtctcattcaggaacgtcgcctgataacactgcaccaccacctccccctccaaggccacagccctctcattctagatcatcatctttagatatgaatcggacctttacagtcaccacaggacaacaacaggctggagttgttgcccatcctcctgcagtgcctccaagaccacagccctcacaggctcctggtcctgctgtgcatcgcccagtggatgccgatggcctcataactcacactagtacctcacctcagcagataccagagcaaccaaattttgcagatttcagtcagtttgaagtatttgctgcatcaaatgtaaacgacgaacaagatgatgaagccgagaaacatccagaagtcctgccggctgaaaaagcttctgatcctgcaagttctcttcgagttgccaaaacagatagtaaaactgaagaaaagacagctgctagtgctcctgccaatgtgagcaaaggcacaacaccacttgctccaccacctaaacctgttcgaagaagattaaaatcagaagatgaattaaggccagaagttgatgaacatacacaaaagacgggtgtcttagctgctgttcttgcatcacaaccttctattcccagatctgttgggaaagataagaaagctattcaggcatcaattagacgtaataaggaaaccaacaccgttttggccagattgaatagcgaattgcagcaacaattaaaggatgttcttgaggagagaatttccctggaagttcaactggaacaacttcgaccattctctcacctataa

SEQ ID NO: 105144 - DNA, 4537 bp, Artificial Sequence
  derived and/or modified sequence
cgctgtcactgttggtgcgggcgcgtcggggccgggccggggcactgtaaatggcggcggagggaggcggagcggcggccacgctcagcccagatcccccgaaactttaggttcgaagccccacaactttccgggaagcgctgccgctccggaggcgtggacggaaggggaagccgaggcgggaagtctgggggaatcggcagggagccggggagactcgaacccgcggcgggggcggagtccgccagtgcctcgcgcctccgcggcccccgcctctttctctgcaccctccccgcggccggagccggagccggagccggagccgtagtcgcagccgcagccgcagccgcgcgccgggcctcgcaggcagcggcgcggcgagcgcagccgggccccctcctcgcgacctccgggccctgttgctcgggcgcacctggcgcgtgtgaggccggggccggcgttttcgggaagctagcaggaggccgggccacgcgcagcccctgccggcccaggttcctggggccgggccccgagtagtgcatgcggggcggggcggccgtgagccggaggcgaagatggaaggcttaacgctgagcgatgcggagcagaaatactattcagatctcttctcctactgcgacattgagagcaccaagaaggtggtggtcaacgggcgggtgctggagctgttccgggccgcgcagctgccgaacgacgtggtcctacagatcatggagctttgtggtgcaacaagacttggttattttggaagaagtcagttctacattgctttgaaacttgtagctgttgcccagtctggtttccctttaagagtggaaagtataaatacagtaaaggaccttcctctgccaagatttgttgcttcaaagaatgaacaggaatctcgccatgcagcctcatattcttcagattctgaaaatcaagggtcgtattctggtgtaattcccccaccacctggcagggggcaagtgaaaaagggatccgtaagccatgatacggttcagcctcgtacatctgcagatgcacaggaacctgcatccccagtagtttcaccacagcaatccccaccaacttctccacacacatggaggaagcacagccgtcatcccagcggtgggaatagtgagaggcctctcgcgggacctgggccattttggtctccctttggtgaagcacaatcaggttcttctgctggtgatgcagtgtggtcagggcattccccacctccacctcaagaaaactgggtcagttttgcagatactccaccaaccagtactcttttaaccatgcatcctgcttctgtccaggaccagacaacagtacgaactgtagcatcagctacaactgccattgaaattcgtaggcaatccagtagttatgatgatccctggaaaataacagatgaacaaagacagtattatgtaaatcagtttaaaaccattcagcctgatctaaacggatttattccaggatctgcagctaaagagttttttacaaaatcaaaacttcctattcttgaactttctcatatttgggaactctcagactttgataaagatggtgcattgacactggatgagttttgtgctgcttttcatctggtggttgctaggaagaatggctatgatttaccagaaaaacttcctgaaagcttaatgcccaaactgattgatttggaagattcagcagatgttggggatcagccaggtgaggtaggttattcaggctctcctgctgaagctcctccaagcaagtcaccatcgatgccatcactaaaccagacatggcctgagctgaatcagagcagtgagcagtgggagacatttagtgaacgctcttcaagctcacaaactctgacccaatttgattctaacattgcaccagctgatcctgatactgctattgttcatccagttcccattcgtatgactccaagcaaaatccacatgcaggaaatggaacttaaaagaactggcagcgatcatacaaatcccactagcccattacttgtgaaaccatctgaccttttagaagaaaataagataaattcatcggtgaaattcgcttctggtaatactgtagcagatggttacagtagttcagactcttttacttctgacccagaacagatcgggagcaatgtaactcgtcaaaggtctcattcaggaacgtcgcctgataacactgcaccaccacctccccctccaaggccacagccctctcattctagatcatcatctttagatatgaatcggacctttacagtcaccacaggacaacaacaggctggagttgttgcccatcctcctgcagtgcctccaagaccacagccctcacaggctcctggtcctgctgtgcatcgcccagtggatgccgatggcctcataactcacactagtacctcacctcagcagataccagagcaaccaaattttgcagatttcagtcagtttgaagtatttgctgcatcaaatgtaaacgacgaacaagatgatgaagccgagaaacatccagaagtcctgccggctgaaaaagcttctgatcctgcaagttctcttcgagttgccaaaacagatagtaaaactgaagaaaagacagctgctagtgctcctgccaatgtgagcaaaggcacaacaccacttgctccaccacctaaacctgttcgaagaagattaaaatcagaagatgaattaaggccagaagttgatgaacatacacaaaagacgggtgtcttagctgctgttcttgcatcacaaccttctattcccagatctgttgggaaagataagaaagctattcaggcatcaattagacgtaataaggaaaccaacaccgttttggccagattgaatagcgaattgcagcaacaattaaaggatgttcttgaggagagaatttccctggaagttcaactggaacaacttcgaccattctctcacctataagccaattgccgttaactgtgaacatacttgtttttaagtggttttgggttcaaagccaatttggagacctagacattcagctcactgcttaactcaacattaaattttatgattctgttttgccctatatgttcaccgttgtatttaagtatcttttattttttaatttcgacaataaaaaggtcaggatggcgttttctggagggtagattgtgtttgttggcacacccaccttttctgttccctagcatctgggatatgcaatgcttctatggctaataccacacaccaatttaatttatagaatgggctcctcatttacatctcagtcacagactcagaaataaattgtcagtttgtccttttatgtttaatattttacataaagcatctattctataaaaatctttagaaagagtttcccatttaattttgattttaaagaattatattggataaggtggttttcaccataagctaatttactctctgcagccgtctacattcttcacaaatcatgtggtacattgaagcctcttttacatgtcaacttgtgacaaatacaaacatgtgagattttatattttccttgtggaaatgtgatcaacttcatcagcgacttcgaactattttatgagattcaataattcagcagtcatgtaaacttatgaaataggtatgagtaatggcctttcttaatttttttaagtattgttttaaaacttctgaggatatcagttattcccagaataaagggaaattccttaggatttctagtttacctttagccatcttgtcactcattcttttgctatacagacaagtttttcctattaatgagtttctggagtatgccttattcaggacaatatgctgttttagattttgtttaatattaaatgatatatacatttcgatccattgctaacagcagatattccctttaagatttattctgtctataggatcatagattttaaactgcatggatatatcttggcagaatcagaagtgtggttttacaccaataaaacagcataatattttaacttttgttcatctttttaacaagatttaaagttttaagaaatagaagattttgtattttcatttctgaaagaaaaaatgtttaaatactatagattcacagtcctaaactgcaccgatagactttgttactgtaaacaagaatttgaagaacaagggaaactgacaacctcaagcttccaagattaatacaatttttacctgacaatatctaggtaaaaatatacatcagctgaagtttccaagtggctttcagtatggctttagttgttaaataataaatttaaagcattaaaggcccaggaaactactcaacacctgtttttctgagtgtctttgttttcaaagaaacatttttactcagctgtatttcattacaagcaagttttgctgtttccatttagttttgttttttaaaatatgctttttaaaaatagccttctaatttaacaatgtcaaaaatatttgttaaagcttcttagaatttagccttccaataaataacacttaaaaattatagaaaa

SEQ ID NO: 105145 - protein, 705 aa, Artificial Sequence
  derived and/or modified sequence
MEGLTLSDAEQKYYSDLFSYCDIESTKKVVVNGRVLELFRAAQLPNDVVLQIMELCGATRLGYFGRSQFYIALKLVAVAQSGFPLRVESINTVKDLPLPRFVASKNEQESRHAASYSSDSENQGSYSGVIPPPPGRGQVKKGSVSHDTVQPRTSADAQEPASPVVSPQQSPPTSPHTWRKHSRHPSGGNSERPLAGPGPFWSPFGEAQSGSSAGDAVWSGHSPPPPQENWVSFADTPPTSTLLTMHPASVQDQTTVRTVASATTAIEIRRQSSSYDDPWKITDEQRQYYVNQFKTIQPDLNGFIPGSAAKEFFTKSKLPILELSHIWELSDFDKDGALTLDEFCAAFHLVVARKNGYDLPEKLPESLMPKLIDLEDSADVGDQPGEVGYSGSPAEAPPSKSPSMPSLNQTWPELNQSSEDTAIVHPVPIRMTPSKIHMQEMELKRTGSDHTNPTSPLLVKPSDLLEENKINSSVKFASGNTVGQQQAGVVAHPPAVPPRPQPSQAPGPAVHRPVDADGLITHTSTSPQQIPEQPNFADFSQFEVFAASNVNDEQDDEAEKHPEVLPAEKASDPASSLRVAKTDSKTEEKTAASAPANVSKGTTPLAPPPKPVRRRLKSEDELRPEVDEHTQKTGVLAAVLASQPSIPRSVGKDKKAIQASIRRNKETNTVLARLNSELQQQLKDVLEERISLEVQLEQLRPFSHL

SEQ ID NO: 105146 - protein, 146 aa, Artificial Sequence
  derived and/or modified sequence
ELNQSSEWETFSERSSSSQTLTQFDSNIAPADPDTAIVHPVPIRMTPSKIHMQEMELKRTGSDHTNPTSPLLVKPSDLLEENKINSSVKFASGNTVGQQQAGVVAHPPAVPPRPQPSQAPGPAVHRPVDADGLITHTSTSPQQIPE

SEQ ID NO: 105147 - DNA, 2118 bp, Artificial Sequence
  derived and/or modified sequence
atggagggcctgaccctgagcgacgccgagcagaagtactacagcgacctgttcagctactgcgacatcgagagcaccaagaaggtggtggtgaacggcagagtgctggagctgttcagagccgcccagctgcccaacgacgtggtgctgcagatcatggagctgtgcggcgccaccagactgggctacttcggcagaagccagttctacatcgccctgaagctggtggccgtggcccagagcggcttccccctgagagtggagagcatcaacaccgtgaaggacctgcccctgcccagattcgtggccagcaagaacgagcaggagagcagacacgccgccagctacagcagcgacagcgagaaccagggcagctacagcggcgtgatcccccccccccccggcagaggccaggtgaagaagggcagcgtgagccacgacaccgtgcagcccagaaccagcgccgacgcccaggagcccgccagccccgtggtgagcccccagcagagcccccccaccagcccccacacctggagaaagcacagcagacaccccagcggcggcaacagcgagagacccctggccggccccggccccttctggagccccttcggcgaggcccagagcggcagcagcgccggcgacgccgtgtggagcggccacagccccccccccccccaggagaactgggtgagcttcgccgacaccccccccaccagcaccctgctgaccatgcaccccgccagcgtgcaggaccagaccaccgtgagaaccgtggccagcgccaccaccgccatcgagatcagaagacagagcagcagctacgacgacccctggaagatcaccgacgagcagagacagtactacgtgaaccagttcaagaccatccagcccgacctgaacggcttcatccccggcagcgccgccaaggagttcttcaccaagagcaagctgcccatcctggagctgagccacatctgggagctgagcgacttcgacaaggacggcgccctgaccctggacgagttctgcgccgccttccacctggtggtggccagaaagaacggctacgacctgcccgagaagctgcccgagagcctgatgcccaagctgatcgacctggaggacagcgccgacgtgggcgaccagcccggcgaggtgggctacagcggcagccccgccgaggccccccccagcaagagccccagcatgcccagcctgaaccagacctggcccgagctgaaccagagcagcgaggacaccgccatcgtgcaccccgtgcccatcagaatgacccccagcaagatccacatgcaggagatggagctgaagagaaccggcagcgaccacaccaaccccaccagccccctgctggtgaagcccagcgacctgctggaggagaacaagatcaacagcagcgtgaagttcgccagcggcaacaccgtgggccagcagcaggccggcgtggtggcccacccccccgccgtgccccccagaccccagcccagccaggcccccggccccgccgtgcacagacccgtggacgccgacggcctgatcacccacaccagcaccagcccccagcagatccccgagcagcccaacttcgccgacttcagccagttcgaggtgttcgccgccagcaacgtgaacgacgagcaggacgacgaggccgagaagcaccccgaggtgctgcccgccgagaaggccagcgaccccgccagcagcctgagagtggccaagaccgacagcaagaccgaggagaagaccgccgccagcgcccccgccaacgtgagcaagggcaccacccccctggcccccccccccaagcccgtgagaagaagactgaagagcgaggacgagctgagacccgaggtggacgagcacacccagaagaccggcgtgctggccgccgtgctggccagccagcccagcatccccagaagcgtgggcaaggacaagaaggccatccaggccagcatcagaagaaacaaggagaccaacaccgtgctggccagactgaacagcgagctgcagcagcagctgaaggacgtgctggaggagagaatcagcctggaggtgcagctggagcagctgagacccttcagccacctgtag

SEQ ID NO: 105148 - DNA, 2118 bp, Artificial Sequence
  derived and/or modified sequence
atggaagggctgactctttctgacgctgagcagaaatattactccgaccttttcagctattgtgacatcgagtccactaagaaagtggtggtgaatgggagggtcctggagctcttccgggccgcccagttgccaaatgatgtcgtgttgcaaatcatggagctgtgtggggccacacgcctcgggtattttggccggagccaattttacatcgctctaaaattggtggctgtcgcgcagagcggctttcctctccgggttgagtccattaacacagtcaaagatttgcctttgccacgctttgtcgcctctaaaaacgagcaagagtcaagacatgccgccagctacagcagtgactctgagaaccaaggctcctattctggggtgattccacccccccctggacgtggacaggtaaaaaagggcagtgtttcacacgacaccgttcagcctcggaccagtgccgacgcccaggagcccgcttctcctgtggtgtcccctcagcaaagccctcctacatctccccacacctggcgaaaacactcaaggcatcctagcggaggcaatagcgaacgacctctcgctggccccggacccttttggagcccttttggcgaagcacaaagcggttctagcgccggtgacgctgtttggagcggccattctccacctcccccgcaggagaattgggtctctttcgctgataccccccccactagtaccctgttaaccatgcatccagccagcgttcaggatcaaacaacagtgcgtaccgtagctagcgcaactacagccattgaaatcagaaggcagtctagcagctacgatgacccatggaagattacagacgaacaaaggcaatattacgttaaccaatttaaaaccatccagccagatctaaacggattcatccctgggtccgcagccaaagaattcttcaccaagtctaaactgccaatcctagaactcagtcacatatgggaactgagtgatttcgataaggacggagccctgacactcgacgagttctgtgcggctttccatctggtggtggccagaaaaaacggatatgatctaccagagaagctccctgagtctctgatgccaaaactgatcgacttggaggattccgctgacgttggtgatcagccgggagaggtgggatacagtgggtcacccgccgaagcccccccctccaagagtccatccatgccgagcctcaatcagacttggcccgagctcaatcagagctctgaggatacggcaattgtgcatcccgtcccaatccgtatgaccccaagtaaaattcacatgcaggagatggaacttaagaggaccggtagcgaccacaccaaccccaccagtcctctgctcgtaaagcccagcgatctgctggaagagaacaagatcaatagctccgtgaagttcgccagcgggaacactgtaggacagcagcaggctggagttgtagctcaccctccagccgtgccaccccggcctcagcccagtcaggcccccggccccgctgtccacaggccggtagacgctgacggattgataactcacacatcaacatcgccacaacagatccctgagcagccgaacttcgcagacttttctcaatttgaggtcttcgcagcctcaaatgtaaacgacgagcaggacgacgaggctgaaaagcaccctgaagtcctgcctgccgaaaaagcaagtgaccccgcaagtagtctgagggtggctaaaactgactccaagaccgaggagaagaccgctgcgtcggcgccagccaacgtcagcaaaggtaccacgccactggccccgcctccgaagccagttcgccgccggttgaagtctgaagatgaactccgcccggaggtggacgaacacacacagaagacaggggtactggcagctgtcctcgcaagtcagccaagtatccctaggtccgtcggcaaggataagaaagcgattcaggcttccattcgccgaaacaaggagaccaacacagtccttgcacgcttaaactcagaacttcaacagcagcttaaagacgtgttggaagagcggatctccttagaggtgcagttagagcagctccgtccattcagccacttgtag

SEQ ID NO: 105149 - DNA, 2118 bp, Artificial Sequence
  derived and/or modified sequence
atggagggcctgaccctgagtgatgctgagcagaagtactacagcgacctcttctcctactgtgacatcgagagcaccaagaaggtggtggtgaatggccgggtgctggagctgttccgggccgcccagctgcccaatgatgtggtgctgcagatcatggagctgtgtggggccacccggctgggctacttcggccgcagccagttctacatcgccctgaagctggtggccgtggcccagagcggcttccccctgcgggtggagagcatcaacacagtgaaggacctgcccctgcccaggtttgtggccagcaagaatgagcaggagagcagacatgctgccagctacagcagtgacagcgagaaccagggcagctacagcggggtcatccccccacctcctggccggggccaggtgaagaagggctctgtgtcccatgacacagtgcagcccaggaccagcgcagatgcccaggagcccgccagccctgtggtgagcccccagcagagcccccccaccagcccccacacctggaggaagcacagccgccaccccagcggcggcaacagcgagcggcccctggccggccctggccccttctggagcccctttggagaggcccagagcggcagcagcgctggagatgctgtgtggagcggccacagccccccaccaccccaggagaactgggtgtcctttgctgacaccccacccaccagcaccctgctgaccatgcacccagcctctgtgcaggaccagaccaccgtgaggacagtggccagcgccaccacagccatcgagatccggcggcagagcagcagctatgatgacccctggaagatcacagatgagcagaggcagtactacgtgaaccagttcaagaccatccagcctgacctgaatggcttcatccctggcagcgctgccaaggagttcttcaccaagagcaagctgcccatcctggagctgagccacatctgggagctgagtgactttgacaaggatggagccctgaccctggatgagttctgtgccgccttccacctggtggtggccaggaagaatggctatgacctgcctgagaagctgcctgagagcctgatgcccaagctgattgacctggaggacagcgcagatgtgggggaccagcccggggaggtgggctacagcggcagccctgctgaggccccacccagcaagagccccagcatgcccagcctgaaccagacctggccagagctgaaccagagcagcgaggacacagccatcgtgcaccctgtgcccatccgcatgacccccagcaagatccacatgcaggagatggagctgaagaggacaggcagtgaccacaccaaccccaccagccccctgctggtgaagcccagcgacctgctggaggagaacaagatcaacagctctgtgaagtttgccagcggcaacacagtgggccagcagcaggccggcgtggtggcccaccccccagctgtgcccccccggccccagcccagccaggcccctggccctgctgtgcacaggcctgtggatgctgatggcctcatcacccacaccagcaccagcccccagcagatccctgagcagcccaactttgctgacttcagccagtttgaggtgtttgctgccagcaatgtgaatgatgagcaggatgatgaggccgagaagcaccctgaggtgctgcctgctgagaaggccagtgaccctgccagcagcctgcgggtggccaagacagacagcaagacagaggagaagacagctgccagcgccccagccaacgtgtccaagggcaccacccccctggcccccccacccaagcctgtgagaagaaggctgaagtcagaagatgagctgcggcctgaggtggatgagcacacccagaagacaggagtgctggccgctgtgctggccagccagcccagcatccccaggtctgtgggcaaggacaagaaggccatccaggccagcatcagaagaaacaaggagaccaacacagtgctggcccggctgaacagcgagctgcagcagcagctgaaggatgtgctggaggagcgcatcagcctggaggtgcagctggagcagctgcggcccttcagccacctgtag

SEQ ID NO: 105150 - DNA, 2118 bp, Artificial Sequence
  derived and/or modified sequence
atggagggcctgaccctgagcgacgccgagcagaagtactacagcgacctgttcagctattgtgatattgaatccactaagaaagtggtagtcaacggtcgagtgctggagctcttcagagccgcccagctcccaaacgacgttgtactccagattatggagctgtgtggcgcaactagactgggatactttggcagatcccagttctatatcgcactcaagcttgtcgcggtagcgcagtccgggtttcctctcagagtggagtctatcaacactgtcaaagacctgcctctacctagatttgtggcctccaaaaacgagcaggagagccggcacgcagcatcttactcatcggactcagagaatcaagggagctactctggtgtgatcccccctccccctggacgaggtcaggtgaaaaagggaagtgtgtcacacgatacagtccagccacgtacatcagccgacgcccaagaaccagcttccccagtggtatccccgcagcagagtccacccacgtccccccacacatggagaaagcacagcagacatcccagtggagggaactctgaacgccccttggcgggtccaggtcctttctggtctcccttcggggaagcccagagtgggagttcggccggagatgccgtctggtcagggcacagtccaccacccccccaggagaattgggtatcttttgccgataccccacccactagcacgctgctcaccatgcatcccgcttcagtacaggatcaaaccacagtccgaacagtggctagcgcgactaccgcaatcgaaattagaaggcagtcctccagttatgatgacccatggaaaattacagacgagcagagacagtattacgtcaaccaattcaaaaccattcagcccgatttaaatggctttattcccggatccgctgcgaaagaattttttaccaagagtaagctgccaattctcgaactatcacatatctgggagctcagcgactttgataaggatggtgctctgactctcgacgagttctgcgccgcttttcacctggtggtcgcccggaagaatgggtatgatctccctgagaaattacctgaatcactgatgccgaagctcatcgatctggaagatagcgccgacgtgggcgatcaacctggcgaagtggggtattccgggtcacctgccgaggctcccccctccaaaagcccaagcatgccgagcctcaatcagacctggcccgagttgaaccaaagttctgaggataccgcaattgtgcaccccgttcccattaggatgacccctagtaagatacatatgcaggaaatggagctgaagcggactggctcagaccacacaaatccaacctcccccctgctcgtcaagccctccgatctgttagaggaaaacaaaattaatagtagcgtgaaattcgcctctggtaacacagtggggcagcagcaggcgggggtcgttgctcatccacctgccgtgcccccgagaccgcagccgagccaagctccaggccccgcagtgcaccgcccggtggacgcagacggcttgattacccatacaagcacctcaccccagcagatacctgaacagcccaacttcgcagacttttctcagttcgaggtgtttgccgcctccaatgttaacgacgagcaggacgatgaagctgagaaacatcctgaagttctaccggcggagaaagcatccgaccccgcctcgtcactgagggtggctaaaactgacagcaaaacagaggagaagacagccgccagcgcccccgcaaacgtatccaagggcacaacccctctggctccaccacccaagccagtgaggcggaggctgaaatccgaggacgaacttagacctgaggtcgacgagcacactcaaaagacaggggtgctggctgccgtcctggcttctcagccgtccataccccggtcggtggggaaagataaaaaagctatccaagccagtatcaggcggaacaaagagaccaatactgtcctcgcccgactaaactccgagctacaacagcaattgaaagacgtcttggaggaaaggatatctcttgaggtgcaactggaacagttacggcccttcagccacctgtag

SEQ ID NO: 105151 - DNA, 2118 bp, Artificial Sequence
  derived and/or modified sequence
atggagggactgaccctctctgacgccgaacagaagtattatagcgatctctttagctattgcgacatcgagagcactaaaaaggtcgtcgttaacggccgagttttggagctatttcgagccgcacaattaccgaatgatgtcgtcttgcagataatggagttgtgtggtgccacacggctgggttattttggtagatcccagttctatatagcactgaaactcgtggcggtagcccagtcaggattcccgctccgggttgagagtatcaataccgttaaggatttgccattaccgcgtttcgtggctagtaagaacgagcaggaatccagacatgccgcttcctactcctcagactcggagaatcaggggtcatattctggcgtgatcccgccaccccctggcagaggccaggtgaaaaagggaagcgtgtctcatgacacagtgcagccgagaacttctgctgacgcccaagagccggcatccccggttgtgagccctcagcaatcacctccaacaagtccccatacttggcgcaagcacagtcgccatccaagcggagggaattcagagcggccactagccggaccaggccctttctggtcccctttcggcgaggcgcagagcggttcttctgctggtgatgccgtctggtctggccacagtccacctccaccccaggaaaattgggttagtttcgcagacacccccccaacatcaacactcttaaccatgcatccggcttcagtccaggatcagaccactgtgcgcactgtggcatccgcaacaaccgctatcgagattcgcagacagagttcttcatacgacgacccttggaagattacagatgaacagcgacagtactatgtgaatcagttcaaaaccattcagcctgacttgaacgggtttatccctggaagcgcggcaaaggagttttttactaaatctaaactccctatccttgagcttagccacatctgggaactaagcgactttgataaagacggtgctcttaccttagatgagttctgcgcagcgtttcatctggtcgttgcaaggaaaaatggctacgacttgccagaaaaacttcctgaatccctcatgccaaagctcatcgatctggaagatagtgcagacgtcggtgaccagcccggtgaggtggggtattcaggaagtcccgcagaggcacccccttctaaaagcccatcaatgcccagtctcaaccagacctggccggaactaaatcagagttccgaggatacagcgattgttcaccccgttccgattagaatgaccccttcgaaaattcatatgcaggaaatggagctcaagagaacaggatctgatcacactaatccaacttccccgctgctggtcaaacccagcgacctgttagaggagaataagatcaattcatcagtgaaattcgcctccggcaatacggtagggcaacagcaagccggagttgtagcacatccccctgccgtgcctccccgaccccagccctcccaggcccctggacctgccgtgcaccgaccagtggatgccgacgggctgataacccataccagcaccagcccacagcagatacccgagcagcccaattttgccgatttttcccaattcgaagtctttgccgcaagcaacgtcaacgacgaacaggatgatgaggctgaaaaacatccagaagtcctcccagccgagaaagcttccgatccagcatcttccttgagagtggccaaaactgacagcaagactgaggaaaagactgctgccagtgctcccgctaatgtgtcaaaaggcactacacctttggctccgcctcccaagcccgtccggaggaggttaaagtcagaggatgaactgcgccctgaggtggatgaacacacccagaagacaggggttcttgcggcagttctggcctcgcaaccctccatccctaggtccgtcggcaaggacaagaaggccatacaagccagtattagacgaaacaaggagacaaacacggtactcgctcgcctgaactctgagctgcagcagcagctgaaagacgtgctggaggaacggatctccctggaggtgcaacttgagcaactgcgccctttttctcacctgtag

SEQ ID NO: 105152 - DNA, 2511 bp, Artificial Sequence
  derived and/or modified sequence
ggcgagcgcagccgggccccctcctcgcgacctccgggccctgttgctcgggcgcacctggcgcgtgtgaggccggggccggcgttttcgggaagctagcaggaggccgggccacgcgcagcccctgccggcccaggttcctggggccgggccccgagtagtgcatgcggggcggggcggccgtgagccggaggcgaagatggaaggcttaacgctgagcgatgcggagcagaaatactattcagatctcttctcctactgcgacattgagagcaccaagaaggtggtggtcaacgggcgggtgctggagctgttccgggccgcgcagctgccgaacgacgtggtcctacagatcatggagctttgtggtgcaacaagacttggttattttggaagaagtcagttctacattgctttgaaacttgtagctgttgcccagtctggtttccctttaagagtggaaagtataaatacagtaaaggaccttcctctgccaagatttgttgcttcaaagaatgaacaggaatctcgccatgcagcctcatattcttcagattctgaaaatcaagggtcgtattctggtgtaattcccccaccacctggcagggggcaagtgaaaaagggatccgtaagccatgatacggttcagcctcgtacatctgcagatgcacaggaacctgcatccccagtagtttcaccacagcaatccccaccaacttctccacacacatggaggaagcacagccgtcatcccagcggtgggaatagtgagaggcctctcgcgggacctgggccattttggtctccctttggtgaagcacaatcaggttcttctgctggtgatgcagtgtggtcagggcattccccacctccacctcaagaaaactgggtcagttttgcagatactccaccaaccagtactcttttaaccatgcatcctgcttctgtccaggaccagacaacagtacgaactgtagcatcagctacaactgccattgaaattcgtaggcaatccagtagttatgatgatccctggaaaataacagatgaacaaagacagtattatgtaaatcagtttaaaaccattcagcctgatctaaacggatttattccaggatctgcagctaaagagttttttacaaaatcaaaacttcctattcttgaactttctcatatttgggaactctcagactttgataaagatggtgcattgacactggatgagttttgtgctgcttttcatctggtggttgctaggaagaatggctatgatttaccagaaaaacttcctgaaagcttaatgcccaaactgattgatttggaagattcagcagatgttggggatcagccaggtgaggtaggttattcaggctctcctgctgaagctcctccaagcaagtcaccatcgatgccatcactaaaccagacatggcctgagctgaatcagagcagtgaggatactgctattgttcatccagttcccattcgtatgactccaagcaaaatccacatgcaggaaatggaacttaaaagaactggcagcgatcatacaaatcccactagcccattacttgtgaaaccatctgaccttttagaagaaaataagataaattcatcggtgaaattcgcttctggtaatactgtaggacaacaacaggctggagttgttgcccatcctcctgcagtgcctccaagaccacagccctcacaggctcctggtcctgctgtgcatcgcccagtggatgccgatggcctcataactcacactagtacctcacctcagcagataccagagcaaccaaattttgcagatttcagtcagtttgaagtatttgctgcatcaaatgtaaacgacgaacaagatgatgaagccgagaaacatccagaagtcctgccggctgaaaaagcttctgatcctgcaagttctcttcgagttgccaaaacagatagtaaaactgaagaaaagacagctgctagtgctcctgccaatgtgagcaaaggcacaacaccacttgctccaccacctaaacctgttcgaagaagattaaaatcagaagatgaattaaggccagaagttgatgaacatacacaaaagacgggtgtcttagctgctgttcttgcatcacaaccttctattcccagatctgttgggaaagataagaaagctattcaggcatcaattagacgtaataaggaaaccaacaccgttttggccagattgaatagcgaattgcagcaacaattaaaggatgttcttgaggagagaatttccctggaagttcaactggaacaacttcgaccattctctcacctataagccaattgccgttaactgtgaacatacttgtttttaagtggttttgggttcaaagccaatttggagacctagacattcagctcactgcttaactcaacattaaattttatgattctgttttgccctatatgttcaccgttgtatttaagtatcttttattttttaatttcgacaataaaaaggtcaggatggcg

SEQ ID NO: 105153 - DNA, 1428 bp, Artificial Sequence
  derived and/or modified sequence
atggccgtgtgggccaccgtgttcctggagttctggaagagaagaagagccgtgatcgcctacgactgggacctgatcgactgggaggaggaggagatctgcgtggtgatcgccgccgtgttcggcatcgtgatctacagagtggtgaccgtgagcaccttcgccgccttcaagtgggccctgatcagaaacaacagccaggtggccaccaccggcaccgccgtgtgcatcaacttctgcatcatcatgctgctgaacgtgctgtacgagaaggtggccctgctgctgaccaacctggagcagcccagaaccgagagcgagtgggagaacagcttcaccctgaagatgttcctgttccagttcgtgaacctgaacagcagcaccttctacatcgccttcttcctgggcagattcaccggccaccccggcgcctacctgagactgatcaacagatggagactggaggagtgccaccccagcggctgcctgatcgacctgtgcatgcagatgggcatcatcatggtgctgaagcagacctggaacaacttcatggagctgggctaccccctgatccagaactggtggaccagaagaaaggtgagacaggagcacggccccgagagaaagatcagcttcccccagtgggagaaggactacaacctgcagcccatgaacgcctacggcctgttcgacgagtacctggagatgatcctgcagttcggcttcaccaccatcttcgtggccgccttccccctggcccccctgctggccctgctgaacaacatcatcgagatcagactggacgcctacaagttcgtgacccagtggagaagacccctggccagcagagccaaggacatcggcatctggtacggcatcctggagggcatcggcatcctgagcgtgatcaccaacgccttcgtgatcgccatcaccagcgacttcatccccagactggtgtacgcctacaagtacggcccctgcgccggccagggcgaggccggccagaagtgcatggtgggctacgtgaacgccagcctgagcgtgttcagaatcagcgacttcgagaacagaagcgagcccgagagcgacggcagcgagttcagcggcacccccctgaagtactgcagatacagagactacagagaccccccccacagcctggtgccctacggctacaccctgcagttctggcacgtgctggccgccagactggccttcatcatcgtgttcgagcacctggtgttctgcatcaagcacctgatcagctacctgatccccgacctgcccaaggacctgagagacagaatgagaagagagaagtacctgatccaggagatgatgtacgaggccgagctggagagactgcagaaggagagaaaggagagaaagaagaacggcaaggcccaccacaacgagtggccctag

SEQ ID NO: 105154 - DNA, 2868 bp, Artificial Sequence
  derived and/or modified sequence
atggaggccagcagcagcggcatcaccaacggcaagaccaaggtgttccaccccgagggcggcgtggacctgcagggctaccagctggacatgcagatcctgcccgacggccccaagagcgacgtggacttcagcgagatcctgaacgccatccaggagatggccaaggacgtgaacatcctgttcgacgagctggaggccgtgagcagcccctgcaaggacgacgacagcctgctgcaccccggcaacctgaccagcaccagcgacgacgccagcagactggaggccggcggcgagaccgtgcccgagagaaacaagagcaacggcctgtacttcagagacggcaagtgcagaatcgactacatcctggtgtacagaaagagcaacccccagaccgagaagagagaggtgttcgagagaaacatcagagccgagggcctgcagatggagaaggagagcagcctgatcaacagcgacatcatcttcgtgaagctgcacgccccctgggaggtgctgggcagatacgccgagcagatgaacgtgagaatgcccttcagaagaaagatctactacctgcccagaagatacaagttcatgagcagaatcgacaagcagatcagcagattcagaagatggctgcccaagaagcccatgagactggacaaggagaccctgcccgacctggaggagaacgactgctacaccgcccccttcagccagcagagaatccaccacttcatcatccacaacaaggagaccttcttcaacaacgccaccagaagcagaatcgtgcaccacatcctgcagagaatcaagtacgaggagggcaagaacaagatcggcctgaacagactgctgaccaacggcagctacgaggccgccttccccctgcacgagggcagctacagaagcaagaacagcatcagaacccacggcgccgagaaccacagacacctgctgtacgagtgctgggccagctggggcgtgtggtacaagtaccagcccctggacctggtgagaagatacttcggcgagaagatcggcctgtacttcgcctggctgggctggtacaccggcatgctgttccccgccgccttcatcggcctgttcgtgttcctgtacggcgtgaccaccctggaccacagccaggtgagcaaggaggtgtgccaggccaccgacatcatcatgtgccccgtgtgcgacaagtactgccccttcatgagactgagcgacagctgcgtgtacgccaaggtgacccacctgttcgacaacggcgccaccgtgttcttcgccgtgttcatggccgtgtgggccaccgtgttcctggagttctggaagagaagaagagccgtgatcgcctacgactgggacctgatcgactgggaggaggaggaggaggagatcagaccccagttcgaggccaagtacagcaagaaggagagaatgaaccccatcagcggcaagcccgagccctaccaggccttcaccgacaagtgcagcagactgatcgtgagcgccagcggcatcttcttcatgatctgcgtggtgatcgccgccgtgttcggcatcgtgatctacagagtggtgaccgtgagcaccttcgccgccttcaagtgggccctgatcagaaacaacagccaggtggccaccaccggcaccgccgtgtgcatcaacttctgcatcatcatgctgctgaacgtgctgtacgagaaggtggccctgctgctgaccaacctggagcagcccagaaccgagagcgagtgggagaacagcttcaccctgaagatgttcctgttccagttcgtgaacctgaacagcagcaccttctacatcgccttcttcctgggcagattcaccggccaccccggcgcctacctgagactgatcaacagatggagactggaggagtgccaccccagcggctgcctgatcgacctgtgcatgcagatgggcatcatcatggtgctgaagcagacctggaacaacttcatggagctgggctaccccctgatccagaactggtggaccagaagaaaggtgagacaggagcacggccccgagagaaagatcagcttcccccagtgggagaaggactacaacctgcagcccatgaacgcctacggcctgttcgacgagtacctggagatgatcctgcagttcggcttcaccaccatcttcgtggccgccttccccctggcccccctgctggccctgctgaacaacatcatcgagatcagactggacgcctacaagttcgtgacccagtggagaagacccctggccagcagagccaaggacatcggcatctggtacggcatcctggagggcatcggcatcctgagcgtgatcaccaacgccttcgtgatcgccatcaccagcgacttcatccccagactggtgtacgcctacaagtacggcccctgcgccggccagggcgaggccggccagaagtgcatggtgggctacgtgaacgccagcctgagcgtgttcagaatcagcgacttcgagaacagaagcgagcccgagagcgacggcagcgagttcagcggcacccccctgaagtactgcagatacagagactacagagaccccccccacagcctggtgccctacggctacaccctgcagttctggcacgtgctggccgccagactggccttcatcatcgtgttcgagcacctggtgttctgcatcaagcacctgatcagctacctgatccccgacctgcccaaggacctgagagacagaatgagaagagagaagtacctgatccaggagatgatgtacgaggccgagctggagagactgcagaaggagagaaaggagagaaagaagaacggcaaggcccaccacaacgagtggccctag

SEQ ID NO: 105155 - DNA, 1428 bp, Artificial Sequence
  derived and/or modified sequence
atggctgtgtgggcaacagtctttcttgagttttggaagagacggcgggccgtgatcgcatacgactgggatctgatagactgggaagaagaagagatctgtgttgtcatagctgcagttttcgggatcgtgatctatagggttgtgaccgtctcaacattcgcagcatttaaatgggctttgattcggaacaattctcaggttgcaacgaccggtaccgctgtctgcatcaatttttgtattataatgctgttgaatgttctctatgaaaaggtcgctctgctcttgaccaacctcgaacagccacggaccgaatcggaatgggaaaattcatttacattgaaaatgttcctgtttcaattcgtgaacctgaactccagcaccttctacatcgccttcttcctcgggcgcttcacaggacatcctggcgcttatcttcgcctcatcaataggtggagactcgaggaatgtcacccaagcggctgcctcattgacctgtgcatgcagatgggcatcatcatggttctgaagcagacatggaataactttatggaactgggctaccccttgatccagaattggtggacacgccgcaaagtgcgccaagaacatggacctgagcgtaaaatctctttccctcaatgggaaaaagactacaacttacagccgatgaacgcctatggtctctttgacgaatatttagagatgatcctccagttcgggttcaccacaatattcgtggctgcttttccgttggcccccctcttggccctcctgaacaatattattgaaatcagattggacgcctacaagttcgtgacgcagtggcgaagaccgctcgctagcagggccaaagatattggcatctggtacggcatccttgagggtatcggcattttgagcgtgatcacgaacgcttttgtgatcgctatcaccagcgactttatccctaggcttgtctacgcttataaatatgggccctgcgccggtcagggcgaagcggggcaaaagtgcatggtcggatatgtaaacgccagtcttagcgtgtttagaatatcagattttgagaatagatctgagcccgaaagcgacggatctgagttcagtggcaccccactgaagtactgccggtatagggactaccgcgaccccccacatagtctggttccatatggctatacgctccagttttggcatgtcctggcagcgaggctcgcatttattatcgtgttcgagcacctggtgttctgcataaaacacttgatctcctacctgattccagacctacctaaagatttgagagacaggatgagacgtgaaaaatacctcatccaagagatgatgtacgaggcagaattggaacgactgcagaaggaaaggaaagaaagaaagaaaaatggaaaggcccatcacaatgagtggccgtag

SEQ ID NO: 105156 - DNA, 2868 bp, Artificial Sequence
  derived and/or modified sequence
atggaggctagcagttccggcatcaccaacgggaagactaaggtgttccatccggaggggggtgttgaccttcaaggctatcaactggatatgcagatcctgcccgacggacctaaatccgacgttgacttttctgagatcctgaacgctattcaggaaatggccaaggacgtaaatatcctgtttgacgaattggaggccgtgagctcaccttgcaaggatgacgattctctcttgcatccgggcaacctcactagcaccagcgatgacgcaagcaggttggaagcaggcggcgagacggtgcctgagcgaaataagagtaatggcctctacttcagagatgggaaatgcaggatcgattacatattggtttatcgtaagagtaatccacaaaccgagaagagagaggtgttcgagagaaacattagagctgagggcctgcagatggagaaggagtcatccctgatcaacagtgacattatttttgtgaagctgcacgctccctgggaagtgcttggtcgctacgcagagcaaatgaatgtccgaatgccattccgcagaaaaatctattaccttccacgccgatataaattcatgagtcgaattgataaacagatatctaggtttagacgttggcttccgaagaaacccatgcggcttgacaaagaaacactgcccgatctggaggagaacgattgctacactgcccccttctctcagcagcgaattcaccactttataatacacaataaggaaaccttcttcaataacgcaacaaggagtcgtatcgttcaccacatcttgcagcgcataaaatacgaggaaggaaagaacaagatcggccttaatagattactgactaatgggtcatacgaagctgcgttccctctgcacgagggatcatacagatcaaagaactccattaggacacacggggccgagaatcacagacacctgttatatgagtgttgggcgtcttggggagtgtggtacaagtatcaaccgctggatctggtgagacgctatttcggggagaagatcgggctatacttcgcatggctgggctggtatacagggatgttgtttcctgccgctttcataggactattcgttttcctctacggtgtgactactctagaccactctcaggtctcaaaggaggtgtgccaagccacggacattatcatgtgccctgtgtgcgacaagtactgcccattcatgagactcagtgactcctgcgtttacgccaaagttacccacctgttcgacaatggtgccacagtttttttcgcagtgtttatggccgtttgggcaaccgtgtttttggagttctggaaaaggcgtcgggctgtgatcgcctatgactgggacttgattgactgggaagaggaagaggaggaaataagaccgcagttcgaagccaagtactctaagaaagaaagaatgaatcctatctcagggaagcccgaaccctatcaggcctttaccgacaagtgttcacggcttattgtgagtgcgtcaggcatcttctttatgatctgcgtagtgatcgcagctgtgttcggcattgtcatttatcgagtggtcacagtttctacattcgcagctttcaaatgggcgctcattcgtaataattcccaggtggccaccaccggtaccgcagtgtgcatcaacttctgtatcataatgctgctcaatgtgttgtatgagaaggtggctctccttctcaccaacctcgaacagcccagaacagagtctgaatgggaaaattcttttaccctcaaaatgtttctgttccagtttgtgaacttgaactcttcaactttttatattgccttcttcctgggccggtttacaggacacccgggcgcatacttacgactgatcaataggtggcggctggaggagtgtcatccctccggttgtctgatcgacctctgcatgcagatggggataattatggtccttaagcaaacatggaacaactttatggaattaggttatcctctgatccaaaattggtggaccagacgcaaggtgagacaggaacacggtccggaaagaaagatctcattcccacaatgggaaaaggattacaacctgcagcccatgaacgcctatggcctgttcgacgaatatcttgaaatgattttgcagtttggatttacgacaatcttcgtggctgccttccctcttgctcctctcctggcactcctgaataacattattgagattagactggacgcctacaagtttgtgacccagtggcggcggccacttgctagccgggcaaaagacattggcatctggtacggcatcctggaaggtataggtattctgtccgtcataaccaacgcatttgtgatcgccatcacatccgatttcatccctagattggtgtacgcttataagtatggaccctgcgctggacagggtgaggctgggcagaagtgcatggtgggctacgtcaacgcgtcgctgtctgtcttcagaatctctgacttcgagaaccgctcagagcctgagtcggacggaagtgagtttagcggtaccccactgaagtactgcaggtacagagactatcgcgatcccccgcattctcttgtcccctatggatataccctgcagttctggcacgtgttggctgcgagactggccttcattatcgtctttgaacaccttgtgttctgcattaaacatctgatctcgtacctcatccctgacctgccaaaagatctgagggacagaatgaggagagagaagtatttgattcaggaaatgatgtacgaggctgaactggagagactccagaaggagaggaaagagcggaagaagaacggcaaagctcatcacaatgagtggccatag

SEQ ID NO: 105157 - DNA, 1428 bp, Artificial Sequence
  derived and/or modified sequence
atggccgtctgggccactgtatttctggaattctggaagaggcgccgcgcagtcatagcttacgattgggacctcattgactgggaagaagaagagatatgcgttgtgatagcagcggtgtttgggatagtcatctatcgggtggtcaccgtttcgacatttgctgctttcaagtgggcactgatccgaaacaacagccaggttgcgactactggaactgccgtatgcattaatttttgtatcatcatgctgcttaatgtcctgtacgagaaagtggccctgcttctgacaaatttggagcagcccagaacagagtcggagtgggagaatagcttcactctcaagatgttcctgttccagttcgtgaacttgaactcctcgactttttatatcgcattcttcctaggacgtttcacaggccatcctggggcatatctgcgtctgattaatcgatggagactcgaagagtgccaccccagcggatgcctgatagatttatgtatgcagatgggaatcatcatggtgctcaaacagacctggaataatttcatggagctggggtatcctctcattcagaactggtggacccggagaaaagtaaggcaggaacacggccccgaacgcaagatctcatttccacagtgggaaaaagactacaatctgcagcccatgaacgcatatggcctatttgatgagtatttggaaatgatacttcaattcggcttcacaactatattcgtagccgcctttccccttgccccgctactagccctactaaacaatattattgagatccgccttgacgcatacaagtttgtgacacagtggcgcagacctctagcctcgcgagcgaaggatatcggcatctggtatgggatcctagagggcatcggcatcctcagcgtgattaccaatgcttttgttatagctatcacttccgactttatcccccggctagtctatgcctacaagtacggcccttgcgccggacagggcgaggccggccagaaatgcatggtaggatacgtgaatgccagtttgtccgtttttcgcatctccgattttgagaaccgctctgagcctgagtccgacggatcagaattctctggtactcctctaaaatattgtcgctaccgggattaccgggacccaccccacagcctcgtgccttacggatacacactgcagttctggcacgtcctggccgcaaggttagcatttatcatcgtttttgagcaccttgtgttttgcattaagcacctgattagctatctgatacccgatctgcccaaggatctcagagatagaatgcgtcgggagaagtatttaatccaggagatgatgtacgaggcagagctggagcgcctgcaaaaggagagaaaagagcgcaagaaaaatggtaaggcccatcataacgaatggccctag

SEQ ID NO: 105158 - DNA, 1428 bp, Artificial Sequence
  derived and/or modified sequence
atggctgtgtgggccaccgtcttcctggagttctggaagagaagaagagctgtgattgcctatgactgggacctgattgactgggaggaggaggagatctgtgtggtgattgctgctgtgtttggaattgtcatctacagagtggtgacagtgtccacctttgctgccttcaagtgggccctgatccggaacaacagccaggtggccaccactggaacagctgtgtgcatcaacttctgcatcatcatgctgctgaatgtgctgtatgagaaggtggccctgctgctgaccaacctggagcagcccaggacagagagcgagtgggagaacagcttcaccctgaagatgttcctgttccagtttgtgaacctgaacagcagcaccttctacatcgccttcttcctgggccgcttcaccggccaccctggggcctacctgcggctcatcaaccgctggaggctggaggagtgccaccccagcggctgcctgattgacctgtgcatgcagatgggcatcatcatggtgctgaagcagacctggaacaacttcatggagctgggctaccccctcatccagaactggtggaccaggaggaaggtgcggcaggagcacggccctgagaggaagatctccttcccccagtgggagaaggactacaacctgcagcccatgaatgcctacggcctgtttgatgagtacctggagatgatcctgcagtttggcttcaccaccatctttgtggccgccttccccctggcccccctgctggccctgctgaacaacatcatcgagatccggctggatgcctacaagtttgtgacccagtggaggcggcccctggccagccgggccaaggacatcggcatctggtacggcatcctggagggcatcggcatcctgagcgtcatcaccaatgcctttgtgattgccatcaccagtgacttcatcccccggctggtgtatgcctacaagtatggcccctgtgccggccagggcgaggccggccagaagtgcatggtgggctacgtgaatgccagcctgagcgtcttccgcatcagtgactttgagaacagaagtgagcctgagagtgatggcagcgagttcagcggcacccccctgaagtactgccgctacagagactacagagaccccccccacagcctggtgccctacggctacaccctgcagttctggcacgtgctggccgcccggctggccttcatcatcgtgtttgagcacctggtgttctgcatcaagcacctgatctcctacctgatcccagacctgcccaaggacctgcgggacaggatgaggcgggagaagtacctgatccaggagatgatgtatgaagctgagctggagcggctgcagaaggagaggaaggagaggaagaagaatggcaaggcccaccacaatgagtggccctag

SEQ ID NO: 105159 - DNA, 2868 bp, Artificial Sequence
  derived and/or modified sequence
atggaggccagcagcagcggcatcaccaacgggaagaccaaggtgttccaccctgagggcggcgtggacctgcagggctaccagctggacatgcagatcctgcctgatggccccaagagtgatgtggacttcagcgagatcctgaatgccatccaggagatggccaaggatgtgaacatcctgtttgatgagctggaggccgtgagcagcccctgcaaggatgatgacagcctgctgcaccctggcaacctgaccagcaccagtgatgatgccagccggctggaggccggcggggagaccgtgcctgagaggaacaagagcaatggcctgtacttcagagatggcaagtgcagaattgactacatcctggtgtacaggaagagcaacccccagacagagaagcgggaggtgtttgagaggaacatccgggcagagggcctgcagatggagaaggagagcagcctcatcaacagcgacatcatctttgtgaagctgcacgccccctgggaggtgctgggccgctatgcagagcagatgaatgtgaggatgcccttccggaggaagatctactacctgccccggcgctacaagttcatgagcagaattgacaagcagatcagccgcttccgccgctggctgcccaagaagcccatgaggctggacaaggagaccctgcctgacctggaggagaatgactgctacacagcccccttcagccagcagaggatccaccacttcatcatccacaacaaggagaccttcttcaacaatgccaccaggagcagaattgtgcaccacatcctgcagaggatcaagtatgaggagggcaagaacaagattggcctgaaccggctgctgaccaacggcagctatgaagctgccttccccctgcacgagggcagctaccgcagcaagaacagcatccgcacccatggagctgagaaccaccgccacctgctgtatgagtgctgggcctcctggggcgtgtggtacaagtaccagcccctggacctggtgcggcgctactttggagagaagattggcctgtactttgcctggctgggctggtacacaggcatgctgtttcctgctgccttcatcggcctgtttgtgttcctgtatggagtgaccaccctggaccacagccaggtgtccaaggaggtgtgccaggccacagacatcatcatgtgccctgtgtgtgacaagtactgccccttcatgaggctgagtgacagctgtgtgtatgccaaggtgacccacctgtttgacaacggggccaccgtcttctttgctgtgttcatggctgtgtgggccaccgtcttcctggagttctggaagagaagaagagctgtgattgcctatgactgggacctgattgactgggaggaggaggaggaggagatccggccccagtttgaggccaagtacagcaagaaggagaggatgaaccccatcagcggcaagccagagccctaccaggccttcacagacaagtgcagccggctgattgtgtctgccagcggcatcttcttcatgatctgtgtggtgattgctgctgtgtttggaattgtcatctacagagtggtgacagtgtccacctttgctgccttcaagtgggccctgatccggaacaacagccaggtggccaccactggaacagctgtgtgcatcaacttctgcatcatcatgctgctgaatgtgctgtatgagaaggtggccctgctgctgaccaacctggagcagcccaggacagagagcgagtgggagaacagcttcaccctgaagatgttcctgttccagtttgtgaacctgaacagcagcaccttctacatcgccttcttcctgggccgcttcaccggccaccctggggcctacctgcggctcatcaaccgctggaggctggaggagtgccaccccagcggctgcctgattgacctgtgcatgcagatgggcatcatcatggtgctgaagcagacctggaacaacttcatggagctgggctaccccctcatccagaactggtggaccaggaggaaggtgcggcaggagcacggccctgagaggaagatctccttcccccagtgggagaaggactacaacctgcagcccatgaatgcctacggcctgtttgatgagtacctggagatgatcctgcagtttggcttcaccaccatctttgtggccgccttccccctggcccccctgctggccctgctgaacaacatcatcgagatccggctggatgcctacaagtttgtgacccagtggaggcggcccctggccagccgggccaaggacatcggcatctggtacggcatcctggagggcatcggcatcctgagcgtcatcaccaatgcctttgtgattgccatcaccagtgacttcatcccccggctggtgtatgcctacaagtatggcccctgtgccggccagggcgaggccggccagaagtgcatggtgggctacgtgaatgccagcctgagcgtcttccgcatcagtgactttgagaacagaagtgagcctgagagtgatggcagcgagttcagcggcacccccctgaagtactgccgctacagagactacagagaccccccccacagcctggtgccctacggctacaccctgcagttctggcacgtgctggccgcccggctggccttcatcatcgtgtttgagcacctggtgttctgcatcaagcacctgatctcctacctgatcccagacctgcccaaggacctgcgggacaggatgaggcgggagaagtacctgatccaggagatgatgtatgaagctgagctggagcggctgcagaaggagaggaaggagaggaagaagaatggcaaggcccaccacaatgagtggccctag

SEQ ID NO: 105160 - DNA, 1428 bp, Artificial Sequence
  derived and/or modified sequence
atggccgtgtgggccaccgtgttcctggagttctggaagcggcggagggcggtgatagcatatgattgggacctcatcgattgggaagaggaggagatttgcgtcgtcatcgcggcagtattcgggatagttatctaccgggtcgtcacggtgtccacttttgccgcattcaagtgggccctaattcgcaataattctcaggtcgctactacggggactgctgtgtgtatcaacttctgtataatcatgttgcttaatgtcctgtatgagaaagtcgccctgttgcttacgaatctagaacagccaaggacggagtccgaatgggaaaacagctttaccctcaagatgttcttattccagttcgtaaacctgaattcatcaaccttttatattgccttttttttgggaaggttcaccggccatcctggcgcatatctgagattaattaacaggtggaggctagaggaatgtcatccttctggctgcttaatagatttatgcatgcagatgggcataattatggtcctcaaacagacctggaacaatttcatggagctgggctaccctctcatccaaaattggtggacgcggcggaaagtgagacaggaacacggacctgagcggaaaatctccttcccccagtgggagaaagactacaatttgcagccaatgaacgcttacggcctctttgatgaatacttggaaatgatactgcagttcggattcaccacaatcttcgtcgcagcctttccactggcaccacttctggcgctactgaacaacatcattgagattcgcctggacgcatataagtttgtcactcagtggaggaggccactagccagtcgggcgaaggatataggaatttggtacgggatcttggaaggaatcggaattttgtccgtgataacaaacgctttcgtcatcgccataacaagtgattttattccacggctcgtgtatgcctataaatatggcccatgtgctggacagggtgaagcgggccaaaagtgtatggtgggctacgtgaacgccagcttgagcgtattcagaatctcagactttgagaacagatcagagccagaaagcgacggctcagagttttctggtaccccactgaagtattgcagatatagggattacagggaccctccccatagccttgtgccatacggatacaccctccaattctggcacgtgctcgctgctagactggcatttatcatcgtttttgagcacttagtgttttgcattaaacacctaattagttaccttattcctgacctgcctaaggatttacgcgataggatgcggagagagaagtacctgattcaggagatgatgtacgaggccgagctcgaaagactgcagaaggagcgtaaggagcgtaagaaaaatggaaaagcgcaccacaacgagtggccatag

SEQ ID NO: 105161 - DNA, 2868 bp, Artificial Sequence
  derived and/or modified sequence
atggaggccagcagcagcggcatcaccaacggcaagaccaaggtgtttcaccctgaaggaggagtcgatttacagggttaccaacttgacatgcaaatcctcccggatggtccaaaaagcgatgttgactttagcgaaatacttaatgcgatccaggaaatggccaaagatgtgaacattctgttcgatgagctagaagctgtgtcaagtccatgcaaggacgacgattcgctgcttcacccgggcaacctcacatcgacatctgacgatgcctcccgtttggaggccggaggagaaaccgtccccgaacggaacaagtcaaatggcctctattttcgcgacggcaagtgcaggattgattatattctggtgtacaggaagtctaatccccagaccgagaagcgcgaagtgttcgagagaaacattagggctgagggtctccaaatggaaaaggaatccagcctgataaacagtgatatcatcttcgtgaaattgcacgccccctgggaggtactgggccgctacgccgaacaaatgaacgtacggatgccctttcgacgcaagatctattacctgcccaggcgttacaagttcatgtctaggatcgacaaacaaatttctagattcaggcgctggctccccaagaagcccatgagactcgacaaagagacccttcccgatctggaagagaatgattgttataccgccccattcagtcagcagagaatacaccatttcataatacataacaaggagaccttttttaataatgcaactcgttcaagaattgtgcaccacatactgcaacggatcaaatacgaggaagggaagaacaagattgggcttaacagactcctgaccaacggaagttacgaggcagcctttccactgcacgaaggctcctacagaagcaagaattccatacgcacccatggggcagagaaccacagacacctcctttacgaatgttgggcttcctggggagtctggtataagtaccagcccctggaccttgttcggagatactttggagagaagatcggcctatacttcgcctggctcggatggtacactgggatgctcttccctgcagcctttatcggcctgttcgtgttcctttatggcgtcaccacactggatcactcacaagtgtccaaggaagtctgccaagctactgacatcataatgtgccctgtgtgcgacaagtactgcccattcatgagactgagcgattcatgtgtgtacgcgaaggtgactcatctctttgataacggggcaactgtgttctttgcagtgtttatggcggtttgggccacagtatttttggagttctggaagcggcgcagggcggtcatagcatatgattgggacctgattgattgggaggaggaggaggaagagatccgaccacagttcgaggcgaaatactcaaaaaaagagcgaatgaatcccatctctggcaagccggagccctaccaagcctttactgataaatgttcccgcttaatcgtgagtgcctccggaattttctttatgatctgtgttgtcatagcggccgtctttgggatcgtgatttatcgagttgtgacagtgtctacatttgccgctttcaagtgggcactcatccgtaacaattcacaggtcgccactacggggaccgcagtttgtattaacttctgcatcatcatgctcctcaacgtgctatacgaaaaagtggcattattgctgaccaacttagagcagccacgaaccgagagcgagtgggagaattcctttaccttgaagatgtttcttttccagttcgtcaaccttaactctagcactttttacatcgcattcttcctgggtcggttcacaggacaccctggcgcctacttgagactgatcaaccggtggcgactggaggagtgtcacccctcaggctgcctgattgacctctgtatgcagatgggaatcataatggtgctcaagcagacttggaataattttatggagttgggatatccccttatccagaattggtggactcgacgaaaagtgagacaggagcacggtcccgagcgcaaaataagttttcctcagtgggaaaaagattacaatcttcagcccatgaacgcgtacgggctgttcgatgagtacctggaaatgattctacagtttggcttcactaccatcttcgtcgcggcctttccgctcgccccccttttggctctgcttaataatatcattgaaattaggctggacgcgtataaattcgtgacacagtggcgtcggccactggcgagtcgagcgaaggacattgggatttggtatggcatcctggaaggcatcggtattctgtctgtgatcacaaacgccttcgtcattgcgattacaagtgatttcatcccgcgtttggtgtatgcctataagtacggtccatgtgccggccagggcgaagccgggcagaaatgcatggttggttatgttaacgcttcgttgagcgtctttcggattagcgacttcgagaatcgcagcgaaccagagagcgacggaagtgaattctctggaacacctttgaagtattgccgctacagagactaccgggaccctcctcactcactcgtgccatatgggtacacactacaattttggcacgtgctcgccgctcggttagccttcatcattgtgtttgagcatcttgtattctgtatcaagcacctgatctcctacctgatacctgatttacccaaggatttgcgtgatcggatgcgccgcgaaaagtatcttattcaggagatgatgtacgaggccgagttggagcggttacagaaggaaagaaaggagaggaaaaagaacggtaaggctcaccacaatgagtggccatag

SEQ ID NO: 105162 - DNA, 1428 bp, Artificial Sequence
  derived and/or modified sequence
atggccgtgtgggccaccgtgttcctggagttctggaagcggcggcgggccgtcatcgcgtatgattgggatctgatagattgggaggaggaggagatctgcgtcgtgatcgcagccgtgtttggaatcgtgatttaccgcgtggtcactgtaagtacgtttgcagcatttaagtgggcacttatcaggaacaactcgcaggtagccaccactggaacagcagtgtgcatcaatttctgtattatcatgcttttgaatgtgctgtacgagaaggttgctctgctgcttactaacctggagcagcctaggacagagagcgaatgggagaactcattcaccctgaaaatgttcctgtttcagttcgtgaacttaaattcaagcaccttctacattgcattcttcctggggcgtttcaccggccacccaggcgcatacctcagacttattaatcggtggcggctggaagaatgtcatccaagtgggtgcctcatcgacctctgtatgcagatggggattataatggttttaaaacagacatggaacaattttatggaacttgggtacccacttatccagaattggtggacccggcgtaaggtgcgccaagagcatggccccgagcgcaaaatcagtttcccacagtgggagaaagactacaatctacagcccatgaatgcgtacggtttattcgacgaatatctggagatgattctccagtttggcttcacaaccattttcgtagcagcctttcctctcgctcctttactggccctactaaataatattattgaaatccggcttgacgcctacaagttcgtgacccagtggcggcggcccctggcttcacgagcaaaagacataggcatctggtatggaatcctggagggcatcggcattctgtccgttattactaatgctttcgttattgccatcacctccgacttcatcccacgcctggtttatgcgtacaagtacggaccctgcgccgggcagggcgaggcaggacagaaatgcatggtgggatatgtcaacgctagcttgtctgtgttcagaatttcggacttcgagaaccggtcggaacctgagtccgacggatcggagttttcaggcacaccgcttaagtactgtaggtatcgggattaccgagatccacctcacagtctcgtcccatatggctatacgttgcaattctggcacgtcctggcagctcgactcgcatttattatcgttttcgagcatctcgtcttttgcatcaagcacctgatatcgtaccttatacctgacctgccaaaggaccttagggaccgcatgaggcgggagaagtatctcatccaagagatgatgtacgaggcagagctggagaggctgcaaaaagaacggaaagagaggaagaaaaatggtaaggctcaccacaacgagtggccttag

SEQ ID NO: 105163 - DNA, 2293 bp, Artificial Sequence
  derived and/or modified sequence
aacaataccttcctggtcctaaatataactatatccatacacatatgtaacccacctttttgacaatggagccactgtcttctttgctgttttcatggcagtctgggcaacagttttcctggagttttggaaaagacggcgagcagtaattgcttatgactgggatttgatagactgggaagaagaggagatctgcgtggtgattgctgccgtgttcgggatcgtcatttaccgggtggtgactgtcagcactttcgctgcctttaagtgggcgttaatcaggaataactctcaggttgcaaccacagggactgctgtgtgcatcaacttctgtatcattatgttgctgaatgtgctctatgaaaaagttgccctgcttctgacgaatttagaacagcctcgcacagagtctgagtgggagaacagcttcaccctgaaaatgtttctttttcagtttgtcaatctgaacagctccacattttacatcgcattcttcctcggaagatttacaggacacccaggtgcctacttgaggctgataaacaggtggagactagaagagtgccaccctagtggatgccttattgatctgtgtatgcaaatgggtattataatggtgctaaagcagacctggaataatttcatggaacttggctacccgttaattcagaattggtggactagaagaaaagtacgacaagaacatggacctgaaaggaaaataagtttcccacaatgggaaaaggactataaccttcagccgatgaatgcctatggactcttcgatgaatacttagaaatgattcttcagtttggattcacaactatctttgtggcagcttttcccctagcaccacttctggccttactgaataacataattgaaattcgacttgatgcttacaaatttgtcacacagtggaggagacctttagcttcaagggccaaagacataggaatttggtatggaattcttgaaggcattggaattctctctgttatcacaaatgcatttgtcatagcgataacatctgactttatccctcgcttggtgtatgcttataagtatggaccttgtgcaggccaaggagaagctgggcaaaagtgcatggttggctatgtgaatgccagcttgtctgtatttcgaatttctgactttgagaaccgatctgagcctgaatctgatggcagtgagttctcggggactcctcttaagtactgcagataccgggactaccgtgacccgcctcattcactggtgccctatggctacacactgcagttttggcatgtcctagctgctcgattagcttttatcattgtctttgagcacctcgtgttttgtataaagcacctcatttcatatctgatcccagacctcccaaaagacctaagggatcgaatgagaagagagaagtacttgattcaggagatgatgtatgaagcagaactggaacgtctccagaaggaacgaaaggagaggaagaagaatggaaaagcacaccacaacgagtggccgtgaccataaaatagtccctttccaggccaaggacctgaattctgtttacttcttctggctgtgcaaaagcacactcaagtgaatgactaaaaatgcaaccacagtgcatgttgcagataccggcggccgcaggaggggcagcatccagtagaggactggcgttggagtcacactgctgtgaaatcacgttgcagtccagcgcacaattgctatctatccatagaccattcttgaccaagcaagcatgcacattatgggcagttacattctcaagtttttaaaatcaaggggaacttgtatactgggcctgtttttcagcctgtttgctaccttttttgcattctatcccatgtgaattttacagacactgggctaaaaagggtattcagacacatggacacacattcctagaatgtcatcatatggtcctaattccatgtcaccaacaacacagacaagaccctgtttacaactttttctttccttttttttaattttagacctttctgagaagattattatatatgacatatctatagctatgtgtatggccatagatgtatttctgtgtgtacatatgtatagtcatgtattcctgcatatgtacatacaaatacagagatatataaagtacatagaaattccttacttgtaaatagccaaaaagtactgacatgagtgaattttcacatttaaatagtcatcaatatgaagccatgattaatgcttgtataatgtgatgcaataaaatttaaaataaatttctgcacatgg

SEQ ID NO: 105164 - DNA, 1428 bp, Artificial Sequence
  derived and/or modified sequence
atggcagtgtgggccaccgtgttcctggagttctggaagaggaggagagcagtgatcgcctatgattgggacctgatcgattgggaggaggaggagatatgcgtggtcatcgctgctgtctttggcatagtgatctatcgggtggtgacagtgagcacctttgccgcttttaagtgggctctgatcagaaacaacagccaggtggccacaacaggcacagctgtctgtatcaatttttgcatcattatgctcctcaatgtcttgtacgagaaagtggcactcctgttaactaatctcgagcaaccaaggacggaaagtgagtgggaaaatagcttcacgttgaagatgttcctgtttcagttcgtcaacctaaattcatctacattctatatcgcattcttcttaggacggtttaccggtcatcctggagcttatttaaggctgatcaaccgatggcggttggaggaatgtcacccgtccggctgcctaatcgatctgtgcatgcagatgggaataattatggttttgaagcagacctggaataattttatggagctagggtatccacttatccagaactggtggacgcgaaggaaggttaggcaggaacacggccctgaaagaaaaatctcctttccgcagtgggagaaagattacaatttgcagccaatgaacgcctatggtttattcgacgagtacctcgaaatgattctgcagtttggttttaccaccatattcgtcgccgcattccccctggctccgctcctcgccctacttaataacatcattgaaattaggttagacgcctataaatttgtaacacaatggcggaggccgttggcatccagggctaaagatattggaatatggtacgggatcttggaagggatcggaattctgtctgtaattactaacgcgtttgtgatcgctattacctcagactttatcccccgactagtgtatgcttacaaatacgggccttgtgcaggacagggcgaagccggacagaagtgtatggttggatatgtaaacgctagtctgagcgtgttccgcataagcgactttgagaaccgttctgagcctgagagcgatggaagtgagttttcgggaaccccattaaagtactgtcgctaccgcgattaccgggatccgcctcattccttggtcccttatggctacacactgcaattctggcatgtactcgccgctcggctggcgtttataatcgtgtttgaacatctggttttctgtatcaaacaccttatatcctacctaatcccggatctaccaaaggacctccgcgaccgtatgaggcgggagaaataccttatccaagagatgatgtacgaagctgagcttgaaagactccagaaagaaaggaaagagagaaaaaaaaacggcaaagcccatcataacgagtggccttag

SEQ ID NO: 105165 - DNA, 2868 bp, Artificial Sequence
  derived and/or modified sequence
atggaggccagtagcagcgggataaccaacggaaagactaaagtgttccacccagaaggcggtgtggacctgcaaggctaccagctagacatgcagattctccctgacggacccaagtccgatgtagatttctccgaaatcctgaacgcgattcaggagatggccaaggatgtcaacatccttttcgatgaacttgaggcagtctcatcaccttgtaaggacgacgactctctgctgcatcctggtaatctcacttcaaccagcgacgatgcttcccggctggaggccggaggggaaaccgtgccagagcgcaacaagtccaatggcttgtattttcgggatggcaaatgtcgaatcgactatattctcgtatacagaaagagtaatccccagaccgagaagagagaggtgttcgagcggaatattcgcgctgaggggctccagatggaaaaagaatccagtctgatcaattcagacattatctttgtgaagctgcacgccccatgggaggttctcgggaggtatgcggagcaaatgaatgttaggatgcccttcaggcgcaagatctattaccttcccagaagatataaatttatgagccgtatagacaaacagataagcaggttcaggagatggctgccaaaaaaacccatgcgactggacaaggaaacactgcctgacctggaagaaaacgactgctacacggcgcctttcagtcagcaaaggattcatcattttattattcataataaggaaacattttttaataatgccacacgaagtcgtattgtccatcatatcctccagagaattaaatatgaagaaggtaagaacaaaattggtttaaataggctgctgacaaacggatcatacgaggctgctttcccactccatgagggcagttaccggtccaaaaatagtattcggacccatggcgcagaaaaccaccggcatctactgtatgaatgctgggctagctggggcgtgtggtataaataccagccactcgacctggtgagaagatatttcggggagaaaattggtctgtattttgcatggttgggatggtatacaggaatgctctttcctgctgcttttattggactctttgtgtttctgtatggcgtgacaacactggatcatagccaggtttcgaaggaagtctgccaggcaaccgatataatcatgtgcccagtatgcgataagtactgcccattcatgcggctgtcagatagttgcgtctatgccaaggttacacacctattcgataatggcgcaaccgtcttctttgctgtcttcatggccgtctgggcaaccgtatttctcgaattttggaagagacgcagagccgtgatcgcctacgactgggacctgatcgactgggaagaggaggaagaggagattcgaccccagttcgaggctaaatattccaaaaaggaacggatgaaccctatatccgggaagcctgaaccctaccaggcgtttacagacaaatgttctcgccttattgtttctgcttccggcattttctttatgatctgtgtggtcatcgcggcagtgttcggcatcgtgatttacagggtggtcacagtctccacttttgccgcattcaagtgggcccttatccggaataactcgcaggtggcaacaactggcaccgctgtgtgcattaacttctgcatcataatgttgctgaacgtcctctacgaaaaagtcgcactcctacttaccaacctcgagcaaccacgaaccgagtcagagtgggaaaacagttttacactcaagatgttcctattccagttcgtcaatcttaacagcagcacgttctacatcgctttctttcttggcagatttacaggacatcccggtgcttatctacgactcatcaacaggtggaggctcgaagaatgccatccctctggctgtctcatcgacctctgtatgcagatgggcattatcatggtcttaaagcaaacctggaacaattttatggagttgggctatccattgatacagaactggtggaccaggcggaaagttcgtcaagaacacggcccagagcggaaaattagcttcccccaatgggaaaaggactataacctccaaccaatgaacgcatacggcctcttcgacgagtatcttgaaatgattctgcagtttggatttaccaccatttttgtggcggctttccccttagcaccgctcctcgccctgcttaataatataatagagatacggctagatgcctacaagtttgtgacgcagtggaggaggccacttgcatcccgtgccaaggacatcggaatctggtacggcattctggaggggattggcattctgagcgtgataacaaatgcatttgtaattgccatcactagtgatttcatccccaggctggtgtacgcttataagtatggaccgtgtgcagggcaaggcgaggccggacagaaatgtatggtagggtatgtaaacgcatccctttccgtcttccgtatatctgactttgagaatcggtcggaacctgaatctgacggctcagagttctcagggactccacttaagtactgtagatacagagattaccgagaccccccacatagtctcgtgccttacgggtatactttacagttctggcacgtgttggctgcccgactggcattcatcatcgtcttcgagcacctggtgttttgtattaagcacctcatctcctatcttatcccagacctgcccaaggacctgcgcgacaggatgcgcagagagaaatacttaattcaggaaatgatgtatgaggcggaactggaacgactgcaaaaggagaggaaagaacggaaaaagaacggaaaagctcatcataacgagtggccttag

SEQ ID NO: 105166 - DNA, 1428 bp, Artificial Sequence
  derived and/or modified sequence
atggcagtatgggcaaccgtttttcttgaattttggaaacgcaggcgggctgtaatcgcctatgattgggacctgatcgactgggaggaggaggaaatctgcgtagtgattgccgcagtattcgggattgtcatctaccgggttgtgaccgtgagcacttttgctgcatttaaatgggccctgatccggaataattcccaggtggccacaacaggaactgctgtctgtatcaatttctgcattataatgctgcttaatgtgctctacgagaaggtagctctgcttctgaccaacttggaacagccacggaccgaaagcgagtgggagaatagcttcacgctgaagatgtttctgtttcagtttgtgaatctgaactcttccacgttctacatcgcattttttcttggacggttcaccggtcatccaggcgcatatctgagactgatcaatcgctggagattggaagaatgccaccctagcggctgcttaattgacctttgcatgcagatgggcattattatggttttgaagcagacttggaacaattttatggaactcggataccccctaatccaaaattggtggacgcggcgtaaggttcgccaggaacacggccctgagaggaaaatcagtttccctcaatgggagaaagactataacctccagccaatgaacgcgtatgggctgttcgatgagtacctggagatgatactccagttcggctttacaaccatctttgtcgctgccttccctctggcccctcttctggccctgctgaacaacatcatcgagatcaggctggacgcatacaagttcgtaacgcaatggaggaggcctctggcctctcgggcaaaggatattgggatatggtacggaatcctcgaggggattggaatcctgtcagtaattaccaatgccttcgtgatcgccatcacgtccgacttcataccgaggctcgtatatgcatataaatatggcccttgcgcaggtcagggcgaggccggacagaagtgtatggtgggctatgtgaatgcatctctatcagtgtttaggataagtgatttcgaaaaccgttctgaaccggagagcgacggcagcgagttctcaggtactccactgaagtactgccgctaccgagattaccgcgatcccccacactctctcgtaccctatggctacaccctccaattttggcatgttctggccgcaaggctggcctttatcatagtgtttgagcacctagtcttctgtattaaacatctcatctcctatttaatccctgacctgccaaaagacttgcgtgatcggatgaggagagaaaagtacctcatccaagagatgatgtatgaggccgagttggaacggctgcagaaggagcggaaagaacgaaagaagaatgggaaagcgcaccacaacgagtggccctag

SEQ ID NO: 105167 - protein, 142 aa, Artificial Sequence
  derived and/or modified sequence
MISTARVPADKPVRIAFSLNDASDDTPPEDSIPLVFPELDQQLQPLPPCHDSEESMEVFKQHCQIAEEYHEVKKEITLLEQRKKELIAKLDQAEKEKVDAAELVREFEALTEENRTLRLAQSQCVEQLEKLRIQYQKRQGSS

SEQ ID NO: 105168 - protein, 94 aa, Artificial Sequence
  derived and/or modified sequence
MISTARVPADKPVRIAFSLNDASDDTPPEDSIPLVFPELDQQLQPLPPCHDSEESMEVFKQHCQIAEEYHEVKKEITLLEQRKKELIAKLDQAE

SEQ ID NO: 105169 - DNA, 429 bp, Artificial Sequence
  derived and/or modified sequence
atgatctctactgcgagagtccctgcggataaaccggtgagaatagcttttagcttgaacgacgccagcgatgatactcccccggaggatagtattccgttggtttttcccgaattagatcagcagctgcagccactcccaccatgccacgactctgaagaatcaatggaggtatttaagcaacattgccaaatcgcagaggagtaccacgaggtgaagaaagagatcacactgcttgaacagaggaagaaggagctgatagccaaactcgaccaagccgaaaaggaaaaagtcgacgcagccgaattggtcagagaattcgaagctttgactgaggaaaaccgaaccctgaggctcgcgcagagtcagtgcgtggagcagttagaaaaactgagaatccagtaccagaaaaggcagggatcgagctag

SEQ ID NO: 105170 - DNA, 429 bp, Artificial Sequence
  derived and/or modified sequence
atgatttctaccgcacgcgttcctgcggataaaccggtacggatcgcgttcagcctgaacgacgctagcgacgataccccccccgaagattctatccccttggtgttcccagagctggaccaacagctgcaaccactcccaccttgtcatgattcagaggagagtatggaggtatttaaacagcactgtcagattgctgaggaataccacgaggtgaagaaagagatcacactgctggaacaacggaagaaggagcttatcgcaaaattggatcaggccgagaaggagaaggtggacgcagctgagttggtgagagaattcgaagcgctgacagaagagaatcgaaccctcaggctagcccaaagccagtgtgttgagcagttagagaagctacgcattcagtaccagaaaagacagggtagctcgtag

SEQ ID NO: 105171 - DNA, 429 bp, Artificial Sequence
  derived and/or modified sequence
atgatctccactgcgagagtgccagccgacaaacccgtgcggatcgctttcagtctcaacgacgcttccgatgatactcctcctgaagactctatccccttggtgtttcccgagcttgaccagcaattacagccgttgccaccctgccacgactctgaagagtccatggaagtattcaagcagcattgccaaatcgctgaggagtaccatgaagtgaagaaagaaatcaccctcctggaacaacggaagaaggagctcattgcaaagctcgaccaagcggagaaagagaaggtggatgccgcggagctggtccgagaatttgaggcgctgaccgaagagaacaggacacttcggctggctcagagtcaatgcgtggagcaactggaaaagttaaggatccagtatcaaaaacggcagggcagcagctag

SEQ ID NO: 105172 - DNA, 429 bp, Artificial Sequence
  derived and/or modified sequence
atgatctcgacagctcgggtacccgcggacaagccagtgagaatcgcattctccctgaacgacgcttcagacgacacacctcccgaggactcaattccgctagtgttcccagaactcgaccagcagctacaaccgctgcctccctgccatgatagtgaagaatctatggaggtatttaaacagcattgccaaatcgcagaagagtatcatgaagtgaaaaaagagattacgctgttggagcaacgaaagaaggagctgattgctaagctggatcaggccgagaaggagaaggtggatgccgccgagttggtgcgcgagtttgaggccctcaccgaagaaaacaggaccctgcgactggctcagtctcaatgcgtggagcagctcgaaaaactacggattcagtaccagaaacgacaaggcagctcctag

SEQ ID NO: 105173 - DNA, 429 bp, Artificial Sequence
  derived and/or modified sequence
atgatcagcaccgcgagggtcccagcggacaaacccgtgcgcatcgccttctcattgaatgatgcaagcgatgacacaccgccagaagactccatcccacttgtgttcccagagctcgatcaacagctgcaaccacttcctccctgccatgactctgaagagagtatggaagtgtttaagcagcactgccagatagccgaggaataccatgaggtgaaaaaagaaattacgctactagaacagcggaagaaagagttaatcgcgaagttagatcaggccgagaaggagaaggtagacgccgctgaactggtccgggaatttgaggccttgaccgaagaaaaccggacgctacgtctcgcacagtctcagtgtgtagagcagctggaaaagttgcgtatacagtaccagaagcgccagggaagctcatag

SEQ ID NO: 105174 - DNA, 429 bp, Artificial Sequence
  derived and/or modified sequence
atgatcagcacagcacgtgttcccgcagacaaacccgtgcggattgcctttagtctcaatgatgcctccgacgatacccctcctgaagatagtatcccactggtgttcccggagttggatcagcagttgcagcccctgccaccttgtcacgactccgaggaatcaatggaagtattcaagcagcactgccaaatcgccgaagagtatcacgaggtgaaaaaagagattactctccttgaacagcgcaagaaagaactgatcgcaaagctcgaccaggccgagaaagagaaagtggacgcagccgagttggtcagagagttcgaggctttgaccgaggagaacaggacactgcggctcgcccagagccagtgcgtggaacaattggagaaattgagaatccagtaccagaaaaggcaggggtctagctag

SEQ ID NO: 105175 - DNA, 285 bp, Artificial Sequence
  derived and/or modified sequence
atgatcagcacggccagagtgcctgcagacaagccagtgcggattgcctttagtcttaatgacgctagtgacgacacccctcccgaggacagtatacccctagtctttccagaactggatcaacagctgcagccgctgcctccatgtcacgacagcgaggagtctatggaagtatttaaacaacattgtcagattgcagaggaatatcacgaagtgaagaaagaaatcaccctgttggagcagaggaaaaaggagttaatcgcaaagctcgaccaggcggagtag

SEQ ID NO: 105176 - DNA, 429 bp, Artificial Sequence
  derived and/or modified sequence
atgatcagcacagcccgggtgcctgctgacaagcctgtgagaattgccttcagcctgaatgatgccagtgatgacaccccaccagaagattccatccccctggtgtttcctgagctggaccagcagctgcagcccctgcccccctgccacgacagcgaggagagcatggaggtgttcaagcagcactgccagattgctgaggagtaccacgaggtgaagaaggagatcaccctgctggagcagaggaagaaggagctgattgccaagctggaccaggccgagaaggagaaggtggatgctgctgagctggtgcgggagtttgaggccctgacagaagaaaatagaaccctgcggctggcccagagccagtgtgtggagcagctggagaagctgcgcatccagtaccagaagaggcagggcagcagctag

SEQ ID NO: 105177 - DNA, 285 bp, Artificial Sequence
  derived and/or modified sequence
atgatcagcacagcccgggtgcctgctgacaagcctgtgagaattgccttcagcctgaatgatgccagtgatgacaccccaccagaagattccatccccctggtgtttcctgagctggaccagcagctgcagcccctgcccccctgccacgacagcgaggagagcatggaggtgttcaagcagcactgccagattgctgaggagtaccacgaggtgaagaaggagatcaccctgctggagcagaggaagaaggagctgattgccaagctggaccaggccgagtag

SEQ ID NO: 105178 - DNA, 429 bp, Artificial Sequence
  derived and/or modified sequence
atgatcagcaccgcccgggtgcccgccgacaagcccgtgcggatcgcgtttagtcttaatgacgcttcggatgacaccccccctgaggattcaatacctttagtgtttcccgagcttgatcagcagctgcagccacttcccccctgccatgattccgaggagtctatggaagtattcaaacagcattgccaaatagctgaagaataccatgaggtgaagaaggagatcaccctcctggagcagcgtaagaaagagctcatagccaagttggatcaagccgaaaaagagaaagtagatgctgcggaactggtccgcgaattcgaagccctcaccgaggagaaccgcactctgcggctggcccagtcacagtgtgttgaacagctcgagaagctgcgaattcagtatcagaaacggcagggttcaagttag

SEQ ID NO: 105179 - DNA, 429 bp, Artificial Sequence
  derived and/or modified sequence
atgatcagcaccgcccgggtgcccgccgacaagcccgtgcggatcgcattttcgctcaacgacgccagtgacgacaccccgccagaagactccattccactggtgtttcctgagctcgatcagcaactgcagccccttcccccctgccacgatagcgaggaatctatggaggtcttcaagcagcattgtcagatagccgaggagtatcatgaagtgaagaaggaaatcaccctgcttgagcaaagaaagaaagagctgatcgccaagttggatcaggcagaaaaagagaaagtggatgcggccgaattagtacgagagtttgaggcgttaaccgaggagaatcgtacactgcggctggctcagtctcagtgtgtggagcagctcgagaagttacgcattcaatatcagaagcgccagggctccagctag

SEQ ID NO: 105180 - DNA, 429 bp, Artificial Sequence
  derived and/or modified sequence
atgatcagcaccgcccgggtgcccgccgacaagcccgtgcggatcgcattttccctgaatgacgctagcgatgacacaccacccgaggatagcatcccattagtttttcctgaactggaccaacagctgcagcctctgcccccttgccacgacagcgaagagtctatggaggtgttcaagcagcattgccagatcgccgaggagtaccacgaagtcaagaaggagataacactattggagcaaaggaagaaagaactgatcgcgaaactggatcaagcagagaaggagaaagttgacgctgcagaactcgtacgtgagttcgaagcactgactgaggagaaccgaaccctgcgcctggctcagagccagtgcgtggaacagctggagaaacttaggatccagtatcagaagaggcaggggtcaagctag

SEQ ID NO: 105181 - DNA, 429 bp, Artificial Sequence
  derived and/or modified sequence
atgatcagcaccgcccgggtgcccgccgacaagcccgtgcggatcgcgttctccctcaatgacgcaagcgatgacacaccacccgaagactcaatcccactggtgtttcccgaactcgaccagcagctccagccgctgccaccttgccacgacagcgaagaaagcatggaggtcttcaaacaacactgccaaatcgctgaagagtatcacgaggtgaagaaggagatcactttgctggagcagcggaagaaggaactgattgccaagttggatcaggcagaaaaggaaaaggttgatgcagcggagctggttagagaattcgaagcattaaccgaggaaaatagaaccttgcgactcgcgcagtcgcagtgcgttgagcaattagagaaattgagaattcaataccagaagagacaagggtcttcctag

SEQ ID NO: 105182 - DNA, 429 bp, Artificial Sequence
  derived and/or modified sequence
atgatcagcaccgcccgggtgcccgccgacaagcccgtgcggatcgcttttagcctcaacgacgcaagcgacgacactccccccgaagacagtattcccctggtcttcccagagctcgatcagcagctgcagcctcttccaccgtgccatgatagcgaagaatcaatggaggtgttcaagcagcactgccagatcgctgaagagtaccacgaggtcaaaaaagagatcacactccttgaacagcgtaagaaagaactgatcgcaaaattggaccaagccgagaaagaaaaagtcgacgccgccgagctggtgcgcgaattcgaggctttgacagaagaaaatcggaccctgagactcgcacaaagccagtgtgtggaacaactggagaagctcagaatccagtatcagaaacgtcaggggtcttcctag

SEQ ID NO: 105183 - DNA, 429 bp, Artificial Sequence
  derived and/or modified sequence
atgatcagcaccgcccgggtgcccgccgacaagcccgtgcggatcgccttttctctgaatgacgcttctgatgataccccacccgaggactctattcccctcgtatttcccgaactggaccagcagctccagccccttcctccttgtcacgacagcgaggagtctatggaggttttcaagcaacactgccagatagccgaggaatatcatgaagtcaaaaaagagattaccctcctggagcagcgcaaaaaagaactcatcgcgaaattggaccaggccgagaaggagaaggtggacgccgcagagctcgtgagagagttcgaagcccttactgaagaaaacaggactctgaggctggcccagagtcagtgcgtcgaacagctggaaaaacttaggatccagtatcagaaacggcagggatccagctag

SEQ ID NO: 105184 - DNA, 285 bp, Artificial Sequence
  derived and/or modified sequence
atgatcagcaccgcccgggtgcccgccgacaagcccgtgcggatcgcgttcagcctgaatgatgcctctgacgacaccccacctgaggactcgatcccccttgtattcccagagctcgatcagcagttgcagccattaccaccttgtcatgattctgaagagagcatggaggtttttaagcaacactgtcagattgctgaggaatatcacgaggtgaagaaagagatcaccttacttgagcagagaaaaaaggaactaattgctaagcttgatcaggccgaatag

SEQ ID NO: 105185 - DNA, 429 bp, Artificial Sequence
  derived and/or modified sequence
atgatttcgactgccagggtgcccgctgacaaaccggttcgtatcgctttctccttgaatgatgcgagtgatgacaccccgcctgaagatagcatcccactggtcttccccgagttggatcagcagctacagcccctgcctccttgtcacgactcagaagagagcatggaggtattcaagcagcattgtcaaatcgctgaagagtaccatgaagtgaaaaaggagattaccttgctcgagcagaggaagaaggagctgattgctaaactcgaccaagccgagaaagaaaaagttgatgctgccgagctcgtacgggagtttgaagccctgaccgaagaaaataggacattgcgcctggcccagagccagtgtgtagagcagttagagaagctgagaattcagtaccagaaacgtcagggctcctcttag

SEQ ID NO: 105186 - DNA, 429 bp, Artificial Sequence
  derived and/or modified sequence
atgatctcaaccgccagggtcccagcagataagcctgtgagaatcgctttctccctcaacgacgcgtcagacgatacacctcctgaagattcaattccgctggtctttccagaattagaccaacagctgcaacctctccccccttgtcatgattccgaggagtctatggaagtttttaagcagcactgccagatcgccgaggaataccacgaggtcaaaaaagagatcacattgctggaacagagaaaaaaagaactaattgcgaagttggatcaagccgagaaagagaaagtagacgccgctgagctcgtgcgagaattcgaggccctcacagaagaaaaccggactctgcgactggctcagagccagtgcgtggagcaactagagaaacttcgcatccagtaccagaagagacagggcagctcctag

SEQ ID NO: 105187 - DNA, 429 bp, Artificial Sequence
  derived and/or modified sequence
atgatttctacagccagagtacctgctgacaagccagttaggattgccttcagcctgaacgacgcaagcgacgatacaccgccagaggattcaatcccactggtctttcccgaattagatcagcagttgcagcctctaccgccttgtcatgactcagaggaaagtatggaggtctttaagcagcattgtcagatagccgaggaataccatgaggtaaagaaggagatcacgctgctcgagcaacggaagaaggagctcatagccaaactggatcaagccgaaaaggagaaagtggacgctgcagaactggttcgggaatttgaggcgttgaccgaagaaaatagaacactgaggctcgctcagagccaatgcgtggagcaacttgagaaactgagaatccagtaccagaagcgccaaggttcatcctag

SEQ ID NO: 105188 - DNA, 429 bp, Artificial Sequence
  derived and/or modified sequence
atgatttccacagctagggtgcctgcagataaacccgtgcgtattgcattctctttgaatgacgcctctgacgacactcccccagaagattcaatcccattggtattcccagaattagaccagcagctgcagcctttgcccccttgccatgatagcgaggagtccatggaagttttcaagcagcactgtcagatagcagaagagtaccatgaggtaaaaaaggaaatcacactcctcgagcagagaaaaaaggaactgattgccaaactcgatcaggccgaaaaggagaaggtcgatgctgcagagctcgtgagagaatttgaggcgcttacagaggaaaaccgcacactgcggcttgctcaatcccaatgcgttgaacagctagaaaagctccgcatccagtaccagaaaaggcagggcagctcttag

SEQ ID NO: 105189 - DNA, 429 bp, Artificial Sequence
  derived and/or modified sequence
atgatctctaccgcacgggttcctgcggacaaacccgtacgcatcgcattttctctcaacgatgcttccgacgacacacctcccgaggacagcatccctctagtgttcccagagctggatcagcagttacagcccctgcccccttgccacgattctgaagagtccatggaggtctttaaacagcattgtcagatcgcggaagagtatcatgaggtgaagaaggagattactctgctggagcagcgtaagaaggaattgattgctaagctcgaccaggctgaaaaggaaaaagttgatgccgctgagctggtgcgcgaattcgaggcccttacagaggaaaatcggaccctacgtctggctcagagccaatgtgtcgaacaactcgaaaagctcagaattcagtatcagaagcgacagggttctagttag

SEQ ID NO: 105190 - DNA, 429 bp, Artificial Sequence
  derived and/or modified sequence
atgatcagcacggcccgtgttccagctgataagcccgtccggattgcctttagtctgaatgatgcctctgacgatacccctcctgaggactcgatacccctagtcttccccgaactcgatcagcagttacagccattgccgccttgccatgactcagaggaatccatggaggtgtttaaacagcattgccagatcgcagaggagtaccatgaagtcaagaaagagatcacgttgctggagcagagaaagaaggaattaattgctaaactggaccaggccgagaaggagaaagtggacgcagcagagctggtgagagaatttgaggctctcacggaggagaatcgaacactgcggctggctcaaagccagtgtgtggagcagctggagaagctaaggattcagtaccaaaaacgacagggctcctcttag

SEQ ID NO: 105191 - DNA, 285 bp, Artificial Sequence
  derived and/or modified sequence
atgataagcactgcacgagtcccagctgacaagcctgtgaggattgccttcagtctcaacgatgcaagcgacgacactccccctgaggattcaatccctttggtctttcccgaactggatcagcaactgcaaccgctgcccccatgtcacgattctgaagaaagcatggaagtcttcaagcagcactgccaaatcgccgaggaataccatgaggttaagaaggagattaccctgcttgagcagcgcaagaaggagctgatagctaaactggaccaggccgaatag

SEQ ID NO: 105192 - DNA, 2066 bp, Artificial Sequence
  derived and/or modified sequence
gtccaagcccagtgctctttcccctgatgagaaacctttccagatttaaaccattaacaaccctctctaaagaggaggcaagaggtttcaatttcttctcagggaaaaaaagaactgacatcaaaaggtctgtgcggggtcatttgtctcatcatgactttgatttggccttgatctttatttagtatttcagttttatgctctgcaacaagtttggccatgttggaggacaatccaaaggtcagcaagttggctactggcgattggatgctcactctgaagccaaagtctattactgtgcccgtggaaatccccagctcccctctgggttgacattcgtaaccttcctggatcctatcagagaaaccttgttcatcatttcatttccaaattatgaagaccacctgggcctgactgaagatgcttgtttcttcctcttccctaacgccctttccaccagtgcggactgcagattgtcagtggctgctatgcagcaggtgcagcctggtctctcactgagtctctactccacaaaggcaacgactggccaaggcagtggctggctctgggttacacaagtgcagacactcaactaagtgagctggaagacccaggagaaggcggaggctcaggtgcccacatgatcagcacagccagggtacctgctgacaagcctgtacgcatcgcctttagcctcaatgacgcctcagatgatacaccccctgaagactccattcctttggtctttccagaattagaccagcagctacagcccctgccgccttgtcatgactccgaggaatccatggaggtgttcaaacagcactgccaaatagcagaagaataccatgaggtcaaaaaggaaatcaccctgcttgagcaaaggaagaaggagctcattgccaagttagatcaggcagaaaaggagaaggtggatgctgctgagctggttcgggaattcgaggctctgacggaggagaatcggacgttgaggttggcccagtctcaatgtgtggaacaactggagaaacttcgaatacagtatcagaagaggcagggctcgtcctaactttaaatttttcagtgtgagcatacgaggctgatgactgccctgtgctggccaaaagatttttattttaaatgaatagtgagtcagatctattgcttctctgtattacccacatgacaactgtctataatgagtttactgcttgccagcttctagcttgagagaagggatattttaaatgagatcattaacgtgaaactattactagtatatgtttttggagatcagaattcttttccaaagatatatgtttttttcttttttaggaagatatgatcatgctgtacaacagggtagaaaatgataaaaatagactattgactgacccagctaagaatcgtgggctgagcagagttaaaccatgggacaaacccataacatgttcaccatagtttcacgtatgtgtatttttaaatttcatgcctttaatatttcaaatatgctcaaatttaaactgtcagaaacttctgtgcatgtatttatatttgccagagtataaacttttatactctgatttttatccttcaatgattgattatactaagaataaatggtcacatatcctaaaagcttcttcatgaaattattagcagaaaccatgtttgtaaccaaagcacatttgccaatgctaactggctgttgtaataataaacagataaggctgcatttgcttcatgccatgtgacctcacagtaaacatctctgcctttgcctgtgtgtgttctgggggaggggggacatggaaaaatattgtttggacattacttgggtgagtgcccatgaaaacatcagtgaacttgtaactattgttttgttttggatttaaggagatgttttagatcagtaacagctaataggaatatgcgagtaaattcagaattgaaacaatttctccttgttctacctatcaccacattttctcaaattgaactctttgttatatgtccatttctattcatgtaacttctttttcattaaacatggatcaaaactgaca

SEQ ID NO: 105193 - DNA, 692 bp, Artificial Sequence
  derived and/or modified sequence
gatcagcagcaacttaaccaaagctctgttacagcctgtagccaagagaaggaacctgtggttcgtttccccagacggtgtgatgaaaagctggaagacccaggagaaggcggaggctcaggtgcccacatgatcagcacagccagggtacctgctgacaagcctgtacgcatcgcctttagcctcaatgacgcctcagatgatacaccccctgaagactccattcctttggtctttccagaattagaccagcagctacagcccctgccgccttgtcatgactccgaggaatccatggaggtgttcaaacagcactgccaaatagcagaagaataccatgaggtcaaaaaggaaatcaccctgcttgagcaaaggaagaaggagctcattgccaagttagatcaggcagaaaaggagaaggtggatgctgctgagctggttcgggaattcgaggctctgacggaggagaatcggacgttgaggttggcccagtctcaatgtgtggaacaactggagaaacttcgaatacagtatcagaagaggcagggctcgtcctaactttaaatttttcagtgtgagcatacgaggctgatgactgccctgtgctggccaaaagatttttattttaaatgaatagtgagtcagatctattgcttctctgtattacccacatgacaactgtctataatgag

SEQ ID NO: 105194 - DNA, 749 bp, Artificial Sequence
  derived and/or modified sequence
aaagatgacaacatcctggctgttagagagattgtcagtggctgctatgcagcaggtgcagcctggtctctcactgagtctctactccacaaaggcaacgactggccaaggcagtggctggctctgggttacacaagtgcagacactcaactaagtgagctggaagacccaggagaaggcggaggctcaggtgcccacatgatcagcacagccagggtacctgctgacaagcctgtacgcatcgcctttagcctcaatgacgcctcagatgatacaccccctgaagactccattcctttggtctttccagaattagaccagcagctacagcccctgccgccttgtcatgactccgaggaatccatggaggtgttcaaacagcactgccaaatagcagaagaataccatgaggtcaaaaaggaaatcaccctgcttgagcaaaggaagaaggagctcattgccaagttagatcaggcagaaaaggagaaggtggatgctgctgagctggttcgggaattcgaggctctgacggaggagaatcggacgttgaggttggcccagtctcaatgtgtggaacaactggagaaacttcgaatacagtatcagaagaggcagggctcgtcctaactttaaatttttcagtgtgagcatacgaggctgatgactgccctgtgctggccaaaagatttttattttaaatgaatagtgagtcagatctattgcttctctgtattacccacatgacaact

SEQ ID NO: 105195 - DNA, 1904 bp, Artificial Sequence
  derived and/or modified sequence
cacgctgaagacattcctgtcttgtgaagcaagtctgtttgtattttaagtttgccaggactaatgaattaaaacatttggactccccacaacttgctgtttatcaatgcctctgacaggaggagggttttcttttgctcttgctttttctagaaagatgacaacatcctggctgttagagaggcaaggaaaggagagaggggttgtgaagggaagcggaagggaagggaagggaggtcccgtgggacgctggggtctggggcagagcaggtagcagcgtgctgccctgacagctgtctccgctcctcagattgtcagtggctgctatgcagcaggtgcagcctggtctctcactgagtctctactccacaaaggcaacgactggccaaggcagtggctggctctgggttacacaagtgcagacactcaactaagtgagctggaagacccaggagaaggcggaggctcaggtgcccacatgatcagcacagccagggtacctgctgacaagcctgtacgcatcgcctttagcctcaatgacgcctcagatgatacaccccctgaagactccattcctttggtctttccagaattagaccagcagctacagcccctgccgccttgtcatgactccgaggaatccatggaggtgttcaaacagcactgccaaatagcagaagaataccatgaggtcaaaaaggaaatcaccctgcttgagcaaaggaagaaggagctcattgccaagttagatcaggcagaaaaggagaaggtggatgctgctgagctggttcgggaattcgaggctctgacggaggagaatcggacgttgaggttggcccagtctcaatgtgtggaacaactggagaaacttcgaatacagtatcagaagaggcagggctcgtcctaactttaaatttttcagtgtgagcatacgaggctgatgactgccctgtgctggccaaaagatttttattttaaatgaatagtgagtcagatctattgcttctctgtattacccacatgacaactgtctataatgagtttactgcttgccagcttctagcttgagagaagggatattttaaatgagatcattaacgtgaaactattactagtatatgtttttggagatcagaattcttttccaaagatatatgtttttttcttttttaggaagatatgatcatgctgtacaacagggtagaaaatgataaaaatagactattgactgacccagctaagaatcgtgggctgagcagagttaaaccatgggacaaacccataacatgttcaccatagtttcacgtatgtgtatttttaaatttcatgcctttaatatttcaaatatgctcaaatttaaactgtcagaaacttctgtgcatgtatttatatttgccagagtataaacttttatactctgatttttatccttcaatgattgattatactaagaataaatggtcacatatcctaaaagcttcttcatgaaattattagcagaaaccatgtttgtaaccaaagcacatttgccaatgctaactggctgttgtaataataaacagataaggctgcatttgcttcatgccatgtgacctcacagtaaacatctctgcctttgcctgtgtgtgttctgggggaggggggacatggaaaaatattgtttggacattacttgggtgagtgcccatgaaaacatcagtgaacttgtaactattgttttgttttggatttaaggagatgttttagatcagtaacagctaataggaatatgcgagtaaattcagaattgaaacaatttctccttgttctacctatcaccacattttctcaaattgaactctttgttatatgtccatttctattcatgtaacttctttttcattaaacatggatcaaaactgaca

SEQ ID NO: 105196 - DNA, 2093 bp, Artificial Sequence
  derived and/or modified sequence
ccgagagcgagggagggctgtgaggactgccagcacgctgtcacctctcaatagcagcccaaacagattaagacatgggaggtgaaagacaacttgagtggttaaattactgtcatgcaaagcgactagatggttcagctgattgcacctttagaagttatgtggaacgaggcagcagatcttaagccccttgctctgtcacgcaggctggaatgcagtggtggaatcatggctcactacagccctgacctcctgggcccagagatggagtctcgctattttgcccaggttggtcttgaacacctggcttcaagcagtcctcctgcttttggcttcttgaagtgcttggattacagtatttcagttttatgctctgcaacaagtttggccatgttggaggacaatccaaaggtcagcaagttggctactggcgattggatgctcactctgaagccaaagtctattactgtgcccgtggaaatccccagctcccctctggattgtcagtggctgctatgcagcaggtgcagcctggtctctcactgagtctctactccacaaaggcaacgactggccaaggcagtggctggctctgggttacacaagtgcagacactcaactaagtgagctggaagacccaggagaaggcggaggctcaggtgcccacatgatcagcacagccagggtacctgctgacaagcctgtacgcatcgcctttagcctcaatgacgcctcagatgatacaccccctgaagactccattcctttggtctttccagaattagaccagcagctacagcccctgccgccttgtcatgactccgaggaatccatggaggtgttcaaacagcactgccaaatagcagaagaataccatgaggtcaaaaaggaaatcaccctgcttgagcaaaggaagaaggagctcattgccaagttagatcaggcagaaaaggagaaggtggatgctgctgagctggttcgggaattcgaggctctgacggaggagaatcggacgttgaggttggcccagtctcaatgtgtggaacaactggagaaacttcgaatacagtatcagaagaggcagggctcgtcctaactttaaatttttcagtgtgagcatacgaggctgatgactgccctgtgctggccaaaagatttttattttaaatgaatagtgagtcagatctattgcttctctgtattacccacatgacaactgtctataatgagtttactgcttgccagcttctagcttgagagaagggatattttaaatgagatcattaacgtgaaactattactagtatatgtttttggagatcagaattcttttccaaagatatatgtttttttcttttttaggaagatatgatcatgctgtacaacagggtagaaaatgataaaaatagactattgactgacccagctaagaatcgtgggctgagcagagttaaaccatgggacaaacccataacatgttcaccatagtttcacgtatgtgtatttttaaatttcatgcctttaatatttcaaatatgctcaaatttaaactgtcagaaacttctgtgcatgtatttatatttgccagagtataaacttttatactctgatttttatccttcaatgattgattatactaagaataaatggtcacatatcctaaaagcttcttcatgaaattattagcagaaaccatgtttgtaaccaaagcacatttgccaatgctaactggctgttgtaataataaacagataaggctgcatttgcttcatgccatgtgacctcacagtaaacatctctgcctttgcctgtgtgtgttctgggggaggggggacatggaaaaatattgtttggacattacttgggtgagtgcccatgaaaacatcagtgaacttgtaactattgttttgttttggatttaaggagatgttttagatcagtaacagctaataggaatatgcgagtaaattcagaattgaaacaatttctccttgttctacctatcaccacattttctcaaattgaactctttgttatatgtccatttctattcatgtaacttctttttcattaaacatggatcaaaactgaca

SEQ ID NO: 105197 - DNA, 556 bp, Artificial Sequence
  derived and/or modified sequence
ctcttgtacttgatttcttggtgcgggaaagtgttgggggatttagccaaaagaggagtgcaactttccatccttagatgttatgctaaagtgattcggtgattgtacaatgcataacagtaaaacttttctttttagctaaaatgttaagggaattttaatggtttcttctgttgaatttgagacaatccatgccattccctaggtggctaacaaaatgcttgattctgagcagctggaagacccaggagaaggcggaggctcaggtgcccacatgatcagcacagccagggtacctgctgacaagcctgtacgcatcgcctttagcctcaatgacgcctcagatgatacaccccctgaagactccattcctttggtctttccagaattagaccagcagctacagcccctgccgccttgtcatgactccgaggaatccatggaggtgttcaaacagcactgccaaatagcagaagaataccatgaggtcaaaaaggaaatcaccctgcttgagcaaaggaagaaggagctcattgccaagttagatcaggcagaa

SEQ ID NO: 105198 - DNA, 429 bp, Artificial Sequence
  derived and/or modified sequence
atgatcagcaccgccagagtgcccgccgacaagcccgtgagaatcgccttcagcctgaacgacgccagcgacgacaccccccccgaggacagcatccccctggtgttccccgagctggaccagcagctgcagcccctgcccccctgccacgacagcgaggagagcatggaggtgttcaagcagcactgccagatcgccgaggagtaccacgaggtgaagaaggagatcaccctgctggagcagagaaagaaggagctgatcgccaagctggaccaggccgagaaggagaaggtggacgccgccgagctggtgagagagttcgaggccctgaccgaggagaacagaaccctgagactggcccagagccagtgcgtggagcagctggagaagctgagaatccagtaccagaagagacagggcagcagctag

SEQ ID NO: 105199 - DNA, 285 bp, Artificial Sequence
  derived and/or modified sequence
atgatcagcaccgccagagtgcccgccgacaagcccgtgagaatcgccttcagcctgaacgacgccagcgacgacaccccccccgaggacagcatccccctggtgttccccgagctggaccagcagctgcagcccctgcccccctgccacgacagcgaggagagcatggaggtgttcaagcagcactgccagatcgccgaggagtaccacgaggtgaagaaggagatcaccctgctggagcagagaaagaaggagctgatcgccaagctggaccaggccgagtag

SEQ ID NO: 105200 - protein, 136 aa, Artificial Sequence
  derived and/or modified sequence
MLVSSSSLTPFPPVRTADDTPPEDSIPLVFPELDQQLQPLPPCHDSEESMEVFKQHCQIAEEYHEVKKEITLLEQRKKELIAKLDQAEKEKVDAAELVREFEALTEENRTLRLAQSQCVEQLEKLRIQYQKRQGSS

SEQ ID NO: 105201 - DNA, 411 bp, Artificial Sequence
  derived and/or modified sequence
atgcttgtgagcagttctagcctcaccccctttccccctgtgcgtacggcagatgacacccccccagaggattccatacccctcgtctttcctgagttggatcagcagctgcagccactgcccccttgtcatgatagtgaggaatccatggaggtgtttaagcaacactgtcagatcgctgaagagtaccacgaggtaaagaaagagattacccttttagagcagcgaaagaaagagttgatcgctaaactggaccaagccgagaaggagaaggttgacgcagcagagctggtgcgagaatttgaagccttgactgaggaaaaccggacgctgcgcctggcacagtctcaatgtgtggagcagttagagaagctccgcatccaataccagaaacgacagggcagtagctag

SEQ ID NO: 105202 - DNA, 411 bp, Artificial Sequence
  derived and/or modified sequence
atgctggtgagcagcagcagcctgacccccttcccccctgtgaggacagcagatgacaccccaccagaagattccatccccctggtgtttcctgagctggaccagcagctgcagcccctgcccccctgccacgacagcgaggagagcatggaggtgttcaagcagcactgccagattgctgaggagtaccacgaggtgaagaaggagatcaccctgctggagcagaggaagaaggagctgattgccaagctggaccaggccgagaaggagaaggtggatgctgctgagctggtgcgggagtttgaggccctgacagaagaaaatagaaccctgcggctggcccagagccagtgtgtggagcagctggagaagctgcgcatccagtaccagaagaggcagggcagcagctag

SEQ ID NO: 105203 - DNA, 411 bp, Artificial Sequence
  derived and/or modified sequence
atgctggtgagcagcagcagcctgacccccttcccccccgtgcggaccgcagacgacaccccaccagaagactcaatccccctggtgtttccagagctggaccagcagcttcagcctctgccaccttgccacgactctgaagaatccatggaagttttcaaacagcactgccagatagcagaggaataccacgaagtgaaaaaggagatcacactacttgagcagagaaaaaaagagctgatcgctaagctggaccaggctgaaaaagagaaagtagacgccgctgaactcgtcagagagtttgaagctctgactgaggagaaccgcacccttcgtctcgcccaatcccagtgcgtggaacagctggagaaactgaggatccaatatcagaagcggcaaggatccagctag

SEQ ID NO: 105204 - DNA, 411 bp, Artificial Sequence
  derived and/or modified sequence
atgctggtgagctcaagtagcctcacgccattccccccagtccggaccgccgatgacacccctccggaagacagcatcccactggtctttccggaactagatcagcagttgcagcctctccccccatgtcacgactctgaggaaagcatggaggtcttcaagcagcattgccagatagccgaggagtaccacgaagtgaaaaaagagatcactctcctggaacaacggaagaaagaactaattgctaaacttgatcaggccgagaaggaaaaggtggatgctgccgaactcgtgagggagttcgaggccctcacggaagaaaacagaacactgcgtctggcccagtcacagtgcgtggaacagttggagaagctccgtatccagtaccagaaacggcagggtagctcttag

SEQ ID NO: 105205 - DNA, 411 bp, Artificial Sequence
  derived and/or modified sequence
atgctggtgagcagcagcagcctgacccccttcccccccgtgagaaccgccgacgacaccccccccgaggacagcatccccctggtgttccccgagctggaccagcagctgcagcccctgcccccctgccacgacagcgaggagagcatggaggtgttcaagcagcactgccagatcgccgaggagtaccacgaggtgaagaaggagatcaccctgctggagcagagaaagaaggagctgatcgccaagctggaccaggccgagaaggagaaggtggacgccgccgagctggtgagagagttcgaggccctgaccgaggagaacagaaccctgagactggcccagagccagtgcgtggagcagctggagaagctgagaatccagtaccagaagagacagggcagcagctag

SEQ ID NO: 105206 - DNA, 438 bp, Artificial Sequence
  derived and/or modified sequence
atggtccaactcattgctcccctggaggtcatgtggaacgaggcagcagacctgaaacccctggcactgtcgagaaggttggaatgcagtggcggcatcatggcccactactcccctgatctcctaggccctgaaatggaatcacgttatttcgctcaggtgggtctcgaacatctggcaagcagcagccctcctgcctttggttttctgaaatgcctggattattccatctctgtgctgtgctccgccaccagcctcgccatgctggaggacaatcctaaagtaagtaaattggctacaggcgactggatgctgacgttgaagcccaaatcgattaccgtccctgtggagattcccagctcacctctagccggacgaccgcgaaggcggcggcggctacggtgcccccatgatcagcattcacaggggacttgttag

SEQ ID NO: 105207 - DNA, 135 bp, Artificial Sequence
  derived and/or modified sequence
atggtccagcttatcgcgcctttggaggtcatgtggaatgaagccgcggacctgaaacccctcgctctttctcggaggcttgagtgcagcggtggaattatggcccactactccccggacctcctgggaccctag

SEQ ID NO: 105208 - DNA, 438 bp, Artificial Sequence
  derived and/or modified sequence
atggtgcagctgattgcccccctggaggtgatgtggaatgaagctgctgacctgaagcccctggccctgagccggcggctggagtgcagcggcggcatcatggcccactacagcccagacctgctgggccctgagatggagagccgctactttgcccaggtgggcctggagcacctggccagcagcagccccccagccttcggcttcctgaagtgcctggactacagcatctctgtgctgtgcagcgccaccagcctggccatgctggaggacaaccccaaggtgtccaagctggccaccggggactggatgctgaccctgaagcccaagagcatcaccgtgcctgtggagatccccagcagccccctggccggccggcccaggagaagaagaaggctgcgctgcccccatgaccagcacagccagggcacctgctag

SEQ ID NO: 105209 - DNA, 135 bp, Artificial Sequence
  derived and/or modified sequence
atggtgcagctgattgcccccctggaggtgatgtggaatgaagctgctgacctgaagcccctggccctgagccggcggctggagtgcagcggcggcatcatggcccactacagcccagacctgctgggcccctag

SEQ ID NO: 105210 - DNA, 438 bp, Artificial Sequence
  derived and/or modified sequence
atggtgcagctgatcgcccccctggaggtgatgtggaacgaggccgcagacttgaagcccctcgccctgtctaggagactggaatgcagcggaggaatcatggctcattacagccctgacctgctcggcccagaaatggaaagcagatatttcgctcaggtcgggttagagcacttggcctcatcttctccccctgcatttggctttttaaaatgcctagattactctatttcggtcctctgctcagcgaccagcttagcgatgctcgaggacaatcccaaggtaagtaaactggcaacaggagactggatgttgactttaaaacctaagagtatcacagtaccagttgaaataccatcaagcccactggccggaagaccaagacggagaagacgcctgcggtgcccccacgaccagcactcccaaggcacctgctag

SEQ ID NO: 105211 - DNA, 135 bp, Artificial Sequence
  derived and/or modified sequence
atggtgcagctgatcgcccccctggaggtgatgtggaacgaggccgccgacctgaagccattggcgttatcaaggcgcctggagtgctcaggtggaattatggcccactactcaccggatcttcttggcccatag

SEQ ID NO: 105212 - DNA, 438 bp, Artificial Sequence
  derived and/or modified sequence
atggtccaactcatagctccactcgaggtgatgtggaatgaagccgctgacctcaaaccccttgcactgtcccggaggcttgagtgcagtggcggaatcatggcccactactcgcccgatctacttggaccagagatggagtctagatactttgcccaggtgggccttgagcatctggcctccagttcacctcctgcttttgggttcctcaagtgtttggactactctatctcggtgctatgttccgccacctccctcgcaatgctggaggataaccctaaggtatctaagctggctacaggcgactggatgctgacactcaaaccgaagagtatcaccgtgcctgttgagatccctagttcaccccttgctggcaggcccagaagacgccgacgattgaggtgcccccatgaccagcactctcagggcacgtgctag

SEQ ID NO: 105213 - DNA, 135 bp, Artificial Sequence
  derived and/or modified sequence
atggtgcagctgatagcccctcttgaagtcatgtggaacgaggctgctgacctcaaaccactcgctctctccaggagactcgaatgttctgggggtattatggcccactattctccagatctcctgggaccttag

SEQ ID NO: 105214 - DNA, 577 bp, Artificial Sequence
  derived and/or modified sequence
gccccggttcctgcccgcacctctccctccacacctccccgcaagctgagggagccggctccggcctcggccagcccaggaaggcgctcccacagcgcagtggtgggctgaagggctcctcaagtgccgccaaagtgggagcccaggcagaggaggcgccgagagcgagggagggctgtgaggactgccagcacgctgtcacctctcaatagcagcccaaacagattaagacatgggagatgtacaagggcagccgtggggctggcaacagcttcgtaatcctggcttcctgctttctgggtcaaagccctggtggtgtgttcttgatatcggtccatctagtggcgttgtttgattcctcccaccttgctgatcattcgtagtgtagcccccaaggtgaaagacaacttgagtggttaaattactgtcatgcaaagcgactagatggttcagctgattgcacctttagaagttatgtggaacgaggcagcagatcttaagccccttgctctgtcacgcaggctggaatgcagtggtggaatcatggctcactacagccctgacctcctgggcccag

SEQ ID NO: 105215 - DNA, 438 bp, Artificial Sequence
  derived and/or modified sequence
atggtgcagctgatcgcccccctggaggtgatgtggaacgaggccgccgacctgaagcccctggccctgagcagaagactggagtgcagcggcggcatcatggcccactacagccccgacctgctgggccccgagatggagagcagatacttcgcccaggtgggcctggagcacctggccagcagcagcccccccgccttcggcttcctgaagtgcctggactacagcatcagcgtgctgtgcagcgccaccagcctggccatgctggaggacaaccccaaggtgagcaagctggccaccggcgactggatgctgaccctgaagcccaagagcatcaccgtgcccgtggagatccccagcagccccctggccggcagacccagaagaagaagaagactgagatgcccccacgaccagcacagccagggcacctgctag

SEQ ID NO: 105216 - DNA, 135 bp, Artificial Sequence
  derived and/or modified sequence
atggtgcagctgatcgcccccctggaggtgatgtggaacgaggccgccgacctgaagcccctggccctgagcagaagactggagtgcagcggcggcatcatggcccactacagccccgacctgctgggcccctag

SEQ ID NO: 105217 - DNA, 2207 bp, Artificial Sequence
  derived and/or modified sequence
ccgcgccggaggacgagcctcggtcatcgcgctgccctcccaggttcaacaggctacccatgtgcccgctccagtaagcgtgcaaccagcccggtcagtcccagggactttaccggctaggagacaccttgaacgtccccagcgcgactcccacaaactgccttgactctttaacgcttcctcgctggcgcccattgggccaggcgtttacgtcatcgctgcgcgccgggcggcggcgacttcccgctccttgactctgacgtcagagcggcgccggcctcggcggctgaggaaagcaggaggaggtggcggcggcgggaagatgctgctctttggcgtaaattgcaatcgattagggatcgtttctcagaatcaagttagaagtgagagttcagataagtgaggccgccattgctgctttgaacacctcagaaggggagaatggatttatcaggagtgaaaaagaagagcttgctaggagtcaaagaaaataataaaaagtccagcactagggctccttcacctaccaaacgcaaagaccgctcagatgagaagtccaaggatcgctcaaaagataaaggggccaccaaggagtcgagtgagaaggatcgcggccgggacaaaacccgaaagaggcgcagcgcttccagtggtagcagcagtaccaggtctcggtccagctcgacttccagctcaggctccagcaccagcactggctcaagcagtggctccagctcttcctcagcatccagccgctcaggaagctccagcacctcccgcagctccagctctagcagctcttctggctctccaagtccttctcggcgcagacacgacaacaggaggcgctcccgctccaaatccaaaccacctaaaagagatgaaaaggagaggaaaaggcggagcccatctcctaagcccaccaaagtgcacattgggagactcacccggaatgtgacaaaggatcacatcatggagatattttccacctatgggaaaattaaaatgattgacatgcccgtggaaaggatgcatccccatctgtccaaaggctatgcgtacgtagagtttgagaatccagatgaagccgagaaggcgctgaagcacatggatggaggacaaattgatggccaggagatcactgccaccgccgtgctggccccctggcctaggccaccccccaggagattcagccctcccaggagaatgttgccaccaccgcctatgtggcgcaggtctcccccacggatgaggagaaggtcccgctccccgaggcgcaggtcccccgtgcgccggagatcacggtccccgggccgccgccgccacaggagccgctccagctccaactcctcccgataaacaggccactgaagctctcgcccctgtaacttataccccacccagctcagttttgtcacttttctagccaaaggaagaccagtaggaaagcaaacccttgactctggcaggatttgcaggcagcaggcagcacccctctgccagccgggccccggctgcagaagtgctgttggtttggatgctgtgtgcctgtcaagattccctccggttttctggctagaaagctcatccgtttccggtttctaagagtcagttcagtggcagagccaccagggaaaagtgaggctcttgggggtggtttgaccctgcttacctgggagcacacttttcccttccccgatgacctgggatggtggccaggccgtgcccttgctgttgctgggcagtgtccttttggaaagggagctgccccaggctttagtgcagctgccaaccctgttaggcctggcctctcgaggcctcttctgacctcaagggtcacaccccctcaaagatcctctcacccatggtagttgctgctcgtggttctgtctgtccgtgcaccgatgcacacaccgcaccccaccactgtactctgaaattggcgagtgagtggagagccagctctgcggagtcatcacgcagccatggttgtgcctgccgttcatggtggtctttcaggttatcttggcaacatgtacattgcttttattttttttcttttttgctttcattgtacagtcagtactataaaatttctcttttgagttttatacctttgtagcattttagatgacattgtgtttgtactttgttgtgtagagtggaagaattgtgttgaataaacccaagatcggaatgcaaatcta

SEQ ID NO: 105218 - DNA, 1271 bp, Artificial Sequence
  derived and/or modified sequence
ggcgccggcctcggcggctgaggaaagcaggaggaggtggcggcggcgggaagatgacgcgcacctttccggaggatgggggaggtaaccgaggtcctgagccggtacctgaacttgggctgctctttggcgtaaattgcaatcgattagggatcgtttctcagaatcaagttagaagtgagagttcagataagtgaggccgccattgctgctttgaacacctcagaaggggagaatggatttatcaggagtgaaaaagaagagcttgctaggagtcaaagaaaataataaaaagtccagcactagggctccttcacctaccaaacgcaaagaccgctcagatgagaagtccaaggatcgctcaaaagataaaggggccaccaaggagtcgagtgagaaggatcgcggccgggacaaaacccgaaagaggcgcagcgcttccagtggtagcagcagtaccaggtctcggtccagctcgacttccagctcaggctccagcaccagcactggctcaagcagtggctccagctcttcctcagcatccagccgctcaggaagctccagcacctcccgcagctccagctctagcagctcttctggctctccaagtccttctcggcgcagacacgacaacaggaggcgctcccgctccaaatccaaaccacctaaaagagatgaaaaggagaggaaaaggcggagcccatctcctaagcccaccaaagtgcacattgggagactcacccggaatgtgacaaaggatcacatcatggagatattttccacctatgggaaaattaaaatgattgacatgcccgtggaaaggatgcatccccatctgtccaaaggctatgcgtacgtagagtttgagaatccagatgaagccgagaaggcgctgaagcacatggatggaggacaaattgatggccaggagatcactgccaccgccgtgctggccccctggcctaggccaccccccaggagattcagccctcccaggagaatgttgccaccaccgcctatgtggcgcaggtctcccccacggatgaggagaaggtcccgctccccgaggcgcaggtcccccgtgcgccggagatcacggtccccgggccgccgccgccacaggagccgctccagctccaactcctcccgataaacaggccactgaagctctcgcccctgtaacttataccccacccagctcagttttgtcacttttctagccaaaggaagaccagtaggaaagcaaacccttgactctggcaggatttgca

SEQ ID NO: 105219 - DNA, 2010 bp, Artificial Sequence
  derived and/or modified sequence
ggcccgcgggactcagaccagcggggagcgcggcctccgcccttggggccctcccgccgggccggagacccaagcccccaacgccaggccctgccctggaagcgctcgcggcccggcgcctggacgggggagttgctgctctttggcgtaaattgcaatcgattagggatcgtttctcagaatcaagttagaagtgagagttcagataagtgaggccgccattgctgctttgaacacctcagaaggggagaatggatttatcaggagtgaaaaagaagagcttgctaggagtcaaagaaaataataaaaagtccagcactagggctccttcacctaccaaacgcaaagaccgctcagatgagaagtccaaggatcgctcaaaagataaaggggccaccaaggagtcgagtgagaaggatcgcggccgggacaaaacccgaaagaggcgcagcgcttccagtggtagcagcagtaccaggtctcggtccagctcgacttccagctcaggctccagcaccagcactggctcaagcagtggctccagctcttcctcagcatccagccgctcaggaagctccagcacctcccgcagctccagctctagcagctcttctggctctccaagtccttctcggcgcagacacgacaacaggaggcgctcccgctccaaatccaaaccacctaaaagagatgaaaaggagaggaaaaggcggagcccatctcctaagcccaccaaagtgcacattgggagactcacccggaatgtgacaaaggatcacatcatggagatattttccacctatgggaaaattaaaatgattgacatgcccgtggaaaggatgcatccccatctgtccaaaggctatgcgtacgtagagtttgagaatccagatgaagccgagaaggcgctgaagcacatggatggaggacaaattgatggccaggagatcactgccaccgccgtgctggccccctggcctaggccaccccccaggagattcagccctcccaggagaatgttgccaccaccgcctatgtggcgcaggtctcccccacggatgaggagaaggtcccgctccccgaggcgcaggtcccccgtgcgccggagatcacggtccccgggccgccgccgccacaggagccgctccagctccaactcctcccgataaacaggccactgaagctctcgcccctgtaacttataccccacccagctcagttttgtcacttttctagccaaaggaagaccagtaggaaagcaaacccttgactctggcaggatttgcaggcagcaggcagcacccctctgccagccgggccccggctgcagaagtgctgttggtttggatgctgtgtgcctgtcaagattccctccggttttctggctagaaagctcatccgtttccggtttctaagagtcagttcagtggcagagccaccagggaaaagtgaggctcttgggggtggtttgaccctgcttacctgggagcacacttttcccttccccgatgacctgggatggtggccaggccgtgcccttgctgttgctgggcagtgtccttttggaaagggagctgccccaggctttagtgcagctgccaaccctgttaggcctggcctctcgaggcctcttctgacctcaagggtcacaccccctcaaagatcctctcacccatggtagttgctgctcgtggttctgtctgtccgtgcaccgatgcacacaccgcaccccaccactgtactctgaaattggcgagtgagtggagagccagctctgcggagtcatcacgcagccatggttgtgcctgccgttcatggtggtctttcaggttatcttggcaacatgtacattgcttttattttttttcttttttgctttcattgtacagtcagtactataaaatttctcttttgagttttatacctttgtagcattttagatgacattgtgtttgtactttgttgtgtagagtggaagaattgtgttgaataaacccaagatcggaatgc

SEQ ID NO: 105220 - DNA, 918 bp, Artificial Sequence
  derived and/or modified sequence
atggacctgtcaggggtaaaaaagaaatccttattaggagtgaaagagaataacaagaaatctagcactagggcgcctagcccaactaagaggaaggaccggtcggacgaaaagagcaaggaccggtccaaggacaaaggtgccaccaaagagagcagcgagaaagaccgggggcgtgacaaaacgcgtaagaggcgatccgctagtagcgggagttcctctacaagatcaaggtcttcttccactagttcaagtgggagctcgacgtccactggctccagtagcggatccagttcatcctccgcgagttcacgaagtggcagctcttccacgtcccgatcatccagttctagctctagttctggttctccctcccccagcaggaggcgccacgataaccgacgaagaagcagatctaaatctaaacctcccaaaagggacgagaaggaacgcaaaagacgctccccgtctcccaagccgacaaaagttcacattggaaggttgactaggaacgtgactaaagatcacattatggagatattcagcacctacggaaagatcaaaatgatagatatgccagtggagaggatgcatccccatttgtctaagggctacgcctacgtggagttcgaaaacccggacgaagcagaaaaggcactaaagcacatggacggtggacagatcgacggccaggagataacggccactgcggtactcgctccatggccccgccctccgccacgacggtttagcccccccagacggatgctccctcccccccccatgtggagacgcagtccccctcggatgcgacgtcgttctcggtctcctcgcagacgcagccctgtgcgcagacggtccaggtctcctggacggcggaggcaccgctctcgatcttcttctaactcgagcaggtag

SEQ ID NO: 105221 - DNA, 918 bp, Artificial Sequence
  derived and/or modified sequence
atggacttatctggggtgaagaagaagtccctgctcggagtgaaagagaacaacaaaaagagtagtaccagggccccaagccccaccaaacgcaaggaccgttccgatgaaaaaagtaaggacagaagtaaggacaaaggcgctacaaaggagtcttctgaaaaggatagaggcagggacaagactcgaaaaagaaggagcgcaagctctgggagttcctctacccgctccagatcttcaagcaccagcagctctgggtcttcgacttccacgggatcaagctccggaagttcttcatcatccgcaagcagcagatcagggtcctcctccactagccgatcttctagttcttcctcctcgtcaggttccccgtcccctagtcgtcgccggcatgataaccgtcggcgatctcggtctaaaagcaaacctcccaagcgggacgaaaaggaacggaaacgtaggagtcccagtcccaagccaactaaagtccatataggcagattgacacggaacgtgaccaaggaccacataatggagatctttagtacatatggcaagattaaaatgatcgacatgcctgtcgagaggatgcatccacatctttccaagggatatgcctatgtcgaatttgagaacccggacgaggctgaaaaggctctcaaacatatggatggcggccagattgacgggcaggagatcactgccactgccgttttagctccctggccacggcctccccctaggagattcagccctccacggcgcatgctgccccctcccccaatgtggcgcagaagtccacccaggatgcgtagaaggagtcgctctccacggcgaaggagtcccgttaggcggaggtcccggagtcccggcagacggcgacaccgtagcaggtcttccagtaattcaagtcgatag

SEQ ID NO: 105222 - DNA, 918 bp, Artificial Sequence
  derived and/or modified sequence
atggacctgtccggggttaagaagaaatcattgctcggcgtcaaagaaaataataaaaagtcgagtacccgggccccctctcccactaagcgcaaagaccgtagcgacgagaagagcaaagaccgtagtaaggataagggggctactaaagagtcatcggagaaggacagaggaagagacaagaccaggaagcgcaggtctgcctctagcgggagctctagcacccgatcccggtcttccagcacatcatcatccgggagctcaaccagcaccggatcttcctccggaagttcttcatccagcgcttccagtcgatcaggatcgagctccacctctcgcagctcctcttcctctagctccagtggcagtccaagtccgtctcgccgccgccatgataatcgcaggcggtcacggagcaagtccaagccgccgaagcgtgatgaaaaggagagaaagcgaagatctccatccccaaaacctactaaggtgcacatcgggaggttaactagaaacgtaacaaaggatcacataatggagattttctcaacctatgggaagatcaaaatgatcgatatgcccgtggagagaatgcatcctcacttgtccaaggggtacgcatatgtcgagttcgaaaaccctgatgaggccgagaaagccctcaagcatatggacggggggcagatcgatggtcaagaaatcaccgctacagcagtgcttgccccttggccacgacctccacctaggcgcttttcacctcctagacgcatgttaccaccacctcctatgtggcggagatccccaccccgcatgagaagacgctcccggtctccccgtagaagatctccagtgcgcagacgtagtcgaagccctggcaggcgccggcatcgttcacgctccagttcaaacagctcccgctag

SEQ ID NO: 105223 - DNA, 918 bp, Artificial Sequence
  derived and/or modified sequence
atggacctgagcggcgtgaagaagaagagcctgctgggcgtgaaggagaacaacaagaagagcagcacccgggcccccagccccaccaagaggaaggacagaagtgatgagaagagcaaggacaggagcaaggacaagggggccaccaaggagagcagcgagaaggaccggggccgggacaagaccaggaagagaagaagtgccagcagcggcagcagcagcaccaggagccgcagcagcagcaccagcagcagcggcagcagcaccagcacaggcagcagcagcggcagcagcagcagcagcgccagcagccgcagcggcagcagcagcaccagccgcagcagcagcagcagcagcagcagcggcagccccagccccagcagaagaagacatgacaacagaagaagaagccgcagcaagagcaagccacccaagagagatgagaaggagaggaagagaagaagccccagccccaagcccaccaaggtgcacatcggccgcctgaccagaaatgtgaccaaggaccacatcatggagatcttcagcacctacggcaagatcaagatgattgacatgcctgtggagaggatgcacccccacctgagcaagggctacgcctacgtggagtttgaaaatccagatgaggccgagaaggccctgaagcacatggatggcggccagattgatggccaggagatcacagccacagctgtgctggccccctggccccggcccccaccccggcgcttcagcccccccaggaggatgctgcccccaccacccatgtggaggaggagcccccccaggatgagaagaagaagccgcagccccaggagaagaagccctgtgagaagaagaagccgcagccctggaagaagaagacacaggagccgcagcagcagcaacagcagcaggtag

SEQ ID NO: 105224 - DNA, 918 bp, Artificial Sequence
  derived and/or modified sequence
atggacctgagcggcgtgaagaagaagagcctgctgggcgtgaaggaaaacaataagaaatctagcacccgagcacctagcccaaccaagaggaaagacaggtccgacgaaaagtccaaggaccgctccaaggacaagggcgccacaaaagagtcctctgagaaggacagaggacgagataagacaagaaaacgaagatccgctagcagcggtagttcgagtacccgcagccggagttcttccacttcatcatctgggagctcaacttcaactggaagctccagcggctcctcaagctcttccgcttcctcccgctccgggtctagtagtacctccagaagcagttctagcagtagtagcagtggcagcccaagtcctagtcggagaagacacgacaatagaaggcgttcccggagcaaatcgaaaccaccgaagagagatgaaaaagaaaggaaacggaggtctccctccccgaagcctactaaagtgcacataggccggctgacccggaatgtgaccaaggatcatataatggaaatcttctccacctatggcaagattaagatgatcgatatgcctgtcgaaagaatgcatccccatctgagcaagggctacgcctatgtcgagttcgaaaaccctgatgaggcggaaaaggccctgaagcatatggacggcggacagatcgacggtcaggagattactgctacagcagtactggctccatggcctcgtcccccgccccgtcggttttcgcctccaaggcgcatgctgccccctcctcctatgtggaggcgcagccccccgcgtatgagaagaaggtcgagatcacctcgacgtaggtctcctgtaagacgcagatctaggtcacctggtcgcagaagacataggtccagaagctccagcaattcttcccgctag

SEQ ID NO: 105225 - DNA, 918 bp, Artificial Sequence
  derived and/or modified sequence
atggacctgagcggcgtgaagaagaagagcctgctgggcgtgaaggaaaacaataaaaaatcaagcaccagggctccttcacctacgaagaggaaggaccggagcgatgagaaatcgaaggaccgatccaaagacaagggggctacaaaggaatctagcgagaaagacaggggcagagacaagacacggaaacgccgcagtgcttcatctggctcatcatctacccgatcgcggtcctcctctacatctagctctggctcgagcacttccacaggaagtagctccggttcaagtagctcaagtgcctcttcaaggagcggctcctcatccacgtcacggtctagtagcagctctagtagtagtggatcgccttccccaagtcgccgtcgccatgacaacagaaggcgtagccgatctaaaagtaaacctcccaagcgcgatgaaaaggaaaggaagagacgcagcccttcgcctaagcccaccaaggtgcacatcggtagactgacgcgcaacgtcaccaaagaccacattatggaaatctttagtacatatggtaagataaaaatgatcgatatgcctgtggagcgcatgcaccctcacctgtccaagggttacgcttatgtggagttcgaaaaccccgacgaagccgagaaagctttaaagcacatggacggtggtcagatcgacggccaggaaattactgcaactgctgtcctcgcaccgtggcctagacccccacctaggaggttctctccccctaggcgtatgctaccacccccaccgatgtggcgtcggtcaccccccaggatgcgtcggcgtagtcgctcccctcggcgacggtcccctgtgaggcggcgcagccggtctcccggccgccgtcggcatcgcagcaggtcatcttccaattcctccaggtag

SEQ ID NO: 105226 - DNA, 918 bp, Artificial Sequence
  derived and/or modified sequence
atggacctgagcggcgtgaagaagaagagcctgctgggcgtgaaggagaataataaaaagtcctctacccgggctccaagcccaacaaagagaaaagatcgctctgacgaaaaatctaaggaccgtagcaaggataaaggagccaccaaggagtcctcggagaaggatcggggcagagacaagacccgaaagaggagatcagccagctctggttcaagctcaacccgaagtcgcagttccagcacgagtagcagtggtagttctacatctacgggctcctcctctgggagtagctcatcatctgcctctagccggtccggatcaagttctacatcgcgttctagttcctcttcctcgtcctccgggtccccaagcccctcacggaggcggcacgacaatagacgcagatctagatctaaaagcaaacctccgaaaagagatgaaaaggagcgtaagagaaggagcccgtctccaaaacctactaaggtgcatattgggagattgactcgtaatgtgacgaaggatcacattatggaaattttctcaacgtatgggaaaattaaaatgatcgacatgcccgtggagagaatgcacccacacctatccaaagggtacgcatacgtcgaatttgagaatcccgacgaggcagagaaagccctgaagcacatggacggcggacagatcgacggacaagagatcacagcgactgccgtgttggccccatggccacgaccgcctcctaggcggttttcgccaccaagaagaatgctgccgcctccccctatgtggcgaagatcccctcccagaatgaggcggcggagcaggagccctcggcggagatcaccagtgcggagacgcagtcgaagccccggaaggaggagacatagatcccgctcttcgagtaactcctcccggtag

SEQ ID NO: 105227 - DNA, 918 bp, Artificial Sequence
  derived and/or modified sequence
atggacttatccggggttaagaagaaatcactgctgggtgtgaaggagaacaacaagaagagctccaccagggcgccatccccaactaagcgcaaagaccgttccgacgagaaatccaaagacagatcaaaagacaagggggctaccaaagaaagcagtgaaaaggatcgaggaagggataagacacgcaaaaggcgaagcgcttcatccgggagctccagtacacggtcacgaagctccagtacgagctcctctggaagttccacttccaccggatccagtagcggatcttcgtcgtcgagcgcatcttccaggtccggtagttcctcaactagccggtcttcctccagctccagcagttccggatctcctagtcccagcaggcggcgtcacgacaaccggagacgctcgaggtccaagagcaaacccccaaagagagacgagaaggagcgcaaaaggcgcagcccctctccaaagccaacgaaggtgcacatcgggcgattgacaagaaacgtcacaaaagatcacatcatggagatcttctcgacttacgggaagatcaagatgattgacatgcctgtggagcggatgcacccacacttaagtaagggctacgcttacgtggaatttgagaaccctgatgaggcggagaaggccctcaagcatatggacgggggtcaaatcgacgggcaggaaatcactgccacagcagtacttgccccatggccccgacctccaccgagacggttctctccccctcgacgaatgctgccgcctcctcccatgtggagacgtagcccacctaggatgcggcgtcggtcgcggagcccaaggcgccgaagccctgttaggaggcgcagcaggagtcctgggcgacggagacaccgttctcgcagcagcagcaacagctcgcgttag

SEQ ID NO: 105228 - DNA, 918 bp, Artificial Sequence
  derived and/or modified sequence
atggacttgtccggggttaagaaaaaaagtctcctcggagttaaggaaaataacaagaaaagctcaaccagagctccttcaccaaccaaacggaaagacaggtcggacgagaagagcaaagacagaagtaaagacaagggggcaaccaaagagagctccgaaaaagatagaggtagagacaagacaaggaagcggagatcagcttcaagcgggtcgtcctctacgaggagccgatcttccagcacctcaagcagcggatccagcaccagcacaggttcatccagtggaagctcatccagttccgcatcatcccgctctgggtcatcaagcaccagccgaagctcaagttcttcctcctcctcaggtagtccctctccatcaagacggaggcatgataaccgacgacgatctcggagtaaatccaagccccctaaaagagatgagaaagaacggaaacgcaggagcccatctcctaaacccacgaaagtgcatatcgggagactgaccagaaacgtcactaaagaccatataatggagatctttagcacttacgggaagatcaaaatgattgacatgcctgtggagaggatgcaccctcatttgtccaagggatatgcctatgtggagtttgagaacccagacgaagctgagaaagccctgaaacatatggacggcggtcagatcgacggccaagaaattacagctactgcggtgctcgcaccttggcctcgaccccctccgagacgcttcagcccccctcgacgaatgttgcctcctccacctatgtggcgccgaagtcctcctcgaatgcgcagaagatctcgttcgcctcggaggcgatccccagtccgccgaaggtcaagaagcccaggaaggcgaaggcaccgcagtagatcctcttcaaactcctccaggtag

SEQ ID NO: 105229 - DNA, 918 bp, Artificial Sequence
  derived and/or modified sequence
atggatttgagcggggtgaagaaaaagtcactgttgggggtgaaggaaaacaacaagaagtcttccacccgcgctccgagccccactaagcgcaaagataggtcagatgagaaaagtaaggatagatctaaggacaagggagcaactaaggaatcatccgagaaggaccgcggacgtgacaagacgcgcaaaaggaggagtgcctcttcaggatcctcctcaaccaggagcaggtcttcatctacttcatcctctggcagctctactagcactggatcttccagcggctcatctagttccagtgcatcctcgcggtccggatctagtagtacctctaggtcttcttcctcatcctcctcctccgggtcaccctcaccaagccgcaggaggcacgataataggaggaggtcccgttcaaaaagcaagccccctaaaagggatgagaaagagcggaagcggcgtagcccctctcctaagcccaccaaggttcatatcgggagacttaccaggaacgtgaccaaagatcacattatggaaattttttctacatatggcaagataaaaatgattgacatgcccgtagaacgaatgcacccgcacctgtccaaggggtacgcctatgtggagtttgagaacccagatgaggctgagaaggcgctcaaacatatggatggcggtcagatagacggtcaggaaatcaccgcaacagctgtcctggctccatggcccaggcctccacccagacgtttctcccctcctagacgaatgcttcccccaccacccatgtggaggcgaagccctccccgaatgaggcgaaggagccggtcccctagacggagatccccggtgcgccgaagaagcaggagccccggacgccgtagacatcgctctcgaagtagttccaactcctccagatag

SEQ ID NO: 105230 - DNA, 918 bp, Artificial Sequence
  derived and/or modified sequence
atggacctgagcggcgtgaagaagaagagcctgctgggcgtgaaggagaacaacaagaagagcagcaccagagcccccagccccaccaagagaaaggacagaagcgacgagaagagcaaggacagaagcaaggacaagggcgccaccaaggagagcagcgagaaggacagaggcagagacaagaccagaaagagaagaagcgccagcagcggcagcagcagcaccagaagcagaagcagcagcaccagcagcagcggcagcagcaccagcaccggcagcagcagcggcagcagcagcagcagcgccagcagcagaagcggcagcagcagcaccagcagaagcagcagcagcagcagcagcagcggcagccccagccccagcagaagaagacacgacaacagaagaagaagcagaagcaagagcaagccccccaagagagacgagaaggagagaaagagaagaagccccagccccaagcccaccaaggtgcacatcggcagactgaccagaaacgtgaccaaggaccacatcatggagatcttcagcacctacggcaagatcaagatgatcgacatgcccgtggagagaatgcacccccacctgagcaagggctacgcctacgtggagttcgagaaccccgacgaggccgagaaggccctgaagcacatggacggcggccagatcgacggccaggagatcaccgccaccgccgtgctggccccctggcccagacccccccccagaagattcagcccccccagaagaatgctgccccccccccccatgtggagaagaagcccccccagaatgagaagaagaagcagaagccccagaagaagaagccccgtgagaagaagaagcagaagccccggcagaagaagacacagaagcagaagcagcagcaacagcagcagatag

SEQ ID NO: 105231 - DNA, 537 bp, Artificial Sequence
  derived and/or modified sequence
gagctgagttcccaaaagactggcggaaatcttgacaggcacactgcctcaaagccaaccgctctgctacagcctggcccaggctggcaacgtggcgctgcttgttgtttacagatccttcccgagtcacgagtgtgtttccctaccgggctcccactggctcggaaagtcactaaacttagctgggtaggttataaactgcaaggaagagagcttcagtggcctgtctaccgcgaagaactggaactggagcgcctgctctggcgtaggcgtcccggagatcgggacttgagaaggactggggatttacgactcggggagagagatctgttgcttatcagaggaggagatctgagacacatcgggggaggtggtaatatcctgctcgggggactaaacttactgggaggcggactcggtcagggggcatccactgccgtggcagtgattagctggcccagcatatgcccacctccaagcatgtgtttcagcgctttctccgcaagctctggattttccaactcaacctacgcatag

SEQ ID NO: 105232 - DNA, 537 bp, Artificial Sequence
  derived and/or modified sequence
gagctttctagccagaaaaccggagggaatcttgacaggcacacagcatccaaaccaacagcacttctgcagccggggcccggctggcagaggggtgctgcctgctgcctgcaaatcctgccagagtcaagggtttgctttcctactggtcttcctttggctagaaaagtgacaaaactgagctgggtggggtataagttacaggggcgagagcttcagtggcctgtttatcgggaggagttggagctggagcggctcctgtggcggcggcggcccggggaccgtgatctccggcgcacgggggacctgcgcctcggggagcgggaccttctcctcatccgtgggggagacctgcgccacataggcggtggtggcaacattctcctgggagggctgaatctcctggggggtggcctaggccagggggccagcacggcggtggcagtgatctcctggccatcaatttgtcctcctccatccatgtgcttcagcgccttctcggcttcatctggattctcaaactctacgtacgcatag

SEQ ID NO: 105233 - DNA, 537 bp, Artificial Sequence
  derived and/or modified sequence
gaattgtcatcacaaaaaacaggcggcaatctggatagacacaccgcaagcaagccaactgctctgcttcagccaggccctgggtggcaacggggggcagcatgctgcctacaaatcctgcctgagtcaagagtttgtttcccaaccggactgccgttagcacgaaaggtgacaaaattgagttgggtcggttacaagttacagggacgagaactgcagtggcccgtttaccgagaggaacttgaactggaaaggctgttgtggagacggcggccaggagaccgggacctgagaagaacaggggaccttcgtctcggtgagagagacctgcttctgatccgcgggggggatttgaggcatatcggagggggcggaaacatccttctgggcggcctgaacctcctcgggggcggtctgggccagggggcctccactgccgtggccgtgataagctggccaagcatttgtcctcccccttccatgtgcttttcagctttttcagctagctcgggttttagcaacagcacgtacgcctag

SEQ ID NO: 105234 - protein, 983 aa, Artificial Sequence
  derived and/or modified sequence
MVSKMIIENFEALKSWLSKTLEPICDADPSALAKYVLALVKKDKSEKELKALCIDQLDVFLQKETQIFVEKLFDAVNTKSYLPPPEQPSSGSLKVEFFPHQEKDIKKEEITKEEEREKKFSRRLNHSPPQSSSRYRENRSRDERKKDDRSRKRDYDRNPPRRDSYRDRYNRRRGRSRSYSRSRSRSWSKERLRERDRDRSRTRSRSRTRSRERDLVKPKYDLDRTDPLENNYTPVSSVPSISSGHYPVPTLSSTITVIAPTHHGNNTTESWSEFHEDQVDHNSYVRPPMPKKRCRDYDEKGFCMRGDMCPFDHGSDPVVVEDVNLPGMLPFPAQPPVVEGPPPPGLPPPPPILTPPPVNLRPPVPPPGPLPPSLPPVTGPPPPLPPLQPSGMDAPPNSATSSVPTVVTTGIHHQPPPAPPSLFTADTYDTDGYNPEAPSITNTSRPMYRHRVHAQRPNLIGLTSGDMDLPPREKPPNKSSMRIVVDSESRKRTIGSGEPGVPTKKTWFDKPNFNRTNSPGFQKKVQFGNENTKLELRKVPPELNNISKLNEHFSRFGTLVNLQVAYNGDPEGALIQFATYEEAKKAISSTEAVLNNRFIKVYWHREGSTQQLQTTSPKVMQPLVQQPILPVVKQSVKERLGPVPSSTIEPAEAQSASSDLPQVLSTSTGLTKTVYNPAALKAAQKTLLVSTSAVDNNEAQKKKQEALKLQQDVRKRKQEILEKHIETQKMLISKLEKNKTMKSEDKAEIMKTLEVLTKNITKLKDEVKAASPGRCLPKSIKTKTQMQKELLDTELDLYKKMQAGEEVTELRRKYTELQLEAAKRGILSSGRGRGIHSRGRGAVHGRGRGRGRGRGVPGHAVVDHRPRALEISAFTESDREDLLPHFAQYGEIEDCQIDDSSLHAVITFKTRAEAEAAAVHGARFKGQDLKLAWNKPVTNISAVETEEVEPDEEEFQEESLVDDSLLQDDDEEEEDNESRSWRR

SEQ ID NO: 105235 - DNA, 3621 bp, Artificial Sequence
  derived and/or modified sequence
tagcggccgcgacctgggcgggcggaggagtgtgacgggccttagggccgctgtggatggtttctaaaatgatcattgaaaacttcgaggcactcaagtcctggctcagcaagactctcgagcccatctgtgatgcagatccatccgccctagcaaaatatgttctggctttggtaaagaaagacaaaagtgaaaaagagttaaaggcattatgtattgatcagctggatgtatttcttcagaaagagacacagatatttgtggaaaaactttttgatgctgtgaatacaaagagttacctacctcctccagagcagccatcatcaggaagcctgaaggtagaattttttccacaccaagaaaaagatataaagaaggaagagatcactaaggaggaagagcgagagaagaagttttctagaaggctaaatcacagtcctccccagtcaagctcccgatacagggaaaatagaagccgtgatgagaggaaaaaagatgatcgttctcgcaaaagagattatgatcgaaaccctcctcgaagagattcatacagagaccggtacaatagaagacgagggcggagtcgcagttatagcaggagtcgaagtcgaagttggagtaaagagaggcttcgtgagagggacagagatagaagcaggactagaagcagaagcagaacacgaagcagggaaagggatctggtaaaacctaaatatgacctggatagaacagatccattagaaaataattatactccagtctcttcggtacctagtatttcatctggccactaccctgtacctactttgagcagcactattacagtaattgctcctactcatcatggaaacaacactaccgaaagttggtctgaatttcatgaagaccaagtggaccataactcttacgtaagaccacccatgccaaagaaacggtgtagagactatgatgaaaagggtttttgtatgagaggagacatgtgtccttttgatcatggaagtgatccagtagttgtagaagatgtgaatcttcctggtatgctgcctttcccagcacagcctcctgttgttgaaggaccacctcctcctggactccccccacctccaccaattcttacacccccacctgtgaatctcaggcccccagtaccaccgccaggtccattgccacccagtctcccacctgttacaggaccaccacctccacttcctcctttgcagccatctggcatggatgctcctccaaactctgcaaccagttctgttcctactgtagtaacaactggcattcatcaccagcctcctcctgctccaccctctctttttactgcagatacatatgacacagatggctacaatcctgaagccccaagcataacaaacacttccagacctatgtatagacacagagtgcatgcacaaaggcccaacttgataggactaacatcaggggatatggatttgccacccagagaaaagcctcccaataaaagcagtatgaggatagtagtggactcagaatcaaggaaaagaaccattggttctggagagcctggagttcctacaaagaagacttggtttgataaaccaaattttaatagaacaaacagcccaggctttcagaagaaggttcaatttggaaatgaaaataccaagcttgaacttagaaaagttcctccagaattaaataatatcagcaaacttaatgaacattttagtcgatttggaaccttggttaacttacaggttgcttataatggtgatcctgaaggtgccctaatccaatttgcaacatacgaagaagcaaagaaagcaatatcaagtacggaagcagtattaaacaatcgctttattaaggtttattggcacagagaaggaagcacccaacagttacaaactacttctccaaaggtaatgcagcctttagtccagcagcccattttgcctgttgtgaagcagtcagtcaaagagcggctgggtccagtaccttcaagtactattgaacctgcagaagcccagagtgcctcttcagaccttcctcaggtgttgtctacatctactggcctaacaaaaacagtgtataatccagctgctttgaaggctgcacagaaaaccttacttgtttccacctctgcagttgataataatgaagcacagaaaaaaaaacaggaggcattgaaacttcagcaggatgtaaggaaaaggaaacaagaaattttagaaaagcacattgaaacacagaagatgttaatttcaaaactggagaaaaacaaaacaatgaagtctgaagataaagcagaaataatgaaaactttagaggttttgacaaaaaatattaccaagttgaaagatgaggtcaaagctgcttctcctggacgctgtcttccaaaaagtataaaaaccaagactcagatgcagaaggaattacttgacacagaactggatttatataagaagatgcaggctggagaagaagtcactgaacttaggagaaagtatacagaattacagctggaagctgccaaacgagggattctttcatctggtcggggcagaggaattcattcaagaggtcgaggtgcagttcatggccgaggcagggggcgagggcgagggcgaggtgtgcctggtcatgctgtggtggatcaccgtcccagggcattggagatttctgcatttacggagagcgatagagaagatcttcttcctcattttgcgcaatatggtgaaattgaagattgtcagattgatgattcctcacttcatgcagtaattacattcaagacaagagcagaagctgaagcagctgcagttcatggagctcgtttcaaagggcaagatctaaaactggcatggaataaaccagtaactaatatttcagctgttgaaacagaagaagttgagcctgatgaagaagaatttcaggaagagtctttggtggatgactcattacttcaagatgatgatgaagaagaagaggacaatgaatctcgttcttggagaagatgatttgactgatcattgatctgcatatgctagaactctacctgtgtttcattagtattatctaatgtacttttacatatttgtaaaaacaatttttggtaaaatgtgatgaagatggatttcacaaatagacaaaaaagaagaaaactaccttctgatcttgtattttgaaagattgatgtttgcattttacttcagtaaacaattgctaaagacatcacactagaaacatatgcaatgtttttattacatacttctactggacatcacagaattctttgggttctttgtaatttaatgaataggtctgaaaacttatgaccaatacttgttataacttagaggactttgttttattccaaataaggaatgaatttgcatttaaaatcttaatgaatgttttcaaaactgaatagataacatagtactctaactaaagtctccaagttatgtattataatattacatagtagtatgcttaggctttactatgtattagccttttgttggactgtgtatgtattttaccatatgggttttaatgataatggtgtatgactgctttacatgagtccttatgcatccagatgttataataaagtggaatggtctcttt

SEQ ID NO: 105236 - DNA, 2952 bp, Artificial Sequence
  derived and/or modified sequence
atggtgagcaagatgatcatcgagaacttcgaggccctgaagagctggctgagcaagaccctggagcccatctgcgacgccgaccccagcgccctggccaagtacgtgctggccctggtgaagaaggacaagagcgagaaggagctgaaggccctgtgcatcgaccagctggacgtgttcctgcagaaggagacccagatcttcgtggagaagctgttcgacgccgtgaacaccaagagctacctgcccccccccgagcagcccagcagcggcagcctgaaggtggagttcttcccccaccaggagaaggacatcaagaaggaggagatcaccaaggaggaggagagagagaagaagttcagcagaagactgaaccacagccccccccagagcagcagcagatacagagagaacagaagcagagacgagagaaagaaggacgacagaagcagaaagagagactacgacagaaacccccccagaagagacagctacagagacagatacaacagaagaagaggcagaagcagaagctacagcagaagcagaagcagaagctggagcaaggagagactgagagagagagacagagacagaagcagaaccagaagcagaagcagaaccagaagcagagagagagacctggtgaagcccaagtacgacctggacagaaccgaccccctggagaacaactacacccccgtgagcagcgtgcccagcatcagcagcggccactaccccgtgcccaccctgagcagcaccatcaccgtgatcgcccccacccaccacggcaacaacaccaccgagagctggagcgagttccacgaggaccaggtggaccacaacagctacgtgagaccccccatgcccaagaagagatgcagagactacgacgagaagggcttctgcatgagaggcgacatgtgccccttcgaccacggcagcgaccccgtggtggtggaggacgtgaacctgcccggcatgctgcccttccccgcccagccccccgtggtggagggcccccccccccccggcctgcccccccccccccccatcctgacccccccccccgtgaacctgagaccccccgtgcccccccccggccccctgccccccagcctgccccccgtgaccggcccccccccccccctgccccccctgcagcccagcggcatggacgccccccccaacagcgccaccagcagcgtgcccaccgtggtgaccaccggcatccaccaccagcccccccccgccccccccagcctgttcaccgccgacacctacgacaccgacggctacaaccccgaggcccccagcatcaccaacaccagcagacccatgtacagacacagagtgcacgcccagagacccaacctgatcggcctgaccagcggcgacatggacctgccccccagagagaagccccccaacaagagcagcatgagaatcgtggtggacagcgagagcagaaagagaaccatcggcagcggcgagcccggcgtgcccaccaagaagacctggttcgacaagcccaacttcaacagaaccaacagccccggcttccagaagaaggtgcagttcggcaacgagaacaccaagctggagctgagaaaggtgccccccgagctgaacaacatcagcaagctgaacgagcacttcagcagattcggcaccctggtgaacctgcaggtggcctacaacggcgaccccgagggcgccctgatccagttcgccacctacgaggaggccaagaaggccatcagcagcaccgaggccgtgctgaacaacagattcatcaaggtgtactggcacagagagggcagcacccagcagctgcagaccaccagccccaaggtgatgcagcccctggtgcagcagcccatcctgcccgtggtgaagcagagcgtgaaggagagactgggccccgtgcccagcagcaccatcgagcccgccgaggcccagagcgccagcagcgacctgccccaggtgctgagcaccagcaccggcctgaccaagaccgtgtacaaccccgccgccctgaaggccgcccagaagaccctgctggtgagcaccagcgccgtggacaacaacgaggcccagaagaagaagcaggaggccctgaagctgcagcaggacgtgagaaagagaaagcaggagatcctggagaagcacatcgagacccagaagatgctgatcagcaagctggagaagaacaagaccatgaagagcgaggacaaggccgagatcatgaagaccctggaggtgctgaccaagaacatcaccaagctgaaggacgaggtgaaggccgccagccccggcagatgcctgcccaagagcatcaagaccaagacccagatgcagaaggagctgctggacaccgagctggacctgtacaagaagatgcaggccggcgaggaggtgaccgagctgagaagaaagtacaccgagctgcagctggaggccgccaagagaggcatcctgagcagcggcagaggcagaggcatccacagcagaggcagaggcgccgtgcacggcagaggcagaggcagaggcagaggcagaggcgtgcccggccacgccgtggtggaccacagacccagagccctggagatcagcgccttcaccgagagcgacagagaggacctgctgccccacttcgcccagtacggcgagatcgaggactgccagatcgacgacagcagcctgcacgccgtgatcaccttcaagaccagagccgaggccgaggccgccgccgtgcacggcgccagattcaagggccaggacctgaagctggcctggaacaagcccgtgaccaacatcagcgccgtggagaccgaggaggtggagcccgacgaggaggagttccaggaggagagcctggtggacgacagcctgctgcaggacgacgacgaggaggaggaggacaacgagagcagaagctggagaagatag

SEQ ID NO: 105237 - DNA, 2952 bp, Artificial Sequence
  derived and/or modified sequence
atggtgtccaagatgataatcgagaacttcgaagcactgaagagttggctgagtaaaaccctggaacccatttgcgatgctgatccaagcgcattggctaaatacgtgctggctttggtgaaaaaggacaagtctgagaaagaacttaaagccttatgcattgaccagcttgatgttttccttcaaaaagagactcagattttcgttgaaaagcttttcgatgctgttaacacaaaaagttacctgccacccccagaacagccttccagcggatctctaaaggtagaattttttccccaccaggagaaggacatcaaaaaggaggagattactaaagaagaagagagggaaaaaaagttcagtagaaggctgaaccattcccccccacaatcctcttcccgctacagggagaacagaagccgtgatgagcgcaaaaaggacgataggtctcgaaaacgtgactacgaccgaaaccccccacggcgggatagctaccgcgacagatacaaccggcgccgcggccgctcaaggtcctacagtcggagccggtctcggtcatggtccaaagaacggctccgtgaaagagaccgggacagatcacgtacaaggtcccgatcccggacacgaagccgggaaagagacttagtcaagccaaaatacgatctggaccggacagatcctctcgagaataactacacgcccgtctccagcgtgcctagcatctcttccggtcattacccagtgcctactctgtcctccaccattacagttatcgcacctactcatcatggaaacaacaccaccgagtcttggtcagagtttcatgaggaccaggtagatcacaactcgtacgtccgcccaccaatgccgaaaaaacggtgtagggattatgacgagaaaggattttgtatgcgcggggacatgtgtccctttgaccatggctccgatcctgtggtggtggaggatgtgaatctgccaggcatgcttccatttccagcgcagccgcctgtagtggaaggaccccccccccctggcctgccccccccacctccaatcctgacaccaccccccgtaaacttaagaccgcctgtgcccccccctggcccacttcccccttccctgccccccgtgacggggcccccacctcctttaccaccactacagccctcaggcatggacgccccaccgaacagcgcgacctcctctgtcccgacggtcgtaacaaccggaattcaccaccaaccgccacccgccccaccctccctcttcacagcagatacctatgatacagatggatataacccggaggctccgtccatcaccaacacgtctaggcctatgtaccggcaccgtgtgcatgcccagaggcctaatctaatcggccttactagcggcgacatggacctcccgccacgcgaaaagcccccaaataagtctagcatgaggatagtggtggatagcgagtccagaaaacgcaccatcggatcaggcgagccaggcgtgcctacaaaaaaaacatggttcgataaaccaaactttaataggacgaattcccccggcttccaaaagaaagttcagttcggtaacgaaaataccaaactcgagctgaggaaggtgccccctgagctcaataacatttcaaaactgaacgaacactttagtagattcggcacactggttaacctgcaggttgcatataacggcgaccccgagggcgcactcatacagttcgcaacttatgaagaggcaaagaaggcgataagtagtacagaggctgtactgaataacaggttcatcaaggtctactggcaccgtgagggctctactcagcagttgcaaaccacctcccctaaagttatgcagcccttggttcaacagccgattctgcctgtggtgaagcagagcgtgaaggagcgactggggcctgtgccttcaagcacgatcgagcccgccgaggcgcagagcgcctcgagcgatctcccccaagtcctgtccacgtcgaccgggctgactaagaccgtatataatcccgccgccttgaaggccgctcagaaaaccctgttggtctcaacatctgccgtagataataatgaagcacagaagaagaaacaggaagccttgaaattgcagcaggacgtaagaaaaagaaagcaggagatccttgagaaacatatcgagactcagaaaatgcttataagtaagctggaaaagaataagacaatgaagtccgaggataaggctgagattatgaagacgttggaggttctgacaaagaacattaccaaactgaaggatgaagttaaagctgctagccctggtcgctgtcttcccaagtccatcaaaaccaaaacccagatgcagaaagagctgcttgataccgagctcgatctgtacaagaagatgcaggctggtgaagaggtcacggagctgcgtagaaaatacaccgaactgcagttggaggctgcgaaacgaggtatcctgtcaagtggtaggggccggggaatccactcccggggccgtggtgcagttcacggaaggggaagagggagggggcgcggcaggggagttcctggccatgcagttgtggatcataggccccgcgcacttgagatctccgccttcacagagtctgaccgggaggacctgctaccccattttgcgcaatacggagagatcgaagattgtcagatcgacgatagcagtctgcacgccgtgattaccttcaaaaccagggctgaggccgaagcagccgcagtccatggggccagatttaagggacaggatctgaagctggcctggaataaaccagttaccaacatctcggccgtcgaaacggaggaggtagagcccgatgaggaggagttccaggaggagtcattagtggacgacagtcttttacaggatgatgacgaagaagaggaggataacgagtcccggagctggcggcggtag

SEQ ID NO: 105238 - DNA, 2952 bp, Artificial Sequence
  derived and/or modified sequence
atggtgtccaagatgatcatcgagaactttgaggccctgaagtcctggctgagcaagaccctggagcccatctgtgatgctgaccccagcgccctggccaagtatgtgctggccctggtgaagaaggacaagtctgagaaggagctgaaggccctgtgcatcgaccagctggatgtgttcctgcagaaggagacccagatctttgtggagaagctgtttgatgctgtgaacaccaagagctacctgcccccacctgagcagcccagcagcggcagcctgaaggtggagttcttcccccaccaggagaaggacatcaagaaggaggagatcaccaaggaggaggagcgggagaagaagttcagccggcggctgaaccacagccccccccagagcagcagccgctacagagaaaatagaagcagagatgagaggaagaaggatgacaggagcaggaagagggactatgacagaaatcctccaagaagagacagctacagagaccgctacaacagaagaagaggccgcagccgcagctacagccgcagccgcagccgctcctggagcaaggagcggctgcgggagcgggaccgggacaggagcaggaccaggagccgcagcaggaccaggagccgggagcgggacctggtgaagcccaagtatgacctggacagaacagaccccctggagaacaactacacccctgtgtcctctgtgcccagcatcagcagcggccactaccctgtgcccaccctgagcagcaccatcaccgtcatcgcccccacccaccacggcaacaacaccacagagagctggagcgagttccacgaggaccaggtggaccacaacagctatgtgcggccccccatgcccaagaagcgctgccgggactatgatgagaagggcttctgcatgagaggagacatgtgcccctttgaccacggcagtgaccctgtggtggtggaggatgtgaacctgcccggcatgctgcccttccctgcccagccccctgtggtggagggccccccacctcctggcctgcccccacctccacccatcctgaccccacctcctgtgaacctgcggccccctgtgcccccacctggccccctgccccccagcctgccccctgtgacaggccccccaccacccctgccccccctgcagcccagcggcatggatgccccacccaacagcgccaccagctctgtgcccaccgtggtgaccaccggcatccaccaccagcccccaccagccccacccagcctcttcaccgctgacacctatgacacagatggctacaaccctgaggcccccagcatcaccaacaccagccggcccatgtaccgccaccgggtgcacgcccagaggcccaacctgattggcctgaccagcggggacatggacctgcccccccgggagaagccacccaacaagagctccatgagaattgtggtggacagcgagagcaggaagaggaccatcggcagcggggagcccggggtgcccaccaagaagacctggtttgacaagcccaacttcaacagaaccaacagccctggcttccagaagaaggtgcagtttggaaatgaaaacaccaagctggagctgaggaaggtgcccccagagctgaacaacatcagcaagctgaatgagcacttcagccgcttcggcaccctggtgaacctgcaggtggcctacaatggagaccctgagggcgccctgatccagtttgccacctatgaggaggccaagaaggccatcagcagcacagaggccgtgctgaacaaccgcttcatcaaggtgtactggcaccgggagggcagcacccagcagctgcagaccaccagccccaaggtgatgcagcccctggtgcagcagcccatcctgcctgtggtgaagcagagcgtgaaggagcggctgggccctgtgcccagcagcaccatcgagcctgctgaggcccagagcgccagcagtgacctgccccaggtgctgagcaccagcacaggcctgaccaagacagtgtacaacccagctgccctgaaggccgcccagaagaccctgctggtgtccaccagcgctgtggacaacaatgaggcccagaagaagaagcaggaggccctgaagctgcagcaggatgtgaggaagaggaagcaggagatcctggagaagcacatcgagacccagaagatgctgatcagcaagctggagaagaacaagaccatgaagtctgaggacaaggccgagatcatgaagaccctggaggtgctgaccaagaacatcaccaagctgaaggatgaggtgaaggccgccagccctggccgctgcctgcccaagagcatcaagaccaagacccagatgcagaaggagctgctggacacagagctggacctgtacaagaagatgcaggccggggaggaggtgacagagctgcggaggaagtacacagagctgcagctggaggccgccaagaggggcatcctgagcagcggccggggccggggcatccacagccggggccgcggggctgtgcacggccggggccggggccggggccggggccggggcgtgcccggccatgctgtggtggaccaccggccccgggccctggagatcagcgccttcacagaaagtgaccgggaggacctgctgccccactttgcccagtatggagaaattgaggactgccagattgatgacagcagcctgcacgccgtcatcaccttcaagaccagggctgaggccgaggccgctgctgtgcacggggcccgcttcaagggccaggacctgaagctggcctggaacaagcctgtgaccaacatctctgctgtggagacagaggaggtggagccagatgaggaggagttccaggaggagagcctggtggatgacagcctgctgcaggatgatgatgaggaggaggaggacaatgaaagccgctcctggaggaggtag

SEQ ID NO: 105239 - DNA, 2952 bp, Artificial Sequence
  derived and/or modified sequence
atggtgagcaagatgatcatcgagaacttcgaggccctgaagagctggctgagtaagacactggagccaatatgtgatgccgatcctagcgccttggccaagtatgtgctcgccctcgtgaaaaaagacaagtcggagaaagagctgaaggccctgtgtatcgatcagctggacgtgttcttgcagaaagaaacccaaatctttgtggagaaactattcgatgcagtgaacactaagagctacctgcccccaccagaacagccgtccagcgggagcctgaaagtggagttctttccccaccaggagaaagatattaagaaggaggagatcacaaaggaggaagaacgggagaaaaagtttagccgtaggctgaatcatagtcccccccagtctagcagccggtatcgtgagaatagatcaagggatgagcggaagaaagacgaccgctcccgcaagagggattacgatcgaaatccacccagaagagactcttatcgggatagatacaatcggagaagaggaaggtcccgatcctactcacgttccagatcaagatcgtggagcaaagagcgcttgagggaacgggatagggataggagccgtactcgtagccgttcaaggacccgatcgcgcgagagggatctggtaaagccaaagtacgacttagacagaacggatcccctggaaaacaattatacacctgtcagttcggttccttcaattagctctggccactacccagtgcccacactgtcatccacaatcacagtcatcgctccaacccaccatgggaataatacgaccgaatcgtggtccgagttccatgaagatcaggtcgatcataatagttatgtgcggcccccaatgcctaaaaaacgctgtagggattatgacgaaaagggcttctgtatgcgtggagatatgtgtcctttcgaccatgggtcagatcctgtggttgtggaggatgtgaacctcccgggcatgttaccgtttccagctcaacctcctgttgttgaaggaccgccaccccctggattgccaccccctccccccattctgacaccgccccctgtgaacttaagacctccggtgcccccacctgggccgctccccccgtcgctgccacccgttactggcccccctccacccctacctcctctccaaccatccggcatggatgcccctcccaactccgccaccagcagcgtgcccacagtggtgacgaccgggatccatcaccagccccccccagccccgccatccttattcacagctgatacctacgatactgacggctataaccccgaagccccatcaattactaacacctccaggccaatgtatcgccacagagtgcacgcacaaaggccaaatctgatcggactcacctctggtgatatggatctgcccccgcgcgagaaacccccaaataaaagctcaatgcggatcgtggtggactctgaatctcgcaagcggacaattggatctggagagcccggagttcctactaaaaagacctggtttgataaaccgaacttcaataggaccaacagcccggggttccagaaaaaggtgcagtttggtaacgaaaacaccaaactggaattgcgtaaggtcccccccgagctgaacaatatcagtaagcttaatgaacacttttcccggttcggaacccttgtgaacttgcaggtggcgtacaatggagatccagagggtgctttgatccagtttgcgacgtatgaggaggctaagaaggccatcagcagcaccgaggctgttctgaataatcggttcatcaaagtgtactggcatcgagagggatctacccaacagttgcaaactaccagtcccaaagtgatgcagccactggttcaacagcccatcctgcccgtggtcaaacagagcgtgaaggagaggctgggaccagtgcccagttctactatagagcccgccgaagcacagagtgctagctccgatctcccccaggtgctgtccacgtccacgggattgacaaagactgtatataatcctgctgcgttgaaagctgcacagaagactttgcttgtttcaacctcagcagtggacaataacgaagctcagaagaagaagcaggaggccctgaagctgcagcaagacgtgcgaaagagaaaacaggagatcctcgaaaagcacattgaaacccagaagatgctaattagcaaactggaaaagaacaagacaatgaagtctgaagacaaggctgaaataatgaagaccttggaggtactgaccaagaatataactaagctgaaagatgaggtgaaggcagcttctcccgggcgatgtctgcctaagagtattaagaccaaaacccaaatgcagaaagagcttctggataccgagttagatctgtataagaaaatgcaggccggagaagaagtcacagaactgcgcaggaaatacactgagttacagcttgaggcggcaaagcgaggaatactcagttcaggaagggggagaggaattcattcccggggccgaggagccgtacacggacggggcagaggccgcggcagaggacgaggtgtgccaggccacgccgtagttgatcaccggcctagagcgctagaaatttctgccttcaccgagagtgaccgcgaggatctcctgccacactttgctcaatatggcgagatagaagactgccagattgatgacagtagcttgcacgccgtgatcacctttaaaaccagagctgaagcggaagcggccgctgtccatggtgcgcgctttaaggggcaggacttaaagttagcttggaacaagcccgtgacaaacataagtgcggtagaaactgaggaggttgagccagacgaggaggagttccaggaggagtctctggtcgacgacagtctccttcaggacgatgatgaggaagaggaggacaacgagagccgatcctggcggaggtag

SEQ ID NO: 105240 - DNA, 2952 bp, Artificial Sequence
  derived and/or modified sequence
atggtttctaagatgatcatcgagaactttgaggccctgaagagctggctgtccaaaacacttgagccaatctgtgatgccgaccctagcgccttagcgaagtacgtgctggccctggtgaagaaggacaaatccgaaaaggaattaaaggccttatgtattgatcagctcgatgtgttcctacagaaagagacacaaattttcgtggaaaagctgtttgacgcggtgaacacgaagagctatctgcctcctcccgaacagccaagttccggcagcctcaaggtggaatttttcccccatcaggagaaggacatcaagaaggaggaaatcacaaaggaagaggaacgcgaaaagaaattttctaggcgcctgaatcacagccccccacagtcttctagcaggtatcgcgagaacaggtccagggacgagagaaaaaaggacgaccggagcagaaagcgggactacgatcgtaatccacccaggagggatagctaccgggatcgttataataggagaaggggaagatcacgatcctactccagatcaaggagtaggagctggagcaaggagcgcctgcgcgagagggaccgcgatagaagccggacccgctcaagaagtcgcacacgctctcgagaacgtgatctggtaaagcccaagtatgatttggataggactgatcccttggagaacaattacaccccagtcagctccgtgccttccatcagcagcggccactaccctgtccctactctctcctcaacaatcaccgtcattgccccaacacaccatggtaataacactaccgaaagttggtctgaattccatgaggatcaggtggatcacaactcctacgtgcgccctccgatgcccaaaaagagatgtcgggactacgatgagaaagggttttgtatgaggggcgatatgtgtccctttgatcatggctccgacccagtggtggtggaggacgtgaacctgccagggatgctgccctttccagctcagccccctgtggtcgagggacctccaccaccgggactgcctccccctccccctatattaacacccccacctgtaaacctccgtccacccgtgcctcctccaggccctctacccccatccctccctccagtaactggccctcctccacccttaccacccctccagccttccgggatggacgcacccccaaatagcgccacctcctccgttcctactgtcgtgacgacaggcattcatcaccagccaccacccgctccaccttccttatttacagcggacacatatgatacagatgggtataacccagaagcaccatctataaccaacacttctcgccctatgtatagacatcgtgtgcatgctcaaagacccaatttgatcggccttacatccggcgacatggacctgcccccaagggagaaacctcccaataagtcctccatgcgcattgtcgtagattcagagtctcgcaagagaacaatcgggagcggcgagcctggagttcctaccaaaaagacatggtttgacaaacctaacttcaaccgtactaattccccagggttccagaagaaggttcagttcggaaatgagaacaccaaattggaattgcggaaggtccctcccgaattgaataatatttcaaagctgaacgagcattttagccgctttgggacactggtaaatctgcaagtggcatataacggtgacccagagggagccttgatacaatttgcgacctatgaggaagccaaaaaggctatcagctccaccgaagctgtactgaataacagatttattaaagtatactggcaccgggagggctccacacagcagctgcagacaacatcaccgaaggtaatgcagcctctggtccagcagcccattctgccagttgtcaaacagtctgtgaaagagagactggggccagtacctagctctacaatcgagccggctgaagcgcagagcgcatcctctgacttgccacaagtcctcagcacaagtaccggtttgactaagacagtgtataaccctgccgctcttaaggccgcacagaaaactctcctggtgtccactagcgccgtggacaacaacgaggcgcagaagaagaaacaggaggctttgaaattgcagcaagacgtgcggaaacggaaacaggagatacttgagaaacatatcgagactcagaagatgctgatctcaaagctcgaaaagaataaaacaatgaagagtgaggacaaggcggagatcatgaagactctcgaagtgttgacgaagaacatcaccaagctgaaagacgaagtgaaggctgccagcccagggagatgcctcccaaaaagcatcaaaaccaaaacccagatgcaaaaggagctgttggacaccgagttagacctgtataaaaaaatgcaggcgggtgaggaggttacagagctcaggcgcaaatacacagaacttcaactggaggctgcgaaaagggggatactgtcaagcgggagggggaggggaatccatagtagaggcaggggagccgtccacggacgaggcaggggtagagggcgaggcaggggggtgcctggacatgcagtggtggatcatcgtcccagagctctcgagattagtgccttcactgagtctgacagggaggatcttctgccccactttgctcagtacggagagatcgaagattgccagatcgatgattcatctcttcacgcagtaataaccttcaagacacgggcagaagccgaagctgcggcagtgcatggagcgaggttcaaaggacaggatttgaaactggcctggaacaagcccgtgaccaacatttccgcggttgaaactgaggaggttgagccagacgaagaagaattccaggaagaaagtctagttgatgactctctgctacaggacgacgacgaggaggaggaggataatgagtctcgatcttggcgacggtag

SEQ ID NO: 105241 - protein, 258 aa, Artificial Sequence
  derived and/or modified sequence
MIPLQKDNQEEGVCPICQESLKEAVSTNCGHLFCRVCLTQHVEKASASGVFCCPLCRKPCSEEVLGTGYICPNHQKRVCRFCEESRLLLCVECLVSPEHMSHHELTIENALSHYKERLNRRSRKLRKDIAELQRLKAQQEKKLQALQFQVDHGNHRLEAGPESQHQTREQLGALPQQWLGQLEHMPAEAARILDISRAVTQLRSLVIDLERTAKELDTNTLKNAGDLLNRSAPQKLEVIYPQLEKGVSELLLQPPQKL

SEQ ID NO: 105242 - DNA, 777 bp, Artificial Sequence
  derived and/or modified sequence
atgatccccctgcagaaggacaaccaggaggagggcgtgtgccccatctgccaggagagcctgaaggaggccgtgagcaccaactgcggccacctgttctgcagagtgtgcctgacccagcacgtggagaaggccagcgccagcggcgtgttctgctgccccctgtgcagaaagccctgcagcgaggaggtgctgggcaccggctacatctgccccaaccaccagaagagagtgtgcagattctgcgaggagagcagactgctgctgtgcgtggagtgcctggtgagccccgagcacatgagccaccacgagctgaccatcgagaacgccctgagccactacaaggagagactgaacagaagaagcagaaagctgagaaaggacatcgccgagctgcagagactgaaggcccagcaggagaagaagctgcaggccctgcagttccaggtggaccacggcaaccacagactggaggccggccccgagagccagcaccagaccagagagcagctgggcgccctgccccagcagtggctgggccagctggagcacatgcccgccgaggccgccagaatcctggacatcagcagagccgtgacccagctgagaagcctggtgatcgacctggagagaaccgccaaggagctggacaccaacaccctgaagaacgccggcgacctgctgaacagaagcgccccccagaagctggaggtgatctacccccagctggagaagggcgtgagcgagctgctgctgcagcccccccagaagctgtag

SEQ ID NO: 105243 - DNA, 777 bp, Artificial Sequence
  derived and/or modified sequence
atgattccactgcagaaggacaaccaggaggaaggcgtttgcccaatctgccaggagagcctgaaagaagcagtttctacaaattgcgggcacctcttctgtcgcgtgtgtctgacacagcacgtggagaaggcatccgcttccggcgtcttctgctgccctctgtgccgtaagccatgttcagaagaagtgctggggacgggatacatctgcccgaatcatcagaaaagagtctgtcggttctgtgaggagtcacgactcctactatgtgtcgaatgcttggtttcaccggagcacatgtcccatcacgagttgacaatcgaaaatgccttgagtcactataaggagcgcttaaatagacggagtaggaagctccgaaaagacattgccgaattacaaaggctgaaagcacagcaggagaagaaactacaggctcttcagttccaggtggaccacggtaaccatagacttgaggctgggcccgaaagccagcaccagacaagagaacagttgggggcgctacctcaacagtggcttggtcaattggaacacatgcctgcagaggcggcaagaatcttggacattagtagggccgtcactcagcttagaagcttggtcatcgatctcgaacgaactgccaaagagctagacacaaacaccctcaagaatgctggcgatctcttaaacaggtccgccccccagaagctagaggtgatctacccacagctagagaagggagtatctgagctactattgcagcctccacaaaagctgtag

SEQ ID NO: 105244 - DNA, 777 bp, Artificial Sequence
  derived and/or modified sequence
atgattcccctgcagaaggacaaccaagaggagggtgtgtgccctatttgtcaggagagtctgaaggaggccgtttccacaaactgcggacacctgttttgcagggtttgtctgactcaacacgtggagaaggcctccgccagcggcgtcttttgttgcccattgtgcagaaagccgtgcagtgaggaggtcctgggtaccgggtatatttgtcctaaccaccagaagcgggtatgtagattctgcgaggagtcacgtttgctgctttgtgtggagtgcttggtctccccagagcacatgtcacatcacgaactcactatagagaacgctctgtcacactacaaagaacgtttgaatagacggagtcgaaaattaagaaaggacatagctgagttgcagcggctcaaagcccagcaagaaaagaaattacaggcccttcaattccaggtggaccatggcaatcacagactggaggctgggcccgagtcgcaacatcaaactagagagcaacttggcgccctcccccagcagtggttgggtcagctggagcacatgcctgcagaggccgcaagaattctcgacatctcgcgcgccgttactcagttaaggtcactcgtaattgacttggagaggacagcaaaggaactagacacaaatactctgaaaaatgctggcgacctgctgaaccggtccgcgccccaaaagctggaagtgatctacccacagcttgagaagggcgtcagcgaactgttgctgcagccccctcagaagctgtag

SEQ ID NO: 105245 - DNA, 777 bp, Artificial Sequence
  derived and/or modified sequence
atgatccctttacagaaagataatcaggaggagggagtctgtcccatctgccaagaaagtctgaaggaggctgtatccacgaactgcggccatctgttttgccgcgtctgcctcactcagcacgtggaaaaggcaagcgcatcaggggtgttctgttgcccattgtgtaggaaaccatgctccgaggaggtgctcggcactggatacatatgtcccaaccatcagaagagagtgtgtaggttttgcgaggagagtcgcctacttctgtgtgtggagtgcctggtgtcacctgagcacatgagccaccacgagctgaccatagagaacgccctgagtcactacaaggaaagactgaatcggagatcccgaaaactaaggaaggacattgccgaactgcagcgattgaaggcccagcaagaaaagaaactgcaggcactgcagtttcaggttgatcacggcaaccaccggctggaagctggccctgagtcgcagcatcagactcgggagcagcttggtgctttacctcagcaatggcttggtcaactggagcatatgcccgccgaagccgcgcggattttggatatttcccgtgcagtcacgcagctgaggtcgttggtgatagatctggagcgcactgccaaagagttggacacgaacaccctaaagaacgccggggacttgctcaacagatctgctccccagaaactggaggtaatctatccccagctggaaaaaggcgtgtccgagttgctcctgcagccaccccagaagctgtag

SEQ ID NO: 105246 - DNA, 777 bp, Artificial Sequence
  derived and/or modified sequence
atgataccgttgcagaaagataatcaggaggagggcgtttgccctatatgtcaagaatccttaaaagaagctgtgtcaacaaactgtggccacctattttgccgcgtgtgtctgacacagcatgttgagaaggcatctgcgtcgggggtgttttgttgtccactctgccggaagccctgcagtgaggaagttcttgggaccgggtacatctgtcccaatcaccagaaacgcgtgtgtaggttttgcgaggagagtcggctgttactctgcgtggaatgtctcgtgagtccagagcatatgtcccaccacgaactgaccatagagaatgccttgagccactacaaggaacggttgaaccgaaggagtcgcaagctgagaaaagatatagctgagctgcaacggttaaaagcccagcaggaaaaaaaattacaggccctgcaatttcaggtcgatcatggcaatcataggttggaagccggacctgagtctcaacatcagacccgtgaacagctgggtgcactcccacagcagtggctgggccagcttgagcacatgcctgcagaagcagccagaatactcgacatcagtcgggctgtgacacagctgcgctcccttgtgattgatcttgagcgcaccgccaaggaactggataccaacactctcaaaaacgccggggatctgctgaacagaagtgcccctcagaaactagaggttatctacccacagcttgagaaaggagtgtccgagctactcttacagccacctcaaaagttgtag

SEQ ID NO: 105247 - DNA, 777 bp, Artificial Sequence
  derived and/or modified sequence
atgatccctctgcaaaaggataaccaggaggaaggtgtgtgccccatctgccaggaatctttgaaggaggccgtttcaaccaactgcgggcatctgttctgcagggtctgtttaactcagcatgtagagaaggcttcagcctccggggtgttctgttgccccctttgccgcaaaccttgttctgaagaggtgttgggcaccggatatatctgccctaaccatcagaagcgggtgtgccgcttttgtgaggagtctaggctgctcttgtgcgtggagtgccttgtaagtcctgaacatatgtcccaccacgagctgacgatcgaaaacgctctgagccactacaaagaacggctcaaccgacgtagtagaaaattgcgaaaggacatcgccgagctccaaaggctgaaggcgcaacaggaaaagaagctacaggccttacagtttcaggttgatcatgggaatcatagactagaggccggccccgagtcccagcaccaaacacgggaacagcttggcgctctgcctcaacagtggctggggcagctggagcatatgcccgctgaagctgctagaatcctcgatattagtcgggcggtgacccagttgcggagcctggtcatagatctcgaaagaacagcaaaggaacttgacacaaacaccctcaaaaatgccggcgacttgctgaatagaagcgccccacagaagcttgaggtgatatacccccaactggagaagggcgtgtccgaactgctcctgcagcccccacagaaactgtag

SEQ ID NO: 105248 - DNA, 777 bp, Artificial Sequence
  derived and/or modified sequence
atgatcccactccaaaaagataaccaagaggagggcgtgtgccccatatgccaggagagcctgaaggaggcagtcagcaccaactgcgggcacctgttttgtagagtttgtttgactcagcacgtcgagaaggcctccgcctctggagttttctgctgcccgttgtgccgtaagccttgttccgaggaggtcctgggtacaggatacatctgtccgaatcaccagaaaagggtgtgtcggttctgcgaggagtcccggctcctgctgtgcgtggaatgcctggtttcgccggagcatatgtcccaccacgaactgaccatagaaaatgccctttcacactacaaggaaaggctgaatagaagaagtcgtaagcttaggaaagacatcgctgagctgcagcgcctaaaagcccaacaagagaaaaagttgcaggccctgcagtttcaggtcgatcacggcaaccaccggttggaagccggccctgaatcacaacaccaaacgcgagagcagctgggggcactgcctcagcagtggctgggccaactcgaacatatgcctgctgaggcagcacgtatactggacatctcccgggctgtgacccagctgagaagcttggtgattgatctggagagaactgcaaaggaacttgacacgaacaccctcaaaaatgccggtgacctcctgaaccgcagcgccccacagaagctggaggtcatctatcctcagcttgaaaaaggcgtgagcgaactgctgttacagccgccacagaagctttag

SEQ ID NO: 105249 - DNA, 777 bp, Artificial Sequence
  derived and/or modified sequence
atgatcccgctgcagaaggataaccaggaggagggagtctgcccaatctgccaggagtctttaaaggaagccgtctctacaaactgtggccatctattctgcagggtgtgcctgacacaacatgtagagaaggccagtgcctcaggtgtgttctgttgccccctttgccggaaaccgtgctctgaggaagtgctgggcacaggctatatctgcccgaaccaccagaagagggtgtgtcgcttctgtgaggaatcccggctgctcctctgtgtggaatgcctggttagccccgaacatatgtcacaccacgagcttaccatcgaaaacgcactaagccactacaaggagaggttaaatcgtaggagtagaaagctgcgaaaggacatcgccgagctgcagaggctgaaggcccaacaggagaagaaattacaggctctccaattccaggtcgatcacggaaaccatagactcgaggccgggcctgagagccagcaccagacccgtgaacaactgggagccctgcctcagcagtggctaggtcagctcgagcacatgccagctgaagccgccagaattttagacatctccagagccgtcacgcagctgcgaagccttgtgattgatttggagagaaccgccaaggagctggatacaaataccctgaagaacgccggggatctgctgaaccgatcagcaccacaaaaactggaggtgatctacccccagctggaaaaaggggtttccgaactgctgttgcagcctcctcagaaattgtag

SEQ ID NO: 105250 - DNA, 777 bp, Artificial Sequence
  derived and/or modified sequence
atgatccctctccagaaggataatcaagaggaaggcgtttgtcccatttgtcaagagtccctcaaggaggctgtgtccaccaactgcgggcacctgttttgtagggtttgtctcacacagcatgtggaaaaggcctcggccagcggggtcttctgctgccccctgtgcagaaaaccgtgtagcgaggaagtgctgggcacaggttacatatgccccaaccatcagaaaagggtgtgtagattttgtgaagaatccagactattgctctgcgtggaatgtctggttagccctgagcacatgtcacaccatgagctgacaatcgaaaatgccctttcccattacaaggaacgccttaataggagatcaagaaagctgaggaaagacatcgcagagctacagcgactgaaggctcagcaagaaaagaagttgcaggcactgcagttccaagtcgaccatgggaatcaccgcctagaagctggtccggaatctcagcatcagactagagaacagctcggggcattaccccagcagtggctcggccagttggagcatatgcctgccgaggctgctaggattctggatattagtcgcgcagtgacacagctacgctccctagtcattgacctggaaaggaccgcaaaagaactggacacaaacacacttaaaaatgcaggagaccttctgaaccgctccgcaccccaaaaactggaggtcatttacccacagcttgagaagggagtttctgagctgcttttacaaccaccacagaagctgtag

SEQ ID NO: 105251 - DNA, 777 bp, Artificial Sequence
  derived and/or modified sequence
atgatacctctgcagaaggataaccaggaggagggtgtttgcccaatatgccaggagagcctgaaagaggcagtgagcactaactgtggacacctattttgccgggtatgtttgacacagcacgttgaaaaggcaagtgccagtggcgtattttgctgtccactctgtcggaagccatgcagcgaagaagttctgggaacaggatacatttgtcccaaccaccagaaaagagtttgtcgattctgtgaagagtcgcggctgctgctatgcgtggaatgtctggtgagccctgagcacatgagtcatcatgaactgaccattgagaatgcactttctcactataaagaacggctgaacaggcgcagcaggaaactgcgcaaagacatcgccgaactgcagcggcttaaggcacagcaggaaaagaaattgcaagcattgcagtttcaagtggatcacggcaatcataggctcgaggcgggtcccgagtctcagcatcagactcgcgagcaactaggggctcttcctcaacagtggctgggacagcttgagcacatgcccgctgaggcggcccgcattctcgacatcagccgagctgtaacacagctgaggagcttggttattgacctggagcggactgccaaagagttagatacgaacaccctcaagaatgctggagatctcctcaatcgcagtgccccccagaagctggaagtgatatacccccagcttgaaaaaggcgtctcagaattattactgcagcccccccagaaactctag

SEQ ID NO: 105252 - DNA, 777 bp, Artificial Sequence
  derived and/or modified sequence
atgatccccctgcagaaggacaaccaggaggagggcgtgtgccccatctgccaggagagcctgaaggaggccgtgtccaccaactgtggccacctgttctgccgggtgtgcctgacccagcacgtggagaaggccagcgccagcggggtcttctgctgccccctgtgcaggaagccctgcagcgaggaggtgctgggcaccggctacatctgccccaaccaccagaagagggtgtgccgcttctgtgaggagagccggctgctgctgtgtgtggagtgcctggtgtccccagagcacatgagccaccacgagctgaccattgaaaatgccctgagccactacaaggagcggctgaacagaagaagcaggaagctgaggaaggacattgctgagctgcagaggctgaaggcccagcaggagaagaagctgcaggccctgcagttccaggtggaccacggcaaccaccggctggaggccggccctgagagccagcaccagacccgggagcagctgggcgccctgccccagcagtggctgggccagctggagcacatgcctgctgaggccgcccgcatcctggacatcagcagagctgtgacccagctgcggagcctggtgattgacctggagaggacagccaaggagctggacaccaacaccctgaagaatgctggggacctgctgaacagaagtgccccccagaagctggaggtgatctacccccagctggagaagggcgtgtctgagctgctgctgcagcccccccagaagctgtag

SEQ ID NO: 105253 - DNA, 777 bp, Artificial Sequence
  derived and/or modified sequence
atgatccccctgcagaaggacaaccaggaggagggcgtgtgccccatatgccaggagtccttgaaggaagcagtatcaacaaactgtggacacttgttctgccgcgtctgcctgacccagcatgttgaaaaggctagtgctagcggggttttctgttgcccactgtgtcgcaaaccatgttccgaggaggtgttgggtacaggctacatttgtccaaaccatcagaagcgtgtgtgccggttttgcgaagagtcccggttactgctctgcgtggagtgcctcgtgtctcccgagcacatgagccatcatgaactcacaattgaaaacgccctgtcccattacaaggagcggctgaacaggcgcagccgcaagttgagaaaggatattgctgaacttcaaagattaaaagcacaacaggagaaaaagttgcaggctctccagttccaggtcgaccatgggaaccataggctggaggccggacctgaatcgcagcatcagacaagggaacagctcggggccctccctcagcagtggcttggacaattggaacacatgccagccgaagctgccaggatcctcgacatctcacgggcagttacgcaactccggtctttggtcatcgacctggaacggactgccaaagagctcgataccaatactctgaagaatgccggagacttactgaaccggagcgctcctcagaagctcgaggttatctacccccagctggaaaaaggcgtttctgagctgctgctacagccccctcaaaaactgtag

SEQ ID NO: 105254 - DNA, 777 bp, Artificial Sequence
  derived and/or modified sequence
atgatccccctgcagaaggacaaccaggaggagggcgtgtgccccatctgtcaagagtctctgaaggaggccgtctccacaaattgtggacatcttttctgccgagtttgtctcacacaacatgtagaaaaagcttcggcctctggtgtcttttgctgtcccttgtgtcggaagccttgctcagaggaagtgttggggaccggctacatttgccccaatcatcagaaaagggtatgcagattttgcgaggaaagccggctcctgctgtgtgtagagtgccttgtgagccctgaacatatgtcccatcatgaactgacaattgaaaatgctctaagccactacaaagagcgcctgaataggcggtcccgcaagctgcggaaggacatcgctgagctccagcgactgaaggcccagcaggagaagaaattgcaggccctccagttccaggtcgatcacggcaaccacagactcgaggccggcccggagagccagcatcaaacgcgggagcagcttggcgctctcccccagcagtggctggggcagctggaacacatgcctgccgaagctgcacgtatcctcgacatttcaagagcagtgacacagctaaggtccttggtaatcgacttggagagaacagccaaagagctcgatactaacaccctcaagaatgccggggacctcttaaacagaagcgccccacagaaacttgaagtgatctaccctcagttagagaaaggcgtctccgagctgctactgcagcccccccagaaattgtag

SEQ ID NO: 105255 - DNA, 777 bp, Artificial Sequence
  derived and/or modified sequence
atgatccccctgcagaaggacaaccaggaggagggcgtgtgccccatctgtcaggagagcctgaaagaggctgtgagcaccaattgcggccacctgttctgtagggtttgtctgacccagcatgtcgaaaaagcatcagcatcaggggtgttctgttgcccactctgtcgcaaaccctgctctgaagaagtgttgggaactggctatatctgccctaatcatcagaagcgtgtctgccggttttgtgaggaatctaggcttctgctctgtgtcgaatgcctggtatctcctgaacacatgagtcatcacgagctgactatcgagaacgccctaagccactacaaagagaggctgaatcggcgttctcgtaagctgcggaaggatatcgctgagttgcaaagactgaaggcgcagcaggaaaaaaaactgcaggctctccaattccaggtggatcacggcaaccatcgcctggaggcaggacccgagtctcaacaccagaccagagaacaattaggagctctgccgcagcagtggttagggcagctggaacacatgccagcagaggccgcccggattctggatatcagccgggcggtcacgcagctgcgttccttagtaatcgatcttgaacgcacggccaaggagctggataccaacaccctgaaaaatgccggcgatcttctgaaccggtcggctccgcaaaaattggaggtcatctacccccagctcgaaaagggggtgtcagagctgcttcttcaaccgcctcaaaagctctag

SEQ ID NO: 105256 - DNA, 777 bp, Artificial Sequence
  derived and/or modified sequence
atgatccccctgcagaaggacaaccaggaggagggcgtgtgccccatttgtcaggaatcactcaaagaagcggtctccaccaactgtggtcacctattctgcagggtctgcttgacccagcacgtcgaaaaagcttctgccagcggagtgttttgttgtccactttgtagaaaaccttgctcagaagaagtccttggaacagggtatatttgccccaaccatcagaagagagtatgccgcttttgtgaagaaagtcggctgctgctgtgcgtggaatgcctggtatcacccgaacatatgagccaccacgaattaacaatcgaaaacgcgctctctcattacaaagaaagattaaatcggcgttcaagaaagctcagaaaggacattgcagaactgcagagactgaaagcccaacaagagaagaaactgcaagcattacagtttcaggtcgaccacggaaaccaccggctggaggctgggcctgaaagtcaacaccagactcgggagcagctcggggcgctcccacagcaatggttaggacaattggagcatatgccagcagaagctgcccgaattctggatatatccagagcggtaacgcagctgaggtcactggtaatcgacctggagcggacggctaaagaactggacaccaacaccctgaagaatgccggggacctgctgaaccggagcgccccgcaaaagctggaggtgatctatccacaacttgagaaaggggtgtccgaactccttcttcaaccaccccaaaagctttag

SEQ ID NO: 105257 - DNA, 777 bp, Artificial Sequence
  derived and/or modified sequence
atgatccccctgcagaaggacaaccaggaggagggcgtgtgccccatctgtcaggagtccttgaaggaagcagtaagtacaaattgtggccacctgttctgtcgcgtgtgtttaacccagcacgtggagaaggcgtctgcctcgggggtgttttgttgccctctatgtcgaaaaccatgttctgaagaagtgcttgggactggttacatctgtcccaaccaccagaagagagtctgccgattctgcgaagaatcgcggctcctgctgtgtgtagagtgtctggtcagtccggaacacatgagccatcacgaactgactattgaaaacgcgttgagtcattacaaggagagactcaacaggcgcagccgtaagctgcgcaaggatatagcggaattgcagagactgaaagcacaacaggaaaaaaagctccaggctcttcagttccaggtggaccatggaaaccataggttggaggctggacctgaatcacagcaccagaccagggagcagttaggcgccttgcctcagcagtggctcggacagctcgagcacatgccagccgaggccgccagaatcctggatatctcgagggctgtgacgcagttgaggagcctggtgattgatctggagaggactgccaaagaactggacactaacactctcaagaatgctggcgatttgctcaaccgctctgctccgcagaagctcgaggtgatttacccccagctggaaaagggtgtatcggaactgctgttacagcctccccaaaaattatag

SEQ ID NO: 105258 - DNA, 777 bp, Artificial Sequence
  derived and/or modified sequence
atgatccccctgcagaaggacaaccaggaggagggcgtgtgccccatctgccaggaatcactgaaagaagcggttagtaccaactgtggccacctcttctgccgcgtgtgtttgacgcagcatgtggagaaagcaagcgcctctggcgtgttttgttgccccctctgtcgcaagccatgtagtgaggaagtgttggggacaggttatatctgccctaatcaccagaaacgagtttgtcgcttctgcgaggaaagcagattgcttctctgtgtggaatgtctggttagccccgagcacatgagccaccacgagctgaccatcgagaatgccctgtcccactataaagagaggcttaatagacgtagccgcaagctccgaaaagacattgccgagcttcagagactgaaggcccagcaggagaaaaaactgcaagctctccagtttcaggtggatcacggtaaccaccgtttggaggccggccccgagtctcagcatcagacaagggaacagctgggagctctcccccagcaatggcttggacaactggagcacatgcctgcggaagccgctcggattcttgatatctccagggccgttacacagctgagatcactcgttatcgacctggaaagaaccgcaaaagaacttgacaccaatactttgaagaacgcaggcgacctactaaacaggagtgccccccaaaaactggaggtcatctatccacagctcgagaaaggtgtttccgaactgctactccagcccccgcagaagctatag

SEQ ID NO: 105259 - DNA, 777 bp, Artificial Sequence
  derived and/or modified sequence
atgatccccctgcagaaggacaaccaggaggagggcgtgtgccccatatgtcaggagagcctcaaggaggcagtgtccacaaactgtgggcacctattttgtcgggtgtgcctgacccagcacgtggagaaggcttccgcctctggggtcttctgttgtcctctctgtcggaaaccctgttccgaagaagtgctgggtaccggctacatatgccctaaccaccagaaacgggtctgccgcttctgtgaggagagcagactgctgttgtgtgtcgagtgtttggtgagccccgaacacatgtcacaccacgagttgactatcgagaatgcactgtctcattacaaagaacgactcaacaggcgctcacggaaactgagaaaggacattgcagaattgcagcggctcaaggctcagcaggagaaaaagctccaggccttacagttccaggtcgaccacggcaaccatcgcctggaggcaggccccgaatcccaacaccagactagagaacagctcggagcacttcctcagcaatggctcggccaactcgagcatatgcccgcagaagccgctcgcattttggatatcagcagggcagtgacacagctgcgctcattggtgattgatctggaaagaaccgccaaggaactggacacaaacaccctcaaaaacgccggagacctgttgaacaggagcgctccccagaagctcgaggtgatatatcctcagcttgagaaaggagtcagcgaactgcttttgcaacccccccagaaactctag

SEQ ID NO: 105260 - DNA, 777 bp, Artificial Sequence
  derived and/or modified sequence
atgatccccctgcagaaggacaaccaggaggagggcgtgtgccccatttgccaagagtcactgaaggaggcagtcagcacaaattgcgggcacctattctgtcgtgtttgtttaacccagcatgtggagaaggcctcagcctccggggtcttttgttgtcccttgtgtcggaagccttgtagtgaggaagtgctggggactgggtacatttgtccaaaccaccaaaagagggtgtgccgattttgcgaggagtctaggctgctgttgtgcgtcgagtgtctggtgagccccgaacacatgtctcatcatgagctcaccattgagaacgccttatcacactataaagaacggctgaataggcgctccaggaagctgaggaaagatattgccgaattgcagcgcctcaaagcccaacaggagaagaagttacaagccctgcagttccaggtggaccacggcaatcatcgtcttgaggcaggccccgagtcacagcaccagacaagagaacagttaggagcactgccccaacagtggctcggacagctggaacacatgcctgccgaagcagctaggattctcgacatttcacgggccgtgactcagctaagatctctggtgattgacctcgagaggactgcaaaggaactggatacgaatacactcaagaacgctggcgaccttctgaatagatccgctccacagaagcttgaggtaatttacccgcagctggagaagggcgtaagcgagctgttactccagccccctcagaaactctag

SEQ ID NO: 105261 - DNA, 777 bp, Artificial Sequence
  derived and/or modified sequence
atgatccccctgcagaaggacaaccaggaggagggcgtgtgccccatctgccaggagagcctcaaagaagccgtgagtactaactgtggccaccttttttgtcgcgtgtgcctgactcaacacgttgaaaaagccagtgcgtcgggggtgttttgttgtcctctttgtcgaaagccctgctcagaagaagttctgggaaccggatacatttgcccaaaccaccagaaacgtgtctgccgattctgcgaggagtcgagactgttgctttgcgttgagtgtttggtatccccagaacatatgagccaccatgaactgacaattgaaaatgccctgtcccactacaaagagaggctcaaccgacggagcagaaaactgcggaaagacattgctgaattgcagcgtctgaaagcccaacaggaaaaaaaactacaggctctccagtttcaggttgatcacggcaatcaccgcttggaggcaggccctgaatctcagcaccaaacccgtgagcagctcggtgccctgcctcagcaatggctgggacagctggagcatatgccagccgaggctgctagaattctagacatcagtagggcggtgacacagcttcggtcactggtgattgatctcgaaaggactgccaaggagctggataccaacactctcaagaacgccggagacctcctgaataggtccgcgcctcagaaactagaagtgatttatccacaactggaaaagggcgtgtctgaactgctcctccagccccctcagaagctgtag

SEQ ID NO: 105262 - DNA, 777 bp, Artificial Sequence
  derived and/or modified sequence
atgatcccactgcagaaggacaatcaggaggaaggtgtctgtcccatttgccaagaatcactgaaagaggccgttagtaccaattgcggccacctgttctgccgggtctgcttaacccaacatgtcgaaaaagcaagtgcaagtggcgtgttttgctgtcccctgtgcagaaagccgtgtagtgaagaagtcctaggaactgggtacatctgccccaatcaccagaaacgagtttgcaggttttgtgaggagagccggttgctcctgtgcgttgaatgcctcgtgagccctgaacacatgtctcaccacgagctgaccatcgaaaacgcactgagccactataaggaaaggcttaatcgtcgtagcaggaagctccggaaagatattgccgagctgcagagactgaaagcacagcaggaaaaaaagctccaggccctacaatttcaggtggaccacgggaaccatagattggaggccggaccagaatcccagcatcaaacacgcgaacagctcggtgcactgccacagcagtggctgggacagttggagcacatgcccgctgaagcagccaggatcctggacatctcaagggccgtcacacagctcagatccctcgtgatcgaccttgagaggaccgccaaagaacttgacaccaatactcttaagaatgctggtgacttactgaaccgcagtgccccacagaagcttgaggtgatttacccgcagttagagaagggcgtgagcgagctgctcttgcagccaccccagaagctgtag

SEQ ID NO: 105263 - DNA, 777 bp, Artificial Sequence
  derived and/or modified sequence
atgatcccccttcagaaagacaaccaagaagagggagtgtgcccaatatgtcaggagagcctgaaggaagctgtgtccacaaattgtgggcacctgttctgtagagtctgcctgacacagcacgtggaaaaggcttcagccagtggcgtgttctgctgtcctttatgccgtaaaccatgtagcgaggaggtgctcggcaccgggtacatctgtcccaaccaccagaaacgagtctgccggttttgtgaagaaagccggctcctgctttgtgttgagtgtctggtttcacccgagcacatgagccaccatgagctgaccatcgagaatgccctctcacactataaagagagattaaatcgcaggtcgagaaagctgagaaaggatattgccgaacttcaacgtctgaaggctcagcaggaaaagaagctgcaagcgctgcagttccaggtggaccatgggaaccaccggctcgaagcaggccctgaatcacagcatcagacccgagaacagctgggggctctcccccaacaatggctcggtcagttggagcacatgcctgccgaggccgctaggatcctagatatcagtcgagccgtcacccaactgcggtctcttgttatcgacctggaaagaacggctaaggaactggacaccaataccttgaaaaatgcaggcgacctcctgaaccggtcagctccacagaagttggaggtaatttacccccaattggagaagggtgtatcagaactcctcctgcagcccccacagaagttgtag

SEQ ID NO: 105264 - DNA, 777 bp, Artificial Sequence
  derived and/or modified sequence
atgatcccgctgcagaaagacaatcaggaggagggtgtgtgtccgatctgccaggaatcactgaaagaagccgtgagtacgaattgcggtcacctgttctgccgagtgtgtcttacccagcacgttgagaaagcttcggcgagcggagtgttctgctgtcccctttgtaggaaaccttgctctgaggaagtcctgggcacaggttatatttgtccgaatcatcagaaacgcgtgtgtcgcttttgcgaggagtctcggctacttttatgtgtggaatgcttggtttctcccgagcacatgtctcatcatgagctcaccatcgagaatgcattgtctcactataaagagcggctcaatcggaggagccgtaagctcagaaaagatatcgcagagctgcagaggctcaaggcacaacaagagaagaagttgcaggcactgcagtttcaggtggatcatggcaaccataggttggaggcaggcccagaaagccaacaccaaaccagggaacagctgggcgcactgccccagcagtggcttggtcagcttgagcacatgcccgctgaagcagcaaggatcctcgacatttcccgtgcagtcacccagctccggagtctggttatagacttggaacggacagctaaggaactggacacgaacaccttgaagaacgcaggcgatctgcttaacagatccgcaccacagaaactggaagttatctacccccagctagaaaagggggtttcggagctgctgttgcagcccccacagaagttgtag

SEQ ID NO: 105265 - DNA, 777 bp, Artificial Sequence
  derived and/or modified sequence
atgattcctctacaaaaggacaatcaggaagagggagtgtgtccaatttgtcaggaatcactcaaggaggccgtgtcaacaaattgtggccacctcttttgtagggtgtgcttgacccagcatgtggagaaagcttcagcaagtggagtcttctgctgtcctttgtgtaggaaaccatgctcagaggaagttctggggacaggctatatctgtccaaatcaccaaaaacgtgtgtgtcggttttgcgaagagagccgccttctgctgtgtgtggaatgtctcgtgagccctgaacatatgtcccatcatgaattaaccatagagaacgctctttcacactataaagaaaggctgaacaggcgttctcgaaagctgaggaaggacatcgccgagctgcagaggctcaaagcccaacaagagaaaaagctccaggcgttacagtttcaggtcgatcatggtaaccacagactcgaggctggccctgagagccagcaccagacgagggaacaacttggggcattgccccagcagtggctgggtcagctggagcacatgcccgcagaagctgcgaggattctagacatctcaagagccgtcacgcaactaagatctctcgtcatcgatctggaaaggacagcgaaagagctggatactaacactttgaagaatgctggggacctattaaaccgctccgcaccgcagaagctggaggtcatctacccccagctggaaaaaggcgtgtcagagctcctcctgcagccacctcagaaactgtag

SEQ ID NO: 105266 - DNA, 777 bp, Artificial Sequence
  derived and/or modified sequence
atgataccactgcagaaggacaaccaggaggaaggagtttgcccaatctgccaagagtcactgaaggaagctgtgagtaccaactgtggccatctgttttgtcgggtgtgcttgacacagcatgtggagaaggcctctgcgagtggagttttctgctgtcctttgtgcaggaaaccttgcagcgaggaagtgctcggcactgggtacatctgccccaaccatcaaaaacgagtgtgcagattctgtgaagagtcacgactcctcctgtgtgttgagtgtcttgttagccctgagcatatgtcacatcacgaattgactattgaaaacgccttatcacactataaggagcgcctgaaccggagatcaaggaaacttcggaaagacatagctgagctgcaacggctcaaggcccaacaggagaaaaagttacaggcactgcagtttcaggtcgatcacggcaaccatcgactggaagccggacccgagtctcagcaccaaacacgggagcagctgggggctctgcctcagcagtggctggggcagcttgagcacatgcccgctgaagccgctcgcattctcgacatcagtcgtgcagtgacccagctgcggagcttggtgatcgacctagagcggaccgccaaggagttggacacaaacacgttgaaaaatgcaggggacttactgaacaggagcgcacctcagaagctggaggtgatttatccccagcttgaaaaaggagtctccgagcttctgctgcaaccaccacagaagctctag

SEQ ID NO: 105267 - DNA, 777 bp, Artificial Sequence
  derived and/or modified sequence
atgatcccactccagaaggataatcaggaagagggagtatgcccaatctgccaagagtcccttaaagaggccgtatctacgaactgtggccacctgttttgccgcgtgtgcctaacgcagcacgtagagaaggctagtgcctctggtgtattctgttgccctctgtgcaggaagccctgtagcgaagaggtcctggggacaggctacatttgtcccaatcaccagaaacgggtctgccgattttgtgaagagagtagactgctgctgtgcgttgaatgtttagtcagcccagagcatatgagccatcacgagctaacaatcgaaaatgccctcagccattacaaggagcgccttaacagaaggtcccgtaaactgcgcaaagacatcgcggaactacagaggcttaaggcgcagcaggagaagaagctgcaggcgctccagttccaagtggatcatggcaaccacagactcgaggcaggcccagagagtcaacatcagactcgcgagcagctcggtgccctccctcagcagtggctcgggcaactggaacacatgccggctgaagctgcacgcattctcgatatttctagagctgtgacacagttgagaagcttggtgattgacctggagcggacagctaaggaactcgataccaacacgctgaaaaacgctggggacttgttgaatcgttccgcgccacagaaactggaggtgatctacccgcagctggaaaagggggtgtctgaactcctcttgcagcccccacagaaattgtag

SEQ ID NO: 105268 - DNA, 777 bp, Artificial Sequence
  derived and/or modified sequence
atgattcccctccagaaggacaaccaggaagagggagtatgcccaatctgccaagagagtctgaaggaggccgtgtctactaattgcggccacctcttctgcagggtgtgtttgactcagcacgtggagaaggccagtgcttctggcgtgttctgctgtccactttgtcggaagccatgctccgaagaggttctcgggactggctacatctgccccaatcatcagaagcgggtatgcaggttttgtgaggagagtcgcctgctgctgtgtgtggaatgcctggtgagtccggaacacatgtctcatcacgagcttactattgagaacgctctgtcacattacaaggaaagacttaatagacgaagccggaagctgaggaaggatattgccgagcttcagcgcctaaaggcgcagcaggaaaaaaagctgcaagctctccagttccaggtggatcacggtaaccataggttggaggccggacctgagtcccagcatcaaaccagagaacagttaggcgctctgcctcagcaatggttgggccagctcgagcatatgcccgcagaagccgctcgcattcttgatattagcagggcagtaacccaactgaggtccctagtgatcgatcttgaaaggactgccaaggagctcgacactaatactctgaagaacgccggtgacctgcttaaccgctccgcccctcaaaaactggaggtcatatatccacaactggagaagggggtgagtgagttgctgctgcagccacctcaaaaactttag

SEQ ID NO: 105269 - DNA, 777 bp, Artificial Sequence
  derived and/or modified sequence
atgattccactccagaaagataaccaggaggaaggcgtctgccccatctgccaggagtctttaaaggaagctgtgtccacaaattgcgggcacctcttttgcagagtctgcctcacccagcacgtcgaaaaggccagtgcctcgggggtgttctgttgtcctctgtgccgcaagccatgcagcgaggaggtcctgggcaccggatatatttgcccaaatcatcagaaacgcgtttgtagattttgtgaggagtcgcgcctcctattgtgcgtggagtgcctcgtaagtcccgagcacatgtcgcatcacgagctcaccatcgagaatgctctgagccactataaagagaggctgaaccggaggagcagaaagctcaggaaagatattgccgaacttcagaggctgaaagcacagcaagagaaaaagcttcaggcgctccagtttcaagtcgatcatggtaatcataggctggaggcgggtccggagtcgcagcaccagacacgggaacagctcggggcacttccccagcagtggttgggtcagttagaacatatgcccgcagaagcagctcgcattttagacatctctcgcgcagtcacccagctgagatcgttagtgatcgacctagagagaaccgccaaagaactcgatacaaacacactgaagaatgcgggagaccttctgaatcggagtgctccccagaaattggaggtcatttaccctcaactggaaaagggggtctctgaattattgctgcagccgccacagaagctttag

SEQ ID NO: 105270 - DNA, 777 bp, Artificial Sequence
  derived and/or modified sequence
atgattcccctacaaaaggataaccaggaagaaggcgtttgccctatctgccaggagtcccttaaagaggctgtatccactaattgtggacatctcttttgcagggtctgcctcacacagcacgtggaaaaagcctccgcaagtggcgttttctgctgtcctttatgtcgcaaaccctgttcagaggaagtcctaggcaccggctacatctgcccgaaccatcagaaaagagtttgtcggttctgtgaggagtccaggctgctgctatgtgttgaatgcctggtgagccccgagcatatgtctcatcacgaactaacgatcgagaacgcactctcacattacaaggagcggcttaatcggaggtctcgcaagctcagaaaggacatcgccgagttgcagcgcctgaaggcacagcaggagaagaagcttcaggccttacagtttcaggtcgatcacggaaatcaccgcttggaggccggacccgagtctcagcatcagacaagggagcaactaggtgccttgccccagcagtggctcggccagctggagcacatgcctgcagaggcggctaggattttggatataagccgggcagtgacacagttacgatctctcgtaatagaccttgagcgaactgcgaaggagctggacacaaatacactgaagaatgccggtgacctcctcaatcgcagtgcacctcagaagctggaggtcatttatccccagctggagaaaggagtttcagagctcctcctgcagcctccgcagaagctgtag

SEQ ID NO: 105271 - DNA, 2004 bp, Artificial Sequence
  derived and/or modified sequence
gtgtatgaaaaataatttcaagtttaacaaacacaaggaaaccgcagggtccatgtcaaagctgatgagctatttctgaaactcgtgcagaattgtggtttgtgtggtctatgtcacggcacccttgagggagagtgggcaattgcctgaacttggaggctgtgtcctgtccccaggctgctccagggctgcctccttccgactgggccttcttatctgggactgttgagggcaacaggccttccgaagaccagtgaagaaggaggccctgcaaacaggaggctgacagggtaggaacgaggccatgatccctttgcagaaggacaaccaggaggagggtgtctgccccatctgccaggagagcctgaaggaggccgtgagcaccaactgcggacatctcttctgtcgagtgtgcctgacacagcatgtggagaaggcctcagcctctggggtcttctgctgccccctctgccggaagccctgttctgaggaggtgctagggacaggctatatctgccccaaccaccagaagagggtgtgcaggttctgtgaggagagcagacttcttctatgtgtggaatgcctggtgtcccctgaacacatgtctcatcatgaactgaccattgaaaatgccctcagccactacaaggaacgactcaatcgccggagcaggaagctcagaaaggacattgcagaacttcagcggctcaaggctcagcaggagaagaaactgcaggctctgcagtttcaggtagaccacgggaaccacaggctggaggctgggccggagagccagcaccaaaccagggaacagctgggtgccctccctcagcagtggctgggccagctggagcacatgccagcagaagcggccagaatccttgacatctccagggcagtaacacagctcagaagcctggtcattgatctggaaaggacggccaaggaattagacaccaacacactgaagaatgctggtgacttactgaacaggagtgctccacagaaattagaggttatttatccccagttggagaaaggagtcagtgaattgcttcttcagccccctcagaagctctgacctgttcatccctgggacacctcacttcaggctcacctcagcctcctctctctccttcctccaacctgtccaggcccccactgggtctacccagtgcatcttcgggcctgccagctcctgaacatgtcaccatttcttcatgtccacagtcatcacctgatgcctgaccctctgactcttggacgatagccagcctccttccaggacaggctcatgcttggggctgccactgtggaggtcggggcccatggtctccaggagcatttgtgaaatctccattttgcctgtaaactgatggtagtgcccatctctcacaatctcattcaaataggatcctccaggcctctgaatggcccgagctcatcagcagtgacaccacctcacatgtggagcccagctgagttcctgcagtacttgttgtctgtaccactcacctggcacttatttattattgttgtggaagacagactcaaagacagcctcccttcatgatcctcacctcttggaattcatgcccttgtttggtcccctccccttgagtgtaagtgggatctgtgacttgcttctaatgaatggaataaggcaaaggtgatagggtgtcactctggcaactgtgttgcattgtatagaactcctccttgctggcccacccttttagagcccctcctaggagccaagagcagcttccagccaacaacaagcagaggccctcagtcttgtggctgcaagaacctgaattctgccaacaacccgagtgagcttggaagcagattcttccccaactgagccggataagaacctagtccagccaacaccttgattatagtcttgtgagtacctaagctgaggacccagtgaagctgtgccaaaatttcccacccacagaaacagtgtgacaataaatgtgtgtgtgtttttttgtt

SEQ ID NO: 105272 - DNA, 2086 bp, Artificial Sequence
  derived and/or modified sequence
ataagaaccactcatctgctggccatctctccaggtctggagccagagaagatgatctgaaattgtagcaggagaaattgaggtgtatgaaaaataatttcaagtttaacaaacacaaggaaaccgcagggtccatgtcaaagctgatgagctatttctgaaactcgtgcagaattgtggtttgtgtggtctatgtcacggcacccttgagggagagtgggcaattgcctgaacttggaggctgtgtcctgtccccaggctgctccagggctgcctccttccgactgggccttcttatctgggactgttgagggcaacaggccttccgaagaccagtgaagaaggaggccctgcaaacaggaggctgacagggtaggaacgaggccatgatccctttgcagaaggacaaccaggaggagggtgtctgccccatctgccaggagagcctgaaggaggccgtgagcaccaactgcggacatctcttctgtcgagtgtgcctgacacagcatgtggagaaggcctcagcctctggggtcttctgctgccccctctgccggaagccctgttctgaggaggtgctagggacaggctatatctgccccaaccaccagaagagggtgtgcaggttctgtgaggagagcagacttcttctatgtgtggaatgcctggtgtcccctgaacacatgtctcatcatgaactgaccattgaaaatgccctcagccactacaaggaacgactcaatcgccggagcaggaagctcagaaaggacattgcagaacttcagcggctcaaggctcagcaggagaagaaactgcaggctctgcagtttcaggtagaccacgggaaccacaggctggaggctgggccggagagccagcaccaaaccagggaacagctgggtgccctccctcagcagtggctgggccagctggagcacatgccagcagaagcggccagaatccttgacatctccagggcagtaacacagctcagaagcctggtcattgatctggaaaggacggccaaggaattagacaccaacacactgaagaatgctggtgacttactgaacaggagtgctccacagaaattagaggttatttatccccagttggagaaaggagtcagtgaattgcttcttcagccccctcagaagctctgacctgttcatccctgggacacctcacttcaggctcacctcagcctcctctctctccttcctccaacctgtccaggcccccactgggtctacccagtgcatcttcgggcctgccagctcctgaacatgtcaccatttcttcatgtccacagtcatcacctgatgcctgaccctctgactcttggacgatagccagcctccttccaggacaggctcatgcttggggctgccactgtggaggtcggggcccatggtctccaggagcatttgtgaaatctccattttgcctgtaaactgatggtagtgcccatctctcacaatctcattcaaataggatcctccaggcctctgaatggcccgagctcatcagcagtgacaccacctcacatgtggagcccagctgagttcctgcagtacttgttgtctgtaccactcacctggcacttatttattattgttgtggaagacagactcaaagacagcctcccttcgtgatcctcacctcttggaattcatgcccttgtttggtcccctccccttgagtgtaagtgggatctgtgacttgcttctaatgaatggaataaggcaaaggtgatagggtgtcactctggcaactgtgttgcattgtatagaactcctccttgctggcccacccttttagagcccctcctaggagccaagagcagcttccagccaacaacaagcagaggccctcagtcttgtggctgcaagaacctgaattctgccaacaacccgagtgagcttggaagcagattcttccccaactgagccggataagaacctagtccagccaacaccttgattatagtcttgtgagtacctaagctgaggacccagtgaagctgtgccaaaatttcccacccacagaaacagtgtgacaataaatgtgtgtgtgtttttttgtt

SEQ ID NO: 105273 - DNA, 2086 bp, Artificial Sequence
  derived and/or modified sequence
ataagaaccactcatctgctggccatctctccaggtctggagccagagaagatgatctgaaattgtagcaggagaaattgaggtgtatgaaaaataatttcaagtttaacaaacacaaggaaaccgcagggtccatgtcaaagctgatgagctatttctgaaactcgtgcagaattgtggtttgtgtggtctatgtcacggcacccttgagggagagtgggcaattgcctgaacttggaggctgtgtcctgtccccaggctgctccagggctgcctccttccgactgggccttcttatctgggactgttgagggcaacaggccttccgaagaccagtgaagaaggaggccctgcaaacaggaggctgacagggtaggaacgaggccatgatccctttgcagaaggacaaccaggaggagggtgtctgccccatctgccaggagagcctgaaggaggccgtgagcaccaactgcggacatctcttctgtcgagtgtgcctgacacagcatgtggagaaggcctcagcctctggggtcttctgctgccccctctgccggaagccctgttctgaggaggtgctagggacaggctatatctgccccaaccaccagaagagggtgtgcaggttctgtgaggagagcagacttcttctatgtgtggaatgcctggtgtcccctgaacacatgtctcatcatgaactgaccattgaaaatgccctcagccactacaaggaacgactcaatcgccggagcaggaagctcagaaaggacattgcagaacttcagcggctcaaggctcagcaggagaagaaactgcaggctctgcagtttcaggtagaccacgggaaccacaggctggaggctgggccggagagccagcaccaaaccagggaacagctgggtgccctccctcagcagtggctgggccagctggagcacatgccagcagaagcggccagaatccttgacatctccagggcagtaacacagctcagaagcctggtcattgatctggaaaggacggccaaggaattagacaccaacacactgaagaatgctggtgacttactgaacaggagtgctccacagaaattagaggttatttatccccagttggagaaaggagtcagtgaattgcttcttcagccccctcagaagctctgacctgttcatccctgggacacctcacttcaggctcacctcagcctcctctctctccttcctccaacctgtccaggcccccactgggtctacccagtgcatcttcgggcctgccagctcctgaacatgtcaccatttcttcatgtccacagtcatcacctgatgcctgaccctctgactcttggacgatagccagcctccttccaggacaggctcatgcttggggctgccactgtggaggtcggggcccatggtctccaggagcatttgtgaaatctccattttgcctgtaaactgatggtagtgcccatctctcacaatctcattcaaataggatcctccaggcctctgaatggcccgagctcatcagcagtgacaccacctcacatgtggagcccagctgagttcctgcagtacttgttgtctgtaccactcacctggcacttatttattattgttgtggaagacagactcaaagacagcctcccttcatgatcctcacctcttggaattcatgcccttgtttggtcccctccccttgagtgtaagtgggatctgtgacttgcttctaatgaatggaataaggcaaaggtgatagggtgtcactctggcaactgtgttgcattgtatagaactcctccttgctggcccacccttttagagcccctcctaggagccaagagcagcttccagccaacaacaagcagaggccctcagtcttgtggctgcaagaacctgaattctgccaacaacccgagtgagcttggaagcagattcttccccaactgagccggataagaacctagtccagccaacaccttgattatagtcttgtgagtacctaagctgaggacccagtgaagctgtgccaaaatttcccacccacagaaacagtgtgacaataaatgtgtgtgtgtttttttgtt

SEQ ID NO: 105274 - DNA, 2066 bp, Artificial Sequence
  derived and/or modified sequence
ggccatctctccaggtctagagccagagaagatgatctgaaattgtagcaggagaaattgaggtgtatgaaaaataatttcaagtttaacaaacacaaggaaaccgcagggtccatgtcaaagctgatgagctatttctgaaactcgtgaagaattgtggtttgtgtggtctatgtcacggcacccttgagggagagtgggcaattgcctgaacttggaggctgtgtcctgtccccaggctgctccagggctgcctccttccgactgggccttcttatctgggactgttgagggcaacaggccttccgaagaccagtgaagaaggaggccctgcaaacaggaggctgacagggtaggaacgaggccatgatccctttgcagaaggacaaccaggaggagggtgtctgccccatctgccaggagagcctgaaggaggccgtgagcaccaactgcggacatctcttctgtcgagtgtgcctgacacagcatgtggagaaggcctcagcctctggggtcttctgctgccccctctgccggaagccctgttctgaggaggtgctagggacaggctatatctgccccaaccaccagaagagggtgtgcaggttctgtgaggagagcagacttcttctatgtgtggaatgcctggtgtcccctgaacacatgtctcatcatgaactgaccattgaaaatgccctcagccactacaaggaacgactcaatcgccggagcaggaagctcagaaaggacattgcagaacttcagcggctcaaggctcagcaggagaagaaactgcaggctctgcagtttcaggtagaccacgggaaccacaggctggaggctgggccggagagccagcaccaaaccagggaacagctgggtgccctccctcagcagtggctgggccagctggagcacatgccagcagaagcggccagaatccttgacatctccagggcagtaacacagctcagaagcctggtcattgatctggaaaggacggccaaggaattagacaccaacacactgaagaatgctggtgacttactgaacaggagtgctccacagaaattagaggttatttatccccagttggagaaaggagtcagtgaattgcttcttcagccccctcagaagctctgacctgttcatccctgggacacctcacttcaggctcacctcagcctcctctctctccttcctccaacctgtccaggcccccactgggtctacccagtgcatcttcgggcctgccagctcctgaacatgtcaccatttcttcatgtccacagtcatcacctgatgcctgaccctctgactcttggacgatagccagcctccttccaggacaggctcatgcttggggctgccactgtggaggtcggggcccatggtctccaggagcatttgtgaaatctccattttgcctgtaaactgatggtagtgcccatctctcacaatctcattcaaataggatcctccaggcctctgaatggcccaagctcatcagcagtgacaccacctcacatgtggagcccagctgagttcctgcagtacttgttgtctgtaccactcacctggcacttatttattattgttgtggaagacagactcaaagacagcctcccttcgtgatcctcacctcttggaattcatgcccttgtttggtcccctccccttgagtgtaagtgggatctgtgacttgcttctaatgaatggaataaggcaaaggtgatagggtgtcactctggcaactgtgttgcattgtatagaactcctccttgctggcccacccttttagagcccctcctaggagccaagagcagcttccagccaacaacaagcagaggccctcagtcttgtggctgcaagaacctgaattctgccaacaacccgagtgagcttggaagcagattcttccccaactgagccggataagaacctagtccagccaacaccttgattatagtcttgtgagtacctaagctgaggacccagtgaagctgtgccaaaatttcccacccacagaaacagtgtgacaataaatgtgtgtgtgtttttttgtt

SEQ ID NO: 105275 - DNA, 2086 bp, Artificial Sequence
  derived and/or modified sequence
ataagaaccactcatctgctggccatctctccaggtctagagccagagaagatgatctgaaattgtagcaggagaaattgaggtgtatgaaaaataatttcaagtttaacaaacacaaggaaaccgcagggtccatgtcaaagctgatgagctatttctgaaactcgtgaagaattgtggtttgtgtggtctatgtcacggcacccttgagggagagtgggcaattgcctgaacttggaggctgtgtcctgtccccaggctgctccagggctgcctccttccgactgggccttcttatctgggactgttgagggcaacaggccttccgaagaccagtgaagaaggaggccctgcaaacaggaggctgacagggtaggaacgaggccatgatccctttgcagaaggacaaccaggaggagggtgtctgccccatctgccaggagagcctgaaggaggccgtgagcaccaactgcggacatctcttctgtcgagtgtgcctgacacagcatgtggagaaggcctcagcctctggggtcttctgctgccccctctgccggaagccctgttctgaggaggtgctagggacaggctatatctgccccaaccaccagaagagggtgtgcaggttctgtgaggagagcagacttcttctatgtgtggaatgcctggtgtcccctgaacacatgtctcatcatgaactgaccattgaaaatgccctcagccactacaaggaacgactcaatcgccggagcaggaagctcagaaaggacattgcagaacttcagcggctcaaggctcagcaggagaagaaactgcaggctctgcagtttcaggtagaccacgggaaccacaggctggaggctgggccggagagccagcaccaaaccagggaacagctgggtgccctccctcagcagtggctgggccagctggagcacatgccagcagaagcggccagaatccttgacatctccagggcagtaacacagctcagaagcctggtcattgatctggaaaggacggccaaggaattagacaccaacacactgaagaatgctggtgacttactgaacaggagtgctccacagaaattagaggttatttatccccagttggagaaaggagtcagtgaattgcttcttcagccccctcagaagctctgacctgttcatccctgggacacctcacttcaggctcacctcagcctcctctctctccttcctccaacctgtccaggcccccactgggtctacccagtgcatcttcgggcctgccagctcctgaacatgtcaccatttcttcatgtccacagtcatcacctgatgcctgaccctctgactcttggacgatagccagcctccttccaggacaggctcatgcttggggctgccactgtggaggtcggggcccatggtctccaggagcatttgtgaaatctccattttgcctgtaaactgatggtagtgcccatctctcacaatctcattcaaataggatcctccaggcctctgaatggcccgagctcatcagcagtgacaccacctcacatgtggagcccagctgagttcctgcagtacttgttgtctgtaccactcacctggcacttatttattattgttgtggaagacagactcaaagacagcctcccttcgtgatcctcacctcttggaattcatgcccttgtttggtcccctccccttgagtgtaagtgggatctgtgacttgcttctaatgaatggaataaggcaaaggtgatagggtgtcactctggcaactgtgttgcattgtatagaactcctccttgctggcccacccttttagagcccctcctaggagccaagagcagcttccagccaacaacaagcagaggccctcagtcttgtggctgcaagaacctgaattctgccaacaacccgagtgagcttggaagcagattcttccccaactgagccggataagaacctagtccagccaacaccttgattatagtcttgtgagtacctaagctgaggacccagtgaagctgtgccaaaatttcccacccacagaaacagtgtgacaataaatgtgtgtgtgtttttttgtt

SEQ ID NO: 105276 - DNA, 2004 bp, Artificial Sequence
  derived and/or modified sequence
gtgtatgaaaaataatttcaagtttaacaaacacaaggaaaccgcagggtccatgtcaaagctgatgagctatttctgaaactcgtgcagaattgtggtttgtgtggtctatgtcacggcacccttgagggagagtgggcaattgcctgaacttggaggctgtgtcctgtccccaggctgctccagggctgcctccttccgactgggccttcttatctgggactgttgagggcaacaggccttccgaagaccagtgaagaaggaggccctgcaaacaggaggctgacagggtaggaacgaggccatgatccctttgcagaaggacaaccaggaggagggtgtctgccccatctgccaggagagcctgaaggaggccgtgagcaccaactgcggacatctcttctgtcgagtgtgcctgacacagcatgtggagaaggcctcagcctctggggtcttctgctgccccctctgccggaagccctgttctgaggaggtgctagggacaggctatatctgccccaaccaccagaagagggtgtgcaggttctgtgaggagagcagacttcttctatgtgtggaatgcctggtgtcccctgaacacatgtctcatcatgaactgaccattgaaaatgccctcagccactacaaggaacgactcaatcgccggagcaggaagctcagaaaggacattgcagaacttcagcggctcaaggctcagcaggagaagaaactgcaggctctgcagtttcaggtagaccacgggaaccacaggctggaggctgggccggagagccagcaccaaaccagggaacagctgggtgccctccctcagcagtggctgggccagctggagcacatgccagcagaagcggccagaatccttgacatctccagggcagtaacacagctcagaagcctggtcattgatctggaaaggacggccaaggaattagacaccaacacactgaagaatgctggtgacttactgaacaggagtgctccacagaaattagaggttatttatccccagttggagaaaggagtcagtgaattgcttcttcagccccctcagaagctctgacctgttcatccctgggacacctcacttcaggctcacctcagcctcctctctctccttcctccaacctgtccaggcccccactgggtctacccagtgcatcttcgggcctgccagctcctgaacatgtcaccatttcttcatgtccacagtcatcacctgatgcctgaccctctgactcttggacgatagccagcctccttccaggacaggctcatgcttggggctgccactgtggaggtcggggcccatggtctccaggagcatttgtgaaatctccattttgcctgtaaactgatggtagtgcccatctctcacaatctcattcaaataggatcctccaggcctctgaatggcccgagctcatcagcagtgacaccacctcacatgtggagcccagctgagttcctgcagtacttgttgtctgtaccactcacctggcacttatttattattgttgtggaagacagactcaaagacagcctcccttcgtgatcctcacctcttggaattcatgcccttgtttggtcccctccccttgagtgtaagtgggatctgtgacttgcttctaatgaatggaataaggcaaaggtgatagggtgtcactctggcaactgtgttgcattgtatagaactcctccttgctggcccacccttttagagcccctcctaggagccaagagcagcttccagccaacaacaagcagaggccctcagtcttgtggctgcaagaacctgaattctgccaacaacccgagtgagcttggaagcagattcttccccaactgagccggataagaacctagtccagccaacaccttgattatagtcttgtgagtacctaagctgaggacccagtgaagctgtgccaaaatttcccacccacagaaacagtgtgacaataaatgtgtgtgtgtttttttgtt

SEQ ID NO: 105277 - DNA, 2004 bp, Artificial Sequence
  derived and/or modified sequence
gtgtatgaaaaataatttcaagtttaacaaacacaaggaaaccgcagggtccatgtcaaagctgatgagctatttctgaaactcgtgaagaattgtggtttgtgtggtctatgtcacggcacccttgagggagagtgggcaattgcctgaacttggaggctgtgtcctgtccccaggctgctccagggctgcctccttccgactgggccttcttatctgggactgttgagggcaacaggccttccgaagaccagtgaagaaggaggccctgcaaacaggaggctgacagggtaggaacgaggccatgatccctttgcagaaggacaaccaggaggagggtgtctgccccatctgccaggagagcctgaaggaggccgtgagcaccaactgcggacatctcttctgtcgagtgtgcctgacacagcatgtggagaaggcctcagcctctggggtcttctgctgccccctctgccggaagccctgttctgaggaggtgctagggacaggctatatctgccccaaccaccagaagagggtgtgcaggttctgtgaggagagcagacttcttctatgtgtggaatgcctggtgtcccctgaacacatgtctcatcatgaactgaccattgaaaatgccctcagccactacaaggaacgactcaatcgccggagcaggaagctcagaaaggacattgcagaacttcagcggctcaaggctcagcaggagaagaaactgcaggctctgcagtttcaggtagaccacgggaaccacaggctggaggctgggccggagagccagcaccaaaccagggaacagctgggtgccctccctcagcagtggctgggccagctggagcacatgccagcagaagcggccagaatccttgacatctccagggcagtaacacagctcagaagcctggtcattgatctggaaaggacggccaaggaattagacaccaacacactgaagaatgctggtgacttactgaacaggagtgctccacagaaattagaggttatttatccccagttggagaaaggagtcagtgaattgcttcttcagccccctcagaagctctgacctgttcatccctgggacacctcacttcaggctcacctcagcctcctctctctccttcctccaacctgtccaggcccccactgggtctacccagtgcatcttcgggcctgccagctcctgaacatgtcaccatttcttcatgtccacagtcatcacctgatgcctgaccctctgactcttggacgatagccagcctccttccaggacaggctcatgcttggggctgccactgtggaggtcggggcccatggtctccaggagcatttgtgaaatctccattttgcctgtaaactgatggtagtgcccatctctcacaatctcattcaaataggatcctccaggcctctgaatggcccgagctcatcagcagtgacaccacctcacatgtggagcccagctgagttcctgcagtacttgttgtctgtaccactcacctggcacttatttattattgttgtggaagacagactcaaagacagcctcccttcgtgatcctcacctcttggaattcatgcccttgtttggtcccctccccttgagtgtaagtgggatctgtgacttgcttctaatgaatggaataaggcaaaggtgatagggtgtcactctggcaactgtgttgcattgtatagaactcctccttgctggcccacccttttagagcccctcctaggagccaagagcagcttccagccaacaacaagcagaggccctcagtcttgtggctgcaagaacctgaattctgccaacaacccgagtgagcttggaagcagattcttccccaactgagccggataagaacctagtccagccaacaccttgattatagtcttgtgagtacctaagctgaggacccagtgaagctgtgccaaaatttcccacccacagaaacagtgtgacaataaatgtgtgtgtgtttttttgtt

SEQ ID NO: 105278 - protein, 145 aa, Artificial Sequence
  derived and/or modified sequence
MVQLIAPLEVMWNEAADLKPLALSRRLECSGGIMAHYSPDLLGPEMESRYFAQVGLEHLASSSPPAFGFLKCLDYSISVLCSATSLAMLEDNPKVSKLATGDWMLTLKPKSITVPVEIPSSPLAGRPRRRRRLRCPHDQHSQGTC

SEQ ID NO: 105279 - protein, 242 aa, Artificial Sequence
  derived and/or modified sequence
MVQLIAPLEVMWNEAADLKPLALSRRLECSGGIMAHYSPDLLGPEMESRYFAQVGLEHLASSSPPAFGFLKCLDYSISVLCSATSLAMLEDNPKVSKLATGDWMLTLKPKSITVPVEIPSSPLDDTPPEDSIPLVFPELDQQLQPLPPCHDSEESMEVFKQHCQIAEEYHEVKKEITLLEQRKKELIAKLDQAEKEKVDAAELVREFEALTEENRTLRLAQSQCVEQLEKLRIQYQKRQGSS

SEQ ID NO: 105280 - protein, 44 aa, Artificial Sequence
  derived and/or modified sequence
MVQLIAPLEVMWNEAADLKPLALSRRLECSGGIMAHYSPDLLGP

SEQ ID NO: 105281 - DNA, 729 bp, Artificial Sequence
  derived and/or modified sequence
atggtgcagctgatcgcaccgctggaagtcatgtggaacgaggcagctgacctgaagcccttagcgctctctcgtcggttggagtgctcaggcgggattatggcgcactacagtcccgacctgctgggacccgaaatggagtctcgctattttgcccaggtagggctggagcacctggcttcaagctctcctcctgcttttggctttctgaagtgtttagactatagcataagcgtgctgtgttctgccactagcctcgcaatgttagaggataatcccaaggtctctaagcttgctacaggggattggatgctgacccttaaacctaagagtatcacagtaccggttgagataccatctagtcctctggatgacacaccgcctgaggactccatacctctggtgtttcccgagctcgatcagcagctccagcctctccctccttgtcacgattcagaagaaagcatggaggtttttaaacagcactgtcagattgcagaggagtaccacgaggtaaaaaaagaaattacactgttggagcagcggaagaaggagctaatcgctaagctggatcaagctgaaaaagagaaggtcgacgctgcggagttggtgagggaattcgaggccctgaccgaagagaacaggactctgaggttggcccagtcacagtgcgtcgagcagttggagaaactgcgtattcaatatcagaagcgccagggatcctcatag

SEQ ID NO: 105282 - DNA, 729 bp, Artificial Sequence
  derived and/or modified sequence
atggtgcagctgatagccccactcgaagtgatgtggaacgaagcagctgacctcaagccactggctctttcacgccgcctcgagtgctccgggggcatcatggctcactattcgcctgacctactgggcccagagatggaatccagatactttgctcaggtcggtttggagcacttagcctctagcagtccccctgcatttggattcttgaagtgtctggattactctatcagcgtgctgtgctccgccactagtctggccatgctggaggataacccgaaagtgtctaagttggctaccggggattggatgctaaccctgaagcctaaatcaattacggtgcctgtagagattccatcttctccccttgatgacacacctcctgaggatagtattcctcttgtttttcccgaacttgaccagcagcttcagccccttccgccttgccacgatagtgaagaatccatggaagtgttcaagcagcactgccagatcgccgaggagtaccatgaggtcaagaaagagattacacttctagaacagaggaaaaaagaactgatcgcaaaactcgatcaggctgagaaggaaaaggtagatgctgccgagctagtgagggaattcgaagcccttactgaagaaaatagaacactgcgtcttgcccaaagccagtgtgtggagcaactggaaaagctgaggatccaataccagaagcgtcaagggagtagctag

SEQ ID NO: 105283 - DNA, 729 bp, Artificial Sequence
  derived and/or modified sequence
atggtgcagctgattgcccccctggaggtgatgtggaatgaagctgctgacctgaagcccctggccctgagccggcggctggagtgcagcggcggcatcatggcccactacagcccagacctgctgggccctgagatggagagccgctactttgcccaggtgggcctggagcacctggccagcagcagccccccagccttcggcttcctgaagtgcctggactacagcatctctgtgctgtgcagcgccaccagcctggccatgctggaggacaaccccaaggtgtccaagctggccaccggggactggatgctgaccctgaagcccaagagcatcaccgtgcctgtggagatccccagcagccccctggatgacaccccaccagaagattccatccccctggtgtttcctgagctggaccagcagctgcagcccctgcccccctgccacgacagcgaggagagcatggaggtgttcaagcagcactgccagattgctgaggagtaccacgaggtgaagaaggagatcaccctgctggagcagaggaagaaggagctgattgccaagctggaccaggccgagaaggagaaggtggatgctgctgagctggtgcgggagtttgaggccctgacagaagaaaatagaaccctgcggctggcccagagccagtgtgtggagcagctggagaagctgcgcatccagtaccagaagaggcagggcagcagctag

SEQ ID NO: 105284 - DNA, 729 bp, Artificial Sequence
  derived and/or modified sequence
atggtgcagctgatcgcccccctggaggtgatgtggaacgaggccgcagacctgaagccattggctctgtctaggcgtctggagtgctcgggcggaatcatggcccactatagtccggatctcctgggccccgagatggaatccagatactttgcacaggtcggtctggaacatctcgctagttctagtccacccgcattcgggttcttaaagtgtctagattatagcataagcgtgctctgttcagctactagcctcgctatgctggaggataacccaaaggtttctaagctggcaacaggcgattggatgctgactctgaaacctaaatccattactgtgccggtggaaatcccaagcagtcctcttgacgacacaccccccgaggactccatccctttagtgttccccgaactggaccagcaactgcagccactgccgccatgtcacgactctgaggagtctatggaggtctttaaacagcattgccaaatcgctgaggagtatcacgaagtcaaaaaagagattaccctgttggagcaacggaagaaggagctgatcgcgaaactcgatcaggcagagaaggaaaaggtagacgcagctgagctagtgcgggaattcgaggccctgaccgaggagaaccgcactctgagattggcgcaatcccagtgtgtggaacagctagagaagctacggatacagtaccagaaaaggcagggttcatcatag

SEQ ID NO: 105285 - DNA, 729 bp, Artificial Sequence
  derived and/or modified sequence
atggtgcagctgatcgcccccctggaggtgatgtggaacgaggccgctgatctcaaaccactggccctctcaaggagactggagtgttccggcggcatcatggcccattacagcccagacctgctgggccctgaaatggagagccggtatttcgcacaagttggactggagcatctcgcttcgtcatctcctccggcattcggattcctcaaatgcctcgactattctatctccgtgctgtgtagcgctacatcactcgctatgcttgaggacaaccccaaggtctctaaacttgccacaggggattggatgttgaccctgaaaccaaaaagtataactgtccccgttgagatcccaagttccccccttgacgacaccccacccgaggatagcattccacttgtgttcccggagcttgatcagcagttacaaccattgccgccctgccacgattctgaggagagtatggaggtgttcaagcagcattgccaaattgcagaagaatatcacgaagtgaaaaaggagattactctgcttgaacaaaggaagaaggagcttatcgcgaagttagatcaagctgagaaggagaaagtggacgctgcggagctggtgcgggagttcgaagcactgacagaagagaataggaccttacgtttggcccagagccaatgcgtagaacaactggagaaattaagaatccagtaccagaagagacagggatccagttag

SEQ ID NO: 105286 - DNA, 729 bp, Artificial Sequence
  derived and/or modified sequence
atggttcagttgatagcccctttggaggttatgtggaacgaggcagccgaccttaagcccttggcactcagccgtaggctggaatgctccggtggtatcatggcacactactcccctgacctgttgggaccggaaatggagtcacgatacttcgctcaagtaggactcgagcatctcgcatcctcaagtcctccagccttcggattcctaaagtgtctggattacagtatctctgtgctgtgctcagccacgagcctggctatgcttgaggacaatccaaaagtctcgaagcttgccaccggtgactggatgcttaccctgaaacctaagtctattaccgtgcctgtcgaaatcccatcctctcccctggatgacactccaccggaagattcaatcccactcgtgtttccagaactggatcagcagctccagcccctcccaccttgccatgatagtgaggagtcaatggaggttttcaaacaacactgccagattgccgaggaataccatgaggtaaagaaagagattactctcctggagcagcggaagaaagagttgatagcaaagctggatcaggccgaaaaagagaaagttgacgcagccgagctcgttcgggagttcgaggctttgacagaggagaatcgcactctcagactcgcccaatcacagtgcgtcgagcagctcgagaagttacggattcagtaccagaagagacaaggcagttcctag

SEQ ID NO: 105287 - DNA, 729 bp, Artificial Sequence
  derived and/or modified sequence
atggttcagttaatcgcccctttagaagtcatgtggaatgaagcggcagacctgaaaccattagccctctcaagacgactggagtgttccggcggtatcatggcccattacagcccggacctcctgggcccagaaatggagtcacgatacttcgcccaagtcggactagaacatctggcctcatcgtctcctccagctttcggtttcctcaagtgcttggactactcaatcagtgtactctgctccgccacctccctggcaatgctggaagataatcctaaggtgtcaaagctggccactggcgattggatgttgacattaaaaccaaaaagcatcactgtcccagtggagataccttcatcgccactcgacgacactccacccgaggattccatccccctggtcttccctgaactggatcagcaactgcagcccctgcccccttgccatgactccgaggagagcatggaagtgttcaagcagcactgccagattgctgaagagtatcacgaggtgaaaaaggaaattaccctgttggaacagaggaaaaaggagctgatcgcgaaactcgatcaggccgaaaaagagaaggtagacgccgcagagttggtcagagagttcgaggcacttacggaagagaaccgcacactgaggttggcccagagtcagtgtgttgaacagttggagaagctcaggatacagtaccagaagcgccagggctcctcttag

SEQ ID NO: 105288 - DNA, 1962 bp, Artificial Sequence
  derived and/or modified sequence
ccgagagcgagggagggctgtgaggactgccagcacgctgtcacctctcaatagcagcccaaacagattaagacatgggaggtgaaagacaacttgagtggttaaattactgtcatgcaaagcgactagatggttcagctgattgcacctttagaagttatgtggaacgaggcagcagatcttaagccccttgctctgtcacgcaggctggaatgcagtggtggaatcatggctcactacagccctgacctcctgggcccagagatggagtctcgctattttgcccaggttggtcttgaacacctggcttcaagcagtcctcctgcttttggcttcttgaagtgcttggattacagtatttcagttttatgctctgcaacaagtttggccatgttggaggacaatccaaaggtcagcaagttggctactggcgattggatgctcactctgaagccaaagtctattactgtgcccgtggaaatccccagctcccctctggctggaagacccaggagaaggcggaggctcaggtgcccacatgatcagcacagccagggtacctgctgacaagcctgtacgcatcgcctttagcctcaatgacgcctcagatgatacaccccctgaagactccattcctttggtctttccagaattagaccagcagctacagcccctgccgccttgtcatgactccgaggaatccatggaggtgttcaaacagcactgccaaatagcagaagaataccatgaggtcaaaaaggaaatcaccctgcttgagcaaaggaagaaggagctcattgccaagttagatcaggcagaaaaggagaaggtggatgctgctgagctggttcgggaattcgaggctctgacggaggagaatcggacgttgaggttggcccagtctcaatgtgtggaacaactggagaaacttcgaatacagtatcagaagaggcagggctcgtcctaactttaaatttttcagtgtgagcatacgaggctgatgactgccctgtgctggccaaaagatttttattttaaatgaatagtgagtcagatctattgcttctctgtattacccacatgacaactgtctataatgagtttactgcttgccagcttctagcttgagagaagggatattttaaatgagatcattaacgtgaaactattactagtatatgtttttggagatcagaattcttttccaaagatatatgtttttttcttttttaggaagatatgatcatgctgtacaacagggtagaaaatgataaaaatagactattgactgacccagctaagaatcgtgggctgagcagagttaaaccatgggacaaacccataacatgttcaccatagtttcacgtatgtgtatttttaaatttcatgcctttaatatttcaaatatgctcaaatttaaactgtcagaaacttctgtgcatgtatttatatttgccagagtataaacttttatactctgatttttatccttcaatgattgattatactaagaataaatggtcacatatcctaaaagcttcttcatgaaattattagcagaaaccatgtttgtaaccaaagcacatttgccaatgctaactggctgttgtaataataaacagataaggctgcatttgcttcatgccatgtgacctcacagtaaacatctctgcctttgcctgtgtgtgttctgggggaggggggacatggaaaaatattgtttggacattacttgggtgagtgcccatgaaaacatcagtgaacttgtaactattgttttgttttggatttaaggagatgttttagatcagtaacagctaataggaatatgcgagtaaattcagaattgaaacaatttctccttgttctacctatcaccacattttctcaaattgaactctttgttatatgtccatttctattcatgtaacttctttttcattaaacatggatcaaaactga

SEQ ID NO: 105289 - DNA, 1855 bp, Artificial Sequence
  derived and/or modified sequence
ccgagagcgagggagggctgtgaggactgccagcacgctgtcacctctcaatagcagcccaaacagattaagacatgggaggtgaaagacaacttgagtggttaaattactgtcatgcaaagcgactagatggttcagctgattgcacctttagaagttatgtggaacgaggcagcagatcttaagccccttgctctgtcacgcaggctggaatgcagtggtggaatcatggctcactacagccctgacctcctgggcccagagatggagtctcgctattttgcccaggttggtcttgaacacctggcttcaagcagtcctcctgcttttggcttcttgaagtgcttggattacagtatttcagttttatgctctgcaacaagtttggccatgttggaggacaatccaaaggtcagcaagttggctactggcgattggatgctcactctgaagccaaagtctattactgtgcccgtggaaatccccagctcccctctggatgatacaccccctgaagactccattcctttggtctttccagaattagaccagcagctacagcccctgccgccttgtcatgactccgaggaatccatggaggtgttcaaacagcactgccaaatagcagaagaataccatgaggtcaaaaaggaaatcaccctgcttgagcaaaggaagaaggagctcattgccaagttagatcaggcagaaaaggagaaggtggatgctgctgagctggttcgggaattcgaggctctgacggaggagaatcggacgttgaggttggcccagtctcaatgtgtggaacaactggagaaacttcgaatacagtatcagaagaggcagggctcgtcctaactttaaatttttcagtgtgagcatacgaggctgatgactgccctgtgctggccaaaagatttttattttaaatgaatagtgagtcagatctattgcttctctgtattacccacatgacaactgtctataatgagtttactgcttgccagcttctagcttgagagaagggatattttaaatgagatcattaacgtgaaactattactagtatatgtttttggagatcagaattcttttccaaagatatatgtttttttcttttttaggaagatatgatcatgctgtacaacagggtagaaaatgataaaaatagactattgactgacccagctaagaatcgtgggctgagcagagttaaaccatgggacaaacccataacatgttcaccatagtttcacgtatgtgtatttttaaatttcatgcctttaatatttcaaatatgctcaaatttaaactgtcagaaacttctgtgcatgtatttatatttgccagagtataaacttttatactctgatttttatccttcaatgattgattatactaagaataaatggtcacatatcctaaaagcttcttcatgaaattattagcagaaaccatgtttgtaaccaaagcacatttgccaatgctaactggctgttgtaataataaacagataaggctgcatttgcttcatgccatgtgacctcacagtaaacatctctgcctttgcctgtgtgtgttctgggggaggggggacatggaaaaatattgtttggacattacttgggtgagtgcccatgaaaacatcagtgaacttgtaactattgttttgttttggatttaaggagatgttttagatcagtaacagctaataggaatatgcgagtaaattcagaattgaaacaatttctccttgttctacctatcaccacattttctcaaattgaactctttgttatatgtccatttctattcatgtaacttctttttcattaaacatggatcaaaactgaca

SEQ ID NO: 105290 - DNA, 1964 bp, Artificial Sequence
  derived and/or modified sequence
ccgagagcgagggagggctgtgaggactgccagcacgctgtcacctctcaatagcagcccaaacagattaagacatgggaggtgaaagacaacttgagtggttaaattactgtcatgcaaagcgactagatggttcagctgattgcacctttagaagttatgtggaacgaggcagcagatcttaagccccttgctctgtcacgcaggctggaatgcagtggtggaatcatggctcactacagccctgacctcctgggcccagagatggagtctcgctattttgcccaggttggtcttgaacacctggcttcaagcagtcctcctgcttttggcttcttgaagtgcttggattacagtatttcagttttatgctctgcaacaagtttggccatgttggaggacaatccaaaggtcagcaagttggctactggcgattggatgctcactctgaagccaaagtctattactgtgcccgtggaaatccccagctcccctctggctggaagacccaggagaaggcggaggctcaggtgcccacatgatcagcacagccagggtacctgctgacaagcctgtacgcatcgcctttagcctcaatgacgcctcagatgatacaccccctgaagactccattcctttggtctttccagaattagaccagcagctacagcccctgccgccttgtcatgactccgaggaatccatggaggtgttcaaacagcactgccaaatagcagaagaataccatgaggtcaaaaaggaaatcaccctgcttgagcaaaggaagaaggagctcattgccaagttagatcaggcagaaaaggagaaggtggatgctgctgagctggttcgggaattcgaggctctgacggaggagaatcggacgttgaggttggcccagtctcaatgtgtggaacaactggagaaacttcgaatacagtatcagaagaggcagggctcgtcctaactttaaatttttcagtgtgagcatacgaggctgatgactgccctgtgctggccaaaagatttttattttaaatgaatagtgagtcagatctattgcttctctgtattacccacatgacaactgtctataatgagtttactgcttgccagcttctagcttgagagaagggatattttaaatgagatcattaacgtgaaactattactagtatatgtttttggagatcagaattcttttccaaagatatatgtttttttcttttttaggaagatatgatcatgctgtacaacagggtagaaaatgataaaaatagactattgactgacccagctaagaatcgtgggctgagcagagttaaaccatgggacaaacccataacatgttcaccatagtttcacgtatgtgtatttttaaatttcatgcctttaatatttcaaatatgctcaaatttaaactgtcagaaacttctgtgcatgtatttatatttgccagagtataaacttttatactctgatttttatccttcaatgattgattatactaagaataaatggtcacatatcctaaaagcttcttcatgaaattattagcagaaaccatgtttgtaaccaaagcacatttgccaatgctaactggctgttgtaataataaacagataaggctgcatttgcttcatgccatgtgacctcacagtaaacatctctgcctttgcctgtgtgtgttctgggggaggggggacatggaaaaatattgtttggacattacttgggtgagtgcccatgaaaacatcagtgaacttgtaactattgttttgttttggatttaaggagatgttttagatcagtaacagctaataggaatatgcgagtaaattcagaattgaaacaatttctccttgttctacctatcaccacattttctcaaattgaactctttgttatatgtccatttctattcatgtaacttctttttcattaaacatggatcaaaactgaca

SEQ ID NO: 105291 - DNA, 2003 bp, Artificial Sequence
  derived and/or modified sequence
atgtacaagggcagccgtggggctggcaacagcttcgtaatcctggcttcctgctttctgggtcaaagccctggtggtgtgttcttgatatcggtccatctagtggcgttgtttgattcctcccaccttgctgatcattcgtagtgtagcccccaaggtgtggaataacccttaagcccttaccggggtccttctggactgagaattgttgtaaagtaatactgctcaggtgaaagacaacttgagtggttaaattactgtcatgcaaagcgactagatggttcagctgattgcacctttagaagttatgtggaacgaggcagcagatcttaagccccttgctctgtcacgcaggctggaatgcagtggtggaatcatggctcactacagccctgacctcctgggcccagagatggagtctcgctattttgcccaggttggtcttgaacacctggcttcaagcagtcctcctgcttttggcttcttgaagtgcttggattacagtatttcagttttatgctctgcaacaagtttggccatgttggaggacaatccaaaggtcagcaagttggctactggcgattggatgctcactctgaagccaaagtctattactgtgcccgtggaaatccccagctcccctctggatgatacaccccctgaagactccattcctttggtctttccagaattagaccagcagctacagcccctgccgccttgtcatgactccgaggaatccatggaggtgttcaaacagcactgccaaatagcagaagaataccatgaggtcaaaaaggaaatcaccctgcttgagcaaaggaagaaggagctcattgccaagttagatcaggcagaaaaggagaaggtggatgctgctgagctggttcgggaattcgaggctctgacggaggagaatcggacgttgaggttggcccagtctcaatgtgtggaacaactggagaaacttcgaatacagtatcagaagaggcagggctcgtcctaactttaaatttttcagtgtgagcatacgaggctgatgactgccctgtgctggccaaaagatttttattttaaatgaatagtgagtcagatctattgcttctctgtattacccacatgacaactgtctataatgagtttactgcttgccagcttctagcttgagagaagggatattttaaatgagatcattaacgtgaaactattactagtatatgtttttggagatcagaattcttttccaaagatatatgtttttttcttttttaggaagatatgatcatgctgtacaacagggtagaaaatgataaaaatagactattgactgacccagctaagaatcgtgggctgagcagagttaaaccatgggacaaacccataacatgttcaccatagtttcacgtatgtgtatttttaaatttcatgcctttaatatttcaaatatgctcaaatttaaactgtcagaaacttctgtgcatgtatttatatttgccagagtataaacttttatactctgatttttatccttcaatgattgattatactaagaataaatggtcacatatcctaaaagcttcttcatgaaattattagcagaaaccatgtttgtaaccaaagcacatttgccaatgctaactggctgttgtaataataaacagataaggctgcatttgcttcatgccatgtgacctcacagtaaacatctctgcctttgcctgtgtgtgttctgggggaggggggacatggaaaaatattgtttggacattacttgggtgagtgcccatgaaaacatcagtgaacttgtaactattgttttgttttggatttaaggagatgttttagatcagtaacagctaataggaatatgcgagtaaattcagaattgaaacaatttctccttgttctacctatcaccacattttctcaaattgaactctttgttatatgtccatttctattcatgtaacttctttttcattaaacatggatcaaaactgaca

SEQ ID NO: 105292 - DNA, 1682 bp, Artificial Sequence
  derived and/or modified sequence
gcacctctccctccacacctccccgcaagctgagggagccggctccggcctcggccagcccaggaaggcgctcccacagcgcagtggtgggctgaagggctcctcaagtgccgccaaagtgggagcccaggcagaggaggcgccgagagcgagggagggctgtgaggactgccagcacgctgtcacctctcaatagcagcccaaacagattaagacatgggaggtgaaagacaacttgagtggttaaattactgtcatgcaaagcgactagatggttcagctgattgcacctttagaagttatgtggaacgaggcagcagatcttaagccccttgctctgtcacgcaggctggaatgcagtggtggaatcatggctcactacagccctgacctcctgggcccagagatggagtctcgctattttgcccaggttggtcttgaacacctggcttcaagcagtcctcctgcttttggcttcttgaagtgcttggattacagtatttcagttttatgctctgcaacaagtttggccatgttggaggacaatccaaaggtcagcaagttggctactggcgattggatgctcactctgaagccaaagtctattactgtgcccgtggaaatccccagctcccctctgggttgacattcgtaaccttcctggatcctatcagagaaaccttgttcatcatttcatttccaaattatgaagaccacctgggcctgactgaagatgcttgtttcttcctcttccctaacgccctttccaccagtgcggactgcagatgatacaccccctgaagactccattcctttggtctttccagaattagaccagcagctacagcccctgccgccttgtcatgactccgaggaatccatggaggtgttcaaacagcactgccaaatagcagaagaataccatgaggtcaaaaaggaaatcaccctgcttgagcaaaggaagaaggagctcattgccaagttagatcaggcagaaaaggagaaggtggatgctgctgagctggttcgggaattcgaggctctgacggaggagaatcggacgttgaggttggcccagtctcaatgtgtggaacaactggagaaacttcgaatacagtatcagaagaggcagggctcgtcctaactttaaatttttcagtgtgagcatacgaggctgatgactgccctgtgctggccaaaagatttttattttaaatgaatagtgagtcagatctattgcttctctgtattacccacatgacaactgtctataatgagtttactgcttgccagcttctagcttgagagaagggatattttaaatgagatcattaacgtgaaactattactagtatatgtttttggagatcagaattcttttccaaagatatatgtttttttcttttttaggaagatatgatcatgctgtacaacagggtagaaaatgataaaaatagactattgactgacccagctaagaatcgtgggctgagcagagttaaaccatgggacaaacccataacatgttcaccatagtttcacgtatgtgtatttttaaatttcatgcctttaatatttcaaatatgctcaaatttaaactgtcagaaacttctgtgcatgtatttatatttgccagagtataaacttttatactctgatttttatccttcaatgattgatta

SEQ ID NO: 105293 - DNA, 729 bp, Artificial Sequence
  derived and/or modified sequence
atggtgcagctgatcgcccccctggaggtgatgtggaacgaggccgccgacctgaagcccctggccctgagcagaagactggagtgcagcggcggcatcatggcccactacagccccgacctgctgggccccgagatggagagcagatacttcgcccaggtgggcctggagcacctggccagcagcagcccccccgccttcggcttcctgaagtgcctggactacagcatcagcgtgctgtgcagcgccaccagcctggccatgctggaggacaaccccaaggtgagcaagctggccaccggcgactggatgctgaccctgaagcccaagagcatcaccgtgcccgtggagatccccagcagccccctggacgacaccccccccgaggacagcatccccctggtgttccccgagctggaccagcagctgcagcccctgcccccctgccacgacagcgaggagagcatggaggtgttcaagcagcactgccagatcgccgaggagtaccacgaggtgaagaaggagatcaccctgctggagcagagaaagaaggagctgatcgccaagctggaccaggccgagaaggagaaggtggacgccgccgagctggtgagagagttcgaggccctgaccgaggagaacagaaccctgagactggcccagagccagtgcgtggagcagctggagaagctgagaatccagtaccagaagagacagggcagcagctag

SEQ ID NO: 105294 - protein, 241 aa, Artificial Sequence
  derived and/or modified sequence
MSLPIAKKYMSENKGVPLHGGDEDRPFPDFDPWWTNDCEQNESEPIPANCTGCAQKHLKVMLLEDAPRKFERLHPLVIKTGKPLLEEEIQHFLCQYPEATEGFSEGFFAKWWRCFPERWFPFPYPWRRPLNRSQMLRELFPVFTHLPFPKDASLNKCSFLHPEPVVGSKMHKMPDLFIIGSGEAMLQLIPPFQCRRHCQSVAMPIEPGDIGYVDTTHWKVYVIARGVQPLVICDGTAFSEL

SEQ ID NO: 105295 - DNA, 1476 bp, Artificial Sequence
  derived and/or modified sequence
atgctgcagagggagaggacaacagctccagtaaacaaaaaggtcagggcagacaggagtattatggaactgctccaggactcttgattttcaagcttatggtgtcaggaatgggatctaaagtggagcttctagcgacccccaggagcactgagtgaacatgcaaggtacctgcaggatccacttgtgtctattgatctctcacagcagctggggatcacagaacctgcagattggatcgtctgagaacaccagagaaagagaaagactgtccttgccatccacactacagcaaaactttggagctttaaaccttgggttcataatctcacagctgagaagggtccctccacactcctggaactgtacatccattggaacccttaagggattttatattggaagacatggatcttgctgccaacgagatcagcatttatgacaaactttcagagactgttgatttggtgagacagaccggccatcagtgtggcatgtcagagaaggcaattgaaaaatttatcagacagctgctggaaaagaatgaacctcagagaccccccccgcagtatcctctccttatagttgtgtataagcccattagcacctgagccagtgctttctggagctcacacctggcgctcactcatccatcacattaggctgatgtccttgcccattgccaagaagtacatgtcagaaaataagggagttcctctgcatgggggtgatgaagacagaccctttccagactttgacccctggtggacaaacgactgtgagcagaatgagtcagagcccattcctgccaactgcactggctgtgcccagaaacacctgaaggtgatgctcctggaagacgccccaaggaaatttgagaggctccatccactggtgatcaagacgggaaagcccctgttggaggaagagattcagcattttttgtgccagtaccctgaggcgacagaaggcttctctgaagggtttttcgccaagtggtggcgctgctttcctgagcggtggttcccatttccttatccatggaggagacctctgaacagatcacaaatgttacgtgagctttttcctgttttcactcacctgccatttccaaaagatgcctctttaaacaagtgctcctttcttcacccagaacctgttgtggggagtaagatgcataagatgcctgacctatttatcattggcagcggtgaggccatgttgcagctcatccctcccttccagtgccgaagacattgtcagtctgtggccatgccaatagagccaggggatatcggctatgtcgacaccacccactggaaggtctacgttatagccagaggggtccagcctttggtcatctgcgatggaaccgctttctcagaactgtaggaaatagaactgtgcacaggaacagcttccagagccgaaaaccaggttgaaaggggaaaaataaaaacaaaaacgatgaaactg

SEQ ID NO: 105296 - DNA, 1044 bp, Artificial Sequence
  derived and/or modified sequence
atggacctggccgccaacgagatcagcatctacgacaagctgagcgagaccgtggacctggtgagacagaccggccaccagtgcggcatgagcgagaaggccatcgagaagttcatcagacagctgctggagaagaacgagccccagagaccccccccccagtaccccctgctgatcgtggtgtacaaggtgctggccaccctgggcctgatcctgctgaccgcctacttcgtgatccagcccttcagccccctggcccccgagcccgtgctgagcggcgcccacacctggagaagcctgatccaccacatcagactgatgagcctgcccatcgccaagaagtacatgagcgagaacaagggcgtgcccctgcacggcggcgacgaggacagacccttccccgacttcgacccctggtggaccaacgactgcgagcagaacgagagcgagcccatccccgccaactgcaccggctgcgcccagaagcacctgaaggtgatgctgctggaggacgcccccagaaagttcgagagactgcaccccctggtgatcaagaccggcaagcccctgctggaggaggagatccagcacttcctgtgccagtaccccgaggccaccgagggcttcagcgagggcttcttcgccaagtggtggagatgcttccccgagagatggttccccttcccctacccctggagaagacccctgaacagaagccagatgctgagagagctgttccccgtgttcacccacctgcccttccccaaggacgccagcctgaacaagtgcagcttcctgcaccccgagcccgtggtgggcagcaagatgcacaagatgcccgacctgttcatcatcggcagcggcgaggccatgctgcagctgatcccccccttccagtgcagaagacactgccagagcgtggccatgcccatcgagcccggcgacatcggctacgtggacaccacccactggaaggtgtacgtgatcgccagaggcgtgcagcccctggtgatctgcgacggcaccgccttcagcgagctgtag

SEQ ID NO: 105297 - DNA, 1044 bp, Artificial Sequence
  derived and/or modified sequence
atggacctggccgcgaatgaaattagcatttatgacaagttgagtgagaccgtggatctcgtgcgccagaccgggcaccaatgcggaatgagtgagaaggcaatcgagaagtttattaggcagcttctcgagaagaacgaaccacaaagaccacctcctcagtaccctctgctgattgtggtctacaaagtgttggcaacattggggctgattttgctaaccgcatattttgtaatccagcctttttcccctctggcaccagagcccgtgctgtcaggagcgcacacctggcggagcctgatccatcacattcggctgatgagcctacctatcgccaaaaagtacatgtctgagaacaaaggcgtgcctctgcacggcggtgacgaggatcgccccttcccagactttgatccttggtggacgaacgactgcgaacagaatgagtccgagccaatccccgccaactgtaccggctgcgcccaaaaacatttgaaggtcatgttattggaagatgctccgcgcaagtttgaaagactccatccactggtaatcaaaacaggcaaaccactgctggaagaggagattcaacacttcctgtgccagtatcctgaggcgacagaggggtttagcgagggctttttcgctaagtggtggaggtgttttccggagaggtggtttccattcccatatccctggcgacggcccctcaatagatcacagatgctccgagagcttttccctgtattcacccacttgccttttccgaaagacgccagccttaacaagtgctcatttctgcaccctgagccagtggtgggctccaagatgcacaagatgcccgatttgttcatcattggatcgggcgaagctatgcttcagttaattccccctttccaatgtagaaggcactgccaaagcgttgctatgcctatagagccaggagatattggatacgtggataccacccactggaaagtctatgtaattgccaggggggtgcaacctctggtaatatgcgatggcacagcattctcagaactctag

SEQ ID NO: 105298 - DNA, 1044 bp, Artificial Sequence
  derived and/or modified sequence
atggacctggccgccaatgagatcagcatctatgacaagctgtctgaaacagtggacctggtgcggcagacaggccaccagtgtggcatgtctgagaaggccatcgagaagttcatccggcagctgctggagaagaatgagccccagaggcccccaccccagtaccccctgctgattgtggtgtacaaggtgctggccaccctgggcctcatcctgctgacagcctactttgtgatccagcccttcagccccctggcccctgagcctgtgctgagcggggcccacacctggaggagcctcatccaccacatccggctgatgagcctgcccatcgccaagaagtacatgtctgagaacaagggcgtgcccctgcatggaggagatgaagatcggcccttcccagactttgacccctggtggaccaatgactgtgagcagaatgaaagtgagcccatcccagccaactgcaccggctgtgcccagaagcacctgaaggtgatgctgctggaggatgcccccaggaagtttgagcggctgcaccccctggtgatcaagacaggcaagcccctgctggaggaggagatccagcacttcctgtgccagtacccagaggccacagagggcttcagcgagggcttctttgccaagtggtggcgctgcttccctgagcgctggttccccttcccctacccctggaggcggcccctgaacagaagccagatgctgcgggagctgtttcctgtgttcacccacctgcccttccccaaggatgccagcctgaacaagtgcagcttcctgcaccctgagcctgtggtgggcagcaagatgcacaagatgccagacctcttcatcatcggcagcggggaggccatgctgcagctgatcccccccttccagtgcagaagacactgccagagcgtggccatgcccatcgagcccggggacatcggctacgtggacaccacccactggaaggtgtatgtgattgcccggggcgtgcagcccctggtgatctgtgatggaacagccttcagcgagctgtag

SEQ ID NO: 105299 - DNA, 1044 bp, Artificial Sequence
  derived and/or modified sequence
atggacctggccgccaacgagatcagcatctacgacaagctgagcgagacggtggacctggtccggcagacagggcaccaatgcggtatgtctgagaaggcgatcgagaaatttataaggcagctcctggagaaaaatgaaccccagcgcccccctccccagtaccccctgctaatcgtcgtgtataaagttctggccactctaggtcttatactcctaaccgcatactttgtgatccaacctttttcccctctggcccccgagccagttctctccggagcacacacgtggcggagtcttattcatcatatccggctgatgagcctgcccattgccaaaaaatacatgtctgagaataagggtgtgcctctccacgggggcgatgaggatcgcccctttccagatttcgacccatggtggaccaacgactgtgagcagaatgagtcggaacctatccccgcaaactgtaccggctgcgcccagaaacacttgaaggtcatgctgctggaggacgctccgcgaaaattcgaacgcctacacccattggtcataaagaccggtaaacccctcttagaagaggaaatacagcactttctgtgtcaataccctgaagctacagagggatttagcgaggggttcttcgctaagtggtggcgctgttttcccgaacgttggttccccttcccctacccatggcgacggccgttgaacaggtctcagatgctgagggagctgtttcctgtctttacacacttgcctttcccaaaggatgccagcctgaataagtgctctttcctgcaccctgagcccgttgtgggctcgaaaatgcataagatgccggacctttttattatcggctcgggcgaggcgatgttgcagctgattccaccgttccagtgtcgccggcactgccaatccgtggcgatgcccattgaaccgggagacattgggtatgtggacacaacccattggaaagtttacgtgatcgccaggggtgtgcaacctctggtcatttgcgacgggaccgccttttccgaactgtag

SEQ ID NO: 105300 - DNA, 1044 bp, Artificial Sequence
  derived and/or modified sequence
atggatttggccgctaatgaaatctcgatctatgacaagttgagcgaaactgtcgatcttgtccggcagaccggccaccagtgtggtatgtcagagaaggccatcgagaaattcattcggcagctgctggagaagaatgagcctcagagaccacctcctcaatatccgctactgatcgtggtctataaggtcctggctaccctcggtctgattctgctaactgcatacttcgtgatccaaccatttagccccctggccccagagcccgtcctgagtggtgcacacacgtggcgcagtctcatacatcacattcgcctaatgtcactgcccatcgccaaaaaatatatgtctgaaaacaaaggggtcccccttcacggtggggacgaagaccggccatttccggacttcgatccatggtggacaaacgactgcgaacaaaatgaatccgaacccattcccgctaactgcacagggtgtgcccaaaagcacctgaaggtgatgctgctggaggatgcccctagaaaatttgaaagactgcaccctttagtgataaagactggcaaaccactactagaggaggaaattcagcatttcctgtgtcagtaccctgaagccaccgaggggttcagcgagggattttttgccaagtggtggagatgctttcctgaacgctggttcccctttccgtatccatggcggcgtcccctgaacaggtcccagatgctgcgtgagctcttccccgtcttcacacatctgccttttccaaaggatgcgtcccttaacaagtgctcttttctgcatccggagccggtggtgggtagcaaaatgcacaagatgcccgatcttttcatcatcggatccggagaggcaatgctccagcttattccccctttccagtgcaggcggcactgtcagagcgtagcgatgccaatcgagcccggtgacatcggatatgtggacaccacccactggaaggtgtatgtgatcgccaggggcgtacagcccctagtgatctgcgacggaaccgcatttagtgaactgtag

SEQ ID NO: 105301 - DNA, 726 bp, Artificial Sequence
  derived and/or modified sequence
atgagcctgcccatcgccaagaagtacatgagcgagaacaagggcgtgcccctgcacggcggcgacgaggacagacccttccccgacttcgacccctggtggaccaacgactgcgagcagaacgagagcgagcccatccccgccaactgcaccggctgcgcccagaagcacctgaaggtgatgctgctggaggacgcccccagaaagttcgagagactgcaccccctggtgatcaagaccggcaagcccctgctggaggaggagatccagcacttcctgtgccagtaccccgaggccaccgagggcttcagcgagggcttcttcgccaagtggtggagatgcttccccgagagatggttccccttcccctacccctggagaagacccctgaacagaagccagatgctgagagagctgttccccgtgttcacccacctgcccttccccaaggacgccagcctgaacaagtgcagcttcctgcaccccgagcccgtggtgggcagcaagatgcacaagatgcccgacctgttcatcatcggcagcggcgaggccatgctgcagctgatcccccccttccagtgcagaagacactgccagagcgtggccatgcccatcgagcccggcgacatcggctacgtggacaccacccactggaaggtgtacgtgatcgccagaggcgtgcagcccctggtgatctgcgacggcaccgccttcagcgagctgtag

SEQ ID NO: 105302 - DNA, 726 bp, Artificial Sequence
  derived and/or modified sequence
atgtctttgccaattgccaaaaagtacatgagtgagaacaaaggtgtacccttgcacggtggagacgaagaccgacctttccctgacttcgacccgtggtggaccaacgactgtgagcagaacgagtctgaacctattcccgccaattgcacaggatgtgcacagaagcatctcaaagtcatgcttctggaggacgccccgcgcaagtttgagcgactgcaccccctggtaatcaaaaccggtaagccgctgcttgaggaagagatccagcactttctgtgtcagtatcccgaggccacagagggattctccgagggtttcttcgctaagtggtggcgatgcttccccgagcgctggttcccattcccatacccatggcgtaggcccctgaacagaagccaaatgctaagggagctgttccccgtctttactcacctgcctttcccaaaggatgcgagcctcaataagtgcagctttctacaccccgagcccgtcgtgggcagtaagatgcacaagatgccagacctgtttataatcggatcaggcgaggctatgctgcagctgatcccaccatttcagtgccgcaggcactgccagagcgtagccatgcccatcgagccaggcgatatcgggtatgtcgacactacccactggaaagtgtacgtcatcgcaaggggtgtgcagccactggtcatttgtgacggcactgccttctcagaactatag

SEQ ID NO: 105303 - DNA, 726 bp, Artificial Sequence
  derived and/or modified sequence
atgtcactgccaatcgccaaaaaatatatgtccgaaaacaagggtgtgcctttgcatggtggcgacgaagaccgaccattccccgactttgacccctggtggacaaatgattgcgagcagaatgagtctgagcccatcccagcaaactgtaccggatgcgcccagaagcacctcaaggtgatgctgttagaggatgcgcctcgaaagtttgaacgcctgcatcccttggtgatcaaaacaggtaagccactgctggaagaagaaatacagcattttttgtgtcagtatccagaagcgactgaagggttcagtgagggatttttcgctaagtggtggaggtgcttccccgaaaggtggtttccttttccctatccttggcgccgcccgttaaaccggagccagatgctcagggagctgttccctgtgtttactcacctgccctttccaaaggacgcctctctcaacaagtgtagtttcctgcaccccgagcctgtggtagggtccaagatgcataagatgcctgatctattcatcatcggaagcggtgaagccatgctgcagttgatcccccccttccagtgcagacggcactgccagtccgtggcaatgccgatcgaacctggtgatattggatacgttgataccactcattggaaagtttacgtgatcgctaggggggtgcagccactggtgatatgcgatggcaccgctttttctgaactgtag

SEQ ID NO: 105304 - DNA, 726 bp, Artificial Sequence
  derived and/or modified sequence
atgagcctgcccatcgccaagaagtacatgtctgagaacaagggcgtgcccctgcatggaggagatgaagatcggcccttcccagactttgacccctggtggaccaatgactgtgagcagaatgaaagtgagcccatcccagccaactgcaccggctgtgcccagaagcacctgaaggtgatgctgctggaggatgcccccaggaagtttgagcggctgcaccccctggtgatcaagacaggcaagcccctgctggaggaggagatccagcacttcctgtgccagtacccagaggccacagagggcttcagcgagggcttctttgccaagtggtggcgctgcttccctgagcgctggttccccttcccctacccctggaggcggcccctgaacagaagccagatgctgcgggagctgtttcctgtgttcacccacctgcccttccccaaggatgccagcctgaacaagtgcagcttcctgcaccctgagcctgtggtgggcagcaagatgcacaagatgccagacctcttcatcatcggcagcggggaggccatgctgcagctgatcccccccttccagtgcagaagacactgccagagcgtggccatgcccatcgagcccggggacatcggctacgtggacaccacccactggaaggtgtatgtgattgcccggggcgtgcagcccctggtgatctgtgatggaacagccttcagcgagctgtag

SEQ ID NO: 105305 - DNA, 726 bp, Artificial Sequence
  derived and/or modified sequence
atgagcctgcccatcgccaagaagtacatgagcgagaacaagggcgtgccccttcatgggggcgacgaggaccgccccttcccagactttgacccttggtggaccaacgactgcgagcagaatgagtccgaacctatccctgccaattgcactggttgcgcacagaagcatctgaaagtgatgttgcttgaagacgctccaaggaagtttgaacggctacacccattggtcattaaaacaggaaaacctttgctcgaggaggaaattcagcactttctttgccagtaccccgaggcaaccgaggggttttctgaaggattttttgccaagtggtggcgatgcttcccagagaggtggttcccctttccatacccctggagacggcctttgaacaggtcccaaatgctaagagagctcttccccgtcttcacgcatcttcccttccccaaggatgcctccctcaacaaatgctcttttctccatccagagcctgtagtcggttccaaaatgcataaaatgcctgatctctttattatcggatcgggcgaggctatgctccagttaatccctccctttcaatgcaggaggcattgtcagtccgtagccatgcctatcgagcccggcgacatcggatatgttgacacgacccactggaaggtgtatgttattgcccggggggttcagcccctggtgatctgtgacggcaccgcattcagcgagctctag

SEQ ID NO: 105306 - DNA, 726 bp, Artificial Sequence
  derived and/or modified sequence
atgagcctgcccatcgccaagaagtacatgagcgagaacaagggcgtgcccttgcacgggggagatgaagacaggccctttcctgatttcgacccatggtggacgaatgactgtgagcaaaacgagagcgagccaatacctgccaattgtaccggctgcgctcagaagcacctgaaggtcatgctgctggaagatgcgccaaggaagttcgagcggttacatcccttggtgataaaaaccgggaagccattactggaggaagaaatacagcattttctttgtcaataccctgaggcaactgagggcttctccgaagggttctttgccaagtggtggaggtgttttccagaacgttggttccccttcccatatccatggaggcggccgttaaaccgatcccaaatgctcagagagctgttccccgtattcactcatctgcccttcccaaaggatgcatcccttaacaagtgtagctttctgcacccagaacctgtcgtaggaagcaagatgcacaagatgccagatctattcatcattggctccggagaagccatgctccagctgatccccccattccagtgtcgtcggcactgccagtctgtggctatgcccattgagccaggggacatcggatatgttgatactacccactggaaggtctatgttatcgcccgcggcgtacaacctctggtgatatgtgatggtactgcctttagtgaattatag

SEQ ID NO: 105307 - DNA, 726 bp, Artificial Sequence
  derived and/or modified sequence
atgtcactgccaatcgctaaaaagtacatgtccgagaataagggtgtccctcttcacggcggagacgaggatcggccatttccagactttgatccatggtggaccaatgattgtgaacaaaatgagagcgagcccatcccagccaattgcaccgggtgcgctcagaaacatttaaaagtgatgttgctagaagatgccccacggaagttcgagaggctgcatccattggttatcaagactggtaagcccctgctggaggaggagatccagcacttcctgtgtcagtatcccgaggcgacagaaggtttctccgagggtttcttcgccaagtggtggagatgcttccctgaacggtggtttccatttccctatccctggcgaagaccactgaataggtcccagatgctgcgggagctttttccagtcttcactcacctccccttccctaaggatgctagcctgaataaatgctcctttctccaccccgagcccgttgttggttccaaaatgcacaagatgcctgatttattcattatcggctcaggagaggccatgctgcagctgattcccccattccagtgtaggaggcattgccagtccgtggccatgcccatcgagcctggggacattggatacgtcgacaccacccactggaaagtctatgtcatcgcgagaggcgtgcagccacttgtgatctgtgatggcacggctttctccgagctctag

SEQ ID NO: 105308 - DNA, 726 bp, Artificial Sequence
  derived and/or modified sequence
atgtccctcccaattgccaaaaaatacatgtcagagaataagggggttcctctccacggcggtgatgaggaccgcccattccccgatttcgacccctggtggactaacgactgtgagcagaatgaaagcgagccaattccagccaattgtacagggtgtgcacagaagcacctgaaagtaatgctactcgaggacgctccaagaaagttcgaacgtctgcacccccttgtgattaagaccgggaaaccactgctggaagaggagatacagcacttcctttgtcagtacccagaggcgacagaggggttttccgaaggcttctttgctaagtggtggaggtgctttcctgaacgctggtttcccttcccttacccctggcggagaccactcaatagatcccagatgcttagagagctcttccccgtgttcacacacctcccattccctaaggacgccagcctgaacaagtgctcatttctgcacccagagcctgtggtggggtcgaaaatgcacaaaatgcctgatctcttcattatcggatcaggtgaggctatgctgcagctgattccaccttttcaatgcagacggcactgccaatccgttgcgatgcccatcgagcccggagacatcggctacgtggatacaacccactggaaagtgtacgttatagctcggggagttcaacctctggtgatatgtgacggtacagctttctcagagttatag

SEQ ID NO: 105309 - protein, 438 aa, Artificial Sequence
  derived and/or modified sequence
MEVGGDTAAPAPGGAEDLEDTQFPSEEAREGGGVHAVPPDPEDEGLEETEDHKLVFLQQGPLLLVAMSRTSQSAAQLRGELLAVHAQIVSTLTRASVARIFAHKQNYDLRRLLAGSERTLDRLLDSMEQDPGALLLGAVRCVPLARPLRDALGALLRRCTAPGLALSVLAVGGRLITAAQERNVLAECRLDPADLQLLLDWVGAPAFAAGEAWAPVCLPRFNPDGFFYAYVARLDAMPVCLLLLGTQREAFHAMAACRRLVEDGMHALGAMRALGEAASFSNASSASAPAYSVQAVGAPGLRHFLYKPLDIPDHHRQLPQFTSPELEAPYSREEERQRLSDLYHRLHARLHSTSRPLRLIYHVAEKETLLAWVTSKFELYTCLSPLVTKAGAILVVTKLLRWVKKEEDRLFIRYPPKYSTPPATSTDQAAHNGLFTGL

SEQ ID NO: 105310 - DNA, 1317 bp, Artificial Sequence
  derived and/or modified sequence
atggaggtgggcggagacacagcagcccctgcacctggtggtgctgaggatttggaggatacccagttcccctctgaagaggcccgggagggcggcggagtgcacgccgtgccacctgatcccgaagatgaagggctcgaggaaaccgaggaccataaacttgtttttctccagcagggccccctcttgctggtcgccatgtccagaaccagtcagtccgcagcacagctccgaggtgaactgctcgccgttcacgcccaaatagtgagcacattaaccagggcctcagtcgccaggatctttgcccacaaacagaactacgacctcagaagactgctggcggggtcagaacgtacattagacaggctgctggatagcatggagcaagaccccggggcactcttgctgggggccgtgcgctgtgtccccttggccaggccattgagggatgccttaggagctctcctccgcagatgtaccgcccctgggctcgcactcagcgtgttggccgttggcggccgcctcatcaccgcggcgcaggagcgcaacgtcttggccgaatgcaggttagatccagctgacttgcagctgctgctggactgggttggcgctccagcctttgccgcgggtgaagcttgggcacctgtttgcctgccccgctttaaccccgacgggtttttctacgcatacgttgcccggctagacgcaatgcccgtctgtctgttgctcctgggtacacaaagagaggcatttcatgcaatggcggcctgtcgcaggctggtggaagacggcatgcatgcactgggagcaatgcgcgcgttaggcgaagctgcaagtttctctaatgcctctagcgcttccgctcccgcttacagcgtacaggcggtcggtgcaccgggactgcgacacttcctgtacaagcccctggacattcccgaccaccacagacaacttcctcagtttacaagtccagagctggaagctccgtactcccgggaggaagagcggcagcggctctctgacttgtatcacagacttcacgcacgtttgcatagcacatcccggccattgagacttatctatcacgtcgctgagaaagagactctccttgcctgggtgacatctaaatttgaactctatacttgcttgagccccctggttactaaagccggggccatcctcgtggttactaagctgctgcgttgggtgaagaaagaggaggacaggctcttcatccggtatccacccaaatacagtacccctccagcaaccagtactgatcaagctgcacataatgggctgtttaccgggctgtag

SEQ ID NO: 105311 - DNA, 1317 bp, Artificial Sequence
  derived and/or modified sequence
atggaggtgggcggggacacagctgccccagcccctgggggcgctgaggacctggaggacacccagttccccagcgaggaggcccgggagggcggcggcgtgcatgctgtgcccccagaccctgaagatgagggcctggaggagacagaggaccacaagctggtgttcctgcagcagggccccctgctgctggtggccatgagcaggaccagccagagcgctgcccagctgcggggggagctgctggccgtgcacgcccagatcgtgtccaccctgacccgggcctctgtggcccgcatctttgcccacaagcagaactatgacctgcggcggctgctggccggcagcgagaggaccctggaccggctgctggacagcatggagcaggaccccggggccctgctgctgggcgctgtgcgctgtgtgcccctggcccggcccctgagagatgccctgggcgccctgctgcggcgctgcacagcccctggcctggccctgtctgtgctggccgtgggcggccgcctcatcacagctgcccaggagagaaatgtgctggctgaatgtcggctggaccctgctgacctgcagctgctgctggactgggtgggcgccccagcctttgctgctggggaggcctgggcccctgtgtgcctgccccgcttcaacccagatggcttcttctacgcctacgtggcccggctggatgccatgcctgtgtgcctgctgctgctgggcacccagcgggaggccttccacgccatggccgcctgccggcggctggtggaggatggcatgcacgccctgggcgccatgagggccctgggggaggccgccagcttcagcaatgccagcagcgccagcgccccagcctacagcgtgcaggccgtgggcgcccctggcctgcggcacttcctgtacaagcccctggacatcccagaccaccaccggcagctgccccagttcaccagccctgagctggaggccccctacagccgggaggaggagcggcagaggctgagtgacctgtaccaccggctgcacgcccggctgcacagcaccagccggcccctgcggctcatctaccacgtggccgagaaggagaccctgctggcctgggtgaccagcaagtttgagctgtacacctgcctgagccccctggtgaccaaggccggggccatcctggtggtgaccaagctgctgcgctgggtgaagaaggaggaggacaggctcttcatccgctacccacccaagtacagcaccccaccagccaccagcacagaccaggccgcccacaacggcctcttcaccggcctgtag

SEQ ID NO: 105312 - DNA, 1759 bp, Artificial Sequence
  derived and/or modified sequence
gtgtgatgccaccgccgctacggggaagtaatggtatccggccaattgagattcggagttaaaacagggatgtgcagatggaggtcggaggagacactgctgccccggcccccgggggcgcggaggacttggaggacacgcagttccccagtgaggaagctagagaaggtggaggggttcacgcggtcccgccggatcccgaagacgagggcctggaggaaacagaggaccacaagctggtgttcctacaacagggcccactgttgctcgtggccatgtcacggacttctcagtcagcagcccagctgcggggggagctgctagctgtgcacgcacagatcgtgagcacacttacacgtgcaagtgtcgcccgcatcttcgcacacaagcagaactatgacctccgccgcctgctggctggttcagagcgcacactggaccgacttctggacagtatggagcaggacccaggagccctgctcctgggtgccgtgcgctgtgtgccccttgcccgcccgctgcgagacgcactaggtgcgctcctccgacgttgcacagcgcctggcctggcgctgtcagtgctggcagtaggcggtcgacttataacagcagcccaggagcgaaatgtgctggccgagtgccggctggacccagctgacctgcagttgctgctcgactgggtgggtgcaccagcctttgcggcgggtgaggcttgggcacctgtgtgcctgccccgcttcaaccctgatggttttttctacgcctacgtggcccgcctggatgctatgcctgtctgcctgctgctgcttggcacccaacgtgaagccttccatgccatggccgcctgccggcgcctggttgaagatgggatgcatgcccttggtgccatgcgtgcccttggggaggctgccagcttctctaatgcctcatcagccagtgctcctgcctacagcgtgcaggctgtcggggcgccgggcctccggcacttcctgtataagccgctggacatccctgaccaccaccgccaactgccccagtttaccagccctgagctagaggccccctacagcagagaggaggagcggcagcggctgtcggacctgtaccaccgcctgcatgctcgtctccacagcacctcccgacccctgcgcctcatttaccacgtggctgagaaggagacactactggcctgggtgacctccaaattcgagctctatacctgcctcagccctctggtgaccaaggcaggtgcaatcttggtagtgaccaaactcctgcgctgggtgaagaaagaggaggaccggctcttcattcgttacccacccaagtactccacaccaccagccacctctacggaccaagctgcccataatggcttgttcactggactctgatagttggagctcccagaccaggcagtgctgggagcaaccacctttgttttttaccttctgtctaccctggaaatgtgtgtgggggtgtgtctgtggccagtcattgtctccctaagcaatggggcaaggtctgagggcccaccgatgagagagatggtggcagccgccaggcgagcaggctgctttccctgcccagtcatgcacctccccctctggggaaatccttaggcctccctctcccttccctctgtctcatctcctccacttggatgatgctctagcctctgtcagggactgtcccctccaaacttgcttccgtggtctgcctcctagttgaatctcagccctgagtgtccagatctggc

SEQ ID NO: 105313 - DNA, 1317 bp, Artificial Sequence
  derived and/or modified sequence
atggaggtgggcggcgacaccgccgcccccgcccccggcggcgccgaagacttggaggatacccagttcccttccgaagaggctagagaaggtgggggagttcatgctgtgccaccagacccagaggatgaaggcttagaggagaccgaggaccacaagttagtgttcctgcagcagggcccccttttgcttgtggccatgtctcggaccagccagtcagccgcgcagctgaggggagagctgctagcagttcatgctcagatagtgtccaccctgacccgggccagcgtcgcacgtatctttgcccacaagcagaactatgacctaagacgtctccttgccggctctgagcgcacattggacaggctgctagattcaatggagcaggaccctggtgcactcttactgggtgccgtgcgatgcgtgccactggcccgccctctcagagacgccctaggtgcccttcttaggcgttgcacggcccccggattggctctgagcgtgctggcggtgggtgggcggcttatcaccgcagctcaggaacgaaacgtcctggctgaatgccgactggatcccgccgatctgcagctcctgctcgattgggtaggggcccctgcttttgctgcaggagaagcctgggctccagtttgtctgcctagattcaacccagacggcttcttttacgcttatgtcgcaagactcgatgctatgcctgtttgcttgcttctgttgggtacccaacgcgaagctttccacgccatggccgcgtgtagacgattggttgaggacggaatgcatgcactcggggctatgcgcgccctaggggaggcagcgtcctttagtaatgctagttctgcaagcgcccctgcctactctgtgcaggccgtgggggcccccggtctccgccacttcctctacaaacccctggatattcctgatcaccaccgacaactaccacagtttacttcgcccgagttagaggctccatattcccgagaggaggaacggcaacgcctttctgacctgtatcaccgcctccacgcccgccttcattcaacaagccgccccctgcggttgatttaccacgtggccgagaaagaaacgctcctcgcttgggtgaccagcaagttcgagctgtatacctgcctgtctccccttgttacaaaggctggcgccatccttgttgtgaccaaattgttgcggtgggtaaaaaaggaagaagataggctgtttatcaggtacccgccgaaatatagcaccccgcctgccacaagcactgaccaggctgcccacaatggcctgttcacggggctctag

SEQ ID NO: 105314 - DNA, 1317 bp, Artificial Sequence
  derived and/or modified sequence
atggaggttggcggtgacaccgcagctcctgcacctgggggagccgaggaccttgaagatactcaatttccgagtgaggaggcgagagagggcggtggggttcacgccgtgcctcccgaccccgaggatgagggcctggaggagaccgaggatcataagctggtgttcctccaacagggcccacttctgctggtagcaatgagtcgcacctctcagtccgcagctcagctgcgaggagaacttctcgctgtgcacgcccagattgtgtctactttaactagggcttctgtggcaaggatctttgcccacaagcagaactatgatttgagaagattattagctggctccgaacggacgttagatagactgctggacagcatggaacaagaccctggcgcattattgttgggggcagtgcggtgcgtgccccttgccaggcccttaagggacgcactgggggcactactgcggaggtgtactgcgccaggcctggccctgtccgtactcgctgtcggcggtcggctgataacagccgcacaggaaagaaacgtgctggctgaatgtcgactagatcctgctgacctgcagctgctactggattgggtgggtgctccagccttcgccgctggagaggcatgggctcctgtttgtctccccaggtttaacccagacggcttcttttatgcttacgtggcgaggctcgacgctatgcctgtctgccttctacttctcgggacacagagggaggcctttcacgctatggctgcatgccggagactcgtcgaagacgggatgcatgctctgggcgcaatgagagccctgggagaagccgcttccttctcaaacgcctcctctgcctctgcccctgcctattccgtgcaagctgtgggcgcaccgggactcaggcattttctctacaaacctctcgatatcccagatcaccaccgccagctgccacagtttacgtcacccgagctagaggccccatacagtagagaagaggagaggcagagactgtcagatctataccaccggcttcacgcgaggttacactccacctcgagaccacttcgcttaatttatcatgtggcggaaaaagagactctgctggcctgggtgacctccaagttcgagctgtacacctgcctctcccctctggttaccaaggccggtgctattttggtcgttaccaagctattacgttgggtcaagaaggaagaggaccgcctatttatccgctacccaccaaaatactcaaccccccctgccacctccacggaccaagcagcccacaacggtttgtttaccggcctttag

SEQ ID NO: 105315 - DNA, 1317 bp, Artificial Sequence
  derived and/or modified sequence
atggaggtgggcggcgacaccgccgcccccgcccccggcggcgccgaggacctggaggacacccagttccccagcgaggaggccagagagggcggcggcgtgcacgccgtgccccccgaccccgaggacgagggcctggaggagaccgaggaccacaagctggtgttcctgcagcagggccccctgctgctggtggccatgagcagaaccagccagagcgccgcccagctgagaggcgagctgctggccgtgcacgcccagatcgtgagcaccctgaccagagccagcgtggccagaatcttcgcccacaagcagaactacgacctgagaagactgctggccggcagcgagagaaccctggacagactgctggacagcatggagcaggaccccggcgccctgctgctgggcgccgtgagatgcgtgcccctggccagacccctgagagacgccctgggcgccctgctgagaagatgcaccgcccccggcctggccctgagcgtgctggccgtgggcggcagactgatcaccgccgcccaggagagaaacgtgctggccgagtgcagactggaccccgccgacctgcagctgctgctggactgggtgggcgcccccgccttcgccgccggcgaggcctgggcccccgtgtgcctgcccagattcaaccccgacggcttcttctacgcctacgtggccagactggacgccatgcccgtgtgcctgctgctgctgggcacccagagagaggccttccacgccatggccgcctgcagaagactggtggaggacggcatgcacgccctgggcgccatgagagccctgggcgaggccgccagcttcagcaacgccagcagcgccagcgcccccgcctacagcgtgcaggccgtgggcgcccccggcctgagacacttcctgtacaagcccctggacatccccgaccaccacagacagctgccccagttcaccagccccgagctggaggccccctacagcagagaggaggagagacagagactgagcgacctgtaccacagactgcacgccagactgcacagcaccagcagacccctgagactgatctaccacgtggccgagaaggagaccctgctggcctgggtgaccagcaagttcgagctgtacacctgcctgagccccctggtgaccaaggccggcgccatcctggtggtgaccaagctgctgagatgggtgaagaaggaggaggacagactgttcatcagatacccccccaagtacagcaccccccccgccaccagcaccgaccaggccgcccacaacggcctgttcaccggcctgtag

SEQ ID NO: 105316 - protein, 401 aa, Artificial Sequence
  derived and/or modified sequence
MVSGQLRFGVKTEDHKLVFLQQGPLLLVAMSRTSQSAAQLRGELLAVHAQIVSTLTRASVARIFAHKQNYDLRRLLAGSERTLDRLLDSMEQDPGALLLGAVRCVPLARPLRDALGALLRRCTAPGLALSVLAVGGRLITAAQERNVLAECRLDPADLQLLLDWVGAPAFAAGEAWAPVCLPRFNPDGFFYAYVARLDAMPVCLLLLGTQREAFHAMAACRRLVEDGMHALGAMRALGEAASFSNASSASAPAYSVQAVGAPGLRHFLYKPLDIPDHHRQLPQFTSPELEAPYSREEERQRLSDLYHRLHARLHSTSRPLRLIYHVAEKETLLAWVTSKFELYTCLSPLVTKAGAILVVTKLLRWVKKEEDRLFIRYPPKYSTPPATSTDQAAHNGLFTGL

SEQ ID NO: 105317 - DNA, 1206 bp, Artificial Sequence
  derived and/or modified sequence
atggtcagcggacaactgagatttggtgttaagactgaggaccacaaactggtctttctgcagcaggggcctctccttttggtggcaatgtctaggaccagccagtccgcggcccagctccggggggagttgctcgccgtgcacgctcaaatcgtctccaccctaactagagcttctgtagcgaggatctttgctcacaagcagaattatgacctgaggagactcttggccgggagcgagaggactctcgaccggctgctggactcgatggagcaagatcctggcgccctgctgctgggcgccgtgcggtgcgtgcccctagcaagacccctccgcgatgctctcggcgcactcctccggcggtgtacagcaccaggcctcgcactttcagttctggcagttggtggacggttgatcacagccgcccaggaacgcaatgtgctcgctgaatgcagacttgatcccgccgacttgcagcttctgctggactgggtcggggcacctgcatttgcagccggtgaggcgtgggcacccgtgtgtctcccgcggttcaaccctgatgggtttttttacgcatatgtcgcaaggttggatgctatgcccgtctgcctgctgcttctgggcacacagcgtgaagctttccacgccatggccgcctgtcgcagactagtcgaagacggcatgcacgcgctgggcgcgatgagggcactgggggaggcagctagcttcagcaacgcaagtagcgccagcgcccctgcctatagtgtgcaggcggtgggggccccaggactcagacattttctgtacaagcccctcgacatccctgaccaccacaggcagttaccccagtttacatcacccgaactcgaagccccgtatagccgcgaggaagagaggcaaaggctgagcgatctgtatcacaggcttcacgccaggttgcattctacttctcggcctttacgcctgatctatcacgttgccgaaaaagagaccctgcttgcctgggtcacgtccaagttcgagttatatacctgcctgtctcctttggtgactaaagcaggcgccatcctagtcgtgactaagctattacggtgggtcaagaaagaagaggatagactctttatccgctatccgcccaaatactccaccccacccgcaacaagcaccgatcaggctgcacacaatggacttttcaccggactatag

SEQ ID NO: 105318 - DNA, 1206 bp, Artificial Sequence
  derived and/or modified sequence
atggtgtctggccagctgcgcttcggcgtgaagacagaggaccacaagctggtgttcctgcagcagggccccctgctgctggtggccatgagcaggaccagccagagcgctgcccagctgcggggggagctgctggccgtgcacgcccagatcgtgtccaccctgacccgggcctctgtggcccgcatctttgcccacaagcagaactatgacctgcggcggctgctggccggcagcgagaggaccctggaccggctgctggacagcatggagcaggaccccggggccctgctgctgggcgctgtgcgctgtgtgcccctggcccggcccctgagagatgccctgggcgccctgctgcggcgctgcacagcccctggcctggccctgtctgtgctggccgtgggcggccgcctcatcacagctgcccaggagagaaatgtgctggccgagtgccgcctggaccctgctgacctgcagctgctgctggactgggtgggcgccccagcctttgctgctggggaggcctgggcccctgtgtgcctgccccgcttcaacccagatggcttcttctacgcctacgtggcccggctggatgccatgcctgtgtgcctgctgctgctgggcacccagcgggaggccttccacgccatggccgcctgccggcggctggtggaggatggcatgcacgccctgggcgccatgagggccctgggggaggccgccagcttcagcaatgccagcagcgccagcgccccagcctacagcgtgcaggccgtgggcgcccctggcctgcggcacttcctgtacaagcccctggacatcccagaccaccaccggcagctgccccagttcaccagccctgagctggaggccccctacagccgggaggaggagcggcagaggctgagtgacctgtaccaccggctgcacgcccggctgcacagcaccagccggcccctgcggctcatctaccacgtggccgagaaggagaccctgctggcctgggtgaccagcaagtttgagctgtacacctgcctgagccccctggtgaccaaggccggggccatcctggtggtgaccaagctgctgcgctgggtgaagaaggaggaggacaggctcttcatccgctacccacccaagtacagcaccccaccagccaccagcacagaccaggccgcccacaacggcctcttcaccggcctgtag

SEQ ID NO: 105319 - DNA, 1814 bp, Artificial Sequence
  derived and/or modified sequence
ccaccgccgctacggggaagtaatggtatccggccaattgagattcggagttaaaacagaggaccacaagctggtgttcctacaacagggcccactgttgctcgtggccatgtcacggacttctcagtcagcagcccagctgcggggggagctgctagctgtgcacgcacagatcgtgagcacacttacacgtgcaagtgtcgcccgcatcttcgcacacaagcagaactatgacctccgccgcctgctggctggttcagagcgcacactggaccgacttctggacagtatggagcaggacccaggagccctgctcctgggtgccgtgcgctgtgtgccccttgcccgcccgctgcgagacgcactaggtgcgctcctccgacgttgcacagcgcctggcctggcgctgtcagtgctggcagtaggcggtcgacttataacagcagcccaggagcgaaatgtgctggccgagtgccggctggacccagctgacctgcagttgctgctcgactgggtgggtgcaccagcctttgcggcgggtgaggcttgggcacctgtgtgcctgccccgcttcaaccctgatggttttttctacgcctacgtggcccgcctggatgctatgcctgtctgcctgctgctgcttggcacccaacgtgaagccttccatgccatggccgcctgccggcgcctggttgaagatgggatgcatgcccttggtgccatgcgtgcccttggggaggctgccagcttctctaatgcctcatcagccagtgctcctgcctacagcgtgcaggctgtcggggcgccgggcctccggcacttcctgtataagccgctggacatccctgaccaccaccgccaactgccccagtttaccagccctgagctagaggccccctacagcagagaggaggagcggcagcggctgtcggacctgtaccaccgcctgcatgctcgtctccacagcacctcccgacccctgcgcctcatttaccacgtggctgagaaggagacactactggcctgggtgacctccaaattcgagctctatacctgcctcagccctctggtgaccaaggcaggtgcaatcttggtagtgaccaaactcctgcgctgggtgaagaaagaggaggaccggctcttcattcgttacccacccaagtactccacaccaccagccacctctacggaccaagctgcccataatggcttgttcactggactctgatagttggagctcccagaccaggcagtgctgggagcaaccacctttgttttttaccttctgtctaccctggaaatgtgtgtgggggtgtgtctgtggccagtcattgtctccctaagcaatggggcaaggtctgagggcccaccgatgagagagatggtggcagccgccaggcgagcaggctgctttccctgcccagtcatgcacctccccctctggggaaatccttaggcctccctctcccttccctctgtctcatctcctccacttggatgatgctctagcctctgtcagggactgtcccctccaaacttgcttccgtggtctgcctcctagttgaatctcagccctgagtgtccagatctggccaaggtgtctagggtggcccacgggggtgctggaattggcacttcagggccaggctatgcttgggactggcctgagggtattttaaagaaaaaaactacataaaaggcctaaaagtaagacccacaaggatattcctttgcccttcttgtacttttttcatctttaccctgccagaaatgacccgccctcaatgctggctgctgctaacattaatgagaag

SEQ ID NO: 105320 - DNA, 1206 bp, Artificial Sequence
  derived and/or modified sequence
atggtgagcggccagctgcggttcggcgtgaagaccgaggaccacaagcttgtatttttgcagcaggggcccctgctcctggtggcgatgtcacggaccagtcagtctgcagcacagttgcgcggggaactgctggcagtacatgcacagatcgtgtccacgctgacaagagcctctgtcgcccggatctttgcgcacaagcagaattatgacctgcggcggctactggcaggcagtgagcggacgttagaccggctgttagactcaatggagcaggaccccggggctctgctcctgggggctgtgaggtgtgtacctctggcacgcccactgcgcgatgctttgggggcactgctgcggcggtgcactgccccaggcctggcactgtccgtgttggccgtgggtggccgtctcattactgctgcccaggaaagaaatgtgctggccgaatgccgtctggacccagccgatttgcagcttctgctcgattgggtaggggcacccgccttcgccgcaggagaagcatgggcacctgtgtgtctgcctaggttcaatcctgacggtttcttttatgcttacgtggcgagactagacgccatgcccgtgtgcctcctgctgctgggaacacagcgggaggccttccacgctatggcagcttgccgacgcctggtggaagatggcatgcacgctctgggtgcaatgcgcgccctgggagaggccgcctctttttcaaacgctagctctgcttcggcccctgcctactcagtacaggccgtcggcgccccgggcttacgccactttctttacaaaccactcgacatccccgatcatcaccgtcagcttccccagtttacaagcccagaactggaagcaccttacagcagggaagaagaacgccaaaggctgagcgacctttaccatcggctacatgctaggctgcattccaccagcaggcctctccgtctgatctatcacgtagccgagaaagagactttgctggcttgggtgacaagtaaatttgaactgtacacctgcctctcgcccttagtgacaaaagcaggagcgatactggtggtcaccaaactgctgagatgggtgaaaaaagaggaggaccgcctgttcataagataccctcctaaatattctacccctccagcgacctccactgatcaagctgctcataacggattgtttaccggtctttag

SEQ ID NO: 105321 - DNA, 1206 bp, Artificial Sequence
  derived and/or modified sequence
atggtatccggccagctccgattcggcgttaaaaccgaggatcacaagctggtgtttctccagcaggggcctttactcttggtggctatgagtcggacaagccagagtgcagcccagctgaggggagaactcctggcagtccacgcacagatagtgtccaccttaacccgcgcttctgtcgcgaggatcttcgctcacaagcaaaattacgacctacgcagactgctggccggatccgagcgcaccctggataggctgctggatagcatggaacaagacccaggggcacttcttctaggggctgttcggtgtgtgcctctggcacgaccattaagggacgcgttgggcgctcttctgcggaggtgtaccgcccctggattggctctgtccgtgctggccgtcggcggaagactgattacagcggcacaggagcggaatgtcctggctgagtgccgcctggacccggctgacctgcagctgctgctggattgggtcggggcacccgcatttgcagccggtgaagcctgggcccctgtctgcctgccccgtttcaaccccgatggctttttctacgcatacgttgcccgactggacgcaatgcctgtttgtcttcttttgctgggcacccagagggaagcatttcacgccatggccgcatgcaggcgcctggttgaggatggaatgcatgccctaggggctatgcgggctctgggtgaggccgcatccttttcgaatgcctcgtctgcaagcgcaccagcttactctgtccaggctgtaggcgcaccaggcttaaggcactttctgtacaaacccttggacatccccgaccaccatcggcagttaccccagtttacctcccctgaactcgaagcaccttattcccgggaggaggagaggcagcggctttctgatctgtatcacaggctccacgcccgtctgcactccacgtcccggccattgcgactgatttaccatgtcgctgaaaaggagacactgcttgcatgggtgactagcaaattcgagttatatacttgtctctcaccgctggtcacaaaagccggagcaatattggtcgtcacgaagctcctgcgttgggtgaaaaaagaggaggatcgcctctttatcaggtacccaccaaagtacagcactccaccagctaccagcactgaccaggccgctcataacggactcttcaccgggctgtag

SEQ ID NO: 105322 - DNA, 1206 bp, Artificial Sequence
  derived and/or modified sequence
atggtgagcggccagctgagattcggcgtgaagaccgaggaccacaagctggtgttcctgcagcagggccccctgctgctggtggccatgagcagaaccagccagagcgccgcccagctgagaggcgagctgctggccgtgcacgcccagatcgtgagcaccctgaccagagccagcgtggccagaatcttcgcccacaagcagaactacgacctgagaagactgctggccggcagcgagagaaccctggacagactgctggacagcatggagcaggaccccggcgccctgctgctgggcgccgtgagatgcgtgcccctggccagacccctgagagacgccctgggcgccctgctgagaagatgcaccgcccccggcctggccctgagcgtgctggccgtgggcggcagactgatcaccgccgcccaggagagaaacgtgctggccgagtgcagactggaccccgccgacctgcagctgctgctggactgggtgggcgcccccgccttcgccgccggcgaggcctgggcccccgtgtgcctgcccagattcaaccccgacggcttcttctacgcctacgtggccagactggacgccatgcccgtgtgcctgctgctgctgggcacccagagagaggccttccacgccatggccgcctgcagaagactggtggaggacggcatgcacgccctgggcgccatgagagccctgggcgaggccgccagcttcagcaacgccagcagcgccagcgcccccgcctacagcgtgcaggccgtgggcgcccccggcctgagacacttcctgtacaagcccctggacatccccgaccaccacagacagctgccccagttcaccagccccgagctggaggccccctacagcagagaggaggagagacagagactgagcgacctgtaccacagactgcacgccagactgcacagcaccagcagacccctgagactgatctaccacgtggccgagaaggagaccctgctggcctgggtgaccagcaagttcgagctgtacacctgcctgagccccctggtgaccaaggccggcgccatcctggtggtgaccaagctgctgagatgggtgaagaaggaggaggacagactgttcatcagatacccccccaagtacagcaccccccccgccaccagcaccgaccaggccgcccacaacggcctgttcaccggcctgtag

SEQ ID NO: 105323 - protein, 506 aa, Artificial Sequence
  derived and/or modified sequence
MEFLKVARRNKREQLEQIQKELSVLEEDIKRVEEMSGLYSPVSEDSTVPQFEAPSPSHSSIIDSTEYSQPPGFSGSSQAGVQWRYLGSLQPPPPRYKRFSCLTLPSSWDYRRLPPHLTKKQPWYNSTLASRRKRLTAHFEDLEQCYFSTRMSRISDDSRTASQLDEFQECLSKFTRYNSVRPLATLSYASDLYNGSSIVSSIEFDRDCDYFAIAGVTKKIKVYEYDTVIQDAVDIHYPENEMTCNSKISCISWSSYHKNLLASSDYEGTVILWDGFTGQRSKVYQEHEKRCWSVDFNLMDPKLLASGSDDAKVKLWSTNLDNSVASIEAKANVCCVKFSPSSRYHLAFGCADHCVHYYDLRNTKQPIMVFKGHRKAVSYAKFVSGEEIVSASTDSQLKLWNVGKPYCLRSFKGHINEKNFVGLASNGDYIACGSENNSLYLYYKGLSKTLLTFKFDTVKSVLDKDRKEDDTNEFVSAVCWRALPDGESNVLIAANSQGTIKVLALL

SEQ ID NO: 105324 - protein, 662 aa, Artificial Sequence
  derived and/or modified sequence
MNGDSRAAVVTSPPPTTAPHKERYFDRVDENNPEYLRERNMAPDLRQDFNMMEQKKRVSMILQSPAFCEELESMIQEQFKKGKNPTGLLALQQIADFMTTNVPNVYPAAPQGGMAALNMSLGMVTPVNDLRGSDSIAYDKGEKLLRCKLAAFYRLADLFGWSQLIYNHITTRVNSEQEHFLIVPFGLLYSEVTASSLVKINLQGDIVDRGSTNLGVNQAGFTLHSAIYAARPDVKCVVHIHTPAGAAVSAMKCGLLPISPEALSLGEVAYHDYHGILVDEEEKVLIQKNLGPKSKVLILRNHGLVSVGESVEEAFYYIHNLVVACEIQVRTLASAGGPDNLVLLNPEKYKAKSRSPGSPVGEGTGSPPKWQIGEQEFEALMRMLDNLGYRTGYPYRYPALREKSKKYSDVEVPASVTGYSFASDGDSGTCSPLRHSFQKQQREKTRWLNSGRGDEASEEGQNGSSPKSKTKWTKEDGHRTSTSAVPNLFVPLNTNPKEVQEMRNKIREQNLQDIKTAGPQSQVLCGVVMDRSLVQDAPLSDCTETIEGLELTEQTFSPAKSLSFRKGELVTASKAIIEKEYQPHVIVSTTGPNPFTTLTDRELEEYRREVERKQKGSEENLDEAREQKEKSPPDQPAVPHPPPSTPIKLEEGDGCAREYLLP

SEQ ID NO: 105325 - DNA, 1989 bp, Artificial Sequence
  derived and/or modified sequence
atgaacggtgactcacgagccgcggtggtcacctctccaccacccactactgctccccataaagaaagatacttcgacagggtggatgaaaacaatcctgaataccttcgtgaaaggaacatggcccccgatctacgacaggacttcaatatgatggagcaaaagaagcgggtgagcatgatactgcagtcacctgcattctgtgaggaactggagtctatgattcaggagcagttcaagaagggtaagaatcctactggcctgctggccctgcaacagatagcagattttatgaccaccaacgtaccaaacgtgtaccccgccgctcctcagggggggatggctgctttgaacatgtctctgggtatggtcactccggtgaacgacttgcgcggcagtgatagtatcgcctatgataaaggggaaaaactgctccggtgcaaacttgccgcattctaccgcttagctgatctctttggttggtctcaactgatatataatcacattaccactcgggtgaacagtgagcaggaacatttcctgatcgtgccatttggcttactgtatagcgaagtgacagccagttcgctggtaaagatcaatctgcaaggtgatatcgtcgacagaggaagcaccaacctgggggtcaaccaagcaggttttaccctacactcggcaatttatgctgcccggcctgatgtgaagtgcgtggtacacatccatacaccagccggtgcagcagtatctgcaatgaagtgtggactcctccctataagtcccgaagctttgagcctgggcgaggtggcttaccacgactaccacgggatcttagtggacgaggaggaaaaagtgctcattcaaaagaacctcggtcccaagtccaaagtgctgattctccgcaatcacggcttggtctccgtgggggaatcggtagaagaagccttctactacattcataaccttgtcgtggcttgtgaaattcaagttcgcacgctggccagtgctggcggtcccgacaacctcgtactgctgaaccccgaaaaatataaggccaaaagccgatcacctggcagcccagttggggaggggacggggtctccgcccaaatggcagattggcgagcaggaatttgaggcccttatgcggatgcttgacaacctgggctatagaacgggatacccttatcgataccccgccctgcgtgaaaagagtaaaaagtacagcgacgtcgaagtaccagcctctgtgacaggatactctttcgcgtctgatggggactccgggacatgctctcccttgaggcactcatttcagaaacaacagagagagaaaacccgctggttaaactccggacggggtgacgaagccagcgaggaagggcagaacggtagctcgcccaaaagcaagacaaagtggaccaaggaggatggacatagaactagcacatctgccgtacctaatctctttgtgccactgaacaccaaccctaaggaggtgcaggaaatgaggaacaagattcgcgagcagaatcttcaggacatcaagaccgcaggaccccagtctcaagtgctatgtggcgtggtaatggaccgctccctggtccaggatgcccccctatctgactgcaccgaaactatcgaaggccttgaactcactgaacaaacctttagtccggctaaatccttgagttttcgaaaaggggagttggttaccgcgtcgaaggctatcattgagaaggaataccagccacacgtgatcgtgagcacgaccggtccgaaccccttcaccacactcactgaccgcgagctggaggagtataggcgggaggtcgaacggaagcagaagggcagtgaggagaacttggacgaggccagggaacaaaaggaaaagtcaccccccgaccagcccgccgtcccccatcctccgccctccacccccatcaagctggaagagggcgacggctgcgcgagagagtatttactgccttag

SEQ ID NO: 105326 - DNA, 4743 bp, Artificial Sequence
  derived and/or modified sequence
gggggcggggaggccgctgcggcgccgagggcgtcttggaggggtccccgcggggccttcggcctgggccgagccggggagcgagggcgccgcagatctttcatcgggataggaccccggggactaggcttttcccgggccgctcgttcctggccggcttgtgggctgcaggggtgggggcggaggaggacgaccctggctggacgctggtcagcatcctgcttgtgagaccggttccgcggtccgcagcgctggtggctgcaaggtttgtgtacggacgcatctgtcggctctcgtatttaaaaacgacggcttctgccaaaagagaaaagccatatctgccgacggacgctcgagagataatcgtggaactttatcagcgatggggctgttggtcacctttgccctccctctcttttcttttttcttaatcttttattttcgttttttgggagatgtcagagggcctttccctgttaggatgacttttatctttgctcttgtaatggctcaagatagttgggaggtaatttgcattcactttatgcatacccaccttgaaaaacgtattttggttcgcctgaaactgttgttggtttgagcataatttatgtttagaaagacaaaaagcaattgtcatatctccaaagaccaaagacatagctgatagctgtatgcattactggggccttttgagcagctgcttctgcaagaggacatccggagacacaggaatagaaatgatccgatcagagtaattaaaggcttttaactgagctctgaggtcccaaacagggcacactccgtcagcctaaagctgtgaagaagaaccttcaacataaggaacctagaaagattgtacaatgaatggtgattctcgtgctgcggtggtgacctcaccacccccgaccacagcccctcacaaggagaggtacttcgaccgagtagatgagaacaacccagagtacttgagggagaggaacatggcaccagaccttcgccaggacttcaacatgatggagcaaaagaagagggtgtccatgattctgcaaagccctgctttctgtgaagaattggaatcaatgatacaggagcaatttaagaaggggaagaaccccacaggcctattggcattacagcagattgcagattttatgaccacgaatgtaccaaatgtctacccagcagctccgcaaggagggatggctgccttaaacatgagtcttggtatggtgactcctgtgaacgatcttagaggatctgattctattgcgtatgacaaaggagagaagttattacggtgtaaattggcagcgttttatagactagcagatctctttgggtggtctcagcttatctacaatcatatcacaaccagagtgaactccgagcaggaacacttcctcattgtcccttttgggcttctttacagtgaagtgactgcatccagtttggttaagatcaatctacaaggagatatagtagatcgtggaagcactaatctgggagtgaatcaggccggcttcaccttacactctgcaatttatgctgcacgcccggacgtgaagtgcgtcgtgcacattcacaccccagcaggggctgcggtctctgcaatgaaatgtggcctcttgccaatctccccggaggcgctttcccttggagaagtggcttatcatgactaccatggcattctggttgatgaagaggaaaaagttttgattcagaaaaatctggggcctaaaagcaaggttcttattctccggaaccatgggctcgtgtcagttggagagagcgttgaggaggccttctattacatccataaccttgtggttgcctgtgagatccaggttcgaactctggccagtgcaggaggaccagacaacttagtcctgctgaatcctgagaagtacaaagccaagtcccgttccccagggtctccggtaggggaaggcactggatcgcctcccaagtggcagattggtgagcaggaatttgaagccctcatgcggatgctcgataatctgggctacagaactggctacccttatcgataccctgctctgagagagaagtctaaaaaatacagcgatgtggaggttcctgctagtgtcacaggttactcctttgctagtgacggtgattcgggcacttgctccccactcagacacagttttcagaagcagcagcgggagaagacaagatggctgaactctggccggggcgacgaagcttccgaggaagggcagaatggaagcagtcccaagtcgaagactaagtggactaaagaggatggacatagaacttccacctctgctgtccctaacctgtttgttccattgaacactaacccaaaagaggtccaggagatgaggaacaagatccgagagcagaatttacaggacattaagacggctggccctcagtcccaggttttgtgtggtgtagtgatggacaggagcctcgtccaggatgcacctctctctgactgtacggaaactatcgaagggctcgagcttacagagcagacctttagtcccgctaaatctctctcttttagaaagggagagctggtgacggcctccaaggccatcattgaaaaggagtaccagccccacgtcattgtgagcaccacgggccccaaccccttcaccacactcacagaccgtgagctggaggagtaccgcagggaggtggagaggaagcagaagggctctgaagagaatctggacgaggctagagaacagaaagaaaagagtcctccagaccagcctgcggtcccccacccgcctcccagcactcccatcaagctggaggaaggagacggatgcgctagagagtacctgttaccctaaccttgtgccggagccgactactggagatgacagtgatgctgccacctttaagccaactctccccgatctgtcccctgatgaaccttcagaagcactcggcttcccaatgttagagaaggaggaggaagcccatagacccccaagccccactgaggcccctactgaggccagccccgagccagccccagacccagccccggtggctgaagaggctgccccctcagctgtcgaggagggggccgccgcggaccctggcagcgatgggtctccaggcaagtccccgtccaaaaagaagaagaagttccgtaccccgtcctttctgaagaagagcaagaagaagagtgactcctgaaagccctgcgctaacactgtcctgtccggagcgaccctggctctgccagcgtccccggccacgtctgtgctctgtccttgtgtaatggaatgcaaaaaagccaagccctccgcctagaggtcccctcacgtgaccagccccgtgtagccccgggctgacccagtgtgtgctcagcagccccaccccaccctgccccttgtcctctcagagcctcagcttctgggggagacatgctctccccacaggggggaggcactaagtcatggtcctggctggaaggtactgaaggcttctgcagctttggctgcacgtcaccctcctgagcctcacctttcctgccgtccctcctgttgtgaaatcaccacattctgtctctgcttggcttcccctccaccctaaagtctcaggtgacggactcagactcctggcttcatgtggcattctctctgctcagtgatctcacttaaatctatatacaaagccttggtcccgtgaaaacactcgtgtgcccaccagcggccttgaagaggcaggtctgggccagatgctgggcaggaaaccccagcggcagatgggcctgtgtgcacccaacgtgatgctatgcatgtctgaccgacgatccctcgaccagaatcagattcaggagctcagtttctttttcacttgggtctctggattcctgtcatagggaaggtatatcaggaggggaagaggcctttctagaattttctttgagcaggtttacaatttagcttacatttttcgactgtgaacgtgaataggctgctttttgctttcttctttccagaccccacagtagagcacttttcacttatttgggggaggcttcaggggactgttctcaccttaactcagccagaaagatgccctagttgtgatcaaaggtaactcgaggtggagggtagccctggggcccctcgacatcaccgtcattgatggagcctgaaccgtgtgctcctcggcagatgctgttgttgttacttccctccaagaggctggaaaagggctcagagctgctgagcaggaaccggagggtgacccatttcaggaggtgccggtaccagcctgactaggtacaggcaagcttgtgtgggcccaacaggcccttggtagagctggtgccagatgtgggctcagatcctgggcatgatgggccgagccacctcggatcccactgattggccagccgagcgagaaccaggctgctgcatggcactgaccgccgcttccagcttcctctgagccgcagggcctgctacgcgggcaagcgtgctgcctctcttctgtgtcgttttgttgccaaggcagaatgaaaagtccttaaccgtggactcttcctttatcccctcctttaccccacatatgcaatgacttttaattttcacttttgtagtttaatcctttgtattacaacatgaaatatagttgcatatatggacaccgacttgggaggacaggtcctgaatgtcctttctccagtgtaacatgttttactcacaaataaaattctttcagcaa

SEQ ID NO: 105327 - DNA, 1989 bp, Artificial Sequence
  derived and/or modified sequence
atgaatggagacagcagagctgctgtggtgaccagccccccacccaccacagccccccacaaggagcgctactttgacagagtggatgagaacaaccctgagtacctgcgggagaggaacatggccccagacctgcggcaggacttcaacatgatggagcagaagaagagggtgtccatgatcctgcagagccctgccttctgtgaggagctggagagcatgatccaggagcagttcaagaagggcaagaaccccaccggcctgctggccctgcagcagattgctgacttcatgaccaccaacgtgcccaacgtgtacccagctgccccccagggcggcatggccgccctgaacatgagcctgggcatggtgacccctgtgaatgacctgcggggcagtgacagcatcgcctatgacaagggggagaagctgctgcgctgcaagctggccgccttctaccgcctggccgacctgtttggctggagccagctgatctacaaccacatcaccaccagggtgaacagcgagcaggagcacttcctgattgtgcccttcggcctgctgtacagcgaggtgacagccagcagcctggtgaagatcaacctgcagggcgacatcgtggaccggggcagcaccaacctgggcgtgaaccaggccggcttcaccctgcacagcgccatctatgctgcccggccagatgtgaagtgtgtggtgcacatccacaccccagctggagctgctgtgtctgccatgaagtgtggcctgctgcccatcagccctgaggccctgagcctgggggaggtggcctaccatgactaccacggcatcctggtggatgaggaggagaaggtgctgatccagaagaacctgggccccaagagcaaggtgctgatcctgaggaaccacggcctggtgtctgtgggggagagcgtggaggaggccttctactacatccacaacctggtggtggcctgtgagatccaggtgaggaccctggccagcgctgggggccctgacaacctggtgctgctgaaccctgagaagtacaaggccaagagccgcagccctggcagccctgtgggggagggcaccggcagcccccccaagtggcagatcggggagcaggagtttgaggccctgatgaggatgctggacaacctgggctacagaacaggctacccctaccgctacccagccctgcgggagaagagcaagaagtacagtgatgtggaggtgcctgcctctgtgacaggctacagctttgccagtgatggagacagcggcacctgcagccccctgcggcacagcttccagaagcagcagcgggagaagacccgctggctgaacagcggcagaggagatgaggccagcgaggagggccagaatggcagcagccccaagagcaagaccaagtggaccaaggaggatggccacaggaccagcaccagcgctgtgcccaacctgtttgtgcccctgaacaccaaccccaaggaggtgcaggagatgaggaacaagatccgggagcagaacctgcaggacatcaagacagctggcccccagagccaggtgctgtgtggggtggtgatggacaggagcctggtgcaggatgcccccctgagtgactgcacagagaccatcgagggcctggagctgacagagcagaccttcagccctgccaagagcctgtccttcaggaagggggagctggtgacagccagcaaggccatcatcgagaaggagtaccagccccacgtgattgtgtccaccaccggccccaaccccttcaccaccctgacagaccgggagctggaggagtacagaagagaggtggagaggaagcagaagggcagcgaggagaacctggatgaggcccgggagcagaaggagaagagccccccagaccagcctgctgtgccccaccccccacccagcacccccatcaagctggaggagggagatggctgtgcccgggagtacctgctgccctag

SEQ ID NO: 105328 - DNA, 1989 bp, Artificial Sequence
  derived and/or modified sequence
atgaacggcgacagccgggccgccgtggtgaccagccccccccccaccacggccccccataaggaacggtattttgaccgagtggacgaaaataatcctgagtatttgcgcgaaagaaacatggcacccgatctacgtcaggattttaatatgatggaacagaagaagcgggtgagtatgatacttcaatctcctgcattctgcgaggaattggagagcatgattcaggagcagtttaagaagggaaagaaccccacaggactgctggcgctgcaacagatagccgacttcatgacaaccaacgtgcccaatgtctaccctgccgccccccaagggggtatggcagcattgaacatgtcgcttggcatggtgacccccgtcaacgatctccggggaagcgacagcattgcctacgacaaaggagaaaaattgctgagatgcaaacttgccgctttttataggctggccgaccttttcggttggagtcagcttatctataatcatatcacaactagggttaacagtgagcaggagcactttctcatagttccatttggtctgctgtatagtgaggttactgctagttctctggtaaagatcaatctccaaggggacatcgtggacaggggttccaccaatttgggagttaatcaagcgggcttcacactacacagcgcgatctacgccgcacgccccgatgttaagtgtgtagtgcatattcacacgccagcaggcgccgccgtcagcgccatgaagtgtggcctgctgcccattagccctgaagcattaagtctaggcgaagtagcctaccacgattatcacggaattttagtagatgaggaggaaaaagtgttaatccaaaagaaccttggccctaaatccaaggtcctgatcctgagaaaccacggactcgtgtcagtcggtgagagcgtggaggaggcattctactatatccataacctggtcgtagcctgcgagatacaggtgagaaccttagcttctgctgggggtccggataatcttgtcctcctgaatccagagaaatacaaagctaaatcccgttccccaggctcccccgttggcgagggcaccggtagcccgcctaagtggcaaattggagaacaggagtttgaagcactcatgaggatgttagacaacttgggatatcggactggatacccctataggtacccagccctccgggagaagtctaagaagtattctgacgtcgaagtgcctgcatcggtgacaggctattcctttgctagcgacggagactccggaacatgttcgccgctgcgccatagctttcagaaacaacagagggagaaaaccagatggttgaacagcggtcggggagatgaagctagcgaggagggccagaatgggtccagcccgaaatcaaagactaagtggaccaaagaagacggccacaggacctcaactagtgccgtgccaaatcttttcgtccccctaaataccaaccctaaagaagtgcaagaaatgcgaaacaagattagagagcaaaatctgcaggacataaaaaccgcggggccccagtctcaggtcctgtgtggcgtggtgatggaccgatctctggtccaggacgcacctctgtccgattgtactgagacaatcgagggactggagttgaccgaacagacattcagccccgctaaatcattgtcttttcggaaaggcgaattggtgacagcaagtaaagccattattgagaaagaatatcaacctcatgtgattgtaagtaccaccggacccaatccttttacaacgctgactgaccgcgaactagaggaatatcgcagggaggttgaaaggaagcagaaaggttcggaggaaaacctggacgaagcccgggaacagaaagagaagtcaccgccagatcagcccgcagtgccccatccccccccttcaaccccaatcaaacttgaagaaggtgatggctgtgctagggagtacctgcttccttag

SEQ ID NO: 105329 - DNA, 1989 bp, Artificial Sequence
  derived and/or modified sequence
atgaacggtgacagtagagcagcagtagttacatcccccccacccacaacagcccctcataaggagcgctactttgacagagtggatgaaaataatcccgagtacctgcgagaacggaacatggcccctgacctgagacaggatttcaacatgatggagcagaaaaaaagggtgtctatgattctgcagagcccggcattttgtgaggagctggagtcaatgatccaggaacagtttaagaaaggaaaaaatccgaccggactcctggccctgcagcagattgctgatttcatgactactaacgttccgaatgtctaccctgctgccccacaagggggaatggctgctctgaatatgtctctgggcatggtgacccctgtcaatgacctgcgcggtagcgattcaatcgcgtatgacaagggggagaagctgctacgatgtaagctggcagccttttatcgccttgcagatctattcggatggtctcagctgatttataatcatattacaacacgggtgaactctgagcaggagcactttcttatagtgccattcggcctcctctatagtgaggttaccgcctcctccctcgtgaaaatcaacctccagggtgatattgtcgaccggggttcgaccaacctgggagtcaaccaagcaggcttcacactgcactccgccatatacgcagcccgacctgatgtgaagtgtgtagtccacatccacactcccgcaggggctgccgtcagcgctatgaaatgtggcctgctccctatctctccggaggctctctctctgggagaggtggcctaccacgactaccatggcatattggtggatgaggaggaaaaggtgctgattcagaagaacctagggccaaaatccaaggtcctgatactccgcaaccatgggctggtaagcgttggtgaatctgtcgaggaagctttctactacattcacaacctcgttgttgcatgcgagattcaggtgaggaccctcgccagtgccggtggccctgacaatctggtgctgttaaaccctgagaagtacaaggccaaaagccgatccccaggaagtcccgtgggtgaaggtacaggcagtcccccaaagtggcaaatcggagagcaggaatttgaggcattgatgcggatgctggacaacctgggctaccggacaggttatccttaccggtatcccgctcttcgcgagaagtctaaaaagtatagtgatgttgaggtgccagcttctgttacagggtatagcttcgcatccgatggagactcaggcacttgtagtccattgcgacactcattccagaagcagcaaagggaaaaaacaagatggctcaacagcggtaggggggacgaggcaagcgaagaaggacagaacgggagctcgcccaaatctaagaccaagtggaccaaggaagacgggcaccgaacaagcactagcgccgtgcccaacctgttcgtaccactgaacacgaatcccaaagaggtccaagagatgaggaacaaaatcagagagcagaatcttcaagacatcaagactgcgggacctcaatctcaggtcctgtgtggagtggtgatggatcgctcattggttcaagacgcacccctttccgactgcactgaaactatcgaaggcctggagctgaccgaacaaacattttccccagcaaaatctcttagcttcaggaaaggggagttggtgacagcctcaaaggcgattattgaaaaggaataccagccacatgtaatcgtgtcgactaccggccctaacccgttcacaacactcacggacagagaacttgaagagtaccgtcgggaggtagagcgtaaacagaaaggaagcgaggaaaacttggatgaggccagagaacagaaggaaaagagcccccctgaccaacccgctgtgccgcatccacctccttcaacgcctataaaattggaagaaggtgatggctgtgcccgagagtatttacttccctag

SEQ ID NO: 105330 - DNA, 1989 bp, Artificial Sequence
  derived and/or modified sequence
atgaacggcgacagcagagccgccgtggtgaccagccccccccccaccaccgccccccacaaggagagatacttcgacagagtggacgagaacaaccccgagtacctgagagagagaaacatggcccccgacctgagacaggacttcaacatgatggagcagaagaagagagtgagcatgatcctgcagagccccgccttctgcgaggagctggagagcatgatccaggagcagttcaagaagggcaagaaccccaccggcctgctggccctgcagcagatcgccgacttcatgaccaccaacgtgcccaacgtgtaccccgccgccccccagggcggcatggccgccctgaacatgagcctgggcatggtgacccccgtgaacgacctgagaggcagcgacagcatcgcctacgacaagggcgagaagctgctgagatgcaagctggccgccttctacagactggccgacctgttcggctggagccagctgatctacaaccacatcaccaccagagtgaacagcgagcaggagcacttcctgatcgtgcccttcggcctgctgtacagcgaggtgaccgccagcagcctggtgaagatcaacctgcagggcgacatcgtggacagaggcagcaccaacctgggcgtgaaccaggccggcttcaccctgcacagcgccatctacgccgccagacccgacgtgaagtgcgtggtgcacatccacacccccgccggcgccgccgtgagcgccatgaagtgcggcctgctgcccatcagccccgaggccctgagcctgggcgaggtggcctaccacgactaccacggcatcctggtggacgaggaggagaaggtgctgatccagaagaacctgggccccaagagcaaggtgctgatcctgagaaaccacggcctggtgagcgtgggcgagagcgtggaggaggccttctactacatccacaacctggtggtggcctgcgagatccaggtgagaaccctggccagcgccggcggccccgacaacctggtgctgctgaaccccgagaagtacaaggccaagagcagaagccccggcagccccgtgggcgagggcaccggcagcccccccaagtggcagatcggcgagcaggagttcgaggccctgatgagaatgctggacaacctgggctacagaaccggctacccctacagataccccgccctgagagagaagagcaagaagtacagcgacgtggaggtgcccgccagcgtgaccggctacagcttcgccagcgacggcgacagcggcacctgcagccccctgagacacagcttccagaagcagcagagagagaagaccagatggctgaacagcggcagaggcgacgaggccagcgaggagggccagaacggcagcagccccaagagcaagaccaagtggaccaaggaggacggccacagaaccagcaccagcgccgtgcccaacctgttcgtgcccctgaacaccaaccccaaggaggtgcaggagatgagaaacaagatcagagagcagaacctgcaggacatcaagaccgccggcccccagagccaggtgctgtgcggcgtggtgatggacagaagcctggtgcaggacgcccccctgagcgactgcaccgagaccatcgagggcctggagctgaccgagcagaccttcagccccgccaagagcctgagcttcagaaagggcgagctggtgaccgccagcaaggccatcatcgagaaggagtaccagccccacgtgatcgtgagcaccaccggccccaaccccttcaccaccctgaccgacagagagctggaggagtacagaagagaggtggagagaaagcagaagggcagcgaggagaacctggacgaggccagagagcagaaggagaagagcccccccgaccagcccgccgtgccccaccccccccccagcacccccatcaagctggaggagggcgacggctgcgccagagagtacctgctgccctag

SEQ ID NO: 105331 - protein, 750 aa, Artificial Sequence
  derived and/or modified sequence
MFGREFCYAMETALVTPILLQIGLPEQYYSLTWFLSPILGLIFTPLIGSASDRCTLSWGRRRPFILALCVGVLFGVALFLNGSAIGLALGDVPNRQPIGIVLTVLGVVVLDFSADATEGPIRAYLLDVVDSEEQDMALNIHAFSAGLGGAIGYVLGGLDWTQTFLGSWFRTQNQVLFFFAAIIFTVSVALHLFSIDEEQYSPQQERSAEEPGALDGGEPHGVPAFPDEVQSEHELALDYPDVDIMRSKSDSALHVPDTALDLEPELLFLHDIEPSIFHDASYPATPRSTSQELAKTKLPRLATFLKEAAKEDETLLDNHLNEAKVPNGSGSPTKDALGGYTRVDTKPSATSSSMRRRRHAFRRQASSTFSYYGKLGSHCYRYRRANAVVLIKPSRSMSDLYDMQKRQRQHRHRNQSGATTSSGDTESEEGEGETTVRLLWLSMLKMPRELMRLCLCHLLTWFSVIAEAVFYTDFMGQVIFEGDPKAPSNSTAWQAYNAGVKMGCWGLVIYAATGAICSALLQKYLDNYDLSVRVIYVLGTLGFSVGTAVMAMFPNVYVAMVTISTMGIVSMSISYCPYALLGQYHDIKQYIHHSPGNSKRGFGIDCAILSCQVYISQILVASALGGVVDAVGTVRVIPMVASVGSFLGFLTATFLVIYPNVSEEAKEEQKGLSSPLAGEGRAGGNSEKPTVLKLTRKEGLQGPVETESVTPAGIDVCQISSHWLVPQLLESIFLYDYFRKKIFFSTMWFS

SEQ ID NO: 105332 - protein, 808 aa, Artificial Sequence
  derived and/or modified sequence
MKMAPQNADPESMQVQELSVPLPDPQKAGGAEAENCETISEGSIDRIPMRLWVMHGAVMFGREFCYAMETALVTPILLQIGLPEQYYSLTWFLSPILGLIFTPLIGSASDRCTLSWGRRRPFILALCVGVLFGVALFLNGSAIGLALGDVPNRQPIGIVLTVLGVVVLDFSADATEGPIRAYLLDVVDSEEQDMALNIHAFSAGLGGAIGYVLGGLDWTQTFLGSWFRTQNQVLFFFAAIIFTVSVALHLFSIDEEQYSPQQERSAEEPGALDGGEPHGVPAFPDEVQSEHELALDYPDVDIMRSKSDSALHVPDTALDLEPELLFLHDIEPSIFHDASYPATPRSTSQELAKTKLPRLATFLKEAAKEDETLLDNHLNEAKVPNGSGSPTKDALGGYTRVDTKPSATSSSMRRRRHAFRRQASSTFSYYGKLGSHCYRYRRANAVVLIKPSRSMSDLYDMQKRQRQHRHRNQSGATTSSGDTESEEGEGETTVRLLWLSMLKMPRELMRLCLCHLLTWFSVIAEAVFYTDFMGQVIFEGDPKAPSNSTAWQAYNAGVKMGCWGLVIYAATGAICSALLQKYLDNYDLSVRVIYVLGTLGFSVGTAVMAMFPNVYVAMVTISTMGIVSMSISYCPYALLGQYHDIKQYIHHSPGNSKRGFGIDCAILSCQVYISQILVASALGGVVDAVGTVRVIPMVASVGSFLGFLTATFLVIYPNVSEEAKEEQKGLSSPLAGEGRAGGNSEKPTVLKLTRKEGLQGPVETESVTPAGIDVCQISSHWLVPQLLESIFLYDYFRKKIFFSTMWFS

SEQ ID NO: 105333 - DNA, 2253 bp, Artificial Sequence
  derived and/or modified sequence
atgttcggcagagagttctgctacgccatggagaccgccctggtgacccccatcctgctgcagatcggcctgcccgagcagtactacagcctgacctggttcctgagccccatcctgggcctgatcttcacccccctgatcggcagcgccagcgacagatgcaccctgagctggggcagaagaagacccttcatcctggccctgtgcgtgggcgtgctgttcggcgtggccctgttcctgaacggcagcgccatcggcctggccctgggcgacgtgcccaacagacagcccatcggcatcgtgctgaccgtgctgggcgtggtggtgctggacttcagcgccgacgccaccgagggccccatcagagcctacctgctggacgtggtggacagcgaggagcaggacatggccctgaacatccacgccttcagcgccggcctgggcggcgccatcggctacgtgctgggcggcctggactggacccagaccttcctgggcagctggttcagaacccagaaccaggtgctgttcttcttcgccgccatcatcttcaccgtgagcgtggccctgcacctgttcagcatcgacgaggagcagtacagcccccagcaggagagaagcgccgaggagcccggcgccctggacggcggcgagccccacggcgtgcccgccttccccgacgaggtgcagagcgagcacgagctggccctggactaccccgacgtggacatcatgagaagcaagagcgacagcgccctgcacgtgcccgacaccgccctggacctggagcccgagctgctgttcctgcacgacatcgagcccagcatcttccacgacgccagctaccccgccacccccagaagcaccagccaggagctggccaagaccaagctgcccagactggccaccttcctgaaggaggccgccaaggaggacgagaccctgctggacaaccacctgaacgaggccaaggtgcccaacggcagcggcagccccaccaaggacgccctgggcggctacaccagagtggacaccaagcccagcgccaccagcagcagcatgagaagaagaagacacgccttcagaagacaggccagcagcaccttcagctactacggcaagctgggcagccactgctacagatacagaagagccaacgccgtggtgctgatcaagcccagcagaagcatgagcgacctgtacgacatgcagaagagacagagacagcacagacacagaaaccagagcggcgccaccaccagcagcggcgacaccgagagcgaggagggcgagggcgagaccaccgtgagactgctgtggctgagcatgctgaagatgcccagagagctgatgagactgtgcctgtgccacctgctgacctggttcagcgtgatcgccgaggccgtgttctacaccgacttcatgggccaggtgatcttcgagggcgaccccaaggcccccagcaacagcaccgcctggcaggcctacaacgccggcgtgaagatgggctgctggggcctggtgatctacgccgccaccggcgccatctgcagcgccctgctgcagaagtacctggacaactacgacctgagcgtgagagtgatctacgtgctgggcaccctgggcttcagcgtgggcaccgccgtgatggccatgttccccaacgtgtacgtggccatggtgaccatcagcaccatgggcatcgtgagcatgagcatcagctactgcccctacgccctgctgggccagtaccacgacatcaagcagtacatccaccacagccccggcaacagcaagagaggcttcggcatcgactgcgccatcctgagctgccaggtgtacatcagccagatcctggtggccagcgccctgggcggcgtggtggacgccgtgggcaccgtgagagtgatccccatggtggccagcgtgggcagcttcctgggcttcctgaccgccaccttcctggtgatctaccccaacgtgagcgaggaggccaaggaggagcagaagggcctgagcagccccctggccggcgagggcagagccggcggcaacagcgagaagcccaccgtgctgaagctgaccagaaaggagggcctgcagggccccgtggagaccgagagcgtgacccccgccggcatcgacgtgtgccagatcagcagccactggctggtgccccagctgctggagagcatcttcctgtacgactacttcagaaagaagatcttcttcagcaccatgtggttcagctag

SEQ ID NO: 105334 - DNA, 2427 bp, Artificial Sequence
  derived and/or modified sequence
atgaagatggccccccagaacgccgaccccgagagcatgcaggtgcaggagctgagcgtgcccctgcccgacccccagaaggccggcggcgccgaggccgagaactgcgagaccatcagcgagggcagcatcgacagaatccccatgagactgtgggtgatgcacggcgccgtgatgttcggcagagagttctgctacgccatggagaccgccctggtgacccccatcctgctgcagatcggcctgcccgagcagtactacagcctgacctggttcctgagccccatcctgggcctgatcttcacccccctgatcggcagcgccagcgacagatgcaccctgagctggggcagaagaagacccttcatcctggccctgtgcgtgggcgtgctgttcggcgtggccctgttcctgaacggcagcgccatcggcctggccctgggcgacgtgcccaacagacagcccatcggcatcgtgctgaccgtgctgggcgtggtggtgctggacttcagcgccgacgccaccgagggccccatcagagcctacctgctggacgtggtggacagcgaggagcaggacatggccctgaacatccacgccttcagcgccggcctgggcggcgccatcggctacgtgctgggcggcctggactggacccagaccttcctgggcagctggttcagaacccagaaccaggtgctgttcttcttcgccgccatcatcttcaccgtgagcgtggccctgcacctgttcagcatcgacgaggagcagtacagcccccagcaggagagaagcgccgaggagcccggcgccctggacggcggcgagccccacggcgtgcccgccttccccgacgaggtgcagagcgagcacgagctggccctggactaccccgacgtggacatcatgagaagcaagagcgacagcgccctgcacgtgcccgacaccgccctggacctggagcccgagctgctgttcctgcacgacatcgagcccagcatcttccacgacgccagctaccccgccacccccagaagcaccagccaggagctggccaagaccaagctgcccagactggccaccttcctgaaggaggccgccaaggaggacgagaccctgctggacaaccacctgaacgaggccaaggtgcccaacggcagcggcagccccaccaaggacgccctgggcggctacaccagagtggacaccaagcccagcgccaccagcagcagcatgagaagaagaagacacgccttcagaagacaggccagcagcaccttcagctactacggcaagctgggcagccactgctacagatacagaagagccaacgccgtggtgctgatcaagcccagcagaagcatgagcgacctgtacgacatgcagaagagacagagacagcacagacacagaaaccagagcggcgccaccaccagcagcggcgacaccgagagcgaggagggcgagggcgagaccaccgtgagactgctgtggctgagcatgctgaagatgcccagagagctgatgagactgtgcctgtgccacctgctgacctggttcagcgtgatcgccgaggccgtgttctacaccgacttcatgggccaggtgatcttcgagggcgaccccaaggcccccagcaacagcaccgcctggcaggcctacaacgccggcgtgaagatgggctgctggggcctggtgatctacgccgccaccggcgccatctgcagcgccctgctgcagaagtacctggacaactacgacctgagcgtgagagtgatctacgtgctgggcaccctgggcttcagcgtgggcaccgccgtgatggccatgttccccaacgtgtacgtggccatggtgaccatcagcaccatgggcatcgtgagcatgagcatcagctactgcccctacgccctgctgggccagtaccacgacatcaagcagtacatccaccacagccccggcaacagcaagagaggcttcggcatcgactgcgccatcctgagctgccaggtgtacatcagccagatcctggtggccagcgccctgggcggcgtggtggacgccgtgggcaccgtgagagtgatccccatggtggccagcgtgggcagcttcctgggcttcctgaccgccaccttcctggtgatctaccccaacgtgagcgaggaggccaaggaggagcagaagggcctgagcagccccctggccggcgagggcagagccggcggcaacagcgagaagcccaccgtgctgaagctgaccagaaaggagggcctgcagggccccgtggagaccgagagcgtgacccccgccggcatcgacgtgtgccagatcagcagccactggctggtgccccagctgctggagagcatcttcctgtacgactacttcagaaagaagatcttcttcagcaccatgtggttcagctag

SEQ ID NO: 105335 - DNA, 2253 bp, Artificial Sequence
  derived and/or modified sequence
atgttcggcagagagttctgctatgccatggaaactgccctggtgaccccaatcctcctccaaatcggcctccccgaacagtattattccctcacctggttcctatccccaatccttggcctcatatttacccccctcatcggaagcgcctcggatcgctgcaccctgtcctggggccgacgtaggcccttcatactagccctctgcgtgggtgtgctgttcggcgttgccctctttctaaacggtagtgccatcggtctcgcactgggcgatgtgccaaaccgtcagcctattgggatagttctgactgtcctgggagttgtcgtgctggacttttccgctgacgccaccgaagggcctattcgagcctatctgctggacgtcgttgactcagaagagcaggacatggctttgaatattcacgccttttctgcgggactaggcggagccatcggctacgttttgggaggtcttgattggacgcagacctttctgggttcctggttccggacccagaatcaggtattgttttttttcgccgccattatttttactgtgagcgtcgccctgcacctcttcagcatcgacgaggaacagtactcacctcagcaggaacgcagcgccgaggaaccaggtgccctggatggcggggaaccccacggcgtccccgcatttcctgatgaagttcagagcgagcatgagctggccttggactacccagacgtcgatataatgagaagcaagtccgactccgccctccacgtgcctgacactgcgctggatctggaacccgaactcttgtttttacacgatatagaacctagtatattccacgacgccagttatccagctactccacgctccacttctcaggaactcgccaagacaaaactcccacggttggccacattccttaaggaagcagctaaagaggacgagactctgcttgacaaccaccttaatgaggcgaaagtgcctaatggctcaggcagcccaacaaaggacgccctgggtgggtatactcgcgtggacacaaagccgagcgcaacgtcctcgagcatgaggagaaggcgccacgccttccgtcgccaggcctctagcaccttctcatactatggaaagctgggctcacactgctacaggtataggcgagcgaacgccgtggtgctgatcaagccaagcaggtcaatgtccgatttgtacgatatgcagaagcgacaacgccagcacaggcaccgtaatcagagcggggccaccacctccagcggcgacaccgaatcagaggagggcgagggggaaactacagtgagactgctttggctgtcaatgcttaagatgccaagagagctgatgagactgtgtctgtgtcatcttttaacctggtttagcgtgatcgccgaggcagttttttacacggattttatgggccaggtcatctttgagggggaccccaaagccccaagcaacagtactgcctggcaagcatataatgccggcgtaaaaatggggtgttggggcctggtcatctatgcagctactggggcgatctgtagcgctctcctgcaaaaatatctcgataactacgatctctccgtgcgagttatttatgttctcggcactctcgggttctcagtcggtactgcagtgatggccatgtttccaaatgtgtacgtcgccatggttacgatttctaccatgggaatcgtgtctatgagcatcagttactgcccctatgctctgttgggccagtaccatgacatcaaacagtacattcaccacagtcccggaaactcgaaacggggctttgggattgactgcgccattctgagctgccaagtgtacatcagccaaatcctggttgcctccgccctgggaggagttgtcgacgccgtgggcacggtgagggtgattcccatggtcgcctccgtaggctcattcctgggttttctgaccgccacatttcttgtgatctacccaaatgtgtctgaggaggcgaaggaggagcaaaagggtctgtcctcccccctcgctggggagggccgagccggaggaaactctgaaaagcctacagtgttaaaactcacgcggaaggaggggttgcaaggtcccgttgagacagagtcagtcacgcccgcgggcatagacgtctgtcaaatatcgagtcactggctggtgccccaacttctggaatccatcttcttgtacgactatttcagaaagaagatcttctttagtaccatgtggttctcttag

SEQ ID NO: 105336 - DNA, 2427 bp, Artificial Sequence
  derived and/or modified sequence
atgaaaatggctcctcagaatgctgatcccgagtctatgcaggtccaggaacttagcgtcccactgccagatccccagaaagccggcggcgctgaagctgagaactgcgagacgatctctgaaggcagtatcgacaggattcccatgagactttgggtgatgcatggggccgtaatgtttggcagagagttctgttatgctatggagacagcattggtgacccccatcctgctgcagatcggcttgccagagcagtattacagcttgacatggttcctttcaccaattctggggctgatttttacccctttaatcggttctgcctctgatcgctgtacactgtcctggggacgtcggagaccctttatcctggccctgtgtgtgggagtgctcttcggtgtggccctgttcttgaacggctcagctatcggcttggcacttggggacgtgcccaatagacagcccattgggattgtgctgacggtgctcggagtcgttgttctggacttttctgccgatgcaacggaaggacccatacgggcttacttactggatgtggtggattccgaggagcaggatatggccctcaatattcatgccttctccgcgggcttgggcggggccattggctatgtcctggggggcctggactggacacagacgttcctaggtagttggttcagaacccagaatcaagtcctgtttttctttgcagctataattttcaccgtaagcgtagctttacatctattcagcattgacgaggagcagtatagtccacagcaagaacggagtgccgaggaacccggggctctggatggcggagagccccacggagtccccgcgttccccgatgaagtccagagtgagcacgaattggcattggactatcccgatgtggacatcatgcgatcgaaatcggattcggccttacatgtgcccgacaccgcacttgacttggagcctgagcttttattcttacacgatattgagccttcaatctttcacgacgccagttaccctgccaccccaagaagtacttcgcaggagttagctaaaacaaagcttcctcggctggcaacatttctgaaagaagccgccaaggaagatgagacattgctggacaatcacctgaacgaagccaaggttcctaatggctccggttcccccaccaaagatgccttgggggggtatacacgtgtagacaccaagcctagcgcgacgagctcctctatgcggcgacgtaggcacgcatttcggcgtcaggcctcaagtacattctcctactatgggaaactgggcagtcactgttatcggtaccggcgagccaacgccgtcgtcttaattaaaccaagccggtccatgtctgacctgtatgacatgcagaaaagacagagacagcataggcatcgcaaccaatcaggggcgacaacatccagcggtgataccgagtctgaggaaggggaaggagaaaccacagttaggctcctctggctgtcaatgctcaagatgccccgcgagctcatgaggctctgtctgtgtcatcttctgacatggttctccgtaatcgccgaagccgtattctataccgactttatggggcaagttatctttgaaggcgacccaaaagccccgtctaattccacagcctggcaggcgtacaacgctggcgttaagatggggtgttgggggctggtgatctacgccgccaccggcgcaatttgctcagctctcctgcagaaatatcttgataactacgacctgtctgtgcgggtcatctacgtcctgggaacactggggttttctgtcgggactgccgttatggctatgttccccaacgtctacgtcgcaatggtgactatctctaccatggggattgtgagcatgtccattagttactgtccctacgccctgctgggtcaataccacgacatcaaacaatacattcaccactcacccggtaactccaagcgcggttttgggatcgactgcgctatcctttcttgccaagtgtacatctcacagattctggtcgcttctgctctgggtggggtggtcgatgccgtcggaactgtccgcgtgattcctatggtggcttccgtgggtagctttttaggtttccttactgccacttttctggtgatatatccgaacgtcagcgaggaggccaaagaagaacagaaggggttaagctcacccttagctggcgaaggaagagctggcgggaatagtgagaaaccaacagttttaaaacttacacggaaggaggggctgcagggccccgtggagaccgagagcgtgacccccgcggggattgacgtctgccagatttcatcccactggctagttccacagctgttggaatcgatctttctctatgattactttagaaaaaagatcttcttctctaccatgtggttcagctag

SEQ ID NO: 105337 - DNA, 2253 bp, Artificial Sequence
  derived and/or modified sequence
atgtttggccgggagttctgctacgccatggagacagccctggtgacccccatcctgctgcagatcggcctgcctgagcagtactacagcctgacctggttcctgagccccatcctgggcctcatcttcacccccctgattggcagcgccagtgaccgctgcaccctgtcctggggcagaagaagacccttcatcctggccctgtgtgtgggcgtgctgtttggagtggccctcttcctgaatggaagtgccatcggcctggccctgggagatgtgcccaaccggcagcccatcggcatcgtgctgactgtgctgggcgtggtggtgctggacttcagcgcagatgccacagagggccccatccgggcctacctgctggatgtggtggacagcgaggagcaggacatggccctgaacatccacgccttctctgctggcctgggcggggccatcggctacgtgctgggcggcctggactggacccagaccttcctgggctcctggttccgcacccagaaccaggtgctcttcttctttgctgccatcatcttcaccgtgtctgtggccctgcacctgttcagcattgatgaggagcagtacagcccccagcaggagaggtctgctgaggagcccggggccctggatggaggagagccccacggcgtgcctgccttcccagatgaggtgcagagcgagcacgagctggccctggactacccagatgtggacatcatgaggagcaagagtgacagcgccctgcacgtgcctgacacagccctggacctggagcctgagctgctcttcctgcatgacatcgagcccagcatcttccatgatgccagctacccagccacccccaggagcaccagccaggagctggccaagaccaagctgccccggctggccaccttcctgaaggaggccgccaaggaggatgagaccctgctggacaaccacctgaatgaggccaaggtgcccaatggaagtggcagccccaccaaggatgccctgggcggctacaccagggtggacaccaagcccagcgccaccagcagctccatgagaagaagaagacatgccttccggcggcaggccagcagcaccttctcctactacggcaagctgggcagccactgctaccgctacagaagagccaatgctgtggtgctgatcaagcccagccgctccatgtctgacctgtatgacatgcagaagaggcagaggcagcaccgccacaggaaccagagcggggccaccaccagcagcggggacacagaaagtgaggagggggagggggagaccaccgtgcggctgctgtggctgtccatgctgaagatgccccgggagctgatgaggctgtgcctgtgccacctgctgacctggttctctgtgattgctgaggccgtgttctacacagacttcatgggccaggtgatctttgaaggagaccccaaggcccccagcaacagcacagcctggcaggcctacaatgctggggtgaagatgggctgctggggcctggtgatctatgctgccactggagccatctgcagcgccctgctgcagaagtacctggacaactatgacctgtctgtgcgggtcatctacgtgctgggcaccctgggcttctctgtgggcacagctgtgatggccatgttccccaacgtgtatgtggccatggtgaccatcagcaccatgggcatcgtgtccatgagcatctcctactgcccctatgccctgctgggccagtaccatgacatcaagcagtacatccaccacagccctggcaacagcaagaggggcttcggcatcgactgtgccatcctgagctgccaggtgtacatcagccagatcctggtggccagcgccctgggcggcgtggtggatgctgtgggcaccgtgcgggtcatccccatggtggcctctgtgggcagcttcctgggcttcctgacagccaccttcctggtgatctaccccaacgtgtctgaggaggccaaggaggagcagaagggcctgagcagccccctggccggggagggccgggccggcggcaacagcgagaagcccaccgtgctgaagctgaccaggaaggagggcctgcagggccctgtggagacagagagcgtgaccccagctggcattgatgtgtgccagatcagcagccactggctggtgccccagctgctggagagcatcttcctgtatgactacttcaggaagaagatcttcttcagcaccatgtggttctcctag

SEQ ID NO: 105338 - DNA, 2427 bp, Artificial Sequence
  derived and/or modified sequence
atgaagatggccccccagaatgctgaccctgagagcatgcaggtgcaggagctgtctgtgcccctgcctgacccccagaaggccggcggcgctgaggccgagaactgtgagaccatcagcgagggcagcattgaccgcatccccatgaggctgtgggtgatgcatggagctgtgatgtttggccgggagttctgctacgccatggagacagccctggtgacccccatcctgctgcagatcggcctgcctgagcagtactacagcctgacctggttcctgagccccatcctgggcctcatcttcacccccctgattggcagcgccagtgaccgctgcaccctgtcctggggcagaagaagacccttcatcctggccctgtgtgtgggcgtgctgtttggagtggccctcttcctgaatggaagtgccatcggcctggccctgggagatgtgcccaaccggcagcccatcggcatcgtgctgactgtgctgggcgtggtggtgctggacttcagcgcagatgccacagagggccccatccgggcctacctgctggatgtggtggacagcgaggagcaggacatggccctgaacatccacgccttctctgctggcctgggcggggccatcggctacgtgctgggcggcctggactggacccagaccttcctgggctcctggttccgcacccagaaccaggtgctcttcttctttgctgccatcatcttcaccgtgtctgtggccctgcacctgttcagcattgatgaggagcagtacagcccccagcaggagaggtctgctgaggagcccggggccctggatggaggagagccccacggcgtgcctgccttcccagatgaggtgcagagcgagcacgagctggccctggactacccagatgtggacatcatgaggagcaagagtgacagcgccctgcacgtgcctgacacagccctggacctggagcctgagctgctcttcctgcatgacatcgagcccagcatcttccatgatgccagctacccagccacccccaggagcaccagccaggagctggccaagaccaagctgccccggctggccaccttcctgaaggaggccgccaaggaggatgagaccctgctggacaaccacctgaatgaggccaaggtgcccaatggaagtggcagccccaccaaggatgccctgggcggctacaccagggtggacaccaagcccagcgccaccagcagctccatgagaagaagaagacatgccttccggcggcaggccagcagcaccttctcctactacggcaagctgggcagccactgctaccgctacagaagagccaatgctgtggtgctgatcaagcccagccgctccatgtctgacctgtatgacatgcagaagaggcagaggcagcaccgccacaggaaccagagcggggccaccaccagcagcggggacacagaaagtgaggagggggagggggagaccaccgtgcggctgctgtggctgtccatgctgaagatgccccgggagctgatgaggctgtgcctgtgccacctgctgacctggttctctgtgattgctgaggccgtgttctacacagacttcatgggccaggtgatctttgaaggagaccccaaggcccccagcaacagcacagcctggcaggcctacaatgctggggtgaagatgggctgctggggcctggtgatctatgctgccactggagccatctgcagcgccctgctgcagaagtacctggacaactatgacctgtctgtgcgggtcatctacgtgctgggcaccctgggcttctctgtgggcacagctgtgatggccatgttccccaacgtgtatgtggccatggtgaccatcagcaccatgggcatcgtgtccatgagcatctcctactgcccctatgccctgctgggccagtaccatgacatcaagcagtacatccaccacagccctggcaacagcaagaggggcttcggcatcgactgtgccatcctgagctgccaggtgtacatcagccagatcctggtggccagcgccctgggcggcgtggtggatgctgtgggcaccgtgcgggtcatccccatggtggcctctgtgggcagcttcctgggcttcctgacagccaccttcctggtgatctaccccaacgtgtctgaggaggccaaggaggagcagaagggcctgagcagccccctggccggggagggccgggccggcggcaacagcgagaagcccaccgtgctgaagctgaccaggaaggagggcctgcagggccctgtggagacagagagcgtgaccccagctggcattgatgtgtgccagatcagcagccactggctggtgccccagctgctggagagcatcttcctgtatgactacttcaggaagaagatcttcttcagcaccatgtggttctcctag

SEQ ID NO: 105339 - DNA, 2253 bp, Artificial Sequence
  derived and/or modified sequence
atgttcggccgggagttctgctacgccatggagaccgccctggtgacgcccatcctgttgcagatcggcctccctgagcagtactattctctgacgtggtttctgagtccaatcctggggcttatatttaccccactaatcggcagcgctagtgaccggtgcactctgtcttggggccgtagaaggccctttattctcgcactgtgcgtgggagtattgttcggagttgctcttttccttaacggctcagcaattgggttggcccttggcgacgttccgaacaggcaaccgattggaattgtcctgacggtgctcggagtcgtggtgctagatttctccgcagacgcaaccgaggggcccatcagggcctacctgctagacgtggtagatagcgaagaacaggatatggccctcaatatccatgcatttagtgcaggactcggaggcgccataggctatgtgttgggcggtctggattggacacagaccttcctcggaagctggtttcgtacccagaatcaggtgctcttctttttcgcagcaattatctttaccgtatccgtcgctctgcatctctttagcatcgatgaggagcagtacagcccccagcaggagcggtccgccgaagagcctggtgcactggatgggggagagccgcatggggtccctgcgttccccgacgaagtccagtctgagcatgagctggcactcgactacccggacgttgatataatgagatctaagtccgatagcgcactgcatgtcccagacaccgctctcgacctagaacctgagctcctatttctccatgacatcgaaccatctatcttccacgacgcatcctatccggcaaccccaaggtccacctcacaggagctcgcaaaaacaaaactacctagattagccaccttcctgaaggaggcagccaaagaagacgaaacattgcttgacaatcatctgaatgaggcaaaggtgcccaacggaagcggctccccaactaaagacgcgctgggtgggtacacccgggttgataccaagccatctgcaacatcctccagcatgaggagaaggaggcatgccttcaggcggcaggcaagctccacattttcttattacgggaagctcggaagccattgctaccgatatagacgagccaacgccgtggtgctgatcaaaccatcacgttccatgagcgatctttacgacatgcagaaacggcagagacagcatcgtcataggaaccagtcgggtgcaactaccagctcaggcgacactgagtccgaggagggcgaaggggagactaccgtgcgcctgctgtggttaagcatgttaaagatgcctagagaactcatgagactgtgcctctgtcatcttctcacttggttctccgtgatcgcggaggccgtcttctacaccgatttcatggggcaagttatattcgagggagatcccaaggcacccagtaactcaacagcgtggcaggcctataacgcaggcgttaagatgggatgttggggtctggtgatctacgccgcaaccggggcaatctgcagcgccctgctgcagaagtaccttgacaattacgatctcagtgtaagagtgatttacgtcctgggtacactggggttcagcgttgggactgccgtcatggcaatgtttccgaacgtatacgtggccatggtgaccataagtacaatgggtatcgtctccatgagcattagttactgcccatacgctctcctgggccagtatcatgacattaagcagtatattcaccacagcccaggtaactcaaagaggggcttcgggatcgattgcgctatactgagctgccaggtgtacatctcgcagattctggtggctagcgcactgggcggtgtggtcgatgccgtgggcaccgtacgcgtgatccccatggtcgctagcgttggctcttttttaggatttctcactgctacattcctcgttatctatcccaacgtgtcagaagaagctaaagaggagcaaaaaggtctgagttccccgcttgctggggagggaagggcaggaggtaacagcgagaagcctacagtcttgaaattgacccggaaagaggggttgcaaggccccgttgaaactgaatccgtcaccccagccggcatcgatgtttgccaaatatcgagccattggttggtgccccagttacttgagtcgatttttttgtatgactactttaggaaaaaaatctttttcagcacaatgtggtttagctag

SEQ ID NO: 105340 - DNA, 2427 bp, Artificial Sequence
  derived and/or modified sequence
atgaagatggccccccagaacgccgaccccgagagcatgcaggtgcaggaacttagcgttccactgcctgacccacagaaagctggcggggccgaagccgagaactgcgaaaccattagtgaggggagcatcgaccgcatacctatgagactgtgggtcatgcacggcgcagtcatgttcggaagggagttttgttatgccatggaaaccgccctggtgacccccattttactgcagattggtctgcctgagcaatattactccttgacatggtttctatcccccatactgggattaatcttcactcccctgattggcagcgcgtccgatcgctgcaccctctcatggggcagacggagaccttttatactcgctttgtgcgtgggcgtgttgttcggggtcgctcttttcctgaatggcagcgcaatcggattggctctgggagacgtcccaaatagacagcccatcgggatcgtcctcaccgtgctgggcgttgtggtactggactttagtgccgatgccacagaggggccaataagggcctatcttctggacgtggttgacagcgaggagcaagatatggcgctcaatattcacgcctttagtgctggtctcgggggagccatcggctatgttttaggagggctcgactggacgcaaaccttcctgggatcatggtttcgaactcagaaccaggtgctgttcttcttcgctgctatcatctttaccgtgtccgtggcccttcatttattcagtatcgacgaggaacagtactcccctcaacaagaacgatctgccgaagagcctggcgctttggatggaggagaacctcatggcgtgccagccttcccggatgaagtgcaaagcgaacatgaactcgctctggactacccagatgtcgacatcatgaggagtaagtctgactccgctctgcatgtaccagacacggctctggacctggaacctgaactgctgttccttcacgatattgagccctccatctttcatgacgcttcttaccctgccactcctcgctcgacctctcaggagctcgccaaaaccaaactcccccggctcgccacattcctgaaagaagcagctaaggaggacgaaaccctgctggataatcatttaaacgaggctaaggtgcccaacgggagtggctcgccaacaaaagacgcgctcggcggttatacgagggtagataccaaaccaagcgccacatcctccagcatgaggaggcgccgccatgctttcaggcggcaggcttcatcaacattctcctattatggtaagctgggtagtcattgttacaggtataggcgtgcaaatgccgtggtgcttattaaaccttcacggagcatgtccgacctttacgatatgcagaagaggcagcgacagcatcgccaccgcaaccagagtggcgcaactaccagcagcggagataccgaaagtgaggagggagagggggagaccaccgtgcgtcttctgtggctctcaatgctgaaaatgcccagggagcttatgaggctgtgcctgtgtcatctactgacgtggttctccgtcattgctgaggctgtcttttacacagacttcatgggtcaggttatttttgaaggggaccctaaggccccttcaaatagcacagcatggcaggcctataatgctggcgtgaaaatgggatgttggggactcgtgatctatgcagccacaggtgcaatctgcagcgcactgctacagaagtatctggacaattacgacctgtccgtacgggtgatatacgtactcggcactctggggttctctgtcggcacagccgtcatggctatgtttcccaacgtctacgttgcgatggtcacaatctcgaccatgggcattgtgtcaatgagcatcagttattgcccatatgctctccttggccagtaccacgatatcaaacagtatatccaccacagcccgggtaacagcaagagagggttcggcattgactgtgccattctctcatgtcaggtgtacattagccagattctggttgcatccgcactggggggcgtcgtggacgctgtgggaacagttcgcgttatacccatggttgccagcgtaggatccttcctggggtttctaactgccaccttcctggttatctacccaaatgtatcggaagaggccaaggaagaacagaagggcctttctagtcctctggctggggaagggagagctggagggaactcagagaaacctacggttttaaagctgaccaggaaagaaggccttcaggggccggtggagacagaaagcgttacccccgctggcatcgatgtgtgtcaaataagcagtcactggcttgtcccacaactccttgaaagcatattcctatacgattatttccgaaagaaaatttttttcagtaccatgtggttcagttag

SEQ ID NO: 105341 - DNA, 2253 bp, Artificial Sequence
  derived and/or modified sequence
atgtttgggagggaattttgctatgccatggaaacagcgcttgtgacacctatcttgctgcagattgggctgcccgagcagtattatagcctcacctggtttctttcccccatactcggcctaatttttactcccctgatcggcagtgcctcagataggtgtaccctgagctgggggagacgcagaccctttattcttgctctctgtgtgggtgtcctgtttggggtggccctgttccttaacggctccgccatcgggctggcgctgggcgacgtccccaatcggcagcccatcggtattgtgctgaccgttctgggagtggtggtgcttgactttagtgccgacgcaaccgagggccctattagagcgtatctgttggatgtggtcgattctgaagagcaggatatggccctgaacatccatgcattctccgccggattgggtggtgctataggctacgtgcttggaggactcgactggactcagacctttttgggcagttggttccggacgcaaaatcaggtcctctttttctttgccgcaatcatatttactgtctctgtggccttgcacttgttcagcattgatgaagagcagtattcgccacagcaggagcggtccgcagaggaacccggtgcactggatggcggtgaaccacacggggtgcctgcatttccagacgaagttcagtccgagcatgagctggctctggattatcccgacgttgatatcatgcggagcaagtcggattcagccctccatgttcccgacaccgcacttgacctggaacccgagttgttgtttctgcatgacatcgagcctagcatctttcacgatgcctcgtatccagcaaccccacggagcacaagtcaggaattagccaagacgaagctgccaaggcttgccacatttctgaaagaagcagctaaagaggacgagactctactggacaaccacctgaatgaagctaaagtgcccaacggctcaggctcaccaactaaagacgccctgggaggatatactagggtcgacactaaaccgagcgctacctcttcgtccatgaggagacgccgtcatgccttccgacgacaagcttcatcaactttcagttattatggtaagctgggatcccactgttacaggtacaggagagcaaacgctgtcgtgcttatcaagcccagcagaagcatgtccgacttgtacgacatgcagaaacgacagagacaacatcgtcacaggaatcagtccggagccaccacaagttccggcgacacagaaagcgaggagggggagggagagacaacggtcaggcttctgtggttgagcatgttaaaaatgccgagagaactcatgagattgtgtctttgccacctgctaacatggtttagtgtgatagcggaagcagtgttctacaccgactttatgggacaggttatcttcgagggcgaccccaaggcgccatcaaatagcacggcctggcaggcttataatgctggagtcaaaatgggctgctggggcctggtgatctatgcggcaactggtgccatctgctccgcgctgctgcagaagtacttggataattacgacctctcagtgcgggttatttacgtgctggggacattagggttctccgtcgggactgccgtaatggcgatgtttcccaatgtgtacgttgccatggttaccatttcaacgatgggaatagttagcatgtctatctcttattgtccatatgctctgcttggccagtatcacgacattaagcagtatattcatcattcaccagggaactccaaaagaggatttggtattgattgcgccatcctaagctgccaggtttatatctcacagatactggtcgcttctgccctcgggggagtagtcgacgcagtcgggaccgtgcgggtgatacccatggtagcatcagtagggagctttctcggattcttaaccgccaccttcttagttatctatccgaatgtaagcgaagaggccaaggaggagcaaaagggtctgagtagtcctctcgccggtgaagggagagcaggaggcaattctgaaaaacccaccgtgctaaagctgacacgcaaggagggactgcaaggcccagtcgagaccgaaagcgtgacccctgctggcatcgatgtatgccagattagctctcactggttggtgccacagctgttagagagtattttcctctacgactattttcgaaaaaaaatatttttttccacaatgtggttttcatag

SEQ ID NO: 105342 - DNA, 2427 bp, Artificial Sequence
  derived and/or modified sequence
atgaaaatggcgccacaaaatgctgacccagagtccatgcaggtgcaggagctgagcgtcccactgcccgatccgcagaaagccggaggtgcggaggccgagaattgtgaaaccataagcgagggctccattgatagaatccctatgcggctgtgggtcatgcatggtgccgtcatgttcggtcgagagttctgctatgccatggagactgcgcttgtaacccccatcttactccaaattggactgcctgagcagtactacagcttgacatggttcctgagtccaatcctgggactcatttttacccctctgatcggcagtgcttctgaccgctgtactctgtcatgggggagacgcagaccattcattctggcactgtgcgttggagttctgtttggagtggccctgttcctgaacggatctgctatcggccttgcacttggcgatgtgccaaaccggcagccgatcggtattgtgctgactgtgttgggagtagtggtcctggatttcagcgctgacgccactgagggccctattcgggcttacctcttggacgtggtggactcggaggaacaggatatggcccttaatattcacgcattctccgcgggactcgggggtgccatcgggtacgtcctcggcggtttagattggactcagaccttcctggggagctggttccgtacgcaaaatcaggttttgttctttttcgccgcaatcatttttacagtgagtgttgccctccacctgttttccattgacgaggaacaatactctcctcagcaggaaaggtcagctgaggaacctggtgccctggatggaggcgagcctcatggcgtgcctgccttccccgatgaagtccagagcgaacacgaactagctttagactaccccgacgtcgacattatgaggtctaaaagcgattcagctctgcatgtgccagatacagctctagatctggaacctgaactgctgtttctgcacgacattgaaccgagcatcttccatgacgcttcctaccccgcaaccccccgttccacatcacaggagttggccaaaacaaaattgccccgtctggctacttttttgaaagaagcagctaaagaggacgaaaccctgctcgacaaccaccttaacgaggccaaggtccctaacggaagcggatccccgacaaaggacgcgcttggtggctataccagggtcgataccaaacccagcgcaacaagctcaagcatgcggaggcggaggcacgctttccgtcgtcaagcttcctctactttctcttattatggaaagttaggtagccattgctatcgctacaggagagccaatgcagtcgtccttattaagccaagtaggtccatgagcgacttgtacgatatgcagaagcggcagcgacagcaccgacaccgcaatcagagtggggcaactacttccagcggcgataccgaatcagaggagggagagggggaaaccacggtaaggttactctggttatcaatgttaaaaatgccacgtgagctgatgaggctgtgcctgtgccacctgttgacctggttctccgtaattgccgaggctgtcttctataccgactttatgggccaagttatattcgaaggcgaccccaaggcgccatcaaacagtactgcgtggcaagcgtacaatgcaggcgttaaaatggggtgttggggattggtcatttatgccgctaccggtgccatttgttcggcgctactccaaaagtatctcgataactatgacttatctgtgcgagttatctatgtgctgggcaccctcggctttagcgttggaaccgcagttatggctatgttccctaacgtttacgtcgcaatggttaccataagtactatggggatcgtatcaatgagtataagctattgcccctacgccctgctgggccagtaccacgatatcaaacagtacatccatcatagcccaggaaactcaaagagggggttcggaattgactgtgcaatcttatcatgtcaggtatacatcagccagatcctcgtcgcaagtgcacttggcggagtcgtggatgcggttggcaccgtgagagtgatcccgatggtagccagtgtggggtcattcttgggcttccttaccgccacattcctagtgatttatccaaacgtgtctgaggaagccaaagaggagcagaaaggattatcaagccctcttgcaggtgaaggacgcgcaggcggaaattcagagaagcctacggtgctcaagctgacccgcaaggagggtctgcagggacctgtcgagacggagagcgtcacgcccgctggcatagacgtatgccagatctcgagtcattggcttgttccccagctcctagaaagtatctttctgtatgattacttcaggaagaagattttcttctccacaatgtggtttagttag

SEQ ID NO: 105343 - DNA, 3367 bp, Artificial Sequence
  derived and/or modified sequence
actgcgagaccatcagcgaggggtccatagaccgaatccccatgcgcctgtgggtgatgcacggggcggtgatgtttggcagggagttctgttacgccatggaaaccgctctggtcacaccaatactgttgcagattggccttccggagcagtactacagcctcacctggttcctgagccccatccttggcctcatcttcacacctctcattgggtctgcgagtgaccggtgcaccctgagctggggccgccggcggcccttcatcctcgccctctgcgttggcgtcctctttggcgttgcacttttccttaacggctctgccatcggtctggccctcggcgatgtccccaaccggcagcccattggcatcgtgctcacggtgctgggagtggtggtcctggacttcagcgccgatgccaccgaggggcccatccgtgcctatctgctggacgtggtggacagcgaggagcaggacatggccctcaacatccacgccttctctgccggcctcggcggagccatcggctacgtgctgggtgggctggactggacccagaccttcctgggcagctggttccggacccagaaccaggtgctcttcttctttgccgccatcatcttcacggtgtccgtggccctgcacctgttcagcatcgacgaggagcagtacagcccgcagcaggagcgcagcgctgaggagcccggcgccctggatgggggcgagccgcacggcgtccctgccttcccagacgaggtacagtcggagcacgagctggccctggactacccggacgtggacatcatgcgcagcaaaagcgactcggcattgcacgtgccggacaccgcgctggacctggagcccgagctgctgttcctgcacgacatcgagccctccatcttccacgacgcctcctaccccgccaccccccgcagcaccagccaggagctcgccaagaccaagctgccccgcctggccaccttcctcaaggaagccgccaaggaggacgagaccttgctggataatcacttgaatgaagctaaagtcccaaacggaagtggctcccccacaaaagacgccctcggcggctacaccagggtggacacgaagccctcggccacgtcgagctccatgcggcggcggcggcacgcgttccgcaggcaggcctccagcaccttctcctactacggcaagcttgggtcccactgctaccgctaccggcgcgccaacgccgtggtgctgatcaagccgtcgcgcagcatgagcgacctgtacgacatgcagaagcggcagcggcagcaccggcaccggaaccagagcggggccaccacctccagcggggacaccgagagtgaggagggggagggcgagaccacggtgcgcctgctgtggctctccatgctgaagatgcccagggagctgatgcggctgtgcctctgccacctcctcacctggttctctgtcatcgccgaggccgtgttctacaccgacttcatgggccaggtcatcttcgaaggcgaccccaaggccccctcgaactcgaccgcctggcaagcctacaacgccggggtcaagatgggctgctggggcctggtcatttatgccgccactggtgctatttgttcagccctgttacagaagtacttggacaactacgacctgagcgtcagggtgatctacgtgctggggacgctgggcttctctgtcggcacagccgtgatggccatgtttcccaacgtctacgtcgccatggtcaccatcagcaccatgggcatcgtctccatgagcatctcctactgcccgtacgccctgctgggccagtaccatgacatcaagcagtacatccaccacagccccgggaactccaagcgagggtttggcatagattgtgccatcctgtcctgccaagtgtacatctcgcagatcctggtggcctctgcccttgggggcgtggtcgacgccgtggggactgtccgcgtcatccccatggtggcctctgtgggctctttcctgggcttcctgacggccacattcctggtgatctatcccaacgtgtcagaggaggccaaggaggagcagaaaggcctgtcttccccgttggccggcgaaggcagggccggtgggaacagcgaaaagcccaccgtgctgaagctcacgcggaaggagggcctgcagggaccggtggagacagagtccgtgacgcctgcaggtattgacgtctgtcagatctcgtcacattggctggtgccgcagctgttggagagtatttttctttatgattattttagaaaaaaaattttcttttccacaatgtggttctcttagaagaatgacgtatcttcttttcctcagcgagttggacacattgtgcccagggcagccctgtccttgggcagcgaccgcacaccaaagctgggaggaggctggtccggggggcctgggcagaagacagtgatttgcaggggtggctcccagacaccctgcccagggatgggctgggcaccacctgggggcggagcgtgagctccagacgagctcctgcgtgcgcgtgtgagtgtgtctgcgcccagccatgtgaccccgctcgtcccgtctgaaggactctcctaggaggccaggttgcccctccagaccgctcccaacgtcagggggaaggaaacgttgactttcactgcactttgattcgtctctaaaccatttgctggggattcctgagagcagagctcccagcgggccctgcctcccaagtcccgccgcaaggctacctcgggtgtgtggatgtgcgagggcctcccccgcttgcgaaggggacatgcgtgctggaacctgtcggaactccatgccttcctcgcctgctcacctgctcgacgctggaatcgggacaggtgcaaagggacgcagacgtctgggacagctaaggcccgtgtcaccggagggctccgcacagtcgttctggtttcaacgaataagcaaaactcgggcaagtactgcagctatttggaaatgttttccaaaccacagtctctttagaactaagcctatttgaaacggtcggtgtaggcttactgagatcaggagacagggaggccccgcacatcacacagataaagtcagacaattgtaattaatacttttgctgcctcaagttgttttttaaataaagtactttgaaatgcatgagaatcatgctgcaatatgatcattctagagcaaatatatatatacacgtatatatatttcaagatgaaactaaagcagtttttaaataaattacttgaattttctgtgtatttaaaggaacgactgtttaatgtacttgatgggcctctggtcttgccgtgtctcctgccgctggtggcactttgtag

SEQ ID NO: 105344 - DNA, 3470 bp, Artificial Sequence
  derived and/or modified sequence
atgaaaatggctccgcagaatgccgacccggaatctatgcaagttcaagagttatccgtgcccctgccggacccgcagaaagccggaggcgcagaggccgagaactgcgagaccatcagcgaggggtccatagaccgaatccccatgcgcctgtgggtgatgcacggggcggtgatgtttggcagggagttctgttacgccatggaaaccgctctggtcacaccaatactgttgcagattggccttccggagcagtactacagcctcacctggttcctgagccccatccttggcctcatcttcacacctctcattgggtctgcgagtgaccggtgcaccctgagctggggccgccggcggcccttcatcctcgccctctgcgttggcgtcctctttggcgttgcacttttccttaacggctctgccatcggtctggccctcggcgatgtccccaaccggcagcccattggcatcgtgctcacggtgctgggagtggtggtcctggacttcagcgccgatgccaccgaggggcccatccgtgcctatctgctggacgtggtggacagcgaggagcaggacatggccctcaacatccacgccttctctgccggcctcggcggagccatcggctacgtgctgggtgggctggactggacccagaccttcctgggcagctggttccggacccagaaccaggtgctcttcttctttgccgccatcatcttcacggtgtccgtggccctgcacctgttcagcatcgacgaggagcagtacagcccgcagcaggagcgcagcgctgaggagcccggcgccctggatgggggcgagccgcacggcgtccctgccttcccagacgaggtacagtcggagcacgagctggccctggactacccggacgtggacatcatgcgcagcaaaagcgactcggcattgcacgtgccggacaccgcgctggacctggagcccgagctgctgttcctgcacgacatcgagccctccatcttccacgacgcctcctaccccgccaccccccgcagcaccagccaggagctcgccaagaccaagctgccccgcctggccaccttcctcaaggaagccgccaaggaggacgagaccttgctggataatcacttgaatgaagctaaagtcccaaacggaagtggctcccccacaaaagacgccctcggcggctacaccagggtggacacgaagccctcggccacgtcgagctccatgcggcggcggcggcacgcgttccgcaggcaggcctccagcaccttctcctactacggcaagcttgggtcccactgctaccgctaccggcgcgccaacgccgtggtgctgatcaagccgtcgcgcagcatgagcgacctgtacgacatgcagaagcggcagcggcagcaccggcaccggaaccagagcggggccaccacctccagcggggacaccgagagtgaggagggggagggcgagaccacggtgcgcctgctgtggctctccatgctgaagatgcccagggagctgatgcggctgtgcctctgccacctcctcacctggttctctgtcatcgccgaggccgtgttctacaccgacttcatgggccaggtcatcttcgaaggcgaccccaaggccccctcgaactcgaccgcctggcaagcctacaacgccggggtcaagatgggctgctggggcctggtcatttatgccgccactggtgctatttgttcagccctgttacagaagtacttggacaactacgacctgagcgtcagggtgatctacgtgctggggacgctgggcttctctgtcggcacagccgtgatggccatgtttcccaacgtctacgtcgccatggtcaccatcagcaccatgggcatcgtctccatgagcatctcctactgcccgtacgccctgctgggccagtaccatgacatcaagcagtacatccaccacagccccgggaactccaagcgagggtttggcatagattgtgccatcctgtcctgccaagtgtacatctcgcagatcctggtggcctctgcccttgggggcgtggtcgacgccgtggggactgtccgcgtcatccccatggtggcctctgtgggctctttcctgggcttcctgacggccacattcctggtgatctatcccaacgtgtcagaggaggccaaggaggagcagaaaggcctgtcttccccgttggccggcgaaggcagggccggtgggaacagcgaaaagcccaccgtgctgaagctcacgcggaaggagggcctgcagggaccggtggagacagagtccgtgacgcctgcaggtattgacgtctgtcagatctcgtcacattggctggtgccgcagctgttggagagtatttttctttatgattattttagaaaaaaaattttcttttccacaatgtggttctcttagaagaatgacgtatcttcttttcctcagcgagttggacacattgtgcccagggcagccctgtccttgggcagcgaccgcacaccaaagctgggaggaggctggtccggggggcctgggcagaagacagtgatttgcaggggtggctcccagacaccctgcccagggatgggctgggcaccacctgggggcggagcgtgagctccagacgagctcctgcgtgcgcgtgtgagtgtgtctgcgcccagccatgtgaccccgctcgtcccgtctgaaggactctcctaggaggccaggttgcccctccagaccgctcccaacgtcagggggaaggaaacgttgactttcactgcactttgattcgtctctaaaccatttgctggggattcctgagagcagagctcccagcgggccctgcctcccaagtcccgccgcaaggctacctcgggtgtgtggatgtgcgagggcctcccccgcttgcgaaggggacatgcgtgctggaacctgtcggaactccatgccttcctcgcctgctcacctgctcgacgctggaatcgggacaggtgcaaagggacgcagacgtctgggacagctaaggcccgtgtcaccggagggctccgcacagtcgttctggtttcaacgaataagcaaaactcgggcaagtactgcagctatttggaaatgttttccaaaccacagtctctttagaactaagcctatttgaaacggtcggtgtaggcttactgagatcaggagacagggaggccccgcacatcacacagataaagtcagacaattgtaattaatacttttgctgcctcaagttgttttttaaataaagtactttgaaatgcatgagaatcatgctgcaatatgatcattctagagcaaatatatatatacacgtatatatatttcaagatgaaactaaagcagtttttaaataaattacttgaattttctgtgtatttaaaggaacgactgtttaatgtacttgatgggcctctggtcttgccgtgtctcctgccgctggtggcactttgtag

SEQ ID NO: 105345 - protein, 717 aa, Artificial Sequence
  derived and/or modified sequence
MGKASPASGLSRPKTLVSPLRSNQWSLQKGLPEQYYSLTWFLSPILGLIFTPLIGSASDRCTLSWGRRRPFILALCVGVLFGVALFLNGSAIGLALGDVPNRQPIGIVLTVLGVVVLDFSADATEGPIRAYLLDVVDSEEQDMALNIHAFSAGLGGAIGYVLGGLDWTQTFLGSWFRTQNQVLFFFAAIIFTVSVALHLFSIDEEQYSPQQERSAEEPGALDGGEPHGVPAFPDEVQSEHELALDYPDVDIMRSKSDSALHVPDTALDLEPELLFLHDIEPSIFHDASYPATPRSTSQELAKTKLPRLATFLKEAAKEDETLLDNHLNEAKVPNGSGSPTKDALGGYTRVDTKPSATSSSMRRRRHAFRRQASSTFSYYGKLGSHCYRYRRANAVVLIKPSRSMSDLYDMQKRQRQHRHRNQSGATTSSGDTESEEGEGETTVRLLWLSMLKMPRELMRLCLCHLLTWFSVIAEAVFYTDFMGQVIFEGDPKAPSNSTAWQAYNAGVKMGCWGLVIYAATGAICSALLQKYLDNYDLSVRVIYVLGTLGFSVGTAVMAMFPNVYVAMVTISTMGIVSMSISYCPYALLGQYHDIKQYIHHSPGNSKRGFGIDCAILSCQVYISQILVASALGGVVDAVGTVRVIPMVASVGSFLGFLTATFLVIYPNVSEEAKEEQKGLSSPLAGEGRAGGNSEKPTVLKLTRKEGLQGPVETESVV

SEQ ID NO: 105346 - DNA, 2154 bp, Artificial Sequence
  derived and/or modified sequence
atgggcaaggccagccccgccagcggcctgagcagacccaagaccctggtgagccccctgagaagcaaccagtggagcctgcagaagggcctgcccgagcagtactacagcctgacctggttcctgagccccatcctgggcctgatcttcacccccctgatcggcagcgccagcgacagatgcaccctgagctggggcagaagaagacccttcatcctggccctgtgcgtgggcgtgctgttcggcgtggccctgttcctgaacggcagcgccatcggcctggccctgggcgacgtgcccaacagacagcccatcggcatcgtgctgaccgtgctgggcgtggtggtgctggacttcagcgccgacgccaccgagggccccatcagagcctacctgctggacgtggtggacagcgaggagcaggacatggccctgaacatccacgccttcagcgccggcctgggcggcgccatcggctacgtgctgggcggcctggactggacccagaccttcctgggcagctggttcagaacccagaaccaggtgctgttcttcttcgccgccatcatcttcaccgtgagcgtggccctgcacctgttcagcatcgacgaggagcagtacagcccccagcaggagagaagcgccgaggagcccggcgccctggacggcggcgagccccacggcgtgcccgccttccccgacgaggtgcagagcgagcacgagctggccctggactaccccgacgtggacatcatgagaagcaagagcgacagcgccctgcacgtgcccgacaccgccctggacctggagcccgagctgctgttcctgcacgacatcgagcccagcatcttccacgacgccagctaccccgccacccccagaagcaccagccaggagctggccaagaccaagctgcccagactggccaccttcctgaaggaggccgccaaggaggacgagaccctgctggacaaccacctgaacgaggccaaggtgcccaacggcagcggcagccccaccaaggacgccctgggcggctacaccagagtggacaccaagcccagcgccaccagcagcagcatgagaagaagaagacacgccttcagaagacaggccagcagcaccttcagctactacggcaagctgggcagccactgctacagatacagaagagccaacgccgtggtgctgatcaagcccagcagaagcatgagcgacctgtacgacatgcagaagagacagagacagcacagacacagaaaccagagcggcgccaccaccagcagcggcgacaccgagagcgaggagggcgagggcgagaccaccgtgagactgctgtggctgagcatgctgaagatgcccagagagctgatgagactgtgcctgtgccacctgctgacctggttcagcgtgatcgccgaggccgtgttctacaccgacttcatgggccaggtgatcttcgagggcgaccccaaggcccccagcaacagcaccgcctggcaggcctacaacgccggcgtgaagatgggctgctggggcctggtgatctacgccgccaccggcgccatctgcagcgccctgctgcagaagtacctggacaactacgacctgagcgtgagagtgatctacgtgctgggcaccctgggcttcagcgtgggcaccgccgtgatggccatgttccccaacgtgtacgtggccatggtgaccatcagcaccatgggcatcgtgagcatgagcatcagctactgcccctacgccctgctgggccagtaccacgacatcaagcagtacatccaccacagccccggcaacagcaagagaggcttcggcatcgactgcgccatcctgagctgccaggtgtacatcagccagatcctggtggccagcgccctgggcggcgtggtggacgccgtgggcaccgtgagagtgatccccatggtggccagcgtgggcagcttcctgggcttcctgaccgccaccttcctggtgatctaccccaacgtgagcgaggaggccaaggaggagcagaagggcctgagcagccccctggccggcgagggcagagccggcggcaacagcgagaagcccaccgtgctgaagctgaccagaaaggagggcctgcagggccccgtggagaccgagagcgtggtgtag

SEQ ID NO: 105347 - DNA, 2154 bp, Artificial Sequence
  derived and/or modified sequence
atgggcaaggcgagtcctgcttccggcctgtcccgaccaaagacattggttagccctcttcggagcaaccagtggagtctgcagaagggtctgcctgagcagtactattccctgacatggttcctgagccccatccttggccttatcttcacccccctcatcggatccgcttccgaccggtgtaccctgtcatgggggcgtcggcgccctttcattttagcactgtgcgttggggtcctcttcggggtggccttattcttaaatgggtcagcgatcgggctagcactcggagatgtccccaatcgtcaaccaattggcatcgtgctgaccgtcttgggcgttgtcgtgctagacttcagcgccgacgccacagaggggcccataagagcctatttgctcgatgtggtggattcagaggagcaggacatggcactgaatattcacgctttttcagcgggtttgggaggagctatcggttatgtgctgggcggcctggactggacccagactttcctgggttcttggttccggacgcagaatcaggtgttgttcttctttgctgcgattatctttacagtatctgtagccctccacctgttctctatcgacgaggagcaatattccccacagcaagagcgatccgccgaagagcccggggccctcgatggtggcgaaccccacggtgtaccagcgttccccgacgaggtgcagtctgagcacgagctggcccttgattaccctgacgtggatatcatgcggtcgaagagcgatagtgccctgcacgtgccagataccgcactcgacctcgagccagagcttctcttcctccacgatattgaaccgagcattttccatgatgcttcataccccgctacccctagaagcacaagtcaagagttagccaaaacaaaactgcccagattggcaacatttcttaaagaagcagcaaaagaggacgagaccctgttggataatcacctcaacgaggccaaagtgccaaacggctctggatcaccgacaaaagatgccctgggcgggtacaccagagtcgacacaaaaccatctgccactagttccagcatgagacgtcgccggcacgccttcagacgccaggcatctagcaccttcagctattacggcaaactggggtctcactgctaccgatatagacgggccaacgcggtcgtacttatcaagcctagccggtctatgtcagatctctacgacatgcagaagcgacagcggcagcacagacacaggaatcagagtggcgcaacaacaagtagcggagacactgaatctgaggagggtgaaggagagacaactgtcagactgctgtggttatctatgctgaagatgccgcgagagctgatgcggctctgtctttgtcacctcctgacctggttctcagtaatcgcagaggccgtgttttacacagacttcatgggccaggtcatctttgagggcgacccaaaggcaccgagcaattcaactgcctggcaggcatacaacgcaggtgtaaagatggggtgctggggactcgttatctacgccgcaaccggcgctatttgtagcgctcttctgcagaagtacctggacaactatgacctcagcgttcgagtgatctacgtactgggcaccctgggtttctcagtgggcacagcagtgatggccatgtttccaaacgtgtacgtggctatggttaccatcagcacgatgggcatcgtgagtatgtctataagctattgtccctacgccctcctcggtcagtaccacgacattaagcagtacattcatcactcgcccggtaattccaagagggggttcgggatcgactgcgccattttatcttgtcaggtgtacataagccagatactggtggcaagcgcacttggcggggtggtggacgcagtgggaacagttagggtgatacccatggtggcctcagtaggatccttcctgggctttctgacagcaacattcctggtgatctatccgaatgtgagcgaggaggccaaagaggagcaaaaggggctctcctctccgctcgccggcgaaggaagggccgggggtaacagcgagaagcccactgtacttaaactgacaaggaaagaggggcttcagggcccggtcgagactgagtctgtggtatag

SEQ ID NO: 105348 - DNA, 2154 bp, Artificial Sequence
  derived and/or modified sequence
atgggcaaggccagccctgccagcggcctgagccggcccaagaccctggtgagccccctgcggagcaaccagtggagcctgcagaagggcctgcctgagcagtactacagcctgacctggttcctgagccccatcctgggcctcatcttcacccccctcatcggcagcgccagtgaccgctgcaccctgtcctggggcagaagaagacccttcatcctggccctgtgtgtgggcgtgctgtttggagtggccctcttcctgaatggcagcgccatcggcctggccctgggagatgtgcccaaccggcagcccatcggcatcgtgctgactgtgctgggcgtggtggtgctggacttcagcgcagatgccacagagggccccatccgggcctacctgctggatgtggtggacagcgaggagcaggacatggccctgaacatccacgccttctctgctggcctgggcggggccatcggctacgtgctgggcggcctggactggacccagaccttcctgggctcctggttccgcacccagaaccaggtgctcttcttctttgctgccatcatcttcaccgtgtctgtggccctgcacctgttcagcattgatgaggagcagtacagcccccagcaggagaggtctgctgaggagcccggggccctggatggaggagagccccatggagtgcctgccttcccagatgaggtgcagagcgagcacgagctggccctggactacccagatgtggacatcatgaggagcaagagtgacagcgccctgcacgtgcctgacacagccctggacctggagcctgagctgctcttcctgcatgacatcgagcccagcatcttccatgatgccagctacccagccacccccaggagcaccagccaggagctggccaagaccaagctgccccggctggccaccttcctgaaggaggccgccaaggaggatgagaccctgctggacaaccacctgaatgaggccaaggtgcccaacggcagcggcagccccaccaaggatgccctgggcggctacaccagggtggacaccaagcccagcgccaccagcagctccatgagaagaagaagacatgccttccggcggcaggccagcagcaccttctcctactacggcaagctgggcagccactgctaccgctaccgccgggccaatgctgtggtgctgatcaagcccagccgctccatgtctgacctgtatgacatgcagaagaggcagaggcagcaccgccacaggaaccagagcggggccaccaccagcagcggggacacagagagcgaggagggggagggggagaccaccgtgcggctgctgtggctgtccatgctgaagatgccccgggagctgatgaggctgtgcctgtgccacctgctgacctggttctctgtgattgctgaggccgtgttctacacagacttcatgggccaggtgatctttgaaggagaccccaaggcccccagcaacagcacagcctggcaggcctacaatgccggcgtgaagatgggctgctggggcctggtgatctatgctgccaccggggccatctgcagcgccctgctgcagaagtacctggacaactatgacctgtctgtgcgggtcatctacgtgctgggcaccctgggcttctctgtgggcacagctgtgatggccatgttccccaacgtgtatgtggccatggtgaccatcagcaccatgggcatcgtgtccatgagcatctcctactgcccctatgccctgctgggccagtaccatgacatcaagcagtacatccaccacagccctggcaacagcaagaggggctttggaattgactgtgccatcctgagctgccaggtgtacatcagccagatcctggtggccagcgccctgggcggcgtggtggatgctgtgggcaccgtgcgggtcatccccatggtggcctctgtgggcagcttcctgggcttcctgacagccaccttcctggtgatctacccaaatgtgtctgaggaggccaaggaggagcagaagggcctgagcagccccctggccggggagggccgggccggcggcaacagcgagaagcccaccgtgctgaagctgaccaggaaggagggcctgcagggccctgtggagacagaatctgtggtgtag

SEQ ID NO: 105349 - DNA, 2154 bp, Artificial Sequence
  derived and/or modified sequence
atgggcaaggccagccccgccagcggcctgagccggcccaagacccttgtatcccctctacggtcgaatcagtggtcactccagaaaggtctcccggaacagtactattccctgacatggttcctatctcctattttgggcttgattttcaccccactgataggatctgcaagcgacagatgcactctgtcatggggtagaagacgcccttttatactggccctctgcgtaggagtcctgtttggggttgcgctgttcctgaatggctctgctatcgggttggccctgggcgacgtgcccaacaggcagcctatcgggattgtgctgacagtgcttggggtggtagtcctcgattttagtgcagacgccactgagggcccaattcgagcctacttgctggatgttgtggatagcgaggagcaggatatggccttgaatatccacgccttctccgctggcctgggaggggctattggctacgtcctggggggcctagactggactcagacatttctggggagttggtttcggacgcagaaccaggtcctgttcttctttgctgccatcatcttcacagtgtctgtggcgctgcaccttttctccattgatgaagagcagtattctccccagcaggagagaagtgctgaggagcccggtgcactcgatggaggtgagccgcacggtgttccggccttcccagatgaggtccaatcagaacacgaactggcactggactatccagatgttgatattatgcgcagtaaatccgattccgctctccacgtgcccgatacagctttggacctggagcctgagcttttattcctgcacgacatcgagccttcgatttttcacgacgcctcttaccccgctactccccggtccacctcccaggagctggctaaaacaaaattacctcggttggctaccttcttaaaagaagcagctaaagaagatgaaactctgttggataatcatctgaacgaggccaaggttccaaacggatccggaagccccactaaggatgcactgggcggttataccagagtagacaccaaacccagcgctaccagtagttcgatgcgaagacgaaggcacgcctttaggcggcaggcctcgagtactttttcgtattatggcaagcttggctctcactgctatagatacaggagagccaatgccgtcgtactgatcaagccctcccgctcaatgtccgacctgtatgatatgcagaaacgtcagagacagcaccgccatagaaatcagtcaggtgcaactacgtcctctggtgacacagaatctgaagaaggcgagggagagacaacggttcggcttctatggctgagcatgctaaagatgcctagagagctcatgagactgtgtctgtgtcatcttcttacatggttttccgtaatcgccgaagcggtgttttatacagatttcatggggcaggttatattcgagggcgatcctaaagccccttctaacagcacagcctggcaagcctacaacgctggggtgaaaatgggctgctgggggctggtgatttatgccgccacgggagcaatctgctctgccctgctgcagaaatatctggataattatgacttgtcagtcagagttatttacgtgctaggtacattgggtttctcagtgggcaccgcggtgatggccatgttcccaaatgtgtacgtcgcaatggtgactataagcactatggggatcgtgtcaatgtccattagctactgcccctatgccctgcttgggcagtaccacgatattaagcaatatatccatcatagtccaggaaattcaaagcggggttttggtatagattgcgccatccttagctgtcaagtgtacatctctcaaatcctagtagcttctgccctcggcggggtggtggatgccgtgggcacggtgcgtgttattccaatggtggcgtccgtcggtagtttcttaggcttccttacggctacttttctggtcatttacccaaatgtgagtgaggaagccaaagaagagcaaaagggcttgtccagccctttagccggcgaaggacgcgccggcggcaacagcgaaaagcctaccgtcctcaaactgacccggaaggaaggcttacaaggaccggtcgaaacagagtcagtggtgtag

SEQ ID NO: 105350 - DNA, 2154 bp, Artificial Sequence
  derived and/or modified sequence
atgggtaaggcatcaccagcgtccggactgtcaaggcccaaaaccctggtgtcccctctgagatcaaaccagtggagcctacagaagggcctaccagaacagtattacagtctgacatggttcttatcgccgatcctcgggctaatctttactccattgattggctccgcctctgacagatgcactttgtcttggggacgccgaagacccttcatcttggccttatgcgtaggcgttcttttcggcgtggccctgtttctgaatggcagtgccataggactggcactaggggacgttcccaataggcagcctattggaattgtgctgaccgtattgggagtagtcgttcttgatttctccgcagacgccacagagggaccaattcgggcatatcttttagatgtggtcgattcagaagagcaggatatggctctaaatatccacgccttctccgcaggcttgggcggtgcaatcggttacgtgctgggcggtctggactggactcagacatttttaggatcctggttcagaacacagaatcaagtgctgttcttttttgccgcaattatttttaccgtctccgtggccctgcatctgttcagcattgatgaggagcagtactccccgcaacaggaaagatccgcggaggagccgggtgcactggatgggggagaacctcatggagttcccgcatttcccgacgaagtccagtcagagcacgaactggcactggactaccccgatgtggatatcatgcgatctaagtccgactcagctttacacgtaccggatactgctctggacctggagcccgagctcttatttctgcatgatatcgaaccgagtatctttcatgacgccagttacccagcgaccccacgtagcaccagtcaggagctggccaagactaaactccccagattggctaccttcttaaaagaggccgctaaggaggatgagaccctgctagacaatcatctcaacgaggccaaggttcccaacggcagcgggagcccaacgaaggacgccctcggaggatatacacgcgtggatacaaagccctctgccaccagttccagtatgcgacgtaggaggcacgcgtttaggagacaagcttcatcaacgttcagctactatggcaaattagggtcgcactgctatcgatatcggagagctaatgctgtggtacttataaagccttcacgttccatgtcagatctgtacgatatgcagaaaagacagcggcagcataggcaccgtaaccagtccggggctactacgtcttccggggatacggaaagcgaagagggcgagggcgaaaccacagtgaggctgctttggctatcaatgctgaagatgccacgggagctgatgagactatgcctatgtcacctccttacctggttttccgttatagccgaagctgttttttatacggacttcatgggacaggtaatcttcgagggggacccaaaggcaccctccaacagcacagcctggcaggcctacaatgctggcgtaaaaatgggatgttgggggctcgtgatctatgcggctacaggggcaatctgcagcgcacttcttcagaagtacctggataactacgatttgagcgtccgcgtgatttacgtcctcggcacccttgggttttcagtcgggactgcggtgatggcgatgtttccaaatgtgtacgtggccatggtaactatttccactatgggcattgttagcatgagcattagttactgtccttatgctttactgggtcaataccacgatatcaaacagtacattcatcatagtccaggcaactccaaaagaggattcggtatcgactgtgccattttgtcctgtcaggtgtacatctcgcagattctggtggcatcagccttgggaggcgtagtggatgctgttgggacagtcagggtcatccccatggtggctagcgtcgggtcttttctaggatttttgaccgcgaccttccttgtcatctatccgaatgtgagtgaagaagctaaggaggagcagaaaggactctcctctcccctagcaggagaagggagagctggcggtaacagtgaaaagccaacagtgttaaagctgacaaggaaagagggcttgcaaggacctgtggagactgagtccgtagtttag

SEQ ID NO: 105351 - DNA, 7483 bp, Artificial Sequence
  derived and/or modified sequence
agggcagagaggagcccatgctccagctgcggggagtgcctgcccgaggagctggccagtgaagacaggtgcctgccagtgaagacaggtgcccacaagctggacacagggtcggccctgagacaggacagcagctgcggaatgttcccgctggctttctggagcgccagcgtcctgcttgggtctggccaggggcctctagccaggctgttgaggcgcccctccttgttgaagaggagaaacagtggccccctgggagttgctgggaggtgcctggcacagggcggcagggacagcatcatctatggggaaagcaagcccagcctcagggctgtcccgtccaaagacccttgtgagtccactgaggtcaaatcaatggagtcttcagaaaggccttccggagcagtactacagcctcacctggttcctgagccccatccttggcctcatcttcacacctctcattgggtctgcgagtgaccggtgcaccctgagctggggccgccggcggcccttcatcctcgccctctgcgttggcgtcctctttggcgttgcacttttccttaacggctctgccatcggtctggccctcggcgatgtccccaaccggcagcccattggcatcgtgctcacggtgctgggagtggtggtcctggacttcagcgccgatgccaccgaggggcccatccgtgcctatctgctggacgtggtggacagcgaggagcaggacatggccctcaacatccacgccttctctgccggcctcggcggagccatcggctacgtgctgggtgggctggactggacccagaccttcctgggcagctggttccggacccagaaccaggtgctcttcttctttgccgccatcatcttcacggtgtccgtggccctgcacctgttcagcatcgacgaggagcagtacagcccgcagcaggagcgcagcgctgaggagcccggcgccctggatgggggcgagccgcacggcgtccctgccttcccagacgaggtacagtcggagcacgagctggccctggactacccggacgtggacatcatgcgcagcaaaagcgactcggcattgcacgtgccggacaccgcgctggacctggagcccgagctgctgttcctgcacgacatcgagccctccatcttccacgacgcctcctaccccgccaccccccgcagcaccagccaggagctcgccaagaccaagctgccccgcctggccaccttcctcaaggaagccgccaaggaggacgagaccttgctggataatcacttgaatgaagctaaagtcccaaacggaagtggctcccccacaaaagacgccctcggcggctacaccagggtggacacgaagccctcggccacgtcgagctccatgcggcggcggcggcacgcgttccgcaggcaggcctccagcaccttctcctactacggcaagcttgggtcccactgctaccgctaccggcgcgccaacgccgtggtgctgatcaagccgtcgcgcagcatgagcgacctgtacgacatgcagaagcggcagcggcagcaccggcaccggaaccagagcggggccaccacctccagcggggacaccgagagtgaggagggggagggcgagaccacggtgcgcctgctgtggctctccatgctgaagatgcccagggagctgatgcggctgtgcctctgccacctcctcacctggttctctgtcatcgccgaggccgtgttctacaccgacttcatgggccaggtcatcttcgaaggcgaccccaaggccccctcgaactcgaccgcctggcaagcctacaacgccggggtcaagatgggctgctggggcctggtcatttatgccgccactggtgctatttgttcagccctgttacagaagtacttggacaactacgacctgagcgtcagggtgatctacgtgctggggacgctgggcttctctgtcggcacagccgtgatggccatgtttcccaacgtctacgtcgccatggtcaccatcagcaccatgggcatcgtctccatgagcatctcctactgcccgtacgccctgctgggccagtaccatgacatcaagcagtacatccaccacagccccgggaactccaagcgagggtttggcatagattgtgccatcctgtcctgccaagtgtacatctcgcagatcctggtggcctctgcccttgggggcgtggtcgacgccgtggggactgtccgcgtcatccccatggtggcctctgtgggctctttcctgggcttcctgacggccacattcctggtgatctatcccaacgtgtcagaggaggccaaggaggagcagaaaggcctgtcttccccgttggccggcgaaggcagggccggtgggaacagcgaaaagcccaccgtgctgaagctcacgcggaaggagggcctgcagggaccggtggagacagagtccgtggtctgagccgcactcccgtttacacacattccagtgggcgggtgggcgggcgggcgggcggcggggccaggccatgggcgggagcagagacaccgcggaaccctgcagatgctgtggccgacccggcagtgcgggccagagcccctccgcccccatagccacaattcagtagtcgtagggtaggtttgagctactaagcaaataccacactaaccactttttcgataattaaaagaatcatttgaaatattttttttaattgaaaaagatattttaatttcagctcttttattctgcaggtgtattattctgcatgtttttaaatgatataaaacatttatatagacaataagcaacttagaaaaaataagattttgcatttctaaaattataattgaaaacaaaatctgacattctctgctaagtcttatctgaatgcttcagataatggtagtgtagtcagtgactaaaatatttttatcaaatttcctctctgtagacgcctgcaggtattgacgtctgtcagatctcgtcacattggctggtgccgcagctgttggagagtatttttctttatgattattttagaaaaaaaattttcttttccacaatgtggttctcttagaagaatgacgtatcttcttttcctcagcgagttggacacattgtgcccagggcagccctgtccttgggcagcgaccgcacaccaaagctgggaggaggctggtccggggggcctgggcagaagacagtgatttgcaggggtggctcccagacaccctgcccagggatgggctgggcaccacctgggggcggagcgtgagctccagacgagctcctgcgtgcgcgtgtgagtgtgtctgcgcccagccatgtgaccccgctcgtcccgtctgaaggactctcctaggaggccaggttgcccctccagaccgctcccaacgtcagggggaaggaaacgttgactttcactgcactttgattcgtctctaaaccatttgctggggattcctgagagcagagctcccagcgggccctgcctcccaagtcccgccgcaaggctacctcgggtgtgtggatgtgcgagggcctcccccgcttgcgaaggggacatgcgtgctggaacctgtcggaactccatgccttcctcgcctgctcacctgctcgacgctggaatcgggacaggtgcaaagggacgcagacgtctgggacagctaaggcccgtgtcaccggagggctccgcacagtcgttctggtttcaacgaataagcaaaactcgggcaagtactgcagctatttggaaatgttttccaaaccacagtctctttagaactaagcctatttgaaacggtcggtgtaggcttactgagatcaggagacagggaggccccgcacatcacacagataaagtcagacaattgtaattaatacttttgctgcctcaagttgttttttaaataaagtactttgaaatgcatgagaatcatgctgcaatatgatcattctagagcaaatatatatatacacgtatatatatttcaagatgaaactaaagcagtttttaaataaattacttgaattttctgtgtatttaaaggaacgactgtttaatgtacttgatgggcctctggtcttgccgtgtctcctgccgctggtggcactttgtagattgtgtgtttgtgtccgggtggcagttgggtacctgctcacgcacggtgtgtctgccaggccacggtgtcccaggatcgcagagggctgactttcaagacttcaagaacattttctggatgtgtggaaacttgagaatggccttgtgaatctcgtgcttggacagggcaagtccgactactgaaagtgctgccagctttgctgcgagccctccggccagcgggagccccgtgggctgggcactgtggcccttcttctctgggggacggcacccctggcttcctcacctcggccgggcgtccgtggcagctcactctatgcaacttgatcctctagcggctttaagactgtagatcccctctctgagacctggctgtacttgtcaggatctcgaggcgcagctcccgtcttagctggtttctccggcttctcgtcctgacgactataaaacagttggaggcaagaaagcagcggatgtggggtggcagtggcctgacccgaatcaagatccgacccaaaccacaccaaatgtgggttcatctgggggccaccccttgcctgaggcttcccaccctcatctgaaggcccaggggccggatccagggctcaccaaagccgattcctcgccagctgggagtgcagaagtctcagggcctggctgcgacttgatttttaggaggaagaggggcttcgcaacccccctctgaatagtgtgttaacccttgagatcccagcctcgactaatctgaagtaaggacaacaaaggccattcagtgccctccacatggccttgccacagtcactgtcagggtatgaacgtgccggaagccagtgccagccagggacaggcgtgactgttgtgtgctcctcggtgacaggagtcggtggctgcacactttgtagactcgtcaagctgtcagcacttcaggtgtttgcaagcaaagcccttcttagtgtgcaggtcagtgtgcagagcccaaatgaggggaccgcaggggctggggtccagggtcagtagagtcggtttctggagctgccttcctgggaggcaggtgtgggtgaccggggctctggcggtgcgtgtgggcccggcctggccacagcggggaccaggtcacgacatctttggcctcaacccctcccctgcactgagattatttccagattgcactcacttgaaaccgtccgtgtcgtcaccttgtgtcttaagggaagccgagaagaagggcagacgggcaggctgtcttgtctgcaaagcgccattgcgcccgcagcttgtgtgggtcaggctgcagctcgggtgtctgtggcttctaaccttgtacctcagacggatgcagtaacaaggcggggctggggacgccggtcagtgtcaaaggggaggtgctctggctgatagccttgcccgagagggacgaggaggccgtgcgggtgccccctggggaagctggccagccatccagtgctgaggacgcagctggagttgggctcgtggcacccttggggtgtgggctgtgcaggctggtggcctgggtgcctctgcacactgagtggagtgtcaggcagggtgtgtcggttggtcgagtcttgtgtaatgtgcgcagaccagttaccaaactaggataatgttggtctcatttgtggtggttttgttccctatacaagtcagctaagtaaagactcttttaacgagcttccccttaacacatggcagaagtttccaggtgcaggaatgcgagctggcgggaaggggcagaggccgtgagctctcagctgggccggcctgcctgtgtcccctttcctgggtctgtcggcagactggcatcatgacgttccctggtggctgaagagctagctttggagtgttgtttttctcactctcaggcaggggccttagctggaatcctccaacctgccactgaacacgtcagtgctgtgtgctgcctcttggacacctgcccttgaaagcctcaggcccctgggagaagcactctgtccagtcctgtccccgggggggaggcagggccactgagccctcctcagatggttagtggcttccaacagccatcaggagtgtttcttgaatgccccaggtgtggaggacttggtctgtgaccacctagaaccccagagctgaacaggaagccgtccctgcagcaacaagagggctggaagggggagctgcaggccaccctcggctctcccactgctggggcggtgatgttcgggtgacatgtttgaaaaatactcttaaagataccaactgttcccttatatggctaatggtttgtgcagccaccagcgatggcggcccctattagagaccaggtttgttaaaacaccaaatattgctgtccacactagacattaaccggcttcagaaaagatggacaccttttcccacgctgtttcgcttcttaactttggtccagctttagccaccacacagcgtgtgagggactgctgctgcggagtcagcctcgtttgtccctccgcctcccaccagcacgcgccgcttctgagagacaccagctccctgcctccaagcctggtgccacaggcctgtcgtgagggacccctgcttccgagagctcctgggggggttctgcccttcaccacctgggagaggtgtcagttcagttccgagttgaacaaggcccgtgcacacagcatgttgggggcccagcccaaagttcttgtcacctcctcatgcaaagccagccatcaccctccggccagagctcaaggtggccccttggccagcccctccttgggtcctccaggaggactgagcacccctcctagcggcatcccttgccctccacagtgctgccaggggcacgtcgctctgtgccgtggactgagaccatcccctggtgacagaatgacccgtttgttggaaatgcctcgttgccagagaaactccccaggcatctcggaacgaaactatttagttccattgtgaactggccacgggacagctttttatcaacttattaagttggagcactgtaatcgcgcttgctgagttagcagtggtggtaagcgtgtgttaaacacataatgttacgttttaggagagagaggtcgtaaggaagtgtcgtgtcgctcatgactctcttctattagttgggtaacagtggcctcatgtttgtgtctgtgtgtacacagagcccttaggttctgctctgtttctttgccaggtgaatgtttgtggcatgcgctgctgtccgcgcccctctgtcctgcgcagggttcagctgtgcggcgccctgatttcctccatgcacacagaacctccttgtgtctgtttctctgttcctctgtggctgactcaataaacttttccctctgacatgatga

SEQ ID NO: 105352 - protein, 223 aa, Artificial Sequence
  derived and/or modified sequence
MAPEVIKQSAYDSKADIWSLGITAIELARGEPPHSELHPMKVLFLIPKNNPPTLEGNYSKPLKEFVEACLNKEPSFRPTAKELLKHKFILRNAKKTSYLTELIDRYKRWKAEQSHDDSSSEDSDAETDGQASGGSDSGDWIFTIREKDPKNLENGALQPSDLDRNKLKEKSQACGGNLGSIEELRGAIYLAEEACPGISDTMVAQLVQRLQRYSLSGGGTSSH

SEQ ID NO: 105353 - protein, 412 aa, Artificial Sequence
  derived and/or modified sequence
MAHSPVQSGLPGMQNLKADPEELFTKLEKIGKGSFGEVFKGIDNRTQKVVAIKIIDLEEAEDEIEDIQQEITVLSQCDSPYVTKYYGSYLKLEPGPLDETQIATILREILKGLDYLHSEKKIHRDIKAANVLLSEHGEVKLADFGVAGQLTDTQIKRNTFVGTPFWMAPEVIKQSAYDSKADIWSLGITAIELARGEPPHSELHPMKVLFLIPKNNPPTLEGNYSKPLKEFVEACLNKEPSFRPTAKELLKHKFILRNAKKTSYLTELIDRYKRWKAEQSHDDSSSEDSDAETDGQASGGSDSGDWIFTIREKDPKNLENGALQPSDLDRNKMKDIPKRPFSQCLSTIISPLFAELKEKSQACGGNLGSIEELRGAIYLAEEACPGISDTMVAQLVQRLQRYSLSGGGTSSH

SEQ ID NO: 105354 - DNA, 1239 bp, Artificial Sequence
  derived and/or modified sequence
atggctcacagtcccgtccaaagcgggctcccggggatgcaaaacttaaaggccgacccagaggaattgtttaccaaactcgagaaaataggcaagggatcgttcggggaggtgttcaaaggaatcgataatagaacacagaaagttgtggccattaaaatcatcgacctggaagaggcggaggacgagattgaggacatacagcaagagatcaccgtgctgtcccagtgcgattctccgtatgttaccaaatattacggcagttacctgaagttggaacccgggcccctcgatgaaacgcagattgctaccattcttagggagattctcaaaggcctcgactacctccactcagagaaaaagattcatagggacattaaggccgctaacgtgctgctaagcgagcacggagaagtcaagcttgcggatttcggagtggctggtcagttaactgatacccagatcaagaggaatacgttcgtcggcacacctttctggatggctcctgaggtcattaaacaatccgcatacgactcaaaagcggacatctggtcgctggggattacggccatcgaactggctaggggcgagccaccacattccgagctccacccaatgaaagtgctgttcttgatcccaaaaaacaacccccccacactggagggcaactacagtaaacctctcaaggagttcgtggaagcctgtctgaacaaggagccaagttttcgacctaccgctaaggagctgctgaaacacaaatttattctgagaaatgctaagaaaacatcctaccttactgaacttatcgatcgatacaagaggtggaaggctgaacagtcgcacgatgactccagctcggaggattcagacgcagaaactgacggtcaggcttctggcgggtcagactcgggggactggatcttcactataagggaaaaagaccctaaaaacctcgaaaacggtgccctgcagcccagcgaccttgacaggaacaagatgaaggacatccccaaacggccattcagtcagtgtctctcaaccataatctcccctctgttcgccgagttaaaggaaaaatcgcaagcatgcggaggcaatcttgggtccatcgaagagttacggggtgcaatatacctcgctgaagaggcttgtcccggcatatctgataccatggtggctcagttagtgcagagacttcaacgttacagcctgagcgggggcggtacttctagtcattag

SEQ ID NO: 105355 - DNA, 1239 bp, Artificial Sequence
  derived and/or modified sequence
atggcccacagccctgtgcagagcggcctgcccggcatgcagaacctgaaggctgaccctgaggagctgttcaccaagctggagaagattggcaagggcagctttggagaggtgttcaagggcatcgacaacagaacccagaaggtggtggccatcaagatcatcgacctggaggaggctgaagatgaaattgaggacatccagcaggagatcaccgtgctgagccagtgtgacagcccctacgtgaccaagtactacggcagctacctgaagctggagcccggccccctggatgagacccagatcgccaccatcctgcgggagatcctgaagggcctggactacctgcacagcgagaagaagatccaccgggacatcaaggccgccaacgtgctgctgtctgagcacggggaggtgaagctggccgactttggagtggccggccagctgacagacacccagatcaagaggaacacctttgtgggcacccccttctggatggcccctgaggtgatcaagcagagcgcctatgacagcaaggctgacatctggagcctgggcatcacagccatcgagctggcccggggggagcccccccacagcgagctgcaccccatgaaggtgctcttcctgatccccaagaacaacccccccaccctggagggcaactacagcaagcccctgaaggagtttgtggaggcctgcctgaacaaggagcccagcttccggcccacagccaaggagctgctgaagcacaagttcatcctgagaaatgccaagaagaccagctacctgacagagctgattgaccgctacaagcgctggaaggccgagcagagccatgatgacagcagcagtgaagattctgatgctgagacagatggccaggccagcggcggcagtgacagcggggactggatcttcaccatccgggagaaggaccccaagaacctggagaatggagccctgcagcccagcgacctggacaggaacaagatgaaggacatccccaagaggcccttcagccagtgcctgagcaccatcatcagccccctgtttgctgagctgaaggagaagagccaggcctgtggcggcaacctgggcagcattgaggagctgcggggggccatctacctggccgaggaggcctgccccggcatcagtgacaccatggtggcccagctggtgcagaggctgcagcgctacagcctgagcggcggcggcaccagcagccactag

SEQ ID NO: 105356 - DNA, 1239 bp, Artificial Sequence
  derived and/or modified sequence
atggcccacagccccgtgcagagcggcctgcccggcatgcagaacttgaaggccgatccagaagaattgtttaccaagttggagaagatcgggaagggcagcttcggggaggtgtttaaaggcatcgataaccgcacccagaaagtggtggctattaagatcattgacttggaagaggcggaagatgaaattgaggatatccaacaggagattactgtgctgagccaatgtgatagcccttacgtcacgaagtactatggctcttacctcaaacttgaacctgggccacttgacgagactcaaatcgccaccattttgcgcgagatcctgaaagggttagactaccttcatagtgaaaagaagatacaccgagatattaaggccgccaacgtcctcctgagtgaacatggagaggtgaagctagctgatttcggcgtggcgggccagctgacagatacgcagatcaaacgcaacaccttcgtaggtactccattttggatggcgccagaggtaattaagcaatccgcctatgatagtaaggcggatatctggtccctggggattacggcaattgaactagcgaggggtgagcctccacattcagaacttcaccctatgaaagtcctgttcctgattccaaagaataacccaccgaccctggaagggaattactctaagcccttaaaagaattcgtggaggcctgtctaaataaagaaccctcattccggcccaccgccaaagagctcctcaagcataaattcatcctgcgtaacgctaaaaagacctcgtatctgaccgagctaatcgacaggtacaaaaggtggaaagcagagcagtctcatgacgactcctccagtgaggatagcgatgctgaaaccgatggtcaggcatccggagggtccgactccggtgactggatctttaccattagagaaaaagatccaaagaaccttgaaaacggcgctttacaaccatctgaccttgataggaataagatgaaagacatccccaaacgacctttctctcagtgcttaagtactatcattagtccgctcttcgctgagttgaaagagaaatcccaggcttgcggcggcaacctgggctctatcgaggagttgcgaggcgccatctacctggctgaggaggcttgcccgggcatttcggacacaatggtggcccaactcgtgcagagacttcagcgatacagtctgtctgggggggggacgtccagccactag

SEQ ID NO: 105357 - DNA, 1239 bp, Artificial Sequence
  derived and/or modified sequence
atggcccactcacctgtacagtccggattgccaggcatgcagaatttgaaggccgacccagaagaactgtttacaaagctagagaagattggaaaaggctcgttcggcgaagtgttcaaggggatcgacaataggacccagaaagtcgttgccattaaaatcattgatcttgaagaggccgaggacgagatagaggacatacagcaggagatcacagttctgagccaatgtgatagcccttacgtcactaaatactacggctcatatttaaagctcgaacccggtccgctcgatgaaacacagatcgcaactatcctacgagagatactaaaaggcttggattatctccattcagaaaaaaaaattcaccgcgacatcaaggccgcaaatgtgttattgtccgaacacggtgaggttaaacttgccgactttggagtggctggccaactgactgatacacagataaaaaggaacacattcgttgggacccccttctggatggcccctgaggtcataaaacagtccgcctatgactcaaaggctgacatttggtcactcgggatcacagccatagaactggcaaggggcgagccccctcattctgaactgcaccccatgaaggtcctgtttttgatccctaaaaacaaccccccaacgctggagggtaattactctaagcccctgaaggagtttgtggaagcctgccttaataaagaaccatcctttagaccaaccgcaaaggagcttctaaagcataaattcatcctcaggaatgccaagaaaacctcctacctgaccgaactcattgaccgatataaacggtggaaggccgaacagtctcacgacgatagctcttccgaagactcggacgctgagacagacgggcaagcatctggaggctccgatagcggagactggatcttcacaatccgggaaaaggaccctaaaaacttggaaaacggcgcactgcaacccagtgacctggaccgcaacaaaatgaaggacataccaaaaagacctttctctcagtgcctctctaccatcatttccccattgttcgcggaacttaaggagaagtcgcaagcatgcgggggaaatttgggcagtatagaagagctccgcggagcaatatatctggctgaggaggcctgccctggtatttccgatacaatggttgctcagcttgttcagcgcctgcagaggtacagtttgtcaggagggggtaccagtagccactag

SEQ ID NO: 105358 - DNA, 1579 bp, Artificial Sequence
  derived and/or modified sequence
gcgcggcccgcgggcctcgccgccccgcgcggatcgtcgcggcccggccgtcccgtcccaggaagtggccgtcctgagcgccatggctcactccccggtgcagtcgggcctgcccggcatgcagaacctaaaggcagacccagaagagctttttacaaaactagagaaaattgggaagggctcctttggagaggtgttcaaaggcattgacaatcggactcagaaagtggttgccataaagatcattgatctggaagaagctgaagatgagatagaggacattcaacaagaaatcacagtgctgagtcagtgtgacagtccatatgtaaccaaatattatggatcctatctgaagttagaacctggcccattagatgaaacccagatcgctactatattaagagaaatactgaaaggactcgattatctccattcggagaagaaaatccacagagacattaaagcggccaacgtcctgctgtctgagcatggcgaggtgaagctggcggactttggcgtggctggccagctgacagacacccagatcaaaaggaacaccttcgtgggcaccccattctggatggcacccgaggtcatcaaacagtcggcctatgactcgaaggcagacatctggtccctgggcataacagctattgaacttgcaagaggggaaccacctcattccgagctgcaccccatgaaagttttattcctcattccaaagaacaacccaccgacgttggaaggaaactacagtaaacccctcaaggagtttgtggaggcctgtttgaataaggagccgagctttagacccactgctaaggagttattgaagcacaagtttatactacgcaatgcaaagaaaacttcctacttgaccgagctcatcgacaggtacaagagatggaaggccgagcagagccatgacgactcgagctccgaggattccgacgcggaaacagatggccaagcctcggggggcagtgattctggggactggatcttcacaatccgagaaaaagatcccaagaatctcgagaatggagctcttcagccatcggacttggacagaaataagatgaaagacatcccgaagaggcctttctctcagtgtttatctacaattatttctcctctgtttgcagagttgaaggagaagagccaggcgtgcggagggaacttggggtccattgaagagctgcgaggggccatctacctagcggaggaggcgtgccctggcatctccgacaccatggtggcccagctcgtgcagcggctccagagatactctctaagtggtggaggaacttcatcccactgaaattcctttggcatttggggttttgtttttccttttttccttcttcatcctcctccttttttaaaagtcaacgagagccttcgctgactccaccgaagaggtgcgccactgggagccaccccagcgccaggcgcccgtccagggacacacacagtcttcactgtgctgcagccagatgaagtctctcagatgggtggggagggtcagctccttccagcgatcattttattttattttattacttttgtttttaatttt

SEQ ID NO: 105359 - DNA, 1239 bp, Artificial Sequence
  derived and/or modified sequence
atggcccacagccccgtgcagagcggcctgcccggcatgcagaacctgaaggccgaccccgaggagctgttcaccaagctggagaagatcggcaagggcagcttcggcgaggtgttcaagggcatcgacaacagaacccagaaggtggtggccatcaagatcatcgacctggaggaggccgaggacgagatcgaggacatccagcaggagatcaccgtgctgagccagtgcgacagcccctacgtgaccaagtactacggcagctacctgaagctggagcccggccccctggacgagacccagatcgccaccatcctgagagagatcctgaagggcctggactacctgcacagcgagaagaagatccacagagacatcaaggccgccaacgtgctgctgagcgagcacggcgaggtgaagctggccgacttcggcgtggccggccagctgaccgacacccagatcaagagaaacaccttcgtgggcacccccttctggatggcccccgaggtgatcaagcagagcgcctacgacagcaaggccgacatctggagcctgggcatcaccgccatcgagctggccagaggcgagcccccccacagcgagctgcaccccatgaaggtgctgttcctgatccccaagaacaacccccccaccctggagggcaactacagcaagcccctgaaggagttcgtggaggcctgcctgaacaaggagcccagcttcagacccaccgccaaggagctgctgaagcacaagttcatcctgagaaacgccaagaagaccagctacctgaccgagctgatcgacagatacaagagatggaaggccgagcagagccacgacgacagcagcagcgaggacagcgacgccgagaccgacggccaggccagcggcggcagcgacagcggcgactggatcttcaccatcagagagaaggaccccaagaacctggagaacggcgccctgcagcccagcgacctggacagaaacaagatgaaggacatccccaagagacccttcagccagtgcctgagcaccatcatcagccccctgttcgccgagctgaaggagaagagccaggcctgcggcggcaacctgggcagcatcgaggagctgagaggcgccatctacctggccgaggaggcctgccccggcatcagcgacaccatggtggcccagctggtgcagagactgcagagatacagcctgagcggcggcggcaccagcagccactag

SEQ ID NO: 105360 - DNA, 1008 bp, Artificial Sequence
  derived and/or modified sequence
atggtggcagtggggatctgccataccgacgatcatgtggtcagcgggaatctggttacacctcttcccgtcatcctgggacatgaggcagccggtatcgtggagtcagttggggaaggtgttaccacagttaaacccggggacaaagtgattccgttgtttacccctcagtgtggaaaatgccgtgtctgtaagaatcctgagagcaactattgtctcaagaatgatctaggaaatcctcgcggcacactgcaggacggcacacgtaggtttacttgccggggtaaaccgattcatcactttctgggaacctctactttttcacagtacaccgtggtggatgaaaatgctgtcgctaagattgatgccgcttctccactcgaaaaggtgtgtctaatcggatgtgggttttctaccggctacggctcagcagtgaacgtcgccaaggttacgccagggtctacctgcgcagtgtttggcctggggggagtcggtctgtctgccgtaatgggctgcaaagctgcaggcgctgcgaggatcatcgccgtcgacatcaataaggacaagtttgccaaggcaaaagagctgggggcaacagaatgtattaatccacaggattacaagaagcctattcaggaggtgctgaaggaaatgaccgatggaggtgtggatttctcttttgaggtcattgggagactagacaccatgatggcctcacttctatgttgccatgaggcctgcggaaccagcgtgattgttggcgtgccccccgcttcccagaatctgtcaatcaaccccatgctgctattaacgggacgcacttggaagggggctgtgtacggcggtttcaagagtaaggagggaattccaaagctcgtcgccgacttcatggccaagaagttttctctggatgctctgatcactcacgtgcttccgtttgagaagattaatgaaggtttcgatctactgcacagcggcaaatcaattagaactgttctcacgttttag

SEQ ID NO: 105361 - DNA, 1008 bp, Artificial Sequence
  derived and/or modified sequence
atggtggccgtgggcatctgccacacagatgaccacgtggtgtctggcaacctggtgacccccctgcctgtgatcctgggccacgaggccgccggcatcgtggagagcgtgggggagggcgtgaccaccgtgaagccaggggacaaggtgatccccctcttcaccccccagtgtgggaagtgccgggtgtgcaagaaccctgagagcaactactgcctgaagaatgacctgggcaacccccggggcaccctgcaggacggcacccggcgcttcacctgccggggcaagcccatccaccacttcctgggcaccagcaccttcagccagtacacagtggtggatgaaaatgctgtggccaagattgatgctgccagccccctggagaaggtgtgcctgattggctgcggcttcagcacaggctacggcagcgctgtgaatgtggccaaggtgaccccaggcagcacctgtgctgtgtttggcctgggcggcgtgggcctgtctgctgtgatgggctgcaaggctgctggagctgcccgcatcatcgctgtggacatcaacaaggacaagtttgccaaggccaaggagctgggcgccacagagtgcatcaacccccaggactacaagaagcccatccaggaggtgctgaaggagatgacagatggcggcgtggacttctcctttgaagtcatcggccgcctggacaccatgatggccagcctgctgtgctgccacgaggcctgtggcaccagcgtcatcgtgggcgtgcccccagccagccagaacctgagcatcaaccccatgctgctgctgactggaagaacctggaagggagctgtgtatggaggcttcaagagcaaggagggcatccccaagctggtggccgacttcatggccaagaagttcagcctggatgccctgatcacccacgtgctgccctttgagaagatcaatgaaggatttgacctgctgcacagcggcaagagcatcagaacagtgctgaccttctag

SEQ ID NO: 105362 - DNA, 1008 bp, Artificial Sequence
  derived and/or modified sequence
atggtggccgtgggcatctgccacaccgacgaccacgtggtgagcgggaacctggtaactcctttacccgtgatcttagggcacgaggctgcagggatcgttgagtcagtgggagaaggtgtgacaaccgtgaagcccggcgacaaggtgatacctctgttcacccctcagtgcggcaagtgtagggtatgtaaaaatcccgagagcaattattgcctcaaaaacgatttaggcaaccctcgcggaactctgcaggacgggacccggaggttcacatgccgaggcaagccgatccaccatttccttggcactagcaccttttcccagtacactgtggtcgatgagaacgctgttgccaagatcgacgcggcctctccactggagaaagtatgcctcattggatgcggcttttcgacgggctacgggtctgccgtgaatgtggccaaggtcactccaggctcaacttgcgcagtcttcggcttaggaggcgtggggctctcagctgttatgggatgtaaagccgctggagctgcgaggattattgccgtagacattaacaaggataagttcgcgaaagctaaagagctgggagcaacggaatgtatcaatccacaggactacaagaagcccatccaggaggtgctaaaagaaatgactgacgggggggtagatttttcatttgaggtcattggaagactggatactatgatggcttccctactttgctgccacgaagcgtgcgggacctcagttatagttggagttccacccgcctctcagaacctgtctattaatccaatgctgttgctgaccggaagaacttggaaaggcgccgtatatggtggtttcaaatccaaggaaggcatccctaagttagtggccgatttcatggccaaaaaattcagtctggatgccctgattacacacgtgctaccttttgagaagatcaatgagggatttgaccttctgcacagtggcaaaagcattcggacagtgttaacattctag

SEQ ID NO: 105363 - DNA, 1008 bp, Artificial Sequence
  derived and/or modified sequence
atggtggcagttggcatttgtcacacggacgaccatgtggtatctggaaatctggtgactccgcttcccgttatacttggccacgaggccgcaggtatagtcgagtccgtgggcgaaggagtcacaacagtgaagcctggcgataaggtcatccctctatttaccccgcaatgcgggaagtgcagggtctgtaagaatccggaatcaaattactgtctgaagaatgatctggggaatcccaggggaactcttcaagacggaacccgcagattcacttgcagaggcaagcccattcatcactttcttggcacatccaccttctctcagtatacagtggtggatgagaatgctgtcgcaaagatcgacgccgcatccccgctcgagaaagtgtgcctgattggatgcggatttagtaccggatacggtagtgccgtgaatgtggctaaggtgacaccaggcagtacatgcgcagtgtttggtctggggggagtcggacttagtgctgtgatggggtgcaaggcagccggtgccgctcggatcatcgcggtggacattaacaaggataagtttgcaaaggcaaaagagctcggcgcaacagagtgcattaatcctcaggattacaaaaagccgatacaggaagtcctgaaggagatgacagacggaggtgtcgatttctcctttgaggtgatcgggagactggataccatgatggcatccctgttatgttgccacgaagcttgcggaacaagcgtcatcgtgggcgtgcctcccgcaagccagaaccttagtataaacccaatgttactgctgactggaaggacgtggaagggcgctgtttatggcggtttcaagtctaaagaggggatccccaaacttgtggccgactttatggctaagaaattctctctggacgcgctaataacccatgtgctgccttttgagaaaataaacgaaggatttgatctgctgcattctggtaagagcattcgcacagttctgacattctag

SEQ ID NO: 105364 - DNA, 1008 bp, Artificial Sequence
  derived and/or modified sequence
atggtggccgtgggcatctgccacaccgacgaccacgtggtgagcggcaacctggtgacccccctgcccgtgatcctgggccacgaggccgccggcatcgtggagagcgtgggcgagggcgtgaccaccgtgaagcccggcgacaaggtgatccccctgttcaccccccagtgcggcaagtgcagagtgtgcaagaaccccgagagcaactactgcctgaagaacgacctgggcaaccccagaggcaccctgcaggacggcaccagaagattcacctgcagaggcaagcccatccaccacttcctgggcaccagcaccttcagccagtacaccgtggtggacgagaacgccgtggccaagatcgacgccgccagccccctggagaaggtgtgcctgatcggctgcggcttcagcaccggctacggcagcgccgtgaacgtggccaaggtgacccccggcagcacctgcgccgtgttcggcctgggcggcgtgggcctgagcgccgtgatgggctgcaaggccgccggcgccgccagaatcatcgccgtggacatcaacaaggacaagttcgccaaggccaaggagctgggcgccaccgagtgcatcaacccccaggactacaagaagcccatccaggaggtgctgaaggagatgaccgacggcggcgtggacttcagcttcgaggtgatcggcagactggacaccatgatggccagcctgctgtgctgccacgaggcctgcggcaccagcgtgatcgtgggcgtgccccccgccagccagaacctgagcatcaaccccatgctgctgctgaccggcagaacctggaagggcgccgtgtacggcggcttcaagagcaaggagggcatccccaagctggtggccgacttcatggccaagaagttcagcctggacgccctgatcacccacgtgctgcccttcgagaagatcaacgagggcttcgacctgctgcacagcggcaagagcatcagaaccgtgctgaccttctag

SEQ ID NO: 105365 - protein, 1290 aa, Artificial Sequence
  derived and/or modified sequence
MEPPSCIQDEPFPHPLEPEPGVSAQPGPGKPSDKRFRLWYVGGSCLDHRTTLPMLPWLMAEIRRRSQKPEAGGCGAPAAREVILVLSAPFLRCVPAPGAGASGGTSPSATQPNPAVFIFEHKAQHISRFIHNSHDLTYFAYLIKAQPDDPESQMACHVFRATDPSQVPDVISSIRQLSKAAMKEDAKPSKDNEDAFYNSQKFEVLYCGKVTVTHKKAPSSLIDDCMEKFSLHEQQRLKIQGEQRGPDPGEDLADLEVVVPGSPGDCLPEEADGTDTHLGLPAGASQPALTSSRVCFPERILEDSGFDEQQEFRSRCSSVTGVQRRVHEGSQKSQPRRRHASAPSHVQPSDSEKNRTMLFQVGRFEINLISPDTKSVVLEKNFKDISSCSQGIKHVDHFGFICRESPEPGLSQYICYVFQCASESLVDEVMLTLKQAFSTAAALQSAKTQIKLCEACPMHSLHKLCERIEGLYPPRAKLVIQRHLSSLTDNEQADIFERVQKMKPVSDQEENELVILHLRQLCEAKQKTHVHIGEGPSTISNSTIPENATSSGRFKLDILKNKAKRSLTSSLENIFSRGANRMRGRLGSVDSFERSNSLASEKDYSPGDSPPGTPPASPPSSAWQTFPEEDSDSPQFRRRAHTFSHPPSSTKRKLNLQDGRAQGVRSPLLRQSSSEQCSNLSSVRRMYKESNSSSSLPSLHTSFSAPSFTAPSFLKSFYQNSGRLSPQYENEISDGEGRKRTSSTCSNESLSVGGTSVTPRRISWRQRIFLRVASPMNKSPSAMQQQDGLDRNELLPLSPLSPTMEEEPLVVFLSGEDDPEKIEERKKSKELRSLWRKAIHQQILLLRMEKENQKLEASRDELQSRKVKLDYEEVGACQKEVLITWDKKLLNCRAKIRCDMEDIHTLLKEGVPKSRRGEIWQFLALQYRLRHRLPNKQQPPDISYKELLKQLTAQQHAILVDLGRTFPTHPYFSVQLGPGQLSLFNLLKAYSLLDKEVGYCQGISFVAGVLLLHMSEEQAFEMLKFLMYDLGFRKQYRPDMMSLQIQMYQLSRLLHDYHRDLYNHLEENEISPSLYAAPWFLTLFASQFSLGFVARVFDIIFLQGTEVIFKVALSLLSSQETLIMECESFENIVEFLKNTLPDMNTSEMEKIITQVFEMDISKQLHAYEVEYHVLQDELQESSYSCEDSETLEKLERANSQLKRQNMDLLEKLQVAHTKIQALESNLENLLTRETKMKSLIRTLEQEKMAYQKTVEQLRKLLPADALVNCDLLLRDLNCNPNNKAKIGNKP

SEQ ID NO: 105366 - DNA, 3873 bp, Artificial Sequence
  derived and/or modified sequence
atggagccccccagctgcatccaggacgagcccttcccccaccccctggagcccgagcccggcgtgagcgcccagcccggccccggcaagcccagcgacaagagattcagactgtggtacgtgggcggcagctgcctggaccacagaaccaccctgcccatgctgccctggctgatggccgagatcagaagaagaagccagaagcccgaggccggcggctgcggcgcccccgccgccagagaggtgatcctggtgctgagcgcccccttcctgagatgcgtgcccgcccccggcgccggcgccagcggcggcaccagccccagcgccacccagcccaaccccgccgtgttcatcttcgagcacaaggcccagcacatcagcagattcatccacaacagccacgacctgacctacttcgcctacctgatcaaggcccagcccgacgaccccgagagccagatggcctgccacgtgttcagagccaccgaccccagccaggtgcccgacgtgatcagcagcatcagacagctgagcaaggccgccatgaaggaggacgccaagcccagcaaggacaacgaggacgccttctacaacagccagaagttcgaggtgctgtactgcggcaaggtgaccgtgacccacaagaaggcccccagcagcctgatcgacgactgcatggagaagttcagcctgcacgagcagcagagactgaagatccagggcgagcagagaggccccgaccccggcgaggacctggccgacctggaggtggtggtgcccggcagccccggcgactgcctgcccgaggaggccgacggcaccgacacccacctgggcctgcccgccggcgccagccagcccgccctgaccagcagcagagtgtgcttccccgagagaatcctggaggacagcggcttcgacgagcagcaggagttcagaagcagatgcagcagcgtgaccggcgtgcagagaagagtgcacgagggcagccagaagagccagcccagaagaagacacgccagcgcccccagccacgtgcagcccagcgacagcgagaagaacagaaccatgctgttccaggtgggcagattcgagatcaacctgatcagccccgacaccaagagcgtggtgctggagaagaacttcaaggacatcagcagctgcagccagggcatcaagcacgtggaccacttcggcttcatctgcagagagagccccgagcccggcctgagccagtacatctgctacgtgttccagtgcgccagcgagagcctggtggacgaggtgatgctgaccctgaagcaggccttcagcaccgccgccgccctgcagagcgccaagacccagatcaagctgtgcgaggcctgccccatgcacagcctgcacaagctgtgcgagagaatcgagggcctgtacccccccagagccaagctggtgatccagagacacctgagcagcctgaccgacaacgagcaggccgacatcttcgagagagtgcagaagatgaagcccgtgagcgaccaggaggagaacgagctggtgatcctgcacctgagacagctgtgcgaggccaagcagaagacccacgtgcacatcggcgagggccccagcaccatcagcaacagcaccatccccgagaacgccaccagcagcggcagattcaagctggacatcctgaagaacaaggccaagagaagcctgaccagcagcctggagaacatcttcagcagaggcgccaacagaatgagaggcagactgggcagcgtggacagcttcgagagaagcaacagcctggccagcgagaaggactacagccccggcgacagcccccccggcaccccccccgccagcccccccagcagcgcctggcagaccttccccgaggaggacagcgacagcccccagttcagaagaagagcccacaccttcagccacccccccagcagcaccaagagaaagctgaacctgcaggacggcagagcccagggcgtgagaagccccctgctgagacagagcagcagcgagcagtgcagcaacctgagcagcgtgagaagaatgtacaaggagagcaacagcagcagcagcctgcccagcctgcacaccagcttcagcgcccccagcttcaccgcccccagcttcctgaagagcttctaccagaacagcggcagactgagcccccagtacgagaacgagatcagcgacggcgagggcagaaagagaaccagcagcacctgcagcaacgagagcctgagcgtgggcggcaccagcgtgacccccagaagaatcagctggagacagagaatcttcctgagagtggccagccccatgaacaagagccccagcgccatgcagcagcaggacggcctggacagaaacgagctgctgcccctgagccccctgagccccaccatggaggaggagcccctggtggtgttcctgagcggcgaggacgaccccgagaagatcgaggagagaaagaagagcaaggagctgagaagcctgtggagaaaggccatccaccagcagatcctgctgctgagaatggagaaggagaaccagaagctggaggccagcagagacgagctgcagagcagaaaggtgaagctggactacgaggaggtgggcgcctgccagaaggaggtgctgatcacctgggacaagaagctgctgaactgcagagccaagatcagatgcgacatggaggacatccacaccctgctgaaggagggcgtgcccaagagcagaagaggcgagatctggcagttcctggccctgcagtacagactgagacacagactgcccaacaagcagcagccccccgacatcagctacaaggagctgctgaagcagctgaccgcccagcagcacgccatcctggtggacctgggcagaaccttccccacccacccctacttcagcgtgcagctgggccccggccagctgagcctgttcaacctgctgaaggcctacagcctgctggacaaggaggtgggctactgccagggcatcagcttcgtggccggcgtgctgctgctgcacatgagcgaggagcaggccttcgagatgctgaagttcctgatgtacgacctgggcttcagaaagcagtacagacccgacatgatgagcctgcagatccagatgtaccagctgagcagactgctgcacgactaccacagagacctgtacaaccacctggaggagaacgagatcagccccagcctgtacgccgccccctggttcctgaccctgttcgccagccagttcagcctgggcttcgtggccagagtgttcgacatcatcttcctgcagggcaccgaggtgatcttcaaggtggccctgagcctgctgagcagccaggagaccctgatcatggagtgcgagagcttcgagaacatcgtggagttcctgaagaacaccctgcccgacatgaacaccagcgagatggagaagatcatcacccaggtgttcgagatggacatcagcaagcagctgcacgcctacgaggtggagtaccacgtgctgcaggacgagctgcaggagagcagctacagctgcgaggacagcgagaccctggagaagctggagagagccaacagccagctgaagagacagaacatggacctgctggagaagctgcaggtggcccacaccaagatccaggccctggagagcaacctggagaacctgctgaccagagagaccaagatgaagagcctgatcagaaccctggagcaggagaagatggcctaccagaagaccgtggagcagctgagaaagctgctgcccgccgacgccctggtgaactgcgacctgctgctgagagacctgaactgcaaccccaacaacaaggccaagatcggcaacaagccctag

SEQ ID NO: 105367 - DNA, 3873 bp, Artificial Sequence
  derived and/or modified sequence
atggaaccccccagctgtatacaggatgaaccttttcctcacccactcgaacccgagccaggcgtaagcgcccagccggggccgggtaagccatccgacaagagattccgcctttggtacgttggcggcagctgcttggatcaccgcactacactgcctatgctgccctggctaatggcggagatcaggcggaggtctcagaagcccgaggccggaggatgtggcgctccggccgcacgtgaagtcatcctcgtcctttccgccccatttctccgatgtgttcccgcgccaggtgccggtgccagtggcggcacaagccccagtgctacccagccaaacccagctgtgttcatttttgagcacaaagcacagcacatcagcaggttcattcacaattcccatgatttaacatatttcgcctacctgattaaggcccagcccgatgatcctgaaagtcaaatggcttgccacgttttccgggcaaccgaccccagtcaagtccccgatgtgatcagttctataaggcagctgtctaaagccgccatgaaggaggacgctaagccgagtaaggacaacgaggatgcattttacaactctcagaaatttgaagttttatattgcggaaaggttactgtaacgcacaagaaggcacctagcagccttattgatgactgcatggaaaagttctcattacatgaacaacagaggctaaagattcagggagagcagcgggggcccgaccctggggaagatctcgctgacctggaggtcgtcgtgcctgggtcccctggcgattgcctgccggaggaagcggacgggacagatactcacctggggcttccagctggggccagtcagcctgccctgacaagctccagagtctgttttcccgagcggattctggaggattccggttttgacgagcagcaagagtttcgctccaggtgttcgagcgtaaccggagtgcagagacgggtgcacgaaggatctcaaaagtctcagccgaggcgtagacacgcttccgcgcccagccatgtgcagccttctgacagcgagaagaaccggaccatgttgtttcaggtgggaaggtttgaaatcaacctcatttcgcccgacacaaaaagtgtcgttctggagaaaaatttcaaagacataagctcctgctcccaggggatcaaacatgtcgaccatttcggtttcatttgtagagagtccccagaacctggcttatcgcaatatatctgctacgtttttcagtgcgcctctgagtcactcgttgatgaagttatgttgaccctaaaacaagccttcagcacagccgccgccctgcaatcagccaaaacccaaataaaactatgtgaagcctgtcctatgcactcactgcataaactgtgtgaaaggatagaagggctgtatccacctagagccaagctggtgattcaacgccatctatcaagccttacagacaatgagcaagctgacatttttgagcgtgtgcagaagatgaagcccgtgagcgatcaggaagaaaacgaattggtaatcctgcatttacgccaattatgcgaagctaagcagaaaacccatgtgcacattggtgaaggacctagcacaataagcaatagtacaatcccagagaatgccacatcttccgggagatttaaactggatattttgaaaaacaaggccaagcgctcactaacatcgagtctggagaacattttcagtcggggcgccaatagaatgcgcgggagactcggcagtgtggattcatttgaacgttcaaatagtctggcttccgagaaagattactcgcccggcgacagtcctccaggcacgccacccgcttctccaccgagtagcgcatggcaaacatttcccgaggaggactccgactctcctcaatttagaagaagggcccatactttttcgcatccccccagcagtacaaagaggaaattgaacctgcaagatgggagagctcagggcgttcgatcgccccttctgcgccaatcatcttctgaacaatgtagtaacctaagcagtgtaaggcggatgtataaggaatctaacagttcctctagtttaccatctttgcacacctcatttagcgctccctcgtttactgcaccatcctttctgaagtccttctatcagaactcgggcagactctctcctcagtatgaaaatgagatctcagacggggaggggcgcaagcgaacgagctccacctgtagtaatgagtcgttgagtgtgggaggaacttcagtgacacctagaaggatttcctggagacagaggatctttctgcgggtcgcttctcccatgaacaagtccccaagcgcgatgcagcaacaggacggtctcgaccggaatgagctcctacctctgtcccctctcagtcctaccatggaggaagagccactggtcgtgttcttgtccggcgaagatgatcctgagaagattgaggaacgcaaaaagagtaaggaactgcggtcactgtggaggaaggccatccaccagcagattttactactgcggatggaaaaagaaaaccagaaacttgaagcttctagggacgaattacagagcaggaaagtgaaactagactacgaggaagtgggagcttgtcagaaggaagtcctgatcacctgggacaaaaagttgctgaattgccgcgccaagatcaggtgtgatatggaagatattcacaccctgctgaaagagggagttcccaagtcacggaggggtgagatctggcagtttctggctctccaatatcggctccgccaccgcctgcctaataaacagcaaccccccgacatatcctataaggaattgctcaagcagctgaccgctcagcagcatgcaattcttgtagacctgggtagaacgtttccaacccatccctatttttctgttcagctggggcctggacagctgtctttgtttaatctactgaaagcctattctttgctggacaaggaagttggatactgtcaggggatcagcttcgtggcaggggtgctcctcctgcacatgagcgaggagcaggctttcgaaatgctgaaattcctgatgtatgatctcggctttaggaagcagtaccggccagacatgatgagtttgcagatacagatgtaccagctcagcaggctgctgcacgactaccatcgagacctctataaccatctggaggaaaatgaaatctctccctctttgtacgccgcaccctggttcctgacactgtttgcaagtcagttttctctgggctttgtcgcaagagtattcgatattatattcctgcaggggacggaagtgatcttcaaggttgccttatccctcctcagctcacaggagacgcttattatggagtgtgaaagcttcgagaacattgtcgagttcctgaaaaacacgctcccagatatgaatacctctgaaatggagaagattataactcaggtgttcgagatggatataagcaaacagctgcacgcatacgaagttgaataccacgtgctgcaggatgagcttcaggagagctcttactcgtgtgaagattctgagacattagagaaactagagcgagccaacagccagctgaagagacaaaacatggatctcctcgagaagctccaagttgcccacaccaaaatccaggcactggaatctaatctggaaaatttattgacccgggaaactaagatgaaatccctgattcgaactctggagcaagagaaaatggcataccaaaagaccgtcgagcagctgcggaaactgctccccgccgacgctcttgtgaattgtgaccttttactgcgagacttaaattgtaacccaaataataaggctaagattgggaacaaaccatag

SEQ ID NO: 105368 - DNA, 3873 bp, Artificial Sequence
  derived and/or modified sequence
atggagccccccagctgcatccaggatgagcccttcccccaccccctggagcctgagcccggggtgtctgcccagcccggccctgggaagcccagcgacaagcgcttccggctgtggtacgtgggcggcagctgcctggaccacaggaccaccctgcccatgctgccctggctgatggccgagatcagaagaagaagccagaagccagaggccggcggctgtggggccccagctgcccgggaggtgatcctggtgctgagcgcccccttcctgcgctgtgtgcctgcccctggagctggggccagcggcggcaccagccccagcgccacccagcccaacccagctgtgttcatctttgagcacaaggcccagcacatcagccgcttcatccacaacagccatgacctgacctactttgcctacctgatcaaggcccagccagatgatcctgagagccagatggcctgccacgtgttccgggccacagaccccagccaggtgcctgatgtgatcagcagcatccggcagctgagcaaggccgccatgaaggaggatgccaagcccagcaaggacaatgaagatgccttctacaacagccagaagtttgaggtgctgtactgcggcaaggtgacagtgacccacaagaaggcccccagcagcctgattgatgactgcatggagaagttcagcctgcacgagcagcagaggctgaagatccagggcgagcagaggggccctgaccccggggaggacctggccgacctggaggtggtggtgcccggcagccctggggactgcctgcctgaggaggctgatggaacagacacccacctgggcctgcctgctggggccagccagcctgccctgaccagcagccgggtgtgcttccctgagcgcatcctggaggacagcggctttgatgagcagcaggagttccgcagccgctgcagctctgtgactggagtgcagaggagagtgcatgagggcagccagaagagccagcccaggagaagacatgccagcgcccccagccacgtgcagcccagcgacagcgagaagaacagaaccatgctgttccaggtgggccgctttgagatcaacctgatcagcccagacaccaagtctgtggtgctggagaagaacttcaaggacatcagcagctgcagccagggcatcaagcacgtggaccacttcggcttcatctgccgggagagccctgagcccggcctgagccagtacatctgctacgtgttccagtgtgccagcgagagcctggtggatgaggtgatgctgaccctgaagcaggccttcagcacagctgctgccctgcagagcgccaagacccagatcaagctgtgtgaggcctgccccatgcacagcctgcacaagctgtgtgagcgcatcgagggcctgtacccaccccgggccaagctggtgatccagaggcacctgagcagcctgacagacaatgagcaggccgacatctttgagcgggtgcagaagatgaagcctgtgtctgaccaggaggagaatgagctggtgatcctgcacctgcggcagctgtgtgaggccaagcagaagacccacgtgcacatcggggagggccccagcaccatcagcaacagcaccatcccagaaaatgccaccagcagcggccgcttcaagctggacatcctgaagaacaaggccaagaggagcctgaccagcagcctggagaacatcttcagcagaggagccaacaggatgaggggccgcctgggctctgtggacagctttgagaggagcaacagcctggccagcgagaaggactacagccctggggacagccccccaggcaccccaccagccagcccccccagcagcgcctggcagaccttcccagaagaagattctgacagcccccagttcagaagaagagcccacaccttcagccacccccccagcagcaccaagaggaagctgaacctgcaggacggccgggcccagggcgtgcgcagccccctgctgcggcagagcagcagcgagcagtgcagcaacctgagctctgtgcggaggatgtacaaggagagcaacagcagcagcagcctgcccagcctgcacaccagcttcagcgcccccagcttcaccgcccccagcttcctgaagagcttctaccagaacagcggccgcctgagcccccagtatgaaaatgagatcagtgatggagagggcaggaagaggaccagcagcacctgcagcaatgaaagcctgtctgtgggcggcacctctgtgaccccccggcgcatctcctggaggcagaggatcttcctgcgggtggccagccccatgaacaagagccccagcgccatgcagcagcaggacggcctggacagaaatgagctgctgcccctgagccccctgagccccaccatggaggaggagcccctggtggtgttcctgagcggggaggatgatcctgagaagattgaggagaggaagaagagcaaggagctgcggagcctgtggaggaaggccatccaccagcagatcctgctgctgaggatggagaaggagaaccagaagctggaggccagcagagatgagctgcagagcaggaaggtgaagctggactatgaggaggtgggcgcctgccagaaggaggtgctgatcacctgggacaagaagctgctgaactgccgggccaagatccgctgtgacatggaggacatccacaccctgctgaaggagggcgtgcccaagagcagaagaggagagatctggcagttcctggccctgcagtaccgcctgcggcaccggctgcccaacaagcagcagcccccagacatctcctacaaggagctgctgaagcagctgacagcccagcagcacgccatcctggtggacctgggccgcaccttccccacccacccctacttctctgtgcagctgggccctggccagctgagcctcttcaacctgctgaaggcctacagcctgctggacaaggaggtgggctactgccagggcatcagctttgtggccggcgtgctgctgctgcacatgtctgaggagcaggcctttgagatgctgaagttcctgatgtatgacctgggcttcaggaagcagtacagaccagacatgatgagcctgcagatccagatgtaccagctgagccggctgctgcatgactaccaccgggacctgtacaaccacctggaggagaatgagatcagccccagcctgtatgctgccccctggttcctgaccctgtttgccagccagttcagcctgggctttgtggcccgggtgtttgacatcatcttcctgcagggcacagaggtgatcttcaaggtggccctgagcctgctgagcagccaggagaccctcatcatggagtgtgagagctttgagaacatcgtggagttcctgaagaacaccctgcctgacatgaacaccagcgagatggagaagatcatcacccaggtgtttgagatggacatcagcaagcagctgcacgcctatgaggtggagtaccacgtgctgcaggatgagctgcaggagagcagctacagctgtgaggacagcgagaccctggagaagctggagcgggccaacagccagctgaagaggcagaacatggacctgctggagaagctgcaggtggcccacaccaagatccaggccctggagagcaacctggagaacctgctgacccgggagaccaagatgaagagcctcatccgcaccctggagcaggagaagatggcctaccagaagacagtggagcagctgaggaagctgctgcctgcagatgccctggtgaactgtgacctgctgctgcgggacctgaactgcaaccccaacaacaaggccaagattggcaacaagccctag

SEQ ID NO: 105369 - DNA, 3873 bp, Artificial Sequence
  derived and/or modified sequence
atggagccccccagctgcatccaggacgagcccttcccccaccccttagagccagagccgggagtatccgcccagcctgggcccggcaagccctctgacaaacgatttcgtctgtggtacgttggcgggtcctgtctggaccacagaaccaccttgccaatgctgccatggctaatggccgagattagaaggcgctcacagaagccggaggccggaggatgcggagcccccgcagctcgcgaggtcatcttggtgctgtcagcaccctttctgcgctgcgtgccagctcccggtgccggcgcaagtggcggcacaagccctagtgccacccagcccaatccagccgtgtttatctttgagcataaggcgcaacacatctcccgtttcattcacaactctcacgacctcacctactttgcctatctaattaaagcacagcctgacgacccggagtcgcagatggcttgccacgtctttcgcgcgacagatccctcccaggttccggatgtgatttcaagtatccggcagctgagcaaggcggctatgaaagaagacgccaagccttccaaagataacgaagatgccttctataactctcagaagttcgaagttctgtattgtgggaaagtcaccgtaactcataaaaaagcgccgtcctcgctgatagacgactgcatggaaaagttctcccttcatgaacagcaacgactaaaaattcagggggaacagcgcggaccagatccaggggaggacctggccgacctcgaggtagtggtgccggggtctcctggagactgcttgcctgaggaagctgatgggactgacacacacctagggctgcccgcaggtgcatcacagcctgctttaacctcctctcgtgtgtgttttccagagaggattctggaggatagcggtttcgacgaacagcaggaatttcgaagcaggtgttcctcagttactggtgtacagagaagggtgcatgaaggcagtcagaagagtcagcccaggagacgtcacgctagtgcacctagccacgtacaaccaagcgactcagagaagaataggactatgctgttccaggtcggacgcttcgaaatcaatctgatatcccctgacactaagagcgtggtactggagaaaaactttaaggatatatcttcatgttcacagggtatcaaacacgtcgaccactttggttttatatgcagagaaagtcctgagcctggcctgtcccaatatatctgttacgtgtttcagtgtgcaagcgaaagtctcgtggatgaggtgatgctcaccctcaagcaggccttttcgaccgctgcagctttacaatcagctaagactcagatcaagctgtgcgaggcctgtcccatgcatagcctccacaaactctgcgaaagaatagagggattgtacccgccacgcgctaaacttgtgatccagaggcatctatctagcttaacagacaatgaacaggctgacatttttgaacgagtgcagaagatgaaacccgtctcagatcaggaggaaaacgaattggtaatattgcacctacgccaattatgcgaagctaaacagaaaacccatgttcacatcggagagggaccaagcaccattagcaacagcacaattcctgagaacgccacctcgtcaggtcgctttaaactggacattctcaaaaataaagccaaacgcagcttaactagtagcctggaaaacatcttctcgcgtggtgccaatcgtatgcgcggccgactgggctcggtggattctttcgaaagatccaactctctggcttcagaaaaagattattcaccgggagactcacccccagggaccccgcccgcttctccgcctagctcggcctggcagacctttcctgaagaggactcggactccccacagtttcggcgccgggcccatacctttagccatccacccagcagcaccaagcgcaagctcaatctccaagatgggcgcgctcagggcgttcgctccccacttcttagacagtcatcatcagagcaatgctctaacctctcttccgtccggcgaatgtataaagaatcaaatagttcttcatccctgccatccttgcacacttctttctcagctccttcatttacagccccgtcctttttgaagagcttctaccagaattctgggcggttatctcctcagtacgagaatgaaatctctgatggcgaaggaagaaaacgcactagttctacatgctccaatgagagcctgagtgtggggggaacctcagttaccccgaggcggataagctggcgacagagaatctttttgagggtggcgagcccgatgaataagtcaccctctgctatgcaacaacaggatgggctcgatcggaacgagcttctgcccctatcccccctgagtcctaccatggaagaagagccattggttgtcttcctgtcaggcgaggatgaccctgaaaaaatcgaggaacggaaaaagagcaaagaactgcggtcactatggagaaaggctattcatcagcagatactcctgctgaggatggagaaagagaaccagaaactcgaagcgagccgggacgagctgcagagccgcaaggtcaagttagactacgaagaggtgggagcgtgtcaaaaagaggtcctcatcacatgggataagaagcttctaaactgcagagcgaaaattcgatgtgatatggaggatatccacacactactaaaagagggcgtgcctaagagccggaggggagaaatttggcagtttttagcccttcaatatcggcttcgccacaggctgccaaacaagcaacaacctcccgatattagctacaaagaactcctcaaacagctgacggcccagcagcacgccatcctagtggatttgggtagaacctttccaacacacccatacttttctgtacagctgggccccggccaactaagcctgttcaatttacttaaagcatactctctgctggataaagaggtgggctactgtcagggtatctccttcgtcgcgggagtccttttacttcacatgtccgaagaacaagccttcgagatgctgaagtttctgatgtatgacctgggctttagaaagcagtaccggcctgatatgatgagcctccagattcaaatgtaccagcttagtcgcctgcttcacgattaccaccgggacctttataaccacctagaagaaaacgagatctcaccaagcctgtatgccgctccatggtttctgacattgttcgcatctcagttcagccttggatttgtggctcgggtgttcgacatcatctttctgcagggaacagaagtaatattcaaagtggcattatctttattaagtagccaggagaccctcatcatggaatgtgagagcttcgagaacatcgtcgagttcttgaagaacacgctccccgacatgaacacatcggagatggagaagatcatcactcaggtattcgagatggacatttctaaacagttgcatgcttacgaggtggaatatcacgtcctgcaagacgagcttcaagaatcttcctacagctgcgaagatagcgagacgctagaaaaactggaacgggctaatagccagttgaagcgccagaatatggacctgctggaaaaacttcaggtagctcacactaaaattcaagctctggagagcaaccttgagaatcttctgacaagggagacaaagatgaaatcgctaattagaactctggagcaggaaaaaatggcttaccagaagacagtggaacagctgcgaaagctgctgcccgctgacgctctcgtgaattgcgacctccttcttagggatctgaattgcaaccctaacaataaggctaagattggaaataaaccatag

SEQ ID NO: 105370 - DNA, 3873 bp, Artificial Sequence
  derived and/or modified sequence
atggagccgccaagttgtatccaggacgaacccttcccccaccccctggagcccgagcccggagtgtccgcacagcccggacctggaaagccttccgacaaacggtttagattatggtacgtcggcggttcttgcctggaccaccgcacaacactgccaatgttgccctggctgatggccgagattcgccgacgatcacaaaagcccgaagccggtgggtgtggcgcaccagctgcgcgagaggtcatactcgttctgagcgcccctttcttgcgatgcgtaccagcccctggggctggcgcaagcgggggtaccagccctagtgccacccaaccaaacccagctgtttttatctttgaacacaaggcacaacacattagtagattcatacacaattctcacgatctgacttacttcgcttacctgataaaagctcagcctgacgacccagagtcacagatggcctgtcatgtgtttagggccactgacccctcccaggtgccggacgtcataagttcaattaggcagctcagcaaagctgcaatgaaggaggatgccaagccatctaaggacaacgaggacgcattctacaactcacagaagttcgaggtgctgtactgtgggaaagtcactgtgacccataaaaaagcaccatcaagtttgattgacgattgcatggaaaaattctccctgcatgagcaacagcgcctcaaaatacaaggggaacaaagagggccagatcccggagaggatctcgctgacttagaggtggtggtgccagggagtcctggagactgcctccctgaggaagctgatggaacagacacgcacctggggctccctgcaggtgcctcgcaacccgcattaacaagtagccgagtctgttttcccgagagaatactggaagacagtggatttgatgagcagcaagaattcaggagtaggtgtagctccgttactggggtccagaggcgggtgcatgagggctctcagaagagtcagccaagaaggagacacgcctccgccccttcacatgtgcaaccaagcgactccgagaaaaatcggaccatgctgtttcaggtgggcagattcgaaataaatttaattagtccagatacaaagtctgtggttctcgagaaaaactttaaagacatctccagctgtagtcagggcatcaagcatgttgaccacttcgggtttatctgtcgggagtcaccggagccaggcttgtcccagtacatctgttacgtgtttcagtgtgcctcagaatctctggttgacgaagtcatgctcaccttgaagcaggcattctcgacagcagccgcactccagagcgctaagacgcaaatcaaattgtgcgaggcttgccccatgcattccctgcataagctgtgtgaacggatagaggggctgtatcctccgcgtgcaaaactagttattcagagacatttatcttctctgacagacaatgaacaggctgacatcttcgaacgcgtccagaagatgaaaccggtatcagaccaggaggaaaatgagctggttattctgcacctcagacaactttgcgaggctaagcagaagacccacgtacatattggagaaggcccttcaactatttctaactcgactattccagagaatgctacctcttcagggcgttttaagcttgatattctaaaaaacaaggcaaagaggtctctcacctcctctcttgagaatatattctcgcggggagctaaccgcatgagaggacgcctggggagcgtcgacagctttgaaaggtctaatagtcttgcgagcgagaaagactattctccaggcgactcaccccctggaacaccccctgcctcccccccaagctctgcctggcaaactttccctgaagaggacagcgattcaccacagttccgcagacgcgcacataccttcagccacccaccctcatcaacgaagaggaaactgaaccttcaggatgggagagcccagggggtccggtctcccttgctccggcagagctcttcagagcaatgttccaatttgtcgagtgtgagacggatgtacaaagagtctaacagctcatcaagcttgccctcactacatacaagcttttccgctcctagttttacagccccatctttcttgaagagcttttaccagaactccggacgcctttccccacaatacgagaatgagatcagcgatggcgaaggacggaagcggacatcctctacctgttccaacgagtcgctttccgtggggggaacatcagtcacgccacgcagaatatcttggagacagcgcattttccttcgagtggcctctcctatgaataagtctccctccgccatgcagcaacaagacgggctcgatcgaaatgaactgctgccactaagcccactgtcgccaaccatggaagaagagcccctagtagtcttcttgtcaggggaagatgatcccgaaaaaatcgaggaaagaaaaaagtctaaggagctgcgcagcttgtggcgtaaagctatccatcagcagatcctcttgctgcggatggagaaagagaatcagaagcttgaagccagccgcgatgaactgcaaagcagaaaagtaaaactagattatgaggaagtaggcgcttgtcagaaagaggtactcatcacttgggacaagaaactgctcaattgccgggcaaagatcaggtgcgacatggaagacatacataccctgctgaaagagggcgtaccaaagtcacggcgaggcgaaatctggcagttcttagctctgcagtaccgcttaagacacagacttcccaacaaacaacaaccccctgatatcagttacaaggagctgctgaagcaattaacagctcagcagcatgccatcctggtggatctcggcagaaccttcccgactcacccctacttttccgtgcagctcgggcctgggcagctatccctgtttaacctgctaaaggcttactctctgttggataaagaagttgggtattgtcagggcattagtttcgttgcaggggtgctactcctgcatatgtcagaagagcaagcattcgaaatgctgaagtttcttatgtatgacctcggcttccggaagcaatacagaccagacatgatgtctctgcagatacagatgtaccagctttcgaggcttcttcacgattaccaccgagacctgtacaaccatctggaggagaatgaaattagtccttccctctacgcagccccatggttcctgaccctcttcgcctcgcagttctcgttgggctttgtggcccgtgtgttcgatatcatatttctacaggggacagaagtgatctttaaggtggcccttagtctgctctcttcacaggaaacacttatcatggaatgcgaatcctttgaaaatatcgtcgagttcctgaagaataccctgccagatatgaacacctctgagatggagaaaattatcactcaggtctttgaaatggacatctccaagcagcttcacgcctacgaggtagagtaccacgtcctgcaagacgagcttcaagagtccagctactcttgcgaggattctgaaaccctggaaaaattggagcgtgctaattcgcagctgaaacggcagaacatggatttgctcgaaaagctccaggtggctcacacgaaaatacaggctctcgagagtaacctggaaaacctcttgacacgggaaactaaaatgaaatcactaattagaacattggaacaggagaagatggcatatcagaaaacagtcgagcagctgaggaaattgcttcccgctgacgcccttgttaactgcgatctgctgctgagggacctgaattgcaacccaaacaacaaagctaagatcggaaacaaaccatag

SEQ ID NO: 105371 - DNA, 6339 bp, Artificial Sequence
  derived and/or modified sequence
gcggccgcggggaccctcggcgtggtcctctgaccctgcaaacccgcgacggaggaaggggaggtcctgcccgaggcgccagcccaaggaggaggatgcccatttaacccgccctcgcctgccgggcgcttgcctcggtgcccgccgccggagcctccgagccgcgcccgtggaagtgctgcatggggcagggctgctgaagcgcggagttcggggtcgcgccgctcccaggcaggcgcgggagcccggtgcggcagttggcacagtttcggcggcgccttctgcgcgggagtggggggcgcggtgcgcccggccggcctccgcggtgccctggtgaggcgagagttatggagccgcccagctgcattcaggatgagccgttcccgcaccccctggagcccgagccgggcgtctcagctcagcccggccccgggaagccaagcgataagcggttccggctgtggtacgttggggggtcgtgcctggaccacaggaccacgctgcctatgctgccctggctcatggccgagatccgcaggcgcagccagaagcccgaggcgggcggctgcggggcgccggcggcccgagaggtgatcctggtgctcagcgcgcccttcctgcgttgcgtccccgcgccgggcgctggggcctcggggggcactagtccgtcggccacgcagcccaacccggcggtattcatcttcgagcacaaggcgcagcatatctcgcgcttcatccacaacagccacgacctcacctactttgcctacctgatcaaggcgcagcccgacgaccccgagtcgcagatggcctgccacgttttccgcgccacagaccccagccaggttcctgatgttattagcagcataaggcaattatctaaagcggccatgaaagaggatgccaaacccagcaaagataatgaggacgccttttacaactctcagaagttcgaagtcctgtactgtggaaaggtgaccgtgacccacaagaaggccccctcaagcctcatcgatgactgcatggagaagttcagcctgcacgaacagcagcgcctgaagatccaaggggagcagcgcggtccggacccaggagaggacctggctgacttggaggtggtggtgcccgggtcccccggagactgcctgccggaggaggctgacggcaccgacacccaccttggcttacctgccggggccagccagcctgccctgaccagctctcgggtctgcttccctgagcggattttggaagattctggctttgatgagcagcaggagtttcggtctcggtgcagcagtgtcaccggcgtgcaacggagagttcacgagggcagccagaaatcccagccgcgacggagacacgcgagcgcacccagtcacgtccagccctcggactcggagaagaacaggaccatgctcttccaggttgggcgatttgagattaaccttatcagtccagacactaaatcagttgtgctagaaaagaattttaaagatatctcctcttgttctcagggtataaagcatgtggatcactttggctttatctgccgggagtctccagagcctggacttagccagtatatttgttatgtattccagtgtgccagcgaatctctggttgatgaggtaatgctgactctgaaacaggccttcagtacggcggctgccctgcagagtgccaagacgcagattaaactgtgtgaggcctgcccgatgcactctttgcataagctctgtgaaaggattgaaggtctctacccaccaagagccaagctggtgatacagaggcatctctcatcactgacagataatgagcaagctgacatctttgaaagagttcagaaaatgaagccagtcagtgaccaggaagaaaatgaacttgtgattttacacctgaggcagctgtgtgaagccaagcagaagacacacgtgcacatcggggaaggcccttctactatttcaaatagtacaatcccagaaaatgcaacaagcagtggaaggttcaaacttgacattctgaaaaataaagctaagagatccttaactagctccctggaaaatatcttctcaaggggagctaacagaatgagaggtcggcttggaagtgtggacagttttgaacggtccaacagtcttgcttcagagaaggactactcaccaggggattctccaccagggacaccgccagcgtccccaccgtcctcagcttggcaaacgtttcccgaagaggattccgactccccgcagtttcgaagacgggcacacacgttcagccacccaccttcaagcacaaagagaaagctgaatttgcaggatgggagggctcagggtgtgcgttcccctctgctgaggcagagctccagtgaacagtgcagcaatctttcgtcagttcgacgcatgtacaaggagagtaattcttcctccagtcttccaagtcttcacacttccttctctgccccttccttcactgccccctctttcctgaaaagcttttaccagaattcaggtagactgtccccacagtatgaaaatgaaatcagtgatggagaagggagaaaaaggacctcatctacctgcagcaatgagtccctaagtgtgggaggaacctctgtcactcctcgccggatctcctggcggcagcgcattttcctcagggttgcttctcccatgaacaaatctccctcagcaatgcaacagcaagatggattggacaggaacgagctgctgccactgtcccccctctctccaaccatggaggaggaaccgctggttgtattcctgtctggggaggatgacccagaaaagattgaagaaagaaagaaatcaaaagaactgaggagcttgtggagaaaagctatacaccaacaaatcttgttacttcgaatggaaaaagaaaaccagaaacttgaagcaagcagagatgaactccagtccagaaaagttaaattagactatgaagaagttggtgcatgtcagaaagaggtcttaataacttgggataagaagttgttaaactgcagagctaaaatcagatgtgatatggaagatattcatactcttcttaaagaaggagttcccaaaagtcgacgaggagaaatttggcagtttctggctttacagtaccgactcagacacagattgcctaataaacaacagcctcctgacatatcctataaggaacttttgaagcagctcactgctcagcagcatgcgattctcgtggatttaggaaggacgtttcctactcacccttacttttcagtacagcttgggccaggacagctgtcactgtttaacctcctgaaagcctattctttgctggacaaagaagtgggatactgtcaggggatcagctttgtggctggagtcctgcttctgcacatgagtgaagagcaagcctttgaaatgctgaaattcctcatgtatgacctcggcttccgcaagcagtacagacctgacatgatgtcgctgcagattcaaatgtaccagctgtccaggctccttcatgactatcacagagatctctacaatcaccttgaagaaaatgaaatcagccccagtctttatgctgccccctggttcctcacattgtttgcctctcagttttcattaggatttgtagccagagtttttgatattatttttcttcagggaactgaagttatattcaaggttgcactcagcctactgagcagccaagagacacttataatggaatgtgagagctttgaaaatattgttgagtttcttaaaaacacgctacctgatatgaatacctctgaaatggaaaaaattattacccaggtttttgagatggatatttctaagcagttgcatgcctatgaggtggaatatcatgtgctacaggatgagcttcaggaatcttcatattcctgtgaggatagtgaaactttggagaagctggagagggccaatagccaactgaaaagacaaaacatggacctcctagaaaaattacaggtagctcatactaaaatccaggccttggaatcaaacctggaaaatcttttgacgagagagaccaaaatgaagtctttaatccggaccctggaacaagaaaaaatggcttatcaaaagacagtggagcaactccggaagctgctgcccgcggatgctctagtcaattgtgacctgttgctgagagacctaaactgcaaccctaacaacaaagccaagataggaaataagccataattgaagaggcacggcctcagcagaaagtgctccttagaatactacagagaggaagagcctgcatgtcgctggcccaaggctggaccctgaagctgatggaaccacctaatactggtgctgagcgcctagtcacagcaggtggacctcgtgctcatcagagcatgccaatcctaagccattggacatatgtagactggtttttgttgttgctatgtacatataaatatatatataaaatgaacatagttcatgctttcagataaaatgagtagatgtatatttagattaatttttttagtcagaacttcatgaaatccacaccaaaggaaaggtaaactgaaatttcccttggacatatgtgaaatctttttgtctttatagtgaaacaaagccagagcatctttgtatattgcaatatacttgaaaaaaatgaatgtatttttttctccaaagaacagcatgtttcactcaatggtgaaaaggtggaaacatttatgtaactttatgtgtatctgtcttgatatctactgacattgtctatatgaggaaaatgattactggtcatgctcctgtgagttttttgggaaggtagggtcatttctccctgcctgctttgtgccaactagcatgttgcatctacatgcattatgagtctggttaggcattactttaaacatacataaagagacagtaggacattgtggctgagtctacccagctcaaggtaaaggagaatgttgctaattttttagcaaactagaccagcattattactcaaactaaaaatatcacacctgaaaaatttaatttaggacctaaaatgtctagattagctttctgctttttttatttgaataactcattcagttgtgaatgaattcctctttatttggtgccacagtcaccaaatgacaaggatttgccactttcccaccaaattgtgagtgcttgtaatttaggtctctctaccttaaattcagtataaggaaacgtaattatgattgattttttccaaagatgacaagctgtgttgaaatacattttttcttttgaccaattgacagaatctaataagctttaataatcttccccttttatgtgaaaagttttgagaactgtgaaatgtttaggaacaaactgttgaaatccattggaagggaaaaaagaaagtggtaccagtgttaccagctcaactaaaacctgcaattctgcatttcaactcttcacttcctcagcctacaaatagctcattagatgacattcacgcatgctgggtataggcaaggaaagtaattttcaaagtacatttgcagttctctttttcagagatgattctatgatagtgcctctgaaagttgatgcagcatttttgcctttccaaaaagtatttatcctcactgctttttgcagtacttgtattttcacagatggattatctggggtaattttcttcaaagggagtttgttatacacagtgaaaatgtattatagagtagaatagtaaagctctaggggtttcagaaagctttgatgaacagatgacaaacatctgaaaccccctccgcactgttacccagtgtgtatataatgacttgttatagctcagtgtgcccttgaatccatacagtttcttaaaagacaataaaatcttattaataaagttaatgtaacttctaagttctagaaaatgctgattctgtctgccccattcaattgggggctactaattgatttgttgcttggatttcctgagaatttctctatttgtaggaggggttttttctttttacggtctgttgatgacaattactttatgggtgtgatgcaccgatggtagccaaggaatctgttggggaagttcggaaagaaaccttttctttcttttattcagtttaaagtaaactttatcctggatgtttagaatcaacattaagagttatattatggtgttcagagattaagctgacttggatacaatattttcttttgaaaatgaattttctttttcatttgtgatttttaaaaaatgttgcaccagttatgcttcatgcatcgttacatcttcatcaggttaatgtaatgtctagttcctttgcaataaatatattgctgcagcttt

SEQ ID NO: 105372 - protein, 1235 aa, Artificial Sequence
  derived and/or modified sequence
MEPPSCIQDEPFPHPLEPEPGVSAQPGPGKPSDKRFRLWYVGGSCLDHRTTLPMLPWLMAEIRRRSQKPEAGGCGAPAAREVILVLSAPFLRCVPAPGAGASGGTSPSATQPNPAVFIFEHKAQHISRFIHNSHDLTYFAYLIKAQPDDPESQMACHVFRATDPSQVPDVISSIRQLSKAAMKEDAKPSKDNEDAFYNSQKFEVLYCGKVTVTHKKAPSSLIDDCMEKFSLHEQQRLKIQGEQRGPDPGEDLADLEVVVPGSPGDCLPEEADGTDTHLGLPAGASQPALTSSRVCFPERILEDSGFDEQQEFRSRCSSVTGVQRRVHEGSQKSQPRRRHASAPSHVQPSDSEKNRTMLFQVGRFEINLISPDTKSVVLEKNFKDISSCSQGIKHVDHFGFICRESPEPGLSQYICYVFQCASESLVDEVMLTLKQAFSTAAALQSAKTQIKLCEACPMHSLHKLCERIEGLYPPRAKLVIQRHLSSLTDNEQADIFERVQKMKPVSDQEENELVILHLRQLCEAKQKTHVHIGEGPSTISNSTIPENATSSGRFKLDILKNKAKRSLTSSLENIFSRGANRMRGRLGSVDSFERSNSLASEKDYSPGDSPPGTPPASPPSSAWQTFPEEDSDSPQFRRRAHTFSHPPSSTKRKLNLQDGRAQGVRSPLLRQSSSEQCSDGEGRKRTSSTCSNESLSVGGTSVTPRRISWRQRIFLRVASPMNKSPSAMQQQDGLDRNELLPLSPLSPTMEEEPLVVFLSGEDDPEKIEERKKSKELRSLWRKAIHQQILLLRMEKENQKLEASRDELQSRKVKLDYEEVGACQKEVLITWDKKLLNCRAKIRCDMEDIHTLLKEGVPKSRRGEIWQFLALQYRLRHRLPNKQQPPDISYKELLKQLTAQQHAILVDLGRTFPTHPYFSVQLGPGQLSLFNLLKAYSLLDKEVGYCQGISFVAGVLLLHMSEEQAFEMLKFLMYDLGFRKQYRPDMMSLQIQMYQLSRLLHDYHRDLYNHLEENEISPSLYAAPWFLTLFASQFSLGFVARVFDIIFLQGTEVIFKVALSLLSSQETLIMECESFENIVEFLKNTLPDMNTSEMEKIITQVFEMDISKQLHAYEVEYHVLQDELQESSYSCEDSETLEKLERANSQLKRQNMDLLEKLQVAHTKIQALESNLENLLTRETKMKSLIRTLEQEKMAYQKTVEQLRKLLPADALVNCDLLLRDLNCNPNNKAKIGNKP

SEQ ID NO: 105373 - protein, 282 aa, Artificial Sequence
  derived and/or modified sequence
DNEQADIFERVQKMKPVSDQEENELVILHLRQLCEAKQKTHVHIGEGPSTISNSTIPENATSSGRFKLDILKNKAKRSLTSSLENIFSRGANRMRGRLGSVDSFERSNSLASEKDYSPGDSPPGTPPASPPSSAWQTFPEEDSDSPQFRRRAHTFSHPPSSTKRKLNLQDGRAQGVRSPLLRQSSSEQCSDGEGRKRTSSTCSNESLSVGGTSVTPRRISWRQRIFLRVASPMNKSPSAMQQQDGLDRNELLPLSPLSPTMEEEPLVVFLSGEDDPEKIEER

SEQ ID NO: 105374 - DNA, 3708 bp, Artificial Sequence
  derived and/or modified sequence
atggagccccccagctgcatccaggacgagcccttcccccaccccctggagcccgagcccggcgtgagcgcccagcccggccccggcaagcccagcgacaagagattcagactgtggtacgtgggcggcagctgcctggaccacagaaccaccctgcccatgctgccctggctgatggccgagatcagaagaagaagccagaagcccgaggccggcggctgcggcgcccccgccgccagagaggtgatcctggtgctgagcgcccccttcctgagatgcgtgcccgcccccggcgccggcgccagcggcggcaccagccccagcgccacccagcccaaccccgccgtgttcatcttcgagcacaaggcccagcacatcagcagattcatccacaacagccacgacctgacctacttcgcctacctgatcaaggcccagcccgacgaccccgagagccagatggcctgccacgtgttcagagccaccgaccccagccaggtgcccgacgtgatcagcagcatcagacagctgagcaaggccgccatgaaggaggacgccaagcccagcaaggacaacgaggacgccttctacaacagccagaagttcgaggtgctgtactgcggcaaggtgaccgtgacccacaagaaggcccccagcagcctgatcgacgactgcatggagaagttcagcctgcacgagcagcagagactgaagatccagggcgagcagagaggccccgaccccggcgaggacctggccgacctggaggtggtggtgcccggcagccccggcgactgcctgcccgaggaggccgacggcaccgacacccacctgggcctgcccgccggcgccagccagcccgccctgaccagcagcagagtgtgcttccccgagagaatcctggaggacagcggcttcgacgagcagcaggagttcagaagcagatgcagcagcgtgaccggcgtgcagagaagagtgcacgagggcagccagaagagccagcccagaagaagacacgccagcgcccccagccacgtgcagcccagcgacagcgagaagaacagaaccatgctgttccaggtgggcagattcgagatcaacctgatcagccccgacaccaagagcgtggtgctggagaagaacttcaaggacatcagcagctgcagccagggcatcaagcacgtggaccacttcggcttcatctgcagagagagccccgagcccggcctgagccagtacatctgctacgtgttccagtgcgccagcgagagcctggtggacgaggtgatgctgaccctgaagcaggccttcagcaccgccgccgccctgcagagcgccaagacccagatcaagctgtgcgaggcctgccccatgcacagcctgcacaagctgtgcgagagaatcgagggcctgtacccccccagagccaagctggtgatccagagacacctgagcagcctgaccgacaacgagcaggccgacatcttcgagagagtgcagaagatgaagcccgtgagcgaccaggaggagaacgagctggtgatcctgcacctgagacagctgtgcgaggccaagcagaagacccacgtgcacatcggcgagggccccagcaccatcagcaacagcaccatccccgagaacgccaccagcagcggcagattcaagctggacatcctgaagaacaaggccaagagaagcctgaccagcagcctggagaacatcttcagcagaggcgccaacagaatgagaggcagactgggcagcgtggacagcttcgagagaagcaacagcctggccagcgagaaggactacagccccggcgacagcccccccggcaccccccccgccagcccccccagcagcgcctggcagaccttccccgaggaggacagcgacagcccccagttcagaagaagagcccacaccttcagccacccccccagcagcaccaagagaaagctgaacctgcaggacggcagagcccagggcgtgagaagccccctgctgagacagagcagcagcgagcagtgcagcgacggcgagggcagaaagagaaccagcagcacctgcagcaacgagagcctgagcgtgggcggcaccagcgtgacccccagaagaatcagctggagacagagaatcttcctgagagtggccagccccatgaacaagagccccagcgccatgcagcagcaggacggcctggacagaaacgagctgctgcccctgagccccctgagccccaccatggaggaggagcccctggtggtgttcctgagcggcgaggacgaccccgagaagatcgaggagagaaagaagagcaaggagctgagaagcctgtggagaaaggccatccaccagcagatcctgctgctgagaatggagaaggagaaccagaagctggaggccagcagagacgagctgcagagcagaaaggtgaagctggactacgaggaggtgggcgcctgccagaaggaggtgctgatcacctgggacaagaagctgctgaactgcagagccaagatcagatgcgacatggaggacatccacaccctgctgaaggagggcgtgcccaagagcagaagaggcgagatctggcagttcctggccctgcagtacagactgagacacagactgcccaacaagcagcagccccccgacatcagctacaaggagctgctgaagcagctgaccgcccagcagcacgccatcctggtggacctgggcagaaccttccccacccacccctacttcagcgtgcagctgggccccggccagctgagcctgttcaacctgctgaaggcctacagcctgctggacaaggaggtgggctactgccagggcatcagcttcgtggccggcgtgctgctgctgcacatgagcgaggagcaggccttcgagatgctgaagttcctgatgtacgacctgggcttcagaaagcagtacagacccgacatgatgagcctgcagatccagatgtaccagctgagcagactgctgcacgactaccacagagacctgtacaaccacctggaggagaacgagatcagccccagcctgtacgccgccccctggttcctgaccctgttcgccagccagttcagcctgggcttcgtggccagagtgttcgacatcatcttcctgcagggcaccgaggtgatcttcaaggtggccctgagcctgctgagcagccaggagaccctgatcatggagtgcgagagcttcgagaacatcgtggagttcctgaagaacaccctgcccgacatgaacaccagcgagatggagaagatcatcacccaggtgttcgagatggacatcagcaagcagctgcacgcctacgaggtggagtaccacgtgctgcaggacgagctgcaggagagcagctacagctgcgaggacagcgagaccctggagaagctggagagagccaacagccagctgaagagacagaacatggacctgctggagaagctgcaggtggcccacaccaagatccaggccctggagagcaacctggagaacctgctgaccagagagaccaagatgaagagcctgatcagaaccctggagcaggagaagatggcctaccagaagaccgtggagcagctgagaaagctgctgcccgccgacgccctggtgaactgcgacctgctgctgagagacctgaactgcaaccccaacaacaaggccaagatcggcaacaagccctag

SEQ ID NO: 105375 - DNA, 849 bp, Artificial Sequence
  derived and/or modified sequence
gacaacgagcaggccgacatcttcgagagagtgcagaagatgaagcccgtgagcgaccaggaggagaacgagctggtgatcctgcacctgagacagctgtgcgaggccaagcagaagacccacgtgcacatcggcgagggccccagcaccatcagcaacagcaccatccccgagaacgccaccagcagcggcagattcaagctggacatcctgaagaacaaggccaagagaagcctgaccagcagcctggagaacatcttcagcagaggcgccaacagaatgagaggcagactgggcagcgtggacagcttcgagagaagcaacagcctggccagcgagaaggactacagccccggcgacagcccccccggcaccccccccgccagcccccccagcagcgcctggcagaccttccccgaggaggacagcgacagcccccagttcagaagaagagcccacaccttcagccacccccccagcagcaccaagagaaagctgaacctgcaggacggcagagcccagggcgtgagaagccccctgctgagacagagcagcagcgagcagtgcagcgacggcgagggcagaaagagaaccagcagcacctgcagcaacgagagcctgagcgtgggcggcaccagcgtgacccccagaagaatcagctggagacagagaatcttcctgagagtggccagccccatgaacaagagccccagcgccatgcagcagcaggacggcctggacagaaacgagctgctgcccctgagccccctgagccccaccatggaggaggagcccctggtggtgttcctgagcggcgaggacgaccccgagaagatcgaggagagatag

SEQ ID NO: 105376 - DNA, 3708 bp, Artificial Sequence
  derived and/or modified sequence
atggagcctccctcatgcatccaagatgagcccttcccccacccgctggaacccgaacccggcgtgtcagcgcagccagggcccggcaaaccatccgacaaacgttttagattatggtatgtggggggttcatgtctggatcatagaactacgttgcccatgcttccatggctgatggctgagattcgccggcgtagccagaaaccagaagccggcggttgcggtgcaccagcagccagagaggtgatactggtactctccgccccttttcttcgttgtgttccagctcccggtgccggggccagtgggggaacatccccgagcgcgactcagcctaaccctgctgtattcatttttgaacacaaggcccagcacatttcccggttcatacataatagccatgatctgacttacttcgcttacttaataaaagctcagcccgatgaccccgagtcacagatggcctgtcacgtttttcgggcgaccgaccctagccaggtccctgatgtaatttcctctattcgccagctttcgaaagccgcaatgaaagaggacgctaaacccagtaaggacaatgaggacgctttctacaattcccagaagtttgaggtgttgtattgtggaaaggtcacagtcacccataaaaaagcaccatcatcattaatcgacgattgtatggagaaattcagccttcatgagcagcagagactgaagatccagggagagcaaaggggacccgaccccggcgaggacctggccgatctggaagtcgtcgtcccagggtctccaggggattgtctacccgaggaagccgacggcaccgacacacatctaggactgcctgccggagcttcacaacctgccttgactagttctagggtgtgttttccagagaggatcctggaagacagcggattcgatgagcaacaagagtttcgttcgagatgcagctcagtcactggcgtccagcggcgcgtacacgaaggatcacagaagagtcagccaagacggagacacgcaagcgcacccagtcacgtgcaaccctctgactctgagaagaatcgaaccatgttgtttcaggtcggccgctttgagattaatttgatatctcctgacactaaatcggtcgtgctggaaaagaactttaaagatatcagcagctgctctcagggaataaagcacgtcgaccatttcggcttcatttgtcgggagtctcccgaacccggcttgtctcaatacatctgttatgtgtttcaatgcgcctcagaaagtctagttgatgaggtaatgctgaccctaaaacaagcctttagcaccgccgcagctcttcaatctgccaaaacgcagattaaactctgtgaagcctgccccatgcacagcctgcacaagctgtgtgagcggatagaggggctctatccaccccgcgccaaattagtgatccagagacacctgagtagcttaaccgataacgagcaggccgacatcttcgagagagttcagaaaatgaagcccgtgtctgatcaggaggaaaacgagttggtcatcttgcacctgagacaattgtgtgaggccaaacagaagactcatgtgcacatcggcgaagggccctcaaccattagcaattccaccatccccgagaatgcaacgtcctccggacgttttaaattggatatcttaaaaaacaaggccaaaagatccctcacctcctcgctcgagaatatttttagccgcggagccaacaggatgcgtggacgcctcgggtctgttgatagtttcgaacgcagcaactctttggcatcagaaaaagattatagccctggggatagtcctcctggcacaccccccgcatcaccgcccagctccgcctggcagactttccctgaagaggattctgactccccccagtttagaagacgagcccatactttcagccatcccccttcgtctaccaaacgaaaactgaacctacaagatggccgggcccagggagtcagaagtccactgctgcgccaaagcagttccgaacagtgttcggatggggaggggcggaaacgaacaagttccacctgctccaacgaatcactctccgttggtggcaccagcgtgactcctcgccgaatctcttggaggcaacgcattttcctccgagtggcctcccctatgaacaaaagcccgtcagccatgcaacagcaggatggattggaccgcaacgagctgttacccttaagtcctcttagccctaccatggaagaggagccactggtggtctttctgagcggcgaggacgaccctgaaaaaatcgaagagagaaaaaagtcaaaggaactgcgttcactgtggcgcaaggcaattcatcagcagattctgctgctgaggatggagaaggaaaatcaaaaactcgaggcgtcccgggatgagctgcaatctcgaaaggtgaagttggactacgaggaggtaggggcatgccaaaaggaagtgctcatcacatgggataagaaactcctcaactgtcgggccaagatccgatgcgacatggaagatatccataccttgctgaaggagggcgtgcctaagtcacggaggggcgaaatctggcaatttctggccttgcagtaccggctaaggcatcggctcccaaacaaacagcagccacctgatattagctataaggaacttcttaagcagctcacagcacagcagcatgctatcttggtagatctgggtcgtactttccctacgcatccttacttctccgtgcagttgggaccaggccagctgtccctgtttaatctgctgaaggcctactccctcctcgataaagaggtggggtactgtcagggaatttcttttgtggctggggtgctgctgcttcacatgtccgaggagcaggcctttgaaatgctcaaattcctgatgtacgacctgggttttaggaagcagtacagacccgacatgatgtctctccagatccagatgtatcagctgtcccgactgttgcacgattatcacagagacctatacaatcatttggaagaaaatgagatcagtcctagcttgtacgcggccccgtggttcctgactctgttcgcaagccagtttagcttagggttcgtggctcgcgtgtttgatattatttttctgcagggcacagaagtaatcttcaaggttgcgctctctctgctaagctcccaggagactctgataatggagtgcgaaagctttgagaatatagtggagtttttgaaaaacaccctgcctgacatgaataccagtgagatggaaaaaatcattactcaggtttttgaaatggatataagtaaacagttgcacgcatacgaggttgagtaccacgtccttcaggacgagctgcaggaatcatcttattcctgtgaggatagcgagactctcgaaaaactggagcgggccaactctcaattgaaaaggcagaacatggatttgcttgaaaagctgcaagtcgcccataccaagatccaggccctcgaatccaacctggaaaatttgctgaccagagagacgaagatgaagtccctaattcggacgttggagcaagaaaaaatggcgtatcagaagacagtggagcagctcaggaagctcctcccagccgatgcacttgtgaattgtgatctactgctgcgagacctgaattgtaatcccaacaacaaagcaaaaattggtaacaagccatag

SEQ ID NO: 105377 - DNA, 849 bp, Artificial Sequence
  derived and/or modified sequence
gataatgaacaagccgatatcttcgaacgggtccagaaaatgaagcccgtgtccgatcaagaggaaaatgagctcgtgatcctccaccttaggcaactttgtgaggccaagcagaagacccatgtccatatcggtgaggggccctcgaccatttctaattccaccattcccgaaaacgcaacgtcttctggtaggtttaaactggacatcctaaaaaataaggctaaaaggagcctgacttcgagtttggagaacatttttagtagaggagctaataggatgcgaggccgtttggggagcgtggattcgttcgaacgcagtaacagcctggcctcagaaaaggactattcccctggggactcacctcctggaacccccccagcgtccccccctagctcagcttggcaaaccttccctgaggaagactccgactctccacagttcagaaggcgagcacataccttctcccatccccccagcagcaccaaacgtaagttgaacctgcaggatggtagagctcagggagtgcggtctccccttctccgtcagagttcatctgagcagtgttcggatggtgaggggaggaagcggacctctagtacatgctccaatgaaagtctcagtgtggggggcacatcagtaactccacgcagaatctcgtggcgtcagcgcattttcctacgggtagcgagccccatgaacaagtcaccttccgcaatgcagcagcaggatggactcgatcgtaacgagcttttacctctctccccattgtcccccaccatggaggaggaacctctggttgtcttcctgtcgggcgaggacgacccagaaaaaattgaggagcggtag

SEQ ID NO: 105378 - DNA, 3708 bp, Artificial Sequence
  derived and/or modified sequence
atggagccccccagctgcatccaggatgagcccttcccccaccccctggagcctgagcccggggtgtctgcccagcccggccctgggaagcccagcgacaagcgcttccggctgtggtacgtgggcggcagctgcctggaccacaggaccaccctgcccatgctgccctggctgatggccgagatcagaagaagaagccagaagccagaggccggcggctgtggggccccagctgcccgggaggtgatcctggtgctgagcgcccccttcctgcgctgtgtgcctgcccctggagctggggccagcggcggcaccagccccagcgccacccagcccaacccagctgtgttcatctttgagcacaaggcccagcacatcagccgcttcatccacaacagccatgacctgacctactttgcctacctgatcaaggcccagccagatgatcctgagagccagatggcctgccacgtgttccgggccacagaccccagccaggtgcctgatgtgatcagcagcatccggcagctgagcaaggccgccatgaaggaggatgccaagcccagcaaggacaatgaagatgccttctacaacagccagaagtttgaggtgctgtactgcggcaaggtgacagtgacccacaagaaggcccccagcagcctgattgatgactgcatggagaagttcagcctgcacgagcagcagaggctgaagatccagggcgagcagaggggccctgaccccggggaggacctggccgacctggaggtggtggtgcccggcagccctggggactgcctgcctgaggaggctgatggaacagacacccacctgggcctgcctgctggggccagccagcctgccctgaccagcagccgggtgtgcttccctgagcgcatcctggaggacagcggctttgatgagcagcaggagttccgcagccgctgcagctctgtgactggagtgcagaggagagtgcatgagggcagccagaagagccagcccaggagaagacatgccagcgcccccagccacgtgcagcccagcgacagcgagaagaacagaaccatgctgttccaggtgggccgctttgagatcaacctgatcagcccagacaccaagtctgtggtgctggagaagaacttcaaggacatcagcagctgcagccagggcatcaagcacgtggaccacttcggcttcatctgccgggagagccctgagcccggcctgagccagtacatctgctacgtgttccagtgtgccagcgagagcctggtggatgaggtgatgctgaccctgaagcaggccttcagcacagctgctgccctgcagagcgccaagacccagatcaagctgtgtgaggcctgccccatgcacagcctgcacaagctgtgtgagcgcatcgagggcctgtacccaccccgggccaagctggtgatccagaggcacctgagcagcctgacagacaatgagcaggccgacatctttgagcgggtgcagaagatgaagcctgtgtctgaccaggaggagaatgagctggtgatcctgcacctgcggcagctgtgtgaggccaagcagaagacccacgtgcacatcggggagggccccagcaccatcagcaacagcaccatcccagaaaatgccaccagcagcggccgcttcaagctggacatcctgaagaacaaggccaagaggagcctgaccagcagcctggagaacatcttcagcagaggagccaacaggatgaggggccgcctgggctctgtggacagctttgagaggagcaacagcctggccagcgagaaggactacagccctggggacagccccccaggcaccccaccagccagcccccccagcagcgcctggcagaccttcccagaagaagattctgacagcccccagttcagaagaagagcccacaccttcagccacccccccagcagcaccaagaggaagctgaacctgcaggacggccgggcccagggcgtgcgcagccccctgctgcggcagagcagcagcgagcagtgcagtgatggagagggcaggaagaggaccagcagcacctgcagcaatgaaagcctgtctgtgggcggcacctctgtgaccccccggcgcatctcctggaggcagaggatcttcctgcgggtggccagccccatgaacaagagccccagcgccatgcagcagcaggacggcctggacagaaatgagctgctgcccctgagccccctgagccccaccatggaggaggagcccctggtggtgttcctgtctggagaagatgatcctgagaagattgaggagaggaagaagagcaaggagctgcggagcctgtggaggaaggccatccaccagcagatcctgctgctgaggatggagaaggagaaccagaagctggaggccagcagagatgagctgcagagcaggaaggtgaagctggactatgaggaggtgggcgcctgccagaaggaggtgctgatcacctgggacaagaagctgctgaactgccgggccaagatccgctgtgacatggaggacatccacaccctgctgaaggagggcgtgcccaagagccggcggggggagatctggcagttcctggccctgcagtaccgcctgcggcaccggctgcccaacaagcagcagcccccagacatctcctacaaggagctgctgaagcagctgacagcccagcagcacgccatcctggtggacctgggccgcaccttccccacccacccctacttctctgtgcagctgggccctggccagctgagcctcttcaacctgctgaaggcctacagcctgctggacaaggaggtgggctactgccagggcatcagctttgtggccggcgtgctgctgctgcacatgtctgaggagcaggcctttgagatgctgaagttcctgatgtatgacctgggcttcaggaagcagtacagaccagacatgatgagcctgcagatccagatgtaccagctgagccggctgctgcatgactaccaccgggacctgtacaaccacctggaggagaatgagatcagccccagcctgtatgctgccccctggttcctgaccctgtttgccagccagttcagcctgggctttgtggcccgggtgtttgacatcatcttcctgcagggcacagaggtgatcttcaaggtggccctgagcctgctgagcagccaggagaccctcatcatggagtgtgagagctttgaaaatattgtggagttcctgaagaacaccctgcctgacatgaacaccagcgagatggagaagatcatcacccaggtgtttgagatggacatcagcaagcagctgcacgcctatgaggtggagtaccacgtgctgcaggatgagctgcaggagagcagctacagctgtgaagattctgagaccctggagaagctggagcgggccaacagccagctgaagaggcagaacatggacctgctggagaagctgcaggtggcccacaccaagatccaggccctggagagcaacctggagaacctgctgacccgggagaccaagatgaagagcctcatccgcaccctggagcaggagaagatggcctaccagaagacagtggagcagctgaggaagctgctgcctgcagatgccctggtgaactgtgacctgctgctgcgggacctgaactgcaaccccaacaacaaggccaagattggcaacaagccctag

SEQ ID NO: 105379 - DNA, 849 bp, Artificial Sequence
  derived and/or modified sequence
gacaatgagcaggccgacatctttgagcgggtgcagaagatgaagcctgtgtctgaccaggaggagaatgagctggtgatcctgcacctgcggcagctgtgtgaggccaagcagaagacccacgtgcacatcggggagggccccagcaccatcagcaacagcaccatcccagaaaatgccaccagcagcggccgcttcaagctggacatcctgaagaacaaggccaagaggagcctgaccagcagcctggagaacatcttcagcagaggagccaacaggatgaggggccgcctgggctctgtggacagctttgagaggagcaacagcctggccagcgagaaggactacagccctggggacagccccccaggcaccccaccagccagcccccccagcagcgcctggcagaccttcccagaagaagattctgacagcccccagttcagaagaagagcccacaccttcagccacccccccagcagcaccaagaggaagctgaacctgcaggacggccgggcccagggcgtgcgcagccccctgctgcggcagagcagcagcgagcagtgcagtgatggagagggcaggaagaggaccagcagcacctgcagcaatgaaagcctgtctgtgggcggcacctctgtgaccccccggcgcatctcctggaggcagaggatcttcctgcgggtggccagccccatgaacaagagccccagcgccatgcagcagcaggacggcctggacagaaatgagctgctgcccctgagccccctgagccccaccatggaggaggagcccctggtggtgttcctgtctggagaagatgatcctgagaagattgaggagaggtag

SEQ ID NO: 105380 - DNA, 3708 bp, Artificial Sequence
  derived and/or modified sequence
atggagccccccagctgcatccaggacgagcccttcccccaccccttggagccagaaccaggcgtatcagcccagcctggacccggcaaaccatcggataagcgctttcgattgtggtatgtcggcgggagttgtctagaccataggactacgctccccatgctgccatggctcatggcagagatccggcgtagatctcaaaagccagaggccggtggatgcggcgctccagccgctagagaggtcatcctggtactgtctgccccattccttagatgcgtgcccgctccaggtgcaggcgcatctggaggtacgtcaccatccgcgactcaacccaaccctgccgtgttcatattcgaacacaaagcccagcatatttccaggttcatacacaactctcacgatctgacctatttcgcgtatctcataaaggcccaaccagacgatccagaatcgcagatggcctgccacgtctttagagctactgatccaagtcaggtgcccgatgtaatcagtagcatcaggcagttaagtaaggccgctatgaaagaagacgccaaacccagcaaggataacgaggatgccttttacaattcccagaagtttgaggttttgtactgcggcaaggtaacagtaactcacaagaaagcgcctagttcactgatcgacgactgcatggagaaattttctctccatgagcagcaaaggctcaaaattcagggagaacagcggggacccgatcccggcgaggatctcgctgacctcgaagttgtcgtacccggctctcccggcgactgcctcccagaggaagcagatggtacggacactcatctgggactgcctgctggcgcatcccagccagccctcacctcatcaagagtatgtttcccagagcgaatcctcgaagatagtggattcgatgagcagcaggaattccgctcacgatgctcatctgtgacgggcgttcagaggcgagtgcacgagggcagtcagaaaagccagccacgccgtagacacgctagcgccccgtcccacgtacaaccaagcgactccgaaaagaatcgcacaatgctgtttcaggtcggaagattcgagattaatctgatttcccccgacactaagagcgtagtgttggagaagaacttcaaggacatctcctcttgcagccagggcattaagcacgtagaccattttggcttcatctgccgggaaagccctgaacccgggctcagccagtacatctgctacgtgttccagtgcgcctctgagtccctcgtggatgaggtgatgctgaccttgaagcaggccttttcaaccgccgcagccctgcaatccgcaaagacccaaatcaagctctgtgaggcctgcccgatgcactccctgcataagctgtgtgaaagaatcgaaggtctgtatcccccacgggccaaactggtaatacagcggcacctttcgtcactgaccgacaatgaacaagccgatatctttgagagagttcagaaaatgaagccagtctcagatcaggaggaaaatgaactcgttattctgcacctgaggcagctctgcgaggccaagcagaagacacacgtgcacattggcgaaggcccgtctactatctcaaactccaccataccagaaaacgctacgtccagcggtaggttcaagctggatattttaaaaaacaaggccaaacgttctctgacctcaagccttgaaaatattttcagccgaggcgccaaccgcatgcggggccggcttggcagcgtagactcgtttgagcggtccaactcactggccagcgaaaaagattactcccccggcgactctcccccgggcacaccacccgcatccccccccagtagcgcctggcaaaccttcccagaggaagatagtgattcgcctcagtttagaagaagagcccatactttttcccaccctccctcctccacaaaacgcaaacttaatctacaggacggcagggcccagggcgtcaggagtccgctcctgcgacagagtagcagcgagcagtgctctgacggcgaaggtcgcaagaggaccagctccacctgcagcaacgaatccctctcagtgggcgggacaagtgtgactcctcgcagaattagctggcggcaacgtatattcttgcgggttgcatctcctatgaacaagagtccatctgctatgcagcaacaggatggcctagataggaacgagcttcttccgctgtcacctttgagccccacgatggaagaagagccacttgttgtgtttctctccggcgaagatgacccagaaaagatcgaggagcgcaagaagtcaaaagaactgcgtagtctgtggcgtaaggccatacatcagcagatcctcctcctgagaatggaaaaggagaaccagaaattagaggcaagtcgcgatgaactgcaatcccgtaaagtgaaactcgattacgaagaagtgggggcttgccagaaggaggtgctgatcacctgggataaaaaactccttaattgtcgcgctaagattcgctgcgatatggaagacattcacacgctgctgaaggagggtgtccctaaaagcaggaggggcgagatttggcagtttttggccctgcagtaccgtctgcgccaccgactccctaataaacagcaacccccagatattagttacaaggagctcttgaagcagctgactgcccaacagcatgcaattcttgtggacctgggtagaacttttcctacacacccatattttagcgtgcagctgggcccgggtcagttgtccctctttaacttgctgaaggcctatagccttctggataaagaggttgggtactgccaaggcatttcgtttgttgccggggtcctccttctgcatatgtcggaggagcaggcttttgagatgctgaaatttttgatgtatgatctgggctttcgcaagcagtacaggcctgacatgatgtcactccagatacagatgtaccagttgtctcgattattgcacgactaccacagagatctttataaccatctagaagagaacgagatctccccgagcctatacgctgcgccatggttcctaacccttttcgcgtctcaattctcgctgggctttgtggctcgagtcttcgatatcatctttctccaaggaacagaggtgatatttaaagtggccctgtcactgctttctagccaggaaaccctcatcatggagtgtgaatccttcgaaaacattgtggagttcttaaagaatacactgcctgatatgaacaccagcgaaatggaaaagatcatcacacaggttttcgaaatggatatcagcaaacagctgcacgcttatgaggtcgagtatcatgtgttgcaggatgagctgcaggagtccagttattcttgtgaggactccgagacattggagaaactcgagcgggccaactcccagctaaagcggcagaacatggacctgctcgaaaagttgcaggtggcacatactaagatccaggctttagaaagtaatctcgagaatttactgacccgagaaaccaagatgaaatcactgattcgcaccttggagcaggagaaaatggcctaccagaaaactgtcgagcagctcagaaagctcctccccgcagacgcgctggtgaactgtgatctcttgctgcgagatctgaactgcaacccaaacaacaaggccaagatcggcaacaaaccttag

SEQ ID NO: 105381 - DNA, 849 bp, Artificial Sequence
  derived and/or modified sequence
gacaacgagcaggccgacatcttcgagcgggtgcagaagatgaagcccgtctctgatcaagaagaaaatgagcttgtgatcctacacctgcggcagctgtgcgaggctaagcagaagacacatgtgcatattggggaaggcccatccactatctcaaatagtaccatacctgaaaatgcgacctcctcaggacgctttaagctggatattttaaaaaataaggcgaagcgttccctgacctcttcactggagaatatattcagtcggggggctaatcgtatgcggggtcgactgggtagcgtcgattcatttgaacgaagcaattcgctggcctctgaaaaggattactcacctggtgatagtccccccgggacacctcctgccagcccccctagcagcgcttggcagacctttcccgaagaagactctgatagtccgcagttcaggcgccgggcccatacgttctcccatccaccatcttctacaaagcggaagttgaaccttcaggacgggagagcgcagggagtgagatccccactgcttcgccagtcctcaagtgagcagtgctcagatggtgaaggcaggaagaggacttctagtacatgctccaacgagagcctttctgtgggtgggacctccgttacccccagacgtatatcatggcggcaacggattttcctgcgcgttgcaagtcccatgaacaagagcccttctgctatgcaacagcaggacggcctggaccgaaacgagcttctaccactgtcccccttgtccccgactatggaggaggagccactggtggtattcttgagtggcgaggatgaccccgagaaaattgaggagcgatag

SEQ ID NO: 105382 - DNA, 3708 bp, Artificial Sequence
  derived and/or modified sequence
atggaacctccgagctgtatccaggatgagcctttcccccacccgcttgaaccagaacccggagtgtctgctcaacccggtccaggtaagccttcagacaaacgctttaggctctggtatgtcggcggatcatgcctggatcatcggaccaccctccccatgttaccttggcttatggctgagatcagaaggcgttctcagaagcctgaggcaggcggatgtggcgcacctgctgcaagagaggtgattttggtgctgtcagcaccatttctgcgctgcgtgcctgctcctggggctggcgcatcagggggaacaagccccagcgctacacagccaaatcccgctgtgttcatctttgagcataaagcccaacacatctcacggttcatccacaattctcacgacttgacctattttgcatacctgattaaggcccagccggatgatcccgagagccagatggcctgccacgtgtttcgcgctaccgatcccagtcaggtccccgacgtgatttcatccattagacagctatcaaaagccgcaatgaaggaggacgcgaagccctctaaggacaacgaagacgccttttacaactcccagaagttcgaagtgctgtactgtggaaaagttaccgttacccataaaaaagccccatcgtctttgatagacgattgcatggagaagttctccctgcacgagcagcagagactcaaaatacaaggggagcagaggggccctgaccccggtgaggatctggcggatcttgaagtggttgtgccaggaagccccggtgattgtctccccgaggaggccgatggcactgacactcacctagggctgcccgcaggggcttcacagcctgctttgacgtcctcaagagtttgttttcctgagcgaatcctggaagacagcggcttcgacgagcagcaagagttccggagtagatgttctagtgttacaggggtccagaggagagtccacgaggggagccagaaatcacagcctaggagacgccacgcctcggcccctagtcatgtccagccgtcagactcagagaagaaccggacaatgttgttccaggtcggacgatttgagattaacctgatctctcccgatacaaagagtgtggttctcgagaaaaattttaaggacatttcctcctgctcacagggcattaaacacgttgaccacttcgggtttatttgccgggagagccctgagcctgggctgagtcagtacatttgttacgttttccagtgtgcgagcgaaagccttgttgacgaagtcatgctcactttaaagcaggctttctccacggcagctgctctgcagtccgccaaaacacagataaaactgtgcgaagcttgccctatgcactctctacacaagctgtgcgagagaattgaaggattgtatccaccacgcgctaaattggtcattcagcggcacctctcttccctcaccgacaacgagcaagcagatattttcgaacgtgttcagaaaatgaaacccgtgagtgaccaggaggaaaacgagctggtgatcttacacttaaggcagctctgcgaagctaagcaaaagacgcacgtacacattggcgaagggccaagcaccatctccaatagcactatccccgagaatgcgacctcatcgggcagattcaaactggacatcctcaagaataaggccaaacgctctctcacttcctccctggagaacatcttttcaagaggcgcaaataggatgagggggaggttagggagtgtcgactccttcgagcgttcgaacagtctcgctagcgagaaggactatagcccgggagactctccgccaggcaccccaccagcttcacccccatcatcagcatggcaaaccttccccgaggaagacagcgattccccacagtttagacggagagcccacaccttctcccatcccccatctagtaccaaaaggaaactcaacctacaagacgggcgagcccagggagtgcgctctccacttcttaggcagagttcctccgagcaatgctctgacggggaaggaagaaaacgaaccagcagtacttgttccaacgaaagtctttcagttggtgggacatccgtgacgccacgtcggatttcctggcggcagagaatctttctacgcgtggcgtcaccaatgaacaaaagtccctctgccatgcagcagcaagacggtctggacaggaatgaattgctcccactgtccccactctccccgaccatggaggaggaacctttggttgtgtttctgagtggcgaggatgatcccgaaaagatcgaagaacgaaagaagagtaaagagctccgctccctgtggcggaaggccattcaccagcagatcctcttgttgcgcatggagaaagagaaccaaaagctggaggccagccgcgacgagttgcagtcacggaaggtcaagctcgactacgaagaggtgggcgcttgccagaaggaggtcctcatcacatgggataaaaagctgctcaattgtagggccaaaatccgatgtgacatggaggatatccatacccttcttaaagaaggagttcccaaaagccgcagaggcgaaatttggcagttcctggctctgcaatatcgactaaggcatcgcctgccaaacaaacagcagcctccggacatatcttataaggaactcctaaagcagctgactgcgcagcagcatgccatcctcgtggatctgggcaggaccttccccactcatccttactttagcgtgcagctagggcctggccaattgtctttattcaacctactcaaggcctattctctccttgacaaagaagttggatactgccaaggaatcagttttgtcgcaggcgtgcttctgctgcacatgtctgaggaacaggcctttgaaatgctcaagttccttatgtatgacctggggttcagaaaacagtataggccagacatgatgagcctccagattcaaatgtaccaactctccaggctgctgcacgactatcaccgcgacctgtacaatcacctggaggagaacgagattagtccatccctatatgctgccccatggtttctgaccttgtttgcatcccaattttcactcggatttgtggctcgtgttttcgatattatcttcctacagggtaccgaggttattttcaaagtggctctcagccttctcagcagtcaggagaccctgattatggaatgtgaatcctttgaaaacatagttgagtttctaaagaatactctccctgatatgaatacgtccgagatggagaaaatcatcacacaggtgttcgaaatggacatctcaaagcaattgcatgcatatgaggtggagtaccacgtgctgcaggatgaattgcaagagtctagctacagctgtgaagattccgagactctggagaagctggagagagccaattcccagctgaaaagacagaatatggatctgctagagaagctgcaagtcgcccacactaaaattcaggctctggaatcgaatctggagaatctgttaaccagggaaactaaaatgaaaagtttaatcagaaccctcgaacaggagaaaatggcctatcaaaaaactgtcgagcaactaagaaaactgctgcccgctgacgcactcgtgaattgtgatcttctcctgcgtgacctgaactgtaaccccaacaacaaggctaagattggcaacaaaccctag

SEQ ID NO: 105383 - DNA, 849 bp, Artificial Sequence
  derived and/or modified sequence
gacaacgagcaggcagatatattcgagcgggtccagaaaatgaagccagttagtgaccaagaggagaacgaactggtgatactacacctgcgccagttatgcgaggctaagcagaaaactcacgtccatataggcgaaggtccttctactataagcaactctactattcctgagaacgctaccagcagcggcaggttcaagctggatatcttaaagaataaggcgaagcgttctctaacatcctccttggaaaacatattttcccggggagccaaccgtatgcgcggaagactcgggtctgtcgatagcttcgaaagatccaacagcctcgccagtgaaaaagactattctcctggagatagcccgcctggtactccgccagcgtctcctccctcgtctgcctggcaaacctttcctgaggaagacagcgactcacctcaatttaggagaagagcccacacattttcccaccctccgtccagcaccaagcgtaagttaaaccttcaggatgggagagcccagggtgtccggagcccacttctacgccagtcatcatctgagcagtgtagcgacggggagggacggaaaaggacatcttcaacatgtagcaacgaaagccttagcgtcggcggaacatcagtgacgccaagaaggatctcgtggagacagcggatattcctgagagtggcctcaccgatgaacaaatccccttcggctatgcagcagcaggatggcctcgaccgcaatgaattactgcctctatctcctctctcacctacgatggaggaggagcccctggtcgtgttcctgtctggagaagacgaccccgaaaaaatcgaggagcgttag

SEQ ID NO: 105384 - DNA, 6174 bp, Artificial Sequence
  derived and/or modified sequence
gcggccgcggggaccctcggcgtggtcctctgaccctgcaaacccgcgacggaggaaggggaggtcctgcccgaggcgccagcccaaggaggaggatgcccatttaacccgccctcgcctgccgggcgcttgcctcggtgcccgccgccggagcctccgagccgcgcccgtggaagtgctgcatggggcagggctgctgaagcgcggagttcggggtcgcgccgctcccaggcaggcgcgggagcccggtgcggcagttggcacagtttcggcggcgccttctgcgcgggagtggggggcgcggtgcgcccggccggcctccgcggtgccctggtgaggcgagagttatggagccgcccagctgcattcaggatgagccgttcccgcaccccctggagcccgagccgggcgtctcagctcagcccggccccgggaagccaagcgataagcggttccggctgtggtacgttggggggtcgtgcctggaccacaggaccacgctgcctatgctgccctggctcatggccgagatccgcaggcgcagccagaagcccgaggcgggcggctgcggggcgccggcggcccgagaggtgatcctggtgctcagcgcgcccttcctgcgttgcgtccccgcgccgggcgctggggcctcggggggcactagtccgtcggccacgcagcccaacccggcggtattcatcttcgagcacaaggcgcagcatatctcgcgcttcatccacaacagccacgacctcacctactttgcctacctgatcaaggcgcagcccgacgaccccgagtcgcagatggcctgccacgttttccgcgccacagaccccagccaggttcctgatgttattagcagcataaggcaattatctaaagcggccatgaaagaggatgccaaacccagcaaagataatgaggacgccttttacaactctcagaagttcgaagtcctgtactgtggaaaggtgaccgtgacccacaagaaggccccctcaagcctcatcgatgactgcatggagaagttcagcctgcacgaacagcagcgcctgaagatccaaggggagcagcgcggtccggacccaggagaggacctggctgacttggaggtggtggtgcccgggtcccccggagactgcctgccggaggaggctgacggcaccgacacccaccttggcttacctgccggggccagccagcctgccctgaccagctctcgggtctgcttccctgagcggattttggaagattctggctttgatgagcagcaggagtttcggtctcggtgcagcagtgtcaccggcgtgcaacggagagttcacgagggcagccagaaatcccagccgcgacggagacacgcgagcgcacccagtcacgtccagccctcggactcggagaagaacaggaccatgctcttccaggttgggcgatttgagattaaccttatcagtccagacactaaatcagttgtgctagaaaagaattttaaagatatctcctcttgttctcagggtataaagcatgtggatcactttggctttatctgccgggagtctccagagcctggacttagccagtatatttgttatgtattccagtgtgccagcgaatctctggttgatgaggtaatgctgactctgaaacaggccttcagtacggcggctgccctgcagagtgccaagacgcagattaaactgtgtgaggcctgcccgatgcactctttgcataagctctgtgaaaggattgaaggtctctacccaccaagagccaagctggtgatacagaggcatctctcatcactgacagataatgagcaagctgacatctttgaaagagttcagaaaatgaagccagtcagtgaccaggaagaaaatgaacttgtgattttacacctgaggcagctgtgtgaagccaagcagaagacacacgtgcacatcggggaaggcccttctactatttcaaatagtacaatcccagaaaatgcaacaagcagtggaaggttcaaacttgacattctgaaaaataaagctaagagatccttaactagctccctggaaaatatcttctcaaggggagctaacagaatgagaggtcggcttggaagtgtggacagttttgaacggtccaacagtcttgcttcagagaaggactactcaccaggggattctccaccagggacaccgccagcgtccccaccgtcctcagcttggcaaacgtttcccgaagaggattccgactccccgcagtttcgaagacgggcacacacgttcagccacccaccttcaagcacaaagagaaagctgaatttgcaggatgggagggctcagggtgtgcgttcccctctgctgaggcagagctccagtgaacagtgcagtgatggagaagggagaaaaaggacctcatctacctgcagcaatgagtccctaagtgtgggaggaacctctgtcactcctcgccggatctcctggcggcagcgcattttcctcagggttgcttctcccatgaacaaatctccctcagcaatgcaacagcaagatggattggacaggaacgagctgctgccactgtcccccctctctccaaccatggaggaggaaccgctggttgtattcctgtctggggaggatgacccagaaaagattgaagaaagaaagaaatcaaaagaactgaggagcttgtggagaaaagctatacaccaacaaatcttgttacttcgaatggaaaaagaaaaccagaaacttgaagcaagcagagatgaactccagtccagaaaagttaaattagactatgaagaagttggtgcatgtcagaaagaggtcttaataacttgggataagaagttgttaaactgcagagctaaaatcagatgtgatatggaagatattcatactcttcttaaagaaggagttcccaaaagtcgacgaggagaaatttggcagtttctggctttacagtaccgactcagacacagattgcctaataaacaacagcctcctgacatatcctataaggaacttttgaagcagctcactgctcagcagcatgcgattctcgtggatttaggaaggacgtttcctactcacccttacttttcagtacagcttgggccaggacagctgtcactgtttaacctcctgaaagcctattctttgctggacaaagaagtgggatactgtcaggggatcagctttgtggctggagtcctgcttctgcacatgagtgaagagcaagcctttgaaatgctgaaattcctcatgtatgacctcggcttccgcaagcagtacagacctgacatgatgtcgctgcagattcaaatgtaccagctgtccaggctccttcatgactatcacagagatctctacaatcaccttgaagaaaatgaaatcagccccagtctttatgctgccccctggttcctcacattgtttgcctctcagttttcattaggatttgtagccagagtttttgatattatttttcttcagggaactgaagttatattcaaggttgcactcagcctactgagcagccaagagacacttataatggaatgtgagagctttgaaaatattgttgagtttcttaaaaacacgctacctgatatgaatacctctgaaatggaaaaaattattacccaggtttttgagatggatatttctaagcagttgcatgcctatgaggtggaatatcatgtgctacaggatgagcttcaggaatcttcatattcctgtgaggatagtgaaactttggagaagctggagagggccaatagccaactgaaaagacaaaacatggacctcctagaaaaattacaggtagctcatactaaaatccaggccttggaatcaaacctggaaaatcttttgacgagagagaccaaaatgaagtctttaatccggaccctggaacaagaaaaaatggcttatcaaaagacagtggagcaactccggaagctgctgcccgcggatgctctagtcaattgtgacctgttgctgagagacctaaactgcaaccctaacaacaaagccaagataggaaataagccataattgaagaggcacggcctcagcagaaagtgctccttagaatactacagagaggaagagcctgcatgtcgctggcccaaggctggaccctgaagctgatggaaccacctaatactggtgctgagcgcctagtcacagcaggtggacctcgtgctcatcagagcatgccaatcctaagccattggacatatgtagactggtttttgttgttgctatgtacatataaatatatatataaaatgaacatagttcatgctttcagataaaatgagtagatgtatatttagattaatttttttagtcagaacttcatgaaatccacaccaaaggaaaggtaaactgaaatttcccttggacatatgtgaaatctttttgtctttatagtgaaacaaagccagagcatctttgtatattgcaatatacttgaaaaaaatgaatgtatttttttctccaaagaacagcatgtttcactcaatggtgaaaaggtggaaacatttatgtaactttatgtgtatctgtcttgatatctactgacattgtctatatgaggaaaatgattactggtcatgctcctgtgagttttttgggaaggtagggtcatttctccctgcctgctttgtgccaactagcatgttgcatctacatgcattatgagtctggttaggcattactttaaacatacataaagagacagtaggacattgtggctgagtctacccagctcaaggtaaaggagaatgttgctaattttttagcaaactagaccagcattattactcaaactaaaaatatcacacctgaaaaatttaatttaggacctaaaatgtctagattagctttctgctttttttatttgaataactcattcagttgtgaatgaattcctctttatttggtgccacagtcaccaaatgacaaggatttgccactttcccaccaaattgtgagtgcttgtaatttaggtctctctaccttaaattcagtataaggaaacgtaattatgattgattttttccaaagatgacaagctgtgttgaaatacattttttcttttgaccaattgacagaatctaataagctttaataatcttccccttttatgtgaaaagttttgagaactgtgaaatgtttaggaacaaactgttgaaatccattggaagggaaaaaagaaagtggtaccagtgttaccagctcaactaaaacctgcaattctgcatttcaactcttcacttcctcagcctacaaatagctcattagatgacattcacgcatgctgggtataggcaaggaaagtaattttcaaagtacatttgcagttctctttttcagagatgattctatgatagtgcctctgaaagttgatgcagcatttttgcctttccaaaaagtatttatcctcactgctttttgcagtacttgtattttcacagatggattatctggggtaattttcttcaaagggagtttgttatacacagtgaaaatgtattatagagtagaatagtaaagctctaggggtttcagaaagctttgatgaacagatgacaaacatctgaaaccccctccgcactgttacccagtgtgtatataatgacttgttatagctcagtgtgcccttgaatccatacagtttcttaaaagacaataaaatcttattaataaagttaatgtaacttctaagttctagaaaatgctgattctgtctgccccattcaattgggggctactaattgatttgttgcttggatttcctgagaatttctctatttgtaggaggggttttttctttttacggtctgttgatgacaattactttatgggtgtgatgcaccgatggtagccaaggaatctgttggggaagttcggaaagaaaccttttctttcttttattcagtttaaagtaaactttatcctggatgtttagaatcaacattaagagttatattatggtgttcagagattaagctgacttggatacaatattttcttttgaaaatgaattttctttttcatttgtgatttttaaaaaatgttgcaccagttatgcttcatgcatcgttacatcttcatcaggttaatgtaatgtctagttcctttgcaataaatatattgctgcagcttt

SEQ ID NO: 105385 - DNA, 847 bp, Artificial Sequence
  derived and/or modified sequence
gataatgagcaagctgacatctttgaaagagttcagaaaatgaagccagtcagtgaccaggaagaaaatgaacttgtgattttacacctgaggcagctgtgtgaagccaagcagaagacacacgtgcacatcggggaaggcccttctactatttcaaatagtacaatcccagaaaatgcaacaagcagtggaaggttcaaacttgacattctgaaaaataaagctaagagatccttaactagctccctggaaaatatcttctcaaggggagctaacagaatgagaggtcggcttggaagtgtggacagttttgaacggtccaacagtcttgcttcagagaaggactactcaccaggggattctccaccagggacaccgccagcgtccccaccgtcctcagcttggcaaacgtttcccgaagaggattccgactccccgcagtttcgaagacgggcacacacgttcagccacccaccttcaagcacaaagagaaagctgaatttgcaggatgggagggctcagggtgtgcgttcccctctgctgaggcagagctccagtgaacagtgcagtgatggagaagggagaaaaaggacctcatctacctgcagcaatgagtccctaagtgtgggaggaacctctgtcactcctcgccggatctcctggcggcagcgcattttcctcagggttgcttctcccatgaacaaatctccctcagcaatgcaacagcaagatggattggacaggaacgagctgctgccactgtcccccctctctccaaccatggaggaggaaccgctggttgtattcctgtctggggaggatgacccagaaaagattgaagaaagaa

SEQ ID NO: 105386 - protein, 809 aa, Artificial Sequence
  derived and/or modified sequence
MIPFLPMFSLLLLLIVNPINANNHYDKILAHSRIRGRDQGPNVCALQQILGTKKKYFSTCKNWYKKSICGQKTTVLYECCPGYMRMEGMKGCPAVLPIDHVYGTLGIVGATTTQRYSDASKLREEIEGKGSFTYFAPSNEAWDNLDSDIRRGLESNVNVELLNALHSHMINKRMLTKDLKNGMIIPSMYNNLGLFINHYPNGVVTVNCARIIHGNQIATNGVVHVIDRVLTQIGTSIQDFIEAEDDLSSFRAAAITSDILEALGRDGHFTLFAPTNEAFEKLPRGVLERIMGDKVASEALMKYHILNTLQCSESIMGGAVFETLEGNTIEIGCDGDSITVNGIKMVNKKDIVTNNGVIHLIDQVLIPDSAKQVIELAGKQQTTFTDLVAQLGLASALRPDGEYTLLAPVNNAFSDDTLSMDQRLLKLILQNHILKVKVGLNELYNGQILETIGGKQLRVFVYRTAVCIENSCMEKGSKQGRNGAIHIFREIIKPAEKSLHEKLKQDKRFSTFLSLLEAADLKELLTQPGDWTLFVPTNDAFKGMTSEEKEILIRDKNALQNIILYHLTPGVFIGKGFEPGVTNILKTTQGSKIFLKEVNDTLLVNELKSKESDIMTTNGVIHVVDKLLYPADTPVGNDQLLEILNKLIKYIQIKFVRGSTFKEIPVTVYRPTLTKVKIEGEPEFRLIKEGETITEVIHGEPIIKKYTKIIDGVPVEITEKETREERIITGPEIKYTRISTGGGETEETLKKLLQEEVTKVTKFIEGGDGHLFEDEEIKRLLQGDTPVRKLQANKKVQGSRRRLREGRSQ

SEQ ID NO: 105387 - DNA, 2430 bp, Artificial Sequence
  derived and/or modified sequence
atgattccatttctgcctatgtttagtctgctactgcttctcatcgttaatcctattaatgccaataatcactacgataagatccttgctcattctaggatacggggcagggatcaggggcccaacgtatgcgcactgcaacaaatactcggcacgaaaaagaaatatttctcaacatgtaaaaattggtacaaaaagtcaatatgtgggcagaagaccacagtcctgtacgaatgctgtcctggctatatgcgcatggagggcatgaaagggtgtccagccgtcctccctattgaccatgtctacggcacgttaggaatcgtcggcgctacaactactcagcggtattctgacgcctccaagctgcgggaagagattgaggggaagggctcttttacatacttcgccccgtcaaacgaggcctgggacaacctggactccgatatccgccggggtttagaaagcaacgtcaatgtggagctactaaacgcattacactcacatatgattaataaacggatgctgacaaaagatttgaagaacgggatgatcattccgagcatgtacaataaccttggcttgttcatcaatcactatcccaatggcgtcgtcacagtcaactgcgcacgtattatccacggaaaccaaattgccactaatggcgtggtgcacgtcatcgacagggtcctgacacagatcggcaccagcattcaagactttattgaggcggaggatgatttaagttcgttccgggccgctgctatcacaagtgacattctggaagcattgggaagagacggacactttacactgttcgcacccacgaatgaggcgttcgaaaagctgcccagaggcgttttggagcgcattatgggggataaggtggcctccgaagctcttatgaaataccatatcctaaacactttacagtgcagcgagagcattatggggggggctgtctttgagacgttggagggcaacactattgagattgggtgtgacggggactccattacagtcaatggcattaaaatggtcaataagaaagatatagtgactaataacggcgttatccacctcatcgatcaggtgctgatcccagattcagctaagcaggtcattgaattagcggggaagcagcagacaactttcactgacctggtggctcagctggggctcgccagcgcactgagaccagacggggagtacactctgctcgcccccgtgaacaacgctttctctgatgataccctgtctatggatcagcggctcctcaaactgatacttcagaaccacattttaaaggtcaaggtcggccttaatgagctgtataacggccaaatcctcgagaccatcggtggtaagcagctccgcgtcttcgtctatagaacagctgtctgtattgagaactcctgtatggagaagggaagtaagcaaggacgtaacggcgctatccatattttccgtgaaatcatcaagcctgctgaaaaatcactgcacgaaaagctgaaacaggacaaacggttctcaacattcctgagtctcctcgaagccgccgacctcaaagagctcttaacccagcccggagattggacacttttcgtcccaaccaacgacgcgtttaaggggatgacttctgaagagaaagagatcctgatccgggataagaatgctcttcagaacattatcctgtaccacctgacaccaggagtgttcattggcaaagggttcgaacctggggtgacaaacattttgaagacgacgcaggggagcaagattttcttaaaggaagtgaacgacacactgctggtcaacgaacttaaaagcaaggagtcggacataatgacgacaaacggcgtaatacacgtcgtggacaagctgctctatcccgccgacacacccgtagggaatgaccaattactagaaattctgaacaaacttataaaatatatccagatcaagtttgtgcgagggagcaccttcaaggaaatcccggtaaccgtgtaccgtccaacactgacaaaggttaagatcgagggagagcctgagtttagactgatcaaggaaggagagacaataactgaagtcattcacggagaaccaattatcaagaaatacactaagataattgacggagtgccggtggagatcaccgagaaggagacgagagaggaaaggatcatcacaggccctgagatcaaatacactaggatctccactgggggaggtgaaaccgaggagacgctgaaaaagttgctacaggaggaggtgacaaaagtcactaagttcattgaaggcggcgatgggcatctttttgaggatgaggagatcaagcgtctgctgcaaggggatactcctgtgaggaagctccaagccaacaaaaaggtgcaaggttcacgccgacgcttgcgcgaagggcgttcccagtag

SEQ ID NO: 105388 - DNA, 2430 bp, Artificial Sequence
  derived and/or modified sequence
atgatccccttcctgcccatgttcagcctgctgctgctgctgattgtgaaccccatcaatgccaacaaccactatgacaagatcctggcccacagccgcatccggggccgggaccagggccccaacgtgtgtgccctgcagcagatcctgggcaccaagaagaagtacttcagcacctgcaagaactggtacaagaagagcatctgtggccagaagaccaccgtgctgtatgagtgctgccccggctacatgaggatggagggcatgaagggctgcccagctgtgctgcccatcgaccacgtgtatggcaccctgggcatcgtgggcgccaccaccacccagcgctacagtgatgccagcaagctgcgggaggagattgagggcaagggcagcttcacctactttgcccccagcaatgaggcctgggacaacctggacagcgacatccggcggggcctggagagcaatgtgaatgtggagctgctgaatgccctgcacagccacatgatcaacaagaggatgctgaccaaggacctgaagaatggcatgatcatccccagcatgtacaacaacctgggcctcttcatcaaccactacccaaatggagtggtgacagtgaactgtgcccgcatcatccacggcaaccagatcgccaccaacggggtggtgcacgtgattgacagagtgctgacccagatcggcaccagcatccaggacttcattgaagcagaagatgacctgagcagcttccgggctgctgccatcaccagtgacatcctggaggccctgggcagagatggccacttcaccctgtttgcccccaccaatgaggcctttgagaagctgccccggggcgtgctggagcgcatcatgggagacaaggtggccagcgaggccctgatgaagtaccacatcctgaacaccctgcagtgcagcgagagcatcatgggcggcgctgtgtttgagaccctggagggcaacaccattgaaattggctgtgatggagacagcatcaccgtgaatggcatcaagatggtgaacaagaaggacatcgtgaccaacaatggagtcatccacctgattgaccaggtgctgatcccagattctgccaagcaggtgattgagctggccggcaagcagcagaccaccttcacagacctggtggcccagctgggcctggccagcgccctgcggccagatggagagtacaccctgctggcccctgtgaacaatgccttcagtgatgacaccctgtccatggaccagaggctgctgaagctgatcctgcagaaccacatcctgaaggtgaaggtgggcctgaatgagctgtacaacggccagatcctggagaccatcggcggcaagcagctgcgggtgtttgtgtacagaacagctgtgtgcatcgagaacagctgcatggagaagggcagcaagcagggcagaaatggagccatccacatcttccgggagatcatcaagccagctgagaagagcctgcacgagaagctgaagcaggacaagcgcttcagcaccttcctgagcctgctggaggccgctgacctgaaggagctgctgacccagcccggggactggaccctgtttgtgcccaccaatgatgccttcaagggcatgaccagcgaggagaaggagatcctgatccgggacaagaatgccctgcagaacatcatcctgtaccacctgaccccaggagtcttcatcggcaaaggatttgagcccggggtgaccaacatcctgaagaccacccagggcagcaagatcttcctgaaggaggtgaatgacaccctgctggtgaatgagctgaagagcaaggagagtgacatcatgaccaccaacggggtcatccacgtggtggacaagctgctgtacccagctgacacccctgtgggcaatgaccagctgctggagatcctgaacaagctgatcaagtacatccagatcaagtttgtgcggggcagcaccttcaaggagatccctgtgacagtgtaccggcccaccctgaccaaggtgaagattgaaggagagcctgagttccgcctcatcaaggagggggagaccatcacagaggtgatccacggggagcccatcatcaagaagtacaccaagatcattgatggagtgcctgtggagatcacagagaaggagacccgggaggagcgcatcatcactggacctgagatcaagtacacccgcatcagcactggaggaggagaaacagaggagaccctgaagaagctgctgcaggaggaggtgaccaaggtgaccaagttcatcgagggcggagatggccacctgtttgaagatgaggagatcaagaggctgctgcagggcgacacccctgtgaggaagctgcaggccaacaagaaggtgcagggcagcagaagaaggctgcgggagggccgcagccagtag

SEQ ID NO: 105389 - DNA, 2430 bp, Artificial Sequence
  derived and/or modified sequence
atgatccccttcctgcccatgttcagcctgctgctgctgctgatcgtgaacccaatcaacgccaataatcattatgacaagattcttgctcactctaggattagaggtcgcgaccagggtcctaatgtgtgtgccttacagcagatcttaggcacaaaaaaaaagtacttttccacatgtaagaattggtacaagaaatccatctgtggacagaagaccacggtactatatgagtgctgtcctggatatatgcgcatggagggcatgaaggggtgtcctgccgtactcccaatcgatcacgtctatggcactctgggaatagtaggtgctacgactacacagcgatactccgatgcttccaagctgagggaggagatagaggggaaaggctcatttacatacttcgcccctagcaacgaggcctgggacaatctggactcagatatccgacgggggcttgagtcgaatgttaacgtggaactattaaatgccctccacagccacatgattaacaagcgcatgctcacgaaggaccttaaaaacggtatgataattccgagtatgtataataacttgggcctctttattaatcattatcccaacggtgtggtgacggtcaactgtgcacgaatcattcacggcaaccagatcgctactaacggagtggtgcatgtgattgaccgtgttctgactcaaataggcacatccatccaggacttcattgaggctgaggacgatctgtcttctttcagagccgcagccattacttcagacatcctggaagctctgggacgagatggccactttacacttttcgcgccaacaaacgaagcattcgagaagctgcccaggggggttctcgaaagaatcatgggcgataaagtcgcttcagaggcgctgatgaaataccacatcctgaacacactgcaatgtagcgaaagcataatgggaggtgcggtctttgaaacactcgagggaaataccattgagatagggtgtgatggtgattccataacagtgaatggcattaaaatggtgaacaagaaagacattgtgactaacaacggggtgattcacttaattgatcaggttttgatccctgattctgctaaacaagttatagaactggctgggaaacagcaaactacctttaccgacctggtggctcaactcggcttagcgagcgcccttcggccagatggcgagtacactctcttagcgccagtgaataacgccttttcggacgacaccctgtcgatggaccagagactcctgaagctgatccttcaaaaccatatactaaaggtgaaggtagggctgaatgagctatataacggacagattttggagaccattggcgggaagcaactgcgagtgttcgtgtaccggaccgctgtctgcatcgagaattcctgcatggagaaggggtcaaagcagggaagaaacggagcaatacatatctttcgcgagattattaaacctgctgagaagtctctccacgagaaactcaaacaggacaagaggttttcaacattcctttcgttgttagaggctgccgatctgaaagagctgctgacccagcccggagattggactctgtttgtgcccacaaacgatgccttcaaaggcatgacatctgaagagaaggagatcctgatcagagacaagaatgcgcttcagaacataattctctatcatctgacccctggggtgtttatcggcaaagggtttgaaccaggggtgacaaatatactgaaaacaacccagggaagtaaaatctttctgaaagaagtaaatgatacgttactggtgaatgagcttaagtccaaggaatcagacattatgacgactaatggagtcattcacgttgtggataagcttctttaccccgccgatacgccagtagggaatgatcagctgctggagattttaaataaactgatcaaatacatacagataaaatttgttagagggtccacttttaaagagatacctgttaccgtgtataggccgaccctgacaaaggttaaaattgagggcgagcctgaatttagattgattaaagagggcgagacaatcaccgaggtgatccacggtgagcctattattaaaaagtacacaaagattattgacggagtcccagtggagattacagaaaaagaaacgcgggaggaacgcattatcacaggccccgagattaagtacacccgtatcagcacagggggtggcgaaacggaggagaccctgaagaagctgctgcaggaggaggtgaccaaggtcacgaagtttattgaggggggagacggacacctcttcgaggatgaggagattaagaggttactccagggggataccccagttaggaagctacaggcaaacaaaaaggtgcagggctctaggagacgattgcgggaaggcagaagtcagtag

SEQ ID NO: 105390 - DNA, 3196 bp, Artificial Sequence
  derived and/or modified sequence
ctaactgcaacggagagactcaagatgattccctttttacccatgttttctctactattgctgcttattgttaaccctataaacgccaacaatcattatgacaagatcttggctcatagtcgtatcaggggtcgggaccaaggcccaaatgtctgtgcccttcaacagattttgggcaccaaaaagaaatacttcagcacttgtaagaactggtataaaaagtccatctgtggacagaaaacgactgtgttatatgaatgttgccctggttatatgagaatggaaggaatgaaaggctgcccagcagttttgcccattgaccatgtttatggcactctgggcatcgtgggagccaccacaacgcagcgctattctgacgcctcaaaactgagggaggagatcgagggaaagggatccttcacttactttgcaccgagtaatgaggcttgggacaacttggattctgatatccgtagaggtttggagagcaacgtgaatgttgaattactgaatgctttacatagtcacatgattaataagagaatgttgaccaaggacttaaaaaatggcatgattattccttcaatgtataacaatttggggcttttcattaaccattatcctaatggggttgtcactgttaattgtgctcgaatcatccatgggaaccagattgcaacaaatggtgttgtccatgtcattgaccgtgtgcttacacaaattggtacctcaattcaagacttcattgaagcagaagatgacctttcatcttttagagcagctgccatcacatcggacatattggaggcccttggaagagacggtcacttcacactctttgctcccaccaatgaggcttttgagaaacttccacgaggtgtcctagaaaggatcatgggagacaaagtggcttccgaagctcttatgaagtaccacatcttaaatactctccagtgttctgagtctattatgggaggagcagtctttgagacgctggaaggaaatacaattgagataggatgtgacggtgacagtataacagtaaatggaatcaaaatggtgaacaaaaaggatattgtgacaaataatggtgtgatccatttgattgatcaggtcctaattcctgattctgccaaacaagttattgagctggctggaaaacagcaaaccaccttcacggatcttgtggcccaattaggcttggcatctgctctgaggccagatggagaatacactttgctggcacctgtgaataatgcattttctgatgatactctcagcatggatcagcgcctccttaaattaattctgcagaatcacatattgaaagtaaaagttggccttaatgagctttacaacgggcaaatactggaaaccatcggaggcaaacagctcagagtcttcgtatatcgtacagctgtctgcattgaaaattcatgcatggagaaagggagtaagcaagggagaaacggtgcgattcacatattccgcgagatcatcaagccagcagagaaatccctccatgaaaagttaaaacaagataagcgctttagcaccttcctcagcctacttgaagctgcagacttgaaagagctcctgacacaacctggagactggacattatttgtgccaaccaatgatgcttttaagggaatgactagtgaagaaaaagaaattctgatacgggacaaaaatgctcttcaaaacatcattctttatcacctgacaccaggagttttcattggaaaaggatttgaacctggtgttactaacattttaaagaccacacaaggaagcaaaatctttctgaaagaagtaaatgatacacttctggtgaatgaattgaaatcaaaagaatctgacatcatgacaacaaatggtgtaattcatgttgtagataaactcctctatccagcagacacacctgttggaaatgatcaactgctggaaatacttaataaattaatcaaatacatccaaattaagtttgttcgtggtagcaccttcaaagaaatccccgtgactgtctatagacccacactaacaaaagtcaaaattgaaggtgaacctgaattcagactgattaaagaaggtgaaacaataactgaagtgatccatggagagccaattattaaaaaatacaccaaaatcattgatggagtgcctgtggaaataactgaaaaagagacacgagaagaacgaatcattacaggtcctgaaataaaatacactaggatttctactggaggtggagaaacagaagaaactctgaagaaattgttacaagaagaggtcaccaaggtcaccaaattcattgaaggtggtgatggtcatttatttgaagatgaagaaattaaaagactgcttcagggagacacacccgtgaggaagttgcaagccaacaaaaaagttcaaggatctagaagacgattaagggaaggtcgttctcagtgaaaatccaaaaaccagaaaaaaatgtttatacaaccctaagtcaataacctgaccttagaaaattgtgagagccaagttgacttcaggaactgaaacatcagcacaaagaagcaatcatcaaataattctgaacacaaatttaatatttttttttctgaatgagaaacatgagggaaattgtggagttagcctcctgtggtaaaggaattgaagaaaatataacaccttacaccctttttcatcttgacattaaaagttctggctaactttggaatccattagagaaaaatccttgtcaccagattcattacaattcaaatcgaagagttgtgaactgttatcccattgaaaagaccgagccttgtatgtatgttatggatacataaaatgcacgcaagccattatctctccatgggaagctaagttataaaaataggtgcttggtgtacaaaactttttatatcaaaaggctttgcacatttctatatgagtgggtttactggtaaattatgttattttttacaactaattttgtactctcagaatgtttgtcatatgcttcttgcaatgcatattttttaatctcaaacgtttcaataaaaccatttttcagatataaagagaattacttcaaattgagtaattcagaaaaactcaagatttaagttaaaaagtggtttggacttgggaacaggactttatacctcttttactgtaacaagtactcattaaaggaaattga

SEQ ID NO: 105391 - DNA, 2430 bp, Artificial Sequence
  derived and/or modified sequence
atgatcccctttctacccatgttcagccttctattgctgctgatcgtgaatccgatcaatgccaataatcactatgataaaatcctcgcccattccagaattcgagggcgtgaccagggtcccaatgtgtgcgccctccagcagatcctaggaacaaagaagaaatacttctctacttgtaagaactggtataaaaagagcatctgcggccaaaagaccactgtcctatatgaatgctgccccggatatatgagaatggaggggatgaagggttgccctgccgttttacctatcgatcatgtgtacggcaccttaggcatcgtgggggctacaaccacccagagatattcagacgcatccaaactacgtgaggagatcgagggaaagggtagcttcacgtactttgcaccaagtaacgaggcttgggataatctggatagtgatattagacgcggactggaaagcaatgtaaatgtggagctactgaacgcactgcactctcacatgatcaacaagaggatgctgaccaaggacctcaagaatggcatgattataccctccatgtataacaacctggggctgttcataaatcactatccaaacggggttgtcaccgtgaactgtgcacgaattattcacggcaaccagatagccacgaatggggttgttcacgttattgatcgcgtgctgacacagatcggtacctctatccaggatttcattgaggccgaggacgatcttagcagcttcagggccgctgctataacatccgatatccttgaggccctagggagagacggtcatttcactcttttcgcaccaactaatgaggcctttgagaaattgccacggggagtgctggagaggataatgggtgacaaggttgcatcggaagctctcatgaaataccatattcttaatacccttcagtgtagcgagtccatcatgggtggcgctgtgtttgaaacccttgaggggaacactatcgaaatcggctgcgatggagactctattacagtgaatggaatcaaaatggtgaacaagaaggacatcgtcaccaacaacggcgtgatacaccttattgaccaagttttgattcccgactccgctaagcaggttatagaactggctggaaaacagcagaccactttcactgatctggttgctcaactggggttggcctcggccctcaggcccgatggtgagtacacactgctggcccctgtcaataacgctttctccgacgatacactgtccatggaccagaggctcttgaagttgatcttgcagaaccacatactaaaagtcaaggtgggcctgaacgaactgtacaatggccagattctggagacaatcggaggaaagcaactcagggtctttgtgtaccgcacagcagtctgtattgaaaacagctgtatggagaaagggagcaagcagggcaggaacggggcaattcatatcttccgcgaaatcataaagcctgcagagaagtctttacacgagaaactcaagcaggacaaaagattctctacatttctatcactcctagaagcagccgacctgaaggagcttttgactcaacctggagattggactttatttgtccctaccaatgacgcattcaaaggtatgacttccgaggaaaaggagatcctgataagggataagaatgcgctgcaaaacattatcctgtatcatctgaccccaggcgtctttattgggaaaggcttcgaacccggtgtcacaaatatcctcaaaactacccagggctcgaagatcttcctcaaagaagtcaacgacaccctgctcgtgaatgaactaaagtcaaaagagtccgacattatgacaacaaatggggtgatccacgtggtagacaagctcctgtacccggcagatactcccgtgggcaatgaccagctgctggagatcctgaacaagctcatcaaatacatccagattaagtttgtaagaggctcaacgttcaaagagatccccgtaactgtgtatcgccctacattaaccaaagtaaaaatagaaggagagccagaatttcgcttaataaaagagggcgagacaataactgaagtgatacacggagaacctatcatcaaaaagtacactaagatcattgatggtgtccctgttgagattaccgaaaaggaaacgcgtgaagagagaattataacagggccagagatcaagtacactcgtatcagtaccggagggggtgaaactgaagagacactaaaaaagctgctccaggaggaagtgacaaaagtgaccaagtttattgaaggcggagacgggcacctgttcgaagacgaagagatcaaacggctcctgcagggggacacccccgttagaaaactccaagctaacaagaaagtgcagggcagccgcaggcggttgcgggagggcagatcgcagtag

SEQ ID NO: 105392 - DNA, 2430 bp, Artificial Sequence
  derived and/or modified sequence
atgatccccttcctgcccatgttcagcctgctgctgctgctgatcgtgaaccccatcaacgccaacaaccactacgacaagatcctggcccacagcagaatcagaggcagagaccagggccccaacgtgtgcgccctgcagcagatcctgggcaccaagaagaagtacttcagcacctgcaagaactggtacaagaagagcatctgcggccagaagaccaccgtgctgtacgagtgctgccccggctacatgagaatggagggcatgaagggctgccccgccgtgctgcccatcgaccacgtgtacggcaccctgggcatcgtgggcgccaccaccacccagagatacagcgacgccagcaagctgagagaggagatcgagggcaagggcagcttcacctacttcgcccccagcaacgaggcctgggacaacctggacagcgacatcagaagaggcctggagagcaacgtgaacgtggagctgctgaacgccctgcacagccacatgatcaacaagagaatgctgaccaaggacctgaagaacggcatgatcatccccagcatgtacaacaacctgggcctgttcatcaaccactaccccaacggcgtggtgaccgtgaactgcgccagaatcatccacggcaaccagatcgccaccaacggcgtggtgcacgtgatcgacagagtgctgacccagatcggcaccagcatccaggacttcatcgaggccgaggacgacctgagcagcttcagagccgccgccatcaccagcgacatcctggaggccctgggcagagacggccacttcaccctgttcgcccccaccaacgaggccttcgagaagctgcccagaggcgtgctggagagaatcatgggcgacaaggtggccagcgaggccctgatgaagtaccacatcctgaacaccctgcagtgcagcgagagcatcatgggcggcgccgtgttcgagaccctggagggcaacaccatcgagatcggctgcgacggcgacagcatcaccgtgaacggcatcaagatggtgaacaagaaggacatcgtgaccaacaacggcgtgatccacctgatcgaccaggtgctgatccccgacagcgccaagcaggtgatcgagctggccggcaagcagcagaccaccttcaccgacctggtggcccagctgggcctggccagcgccctgagacccgacggcgagtacaccctgctggcccccgtgaacaacgccttcagcgacgacaccctgagcatggaccagagactgctgaagctgatcctgcagaaccacatcctgaaggtgaaggtgggcctgaacgagctgtacaacggccagatcctggagaccatcggcggcaagcagctgagagtgttcgtgtacagaaccgccgtgtgcatcgagaacagctgcatggagaagggcagcaagcagggcagaaacggcgccatccacatcttcagagagatcatcaagcccgccgagaagagcctgcacgagaagctgaagcaggacaagagattcagcaccttcctgagcctgctggaggccgccgacctgaaggagctgctgacccagcccggcgactggaccctgttcgtgcccaccaacgacgccttcaagggcatgaccagcgaggagaaggagatcctgatcagagacaagaacgccctgcagaacatcatcctgtaccacctgacccccggcgtgttcatcggcaagggcttcgagcccggcgtgaccaacatcctgaagaccacccagggcagcaagatcttcctgaaggaggtgaacgacaccctgctggtgaacgagctgaagagcaaggagagcgacatcatgaccaccaacggcgtgatccacgtggtggacaagctgctgtaccccgccgacacccccgtgggcaacgaccagctgctggagatcctgaacaagctgatcaagtacatccagatcaagttcgtgagaggcagcaccttcaaggagatccccgtgaccgtgtacagacccaccctgaccaaggtgaagatcgagggcgagcccgagttcagactgatcaaggagggcgagaccatcaccgaggtgatccacggcgagcccatcatcaagaagtacaccaagatcatcgacggcgtgcccgtggagatcaccgagaaggagaccagagaggagagaatcatcaccggccccgagatcaagtacaccagaatcagcaccggcggcggcgagaccgaggagaccctgaagaagctgctgcaggaggaggtgaccaaggtgaccaagttcatcgagggcggcgacggccacctgttcgaggacgaggagatcaagagactgctgcagggcgacacccccgtgagaaagctgcaggccaacaagaaggtgcagggcagcagaagaagactgagagagggcagaagccagtag

SEQ ID NO: 105393 - protein, 749 aa, Artificial Sequence
  derived and/or modified sequence
MIPFLPMFSLLLLLIVNPINANNHYDKILAHSRIRGRDQGPNVCALQQILGTKKKYFSTCKNWYKKSICGQKTTVLYECCPGYMRMEGMKGCPAVLPIDHVYGTLGIVGATTTQRYSDASKLREEIEGKGSFTYFAPSNEAWDNLDSDIRRGLESNVNVELLNALHSHMINKRMLTKDLKNGMIIPSMYNNLGLFINHYPNGVVTVNCARIIHGNQIATNGVVHVIDRVLTQIGTSIQDFIEAEDDLSSFRAAAITSDILEALGRDGHFTLFAPTNEAFEKLPRGVLERIMGDKVASEALMKYHILNTLQCSESIMGGAVFETLEGNTIEIGCDGDSITVNGIKMVNKKDIVTNNGVIHLIDQVLIPDSAKQVIELAGKQQTTFTDLVAQLGLASALRPDGEYTLLAPVNNAFSDDTLSMDQRLLKLILQNHILKVKVGLNELYNGQILETIGGKQLRVFVYRTAVCIENSCMEKGSKQGRNGAIHIFREIIKPAEKSLHEKLKQDKRFSTFLSLLEAADLKELLTQPGDWTLFVPTNDAFKGMTSEEKEILIRDKNALQNIILYHLTPGVFIGKGFEPGVTNILKTTQGSKIFLKEVNDTLLVNELKSKESDIMTTNGVIHVVDKLLYPADTPVGNDQLLEILNKLIKYIQIKFVRGSTFKEIPVTVYSPEIKYTRISTGGGETEETLKKLLQEEVTKVTKFIEGGDGHLFEDEEIKRLLQGDTPVRKLQANKKVQGSRRRLREGRSQ

SEQ ID NO: 105394 - DNA, 2250 bp, Artificial Sequence
  derived and/or modified sequence
atgataccatttttgcccatgttctccctgctgcttcttctcatcgtcaatccaatcaatgcaaataaccattatgataaaatcctggctcattcacgcataagaggcagagaccagggccctaatgtctgcgcactccagcagatactgggcacaaagaagaagtacttctccacctgcaaaaactggtacaagaagtctatatgcgggcaaaagacaaccgttttgtacgagtgctgtcccggatacatgcgcatggaggggatgaagggctgtcctgcagtgctacccattgaccatgtttacgggaccttggggattgtcggcgctacaacaacacagcgctactctgatgcttctaagcttagggaggaaatagaaggcaaaggaagttttacttacttcgccccatctaatgaagcctgggacaatttagactcagacatccgtagaggtctcgaatccaacgttaatgtggagttactaaacgcactgcattcccacatgatcaacaagcgaatgctcactaaagacctgaaaaatggaatgattatccccagcatgtataacaaccttgggctgtttattaaccattatcccaatggcgttgtgacagtcaactgtgctaggattatccatggcaaccagattgcaacaaacggtgtggtccacgtgatagacagggtcttgacacagatcggaacatctattcaggactttattgaggcggaggacgacttgtcgtcgtttagggcggccgcaataacttctgatattctagaggcgttgggccgggatggacacttcacactgttcgctcctactaatgaagcatttgaaaaacttccccggggcgttctggagaggatcatgggtgacaaagtagcctctgaggcactgatgaaataccacattctaaatacattgcagtgttctgagagcatcatgggcggggcagtctttgagacactcgagggaaacaccatagaaattggctgtgacggcgactccatcaccgtgaacggaatcaagatggtgaacaagaaagatatcgttactaacaacggtgtgatacacttaatcgatcaggtcctgattccagattcagcaaagcaagttatcgagcttgctgggaagcagcaaaccaccttcacggacctggttgcccagcttggactggctagcgctctgcggccagacggcgaatacaccctgctcgcacccgtaaataatgctttctcagatgatacattatctatggaccagaggcttctgaaacttattctgcagaaccacatcctcaaggtgaaggttggcctgaatgagttatataacggccagattttagagacgatcggaggaaaacagctccgcgttttcgtgtacagaacggcggtgtgtatcgagaactcttgcatggagaagggaagcaagcagggaagaaatggggctatccacatctttagggaaatcattaaacccgctgagaagtcgctccacgaaaaactgaaacaggacaagcggttctctacgtttttatcattgctcgaagccgcggatttgaaagaattactgacacagcctggtgactggaccctgttcgtgccgacaaatgatgccttcaagggaatgacaagcgaggaaaaagaaatcctgatccgggacaagaatgccctccagaacatcattctctaccacctcacacctggagtcttcataggaaagggatttgaacctggagtcacaaacatcctgaagaccacccaaggttccaagatcttcctgaaagaagtcaatgatactttactggttaatgagctcaaaagtaaagaaagtgatattatgaccacaaacggtgtgattcacgtggttgataaactgctgtacccggccgacactcccgtaggtaatgatcaactcctcgaaattcttaacaaattaatcaagtatattcagatcaaattcgtgaggggctcaacttttaaagaaatccctgtcactgtgtatagcccagagatcaaatacacccgcatttctacaggtgggggggaaaccgaagagactctcaaaaaattactccaagaagaagtgacgaaggtgaccaaatttatcgaggggggtgatggccacctgttcgaggatgaagagatcaaacggctgctgcagggggataccccagttaggaaactgcaggctaacaagaaagtgcaggggtctaggaggcgcctgagggagggcaggagccagtag

SEQ ID NO: 105395 - DNA, 2250 bp, Artificial Sequence
  derived and/or modified sequence
atgatccccttcctgcccatgttcagcctgctgctgctgctgattgtgaaccccatcaatgccaacaaccactatgacaagatcctggcccacagccgcatccggggccgggaccagggccccaacgtgtgtgccctgcagcagatcctgggcaccaagaagaagtacttcagcacctgcaagaactggtacaagaagagcatctgtggccagaagaccaccgtgctgtatgagtgctgccccggctacatgaggatggagggcatgaagggctgcccagctgtgctgcccatcgaccacgtgtatggcaccctgggcatcgtgggcgccaccaccacccagcgctacagtgatgccagcaagctgcgggaggagattgagggcaagggcagcttcacctactttgcccccagcaatgaggcctgggacaacctggacagcgacatccggcggggcctggagagcaatgtgaatgtggagctgctgaatgccctgcacagccacatgatcaacaagaggatgctgaccaaggacctgaagaatggcatgatcatccccagcatgtacaacaacctgggcctcttcatcaaccactacccaaatggagtggtgacagtgaactgtgcccgcatcatccacggcaaccagatcgccaccaacggggtggtgcacgtgattgacagagtgctgacccagatcggcaccagcatccaggacttcattgaagcagaagatgacctgagcagcttccgggctgctgccatcaccagtgacatcctggaggccctgggcagagatggccacttcaccctgtttgcccccaccaatgaggcctttgagaagctgccccggggcgtgctggagcgcatcatgggagacaaggtggccagcgaggccctgatgaagtaccacatcctgaacaccctgcagtgcagcgagagcatcatgggcggcgctgtgtttgagaccctggagggcaacaccattgaaattggctgtgatggagacagcatcaccgtgaatggcatcaagatggtgaacaagaaggacatcgtgaccaacaatggagtcatccacctgattgaccaggtgctgatcccagattctgccaagcaggtgattgagctggccggcaagcagcagaccaccttcacagacctggtggcccagctgggcctggccagcgccctgcggccagatggagagtacaccctgctggcccctgtgaacaatgccttcagtgatgacaccctgtccatggaccagaggctgctgaagctgatcctgcagaaccacatcctgaaggtgaaggtgggcctgaatgagctgtacaacggccagatcctggagaccatcggcggcaagcagctgcgggtgtttgtgtacagaacagctgtgtgcatcgagaacagctgcatggagaagggcagcaagcagggcagaaatggagccatccacatcttccgggagatcatcaagccagctgagaagagcctgcacgagaagctgaagcaggacaagcgcttcagcaccttcctgagcctgctggaggccgctgacctgaaggagctgctgacccagcccggggactggaccctgtttgtgcccaccaatgatgccttcaagggcatgaccagcgaggagaaggagatcctgatccgggacaagaatgccctgcagaacatcatcctgtaccacctgaccccaggagtcttcatcggcaaaggatttgagcccggggtgaccaacatcctgaagaccacccagggcagcaagatcttcctgaaggaggtgaatgacaccctgctggtgaatgagctgaagagcaaggagagtgacatcatgaccaccaacggggtcatccacgtggtggacaagctgctgtacccagctgacacccctgtgggcaatgaccagctgctggagatcctgaacaagctgatcaagtacatccagatcaagtttgtgcggggcagcaccttcaaggagatccctgtgacagtgtacagccctgagatcaagtacacccgcatcagcactggaggaggagaaacagaggagaccctgaagaagctgctgcaggaggaggtgaccaaggtgaccaagttcatcgagggcggagatggccacctgtttgaagatgaggagatcaagaggctgctgcagggcgacacccctgtgaggaagctgcaggccaacaagaaggtgcagggcagcagaagaaggctgcgggagggccgcagccagtag

SEQ ID NO: 105396 - DNA, 2250 bp, Artificial Sequence
  derived and/or modified sequence
atgatccccttcctgcccatgttcagcctgctgctgctgctgatcgtgaatcctatcaatgccaacaaccactatgacaaaatcttagcacatagccgcattcgtggaagagatcaaggtccaaacgtttgcgccttacagcaaattctcggcactaagaaaaaatacttctctacatgtaaaaattggtataagaagtccatatgtgggcaaaagactacagtgctgtacgaatgttgtcctggctatatgagaatggaaggcatgaaaggctgccctgccgtacttcctatcgatcacgtgtacggcaccctcggcattgtgggggccactacaactcagaggtattcggatgcgagtaagctgcgcgaggagatcgaaggtaagggctcttttacatactttgccccatccaacgaggcatgggacaacctggattccgatattcggagaggacttgagtctaatgtcaacgtagaattgctgaatgcactgcacagccacatgattaacaagaggatgttgacgaaagatctcaaaaatgggatgataattccaagcatgtataataatctggggttgtttataaatcactaccccaacggtgtggtgacagtgaattgcgcaaggatcatccacggcaaccagatcgccactaacggtgtggtgcacgtaattgaccgagttttgactcagataggcacctccatacaggattttatcgaagcagaagacgacctctcctcgtttcgggctgcagctatcaccagcgatatcttagaagctctggggcgagacggacatttcaccctgtttgccccgaccaacgaggccttcgagaagctgccaaggggagtcctggagaggattatgggcgacaaggtggcctcagaggcgctcatgaagtatcatatactcaacactcttcagtgcagtgagtccattatggggggagctgtcttcgagaccctggaaggaaatacaattgagataggatgcgatggagactcaatcacagtaaacggaatcaagatggtcaacaaaaaagatatagtcacaaataacggtgtaatccacctgatagaccaggtgcttattcctgatagtgcaaagcaggtaatcgaactagctggcaagcagcagactacatttacagatttggtagcccagctggggctggcgagcgctctgaggcctgatggcgagtatacgctgttggccccagtgaataatgctttttccgacgatactctgtcaatggatcagcggctgctaaagctgatccttcagaaccacattctgaaagtgaaagtggggctaaatgaattgtacaacggtcaaatactggaaacgattggcggtaagcagctccgggtctttgtttaccgtacagccgtttgtatcgaaaactcttgcatggaaaagggcagcaagcaaggacgaaacggtgccatccacatcttccgagagattatcaagcctgccgaaaagtcactacacgaaaagctcaaacaggacaagcgattttcaacatttttatccttgctggaggcagcagacctgaaagagctgcttacacaacctggcgactggacattgttcgtgcccaccaatgatgcctttaaagggatgacgagtgaggaaaaggagatactgattcgcgataaaaatgccttgcagaacataattctgtatcacctcacgcctggcgtctttatcgggaaagggtttgagcctggcgttaccaatattctgaaaaccacacaaggaagcaaaatctttctaaaggaggtcaacgacacgttactggtgaacgaactcaagtccaaggagtctgatatcatgacaactaacggggtgattcatgttgtggacaaacttctctaccccgctgacactccagtgggcaacgatcagctcctggagattctgaacaagctgataaaatacatccagatcaaattcgtgagggggagcacatttaaggagatacccgttaccgtctattcccccgagatcaaatatacgcggatctccactggaggaggtgagacggaggaaacgctcaaaaagcttttgcaggaggaggtcacaaaagtgaccaagttcattgagggcggtgatggacacctattcgaggatgaagagatcaagcggttgttgcagggggatacacccgttaggaagctgcaggccaataagaaagtccaggggagcaggcgccggcttcgggagggtagatctcagtag

SEQ ID NO: 105397 - DNA, 2250 bp, Artificial Sequence
  derived and/or modified sequence
atgattccctttttacccatgttttctctactattgctgcttattgttaaccctataaacgccaacaatcattatgacaagatcttggctcatagtcgtatcaggggtcgggaccaaggcccaaatgtctgtgcccttcaacagattttgggcaccaaaaagaaatacttcagcacttgtaagaactggtataaaaagtccatctgtggacagaaaacgactgtgttatatgaatgttgccctggttatatgagaatggaaggaatgaaaggctgcccagcagttttgcccattgaccatgtttatggcactctgggcatcgtgggagccaccacaacgcagcgctattctgacgcctcaaaactgagggaggagatcgagggaaagggatccttcacttactttgcaccgagtaatgaggcttgggacaacttggattctgatatccgtagaggtttggagagcaacgtgaatgttgaattactgaatgctttacatagtcacatgattaataagagaatgttgaccaaggacttaaaaaatggcatgattattccttcaatgtataacaatttggggcttttcattaaccattatcctaatggggttgtcactgttaattgtgctcgaatcatccatgggaaccagattgcaacaaatggtgttgtccatgtcattgaccgtgtgcttacacaaattggtacctcaattcaagacttcattgaagcagaagatgacctttcatcttttagagcagctgccatcacatcggacatattggaggcccttggaagagacggtcacttcacactctttgctcccaccaatgaggcttttgagaaacttccacgaggtgtcctagaaaggatcatgggagacaaagtggcttccgaagctcttatgaagtaccacatcttaaatactctccagtgttctgagtctattatgggaggagcagtctttgagacgctggaaggaaatacaattgagataggatgtgacggtgacagtataacagtaaatggaatcaaaatggtgaacaaaaaggatattgtgacaaataatggtgtgatccatttgattgatcaggtcctaattcctgattctgccaaacaagttattgagctggctggaaaacagcaaaccaccttcacggatcttgtggcccaattaggcttggcatctgctctgaggccagatggagaatacactttgctggcacctgtgaataatgcattttctgatgatactctcagcatggatcagcgcctccttaaattaattctgcagaatcacatattgaaagtaaaagttggccttaatgagctttacaacgggcaaatactggaaaccatcggaggcaaacagctcagagtcttcgtatatcgtacagctgtctgcattgaaaattcatgcatggagaaagggagtaagcaagggagaaacggtgcgattcacatattccgcgagatcatcaagccagcagagaaatccctccatgaaaagttaaaacaagataagcgctttagcaccttcctcagcctacttgaagctgcagacttgaaagagctcctgacacaacctggagactggacattatttgtgccaaccaatgatgcttttaagggaatgactagtgaagaaaaagaaattctgatacgggacaaaaatgctcttcaaaacatcattctttatcacctgacaccaggagttttcattggaaaaggatttgaacctggtgttactaacattttaaagaccacacaaggaagcaaaatctttctgaaagaagtaaatgatacacttctggtgaatgaattgaaatcaaaagaatctgacatcatgacaacaaatggtgtaattcatgttgtagataaactcctctatccagcagacacacctgttggaaatgatcaactgctggaaatacttaataaattaatcaaatacatccaaattaagtttgttcgtggtagcaccttcaaagaaatccccgtgactgtctatagtcctgaaataaaatacactaggatttctactggaggtggagaaacagaagaaactctgaagaaattgttacaagaagaggtcaccaaggtcaccaaattcattgaaggtggtgatggtcatttatttgaagatgaagaaattaaaagactgcttcagggagacacacccgtgaggaagttgcaagccaacaaaaaagttcaaggatctagaagacgattaagggaaggtcgttctcagtga

SEQ ID NO: 105398 - DNA, 2250 bp, Artificial Sequence
  derived and/or modified sequence
atgattccctttctccccatgttctcattgctgctgctccttatcgtgaacccaattaacgctaacaaccactacgataagatactcgctcatagtcgaatccgcggtagggaccagggtccaaatgtgtgcgcgctgcagcaaatcttgggcactaagaagaagtacttttccacttgtaaaaattggtataaaaagtcaatctgcggacagaaaaccaccgtcctgtacgaatgctgtcccggatacatgaggatggaagggatgaaggggtgccccgcagttttgccgattgatcatgtttacgggactctcggcattgtgggtgccacgacgacccagaggtacagcgatgcatccaagttgcgggaagagatagagggcaagggcagctttacctactttgcacccagtaatgaggcctgggataatctcgactctgatatcagacgagggctagaaagtaatgtaaatgttgaactactcaatgcactccacagccatatgatcaacaagaggatgctcactaaagatttaaaaaacggcatgatcatcccatctatgtataataatctcgggctgttcattaatcattaccctaacggggtagtaaccgtaaattgcgctcggataatacatggaaaccagatcgccaccaatggagtggtgcacgttatcgatagggtgctgacacagatcggtacttccattcaagacttcatcgaagccgaggatgatctttctagttttcgtgcggcagcaatcaccagtgacatattggaagcactgggccgtgatgggcactttaccctttttgctcctacgaacgaagctttcgaaaaactccccaggggcgtgttggaacggatcatgggagacaaagtcgcatccgaagcattgatgaagtaccacatccttaacacattgcaatgcagtgagagcataatgggtggagccgtatttgaaaccctcgagggaaatactatcgaaataggctgcgacggggacagcattactgtcaacggcataaagatggtgaacaagaaggatatagtcactaacaatggagtgatccatctaattgaccaggtgttgattcctgactccgccaaacaagtgattgaactcgcaggcaaacagcaaactacattcactgatctggtagctcaactcggcctcgcatcagctctgagacctgatggtgaatatacactactcgctccagtgaacaacgctttttccgatgatactcttagtatggatcagcgattactgaaactgattcttcaaaaccacatcctgaaagtgaaggtgggcctcaatgagttgtacaatggccagatcttagagaccattggtggaaagcaactacgtgtttttgtgtatcgaactgcagtgtgcattgaaaattcttgcatggaaaagggttctaaacagggccgtaacggggctatacatatctttcgggagataattaaacctgcagaaaagtcgctccacgagaaactcaagcaggataagcgattctccacttttttgtcattgttggaggctgcagatcttaaggagctgctcacacagccaggagactggacgcttttcgtccctacaaatgatgctttcaaggggatgacttcagaagagaaagagatcctcatccgagacaagaacgcactccaaaacattatattgtatcatctcacacctggcgtcttcattgggaaaggctttgaacctggggtaacaaatatactaaagacaactcaagggtccaagatcttcctcaaagaagtaaatgacactctgctggtgaatgagctcaagtcaaaagagtctgatatcatgactacgaatggggtcatccacgtggttgataagcttctatatcctgccgatacaccggtgggcaatgatcagttactcgaaattctgaacaagcttattaaatatattcagattaagtttgtaagagggagcacgttcaaagaaatccccgtgaccgtttatagccctgaaatcaaatacacccgtatctcgacagggggtggagaaaccgaggaaactctgaagaagctcctccaagaggaagtgacaaaggtaacgaaattcatcgagggaggcgatggccatctgttcgaggacgaagagataaaaaggctcctccagggcgacactcctgtgagaaagttgcaagcgaataaaaaggtacagggaagcaggcgcagactgcgagagggacgatcacaatag

SEQ ID NO: 105399 - DNA, 2250 bp, Artificial Sequence
  derived and/or modified sequence
atgatccccttcctgcccatgttcagcctgctgctgctgctgatcgtgaaccccatcaacgccaacaaccactacgacaagatcctggcccacagcagaatcagaggcagagaccagggccccaacgtgtgcgccctgcagcagatcctgggcaccaagaagaagtacttcagcacctgcaagaactggtacaagaagagcatctgcggccagaagaccaccgtgctgtacgagtgctgccccggctacatgagaatggagggcatgaagggctgccccgccgtgctgcccatcgaccacgtgtacggcaccctgggcatcgtgggcgccaccaccacccagagatacagcgacgccagcaagctgagagaggagatcgagggcaagggcagcttcacctacttcgcccccagcaacgaggcctgggacaacctggacagcgacatcagaagaggcctggagagcaacgtgaacgtggagctgctgaacgccctgcacagccacatgatcaacaagagaatgctgaccaaggacctgaagaacggcatgatcatccccagcatgtacaacaacctgggcctgttcatcaaccactaccccaacggcgtggtgaccgtgaactgcgccagaatcatccacggcaaccagatcgccaccaacggcgtggtgcacgtgatcgacagagtgctgacccagatcggcaccagcatccaggacttcatcgaggccgaggacgacctgagcagcttcagagccgccgccatcaccagcgacatcctggaggccctgggcagagacggccacttcaccctgttcgcccccaccaacgaggccttcgagaagctgcccagaggcgtgctggagagaatcatgggcgacaaggtggccagcgaggccctgatgaagtaccacatcctgaacaccctgcagtgcagcgagagcatcatgggcggcgccgtgttcgagaccctggagggcaacaccatcgagatcggctgcgacggcgacagcatcaccgtgaacggcatcaagatggtgaacaagaaggacatcgtgaccaacaacggcgtgatccacctgatcgaccaggtgctgatccccgacagcgccaagcaggtgatcgagctggccggcaagcagcagaccaccttcaccgacctggtggcccagctgggcctggccagcgccctgagacccgacggcgagtacaccctgctggcccccgtgaacaacgccttcagcgacgacaccctgagcatggaccagagactgctgaagctgatcctgcagaaccacatcctgaaggtgaaggtgggcctgaacgagctgtacaacggccagatcctggagaccatcggcggcaagcagctgagagtgttcgtgtacagaaccgccgtgtgcatcgagaacagctgcatggagaagggcagcaagcagggcagaaacggcgccatccacatcttcagagagatcatcaagcccgccgagaagagcctgcacgagaagctgaagcaggacaagagattcagcaccttcctgagcctgctggaggccgccgacctgaaggagctgctgacccagcccggcgactggaccctgttcgtgcccaccaacgacgccttcaagggcatgaccagcgaggagaaggagatcctgatcagagacaagaacgccctgcagaacatcatcctgtaccacctgacccccggcgtgttcatcggcaagggcttcgagcccggcgtgaccaacatcctgaagaccacccagggcagcaagatcttcctgaaggaggtgaacgacaccctgctggtgaacgagctgaagagcaaggagagcgacatcatgaccaccaacggcgtgatccacgtggtggacaagctgctgtaccccgccgacacccccgtgggcaacgaccagctgctggagatcctgaacaagctgatcaagtacatccagatcaagttcgtgagaggcagcaccttcaaggagatccccgtgaccgtgtacagccccgagatcaagtacaccagaatcagcaccggcggcggcgagaccgaggagaccctgaagaagctgctgcaggaggaggtgaccaaggtgaccaagttcatcgagggcggcgacggccacctgttcgaggacgaggagatcaagagactgctgcagggcgacacccccgtgagaaagctgcaggccaacaagaaggtgcagggcagcagaagaagactgagagagggcagaagccagtag

SEQ ID NO: 105400 - DNA, 834 bp, Artificial Sequence
  derived and/or modified sequence
atgcggatggaggggatgaaaggatgcccagccgtcttgccgatagaccacgtatacggaaccttggggatcgtgggtgcaaccaccacccagagatacagcgatgcgtccaaactcagggaggagatcgaagggaaaggcagtttcacctactttgcgccgtctaatgaagcgtgggataacctagactcggatatccgaagggggctggaaagtaacgtcaacgtagagttactgaatgccctccattcccatatgatcaataaaagaatgctgaccaaggatctcaagaatggcatgatcattccgtccatgtataacaacctcggcctttttatcaaccattaccctaatggcgttgttactgtaaactgcgcaaggatcatccacggcaatcaaatcgctacgaacggtgtcgtgcacgtgatagatcgtgtattaacccagattggtacctcaattcaagattttattgaggctgaggatgacctaagcagctttcgggccgccgcaatcacatctgatatcctcgaagcattaggtcgggatggacattttaccttattcgcgcctacgaacgaagcctttgagaagctgcccagaggcgtgttggaacggattatgggagataaagtggctagcgaggctttgatgaagtaccacatcctgaacacactccagtgctcggagtctatcatgggcggcgctgtcttcgaaacactggaaggaaacaccattgaaattggctgcgacggcgacagcatcactgtcaacggaatcaaaatggttaacaaaaaggacattgtgactaattggtgtgatccttttgactag

SEQ ID NO: 105401 - DNA, 834 bp, Artificial Sequence
  derived and/or modified sequence
atgaggatggagggcatgaagggctgcccagctgtgctgcccatcgaccacgtgtatggcaccctgggcatcgtgggcgccaccaccacccagcgctacagtgatgccagcaagctgcgggaggagattgagggcaagggcagcttcacctactttgcccccagcaatgaggcctgggacaacctggacagcgacatcagaagaggcctggagagcaatgtgaatgtggagctgctgaatgccctgcacagccacatgatcaacaagaggatgctgaccaaggacctgaagaatggcatgatcatccccagcatgtacaacaacctgggcctcttcatcaaccactaccccaacggggtggtgacagtgaactgtgcccgcatcatccacggcaaccagatcgccaccaatggagtggtgcacgtgattgacagagtgctgacccagatcggcaccagcatccaggacttcatcgaggctgaagatgacctgagcagcttccgggccgccgccatcaccagtgacatcctggaggccctgggcagagatggccacttcaccctgtttgcccccaccaatgaggcctttgagaagctgccccggggcgtgctggagcgcatcatgggagacaaggtggccagcgaggccctgatgaagtaccacatcctgaacaccctgcagtgcagcgagagcatcatgggcggcgctgtgtttgagaccctggagggcaacaccatcgagatcggctgtgatggagacagcatcaccgtgaatggcatcaagatggtgaacaagaaggacatcgtgaccaactggtgtgacccctttgattag

SEQ ID NO: 105402 - DNA, 834 bp, Artificial Sequence
  derived and/or modified sequence
atgcggatggagggcatgaagggctgccccgccgtgctgcccatcgatcatgtctatgggaccctgggcatagttggagctacgacaactcaacgttactctgacgcgtccaaactgagagaggagatagaaggaaaggggtcctttacatatttcgcccctagcaatgaggcctgggataatctggatagcgatatcagacggggcctggagtccaatgtgaatgtcgaactcctgaacgctctccatagccacatgataaataagagaatgcttacaaaagacctcaagaacgggatgattatcccctccatgtataacaaccttggcctgttcattaaccactatcctaacggcgtagttactgtcaattgcgctcggataattcatggaaatcagatcgcaacaaacggggtcgtccacgtgattgaccgagtgctgactcagataggcacatctatccaggacttcattgaagctgaggatgacctgagttccttcagagctgctgcaatcacttcggatatcctagaagctctcggacgggatggacacttcacgctcttcgcaccaactaatgaggccttcgagaaactgccgcgtggcgtgctggagcggatcatgggcgacaaggtcgcttcggaagcactgatgaaataccacatcctgaacacactgcaatgcagtgaatctattatgggcggcgccgtttttgaaacactcgaaggcaacacaattgagataggatgcgacggcgactctatcacagttaatggaattaaaatggtaaacaaaaaggacatagtaaccaattggtgcgacccttttgactag

SEQ ID NO: 105403 - DNA, 834 bp, Artificial Sequence
  derived and/or modified sequence
atgcggatggaagggatgaaaggctgcccagcggtgcttccaatagaccacgtatacggtaccctgggtatcgtcggcgctacaaccacccagcgatactccgacgcatcaaaacttcgggaagaaatcgagggaaaagggtccttcacctacttcgctccttccaacgaggcctgggacaacctggactcagatatcagaagaggcctggagagtaatgttaacgttgagctcctgaacgctctgcactcccatatgattaacaagcgcatgctgacgaaagatcttaagaatggcatgattattccctcaatgtataacaatctcggtcttttcataaaccattatccaaatggggtggttacagtcaactgtgcgagaattatccatggaaaccagattgccacaaatggtgtggtccatgtgatcgacagagtactcacacagataggtaccagcatccaggattttatcgaggcagaagacgacttaagctctttcagggccgcagccatcacatccgatatcctggaggctctagggagagacggacacttcactctgtttgcgccaactaatgaagcatttgagaagctgcccaggggggtgttagaaaggatcatgggagataaagtcgcgtcagaggccctgatgaaataccacatcctgaatacgctgcagtgcagtgaaagcattatgggcggagcagtgttcgaaactctggaaggtaataccatagagataggttgcgatggagactccatcacggtgaatggcattaaaatggtcaacaagaaggacatagtgactaattggtgtgacccatttgactag

SEQ ID NO: 105404 - DNA, 834 bp, Artificial Sequence
  derived and/or modified sequence
atgagaatggagggcatgaagggctgccccgccgtgctgcccatcgaccacgtgtacggcaccctgggcatcgtgggcgccaccaccacccagagatacagcgacgccagcaagctgagagaggagatcgagggcaagggcagcttcacctacttcgcccccagcaacgaggcctgggacaacctggacagcgacatcagaagaggcctggagagcaacgtgaacgtggagctgctgaacgccctgcacagccacatgatcaacaagagaatgctgaccaaggacctgaagaacggcatgatcatccccagcatgtacaacaacctgggcctgttcatcaaccactaccccaacggcgtggtgaccgtgaactgcgccagaatcatccacggcaaccagatcgccaccaacggcgtggtgcacgtgatcgacagagtgctgacccagatcggcaccagcatccaggacttcatcgaggccgaggacgacctgagcagcttcagagccgccgccatcaccagcgacatcctggaggccctgggcagagacggccacttcaccctgttcgcccccaccaacgaggccttcgagaagctgcccagaggcgtgctggagagaatcatgggcgacaaggtggccagcgaggccctgatgaagtaccacatcctgaacaccctgcagtgcagcgagagcatcatgggcggcgccgtgttcgagaccctggagggcaacaccatcgagatcggctgcgacggcgacagcatcaccgtgaacggcatcaagatggtgaacaagaaggacatcgtgaccaactggtgcgaccccttcgactag

SEQ ID NO: 105405 - protein, 613 aa, Artificial Sequence
  derived and/or modified sequence
MVSKDASVKEYIFKELQKYLPSHAVPDELVLIDSLPFTSHGKIDVSELNKIYLNYINLKSENKLSGKEDLWEKLQYLWKSTLNLPEDLLRVPDESLFLNSGGDSLKSIRLLSEIEKLVGTSVPGLLEIILSSSILEIYNHILQTVVPDEDVTFRKSCATKRKLSDINQEEASGTSLHQKAIMTFTCHNEINAFVVLSRGSQILSLNSTRFLTKLGHCSSACPSDSVSQTNIQNLKGLNSPVLIGKSKDPSCVAKVSEEGKPAIGTQKMELHVRWRSDTGKCVDASPLVVIPTFDKSSTTVYIGSHSHRMKAVDFYSGKVKWEQILGDRIESSACVSKCGNFIVVGCYNGLVYVLKSNSGEKYWMFTTEDAVKSSATMDPTTGLIYIGSHDQHAYALDIYRKKCVWKSKCGGTVFSSPCLNLIPHHLYFATLGGLLLAVNPATGNVIWKHSCGKPLFSSPQCCSQYICIGCVDGNLLCFTHFGEQVWQFSTSGPIFSSPCTSPSEQKIFFGSHDCFIYCCNMKGHLQWKFETTSRVYATPFAFHNYNGSNEMLLAAASTDGKVWILESQSGQLQSVYELPGEVFSSPVVLESMLIIGCRDNYVYCLDLLGGNQK

SEQ ID NO: 105406 - protein, 998 aa, Artificial Sequence
  derived and/or modified sequence
MKKCNLKYILVEKKQINKFKSFHETLLNYDTFTVEHNDLVLFRLHWKNTEVNLMLNDGKEKYEKEKIKSISSEHVNEEKAEEHMDLRLKHCLAYVLHTSGTTGIPKIVRVPHKCIVPNIQHFRVLFDITQEDVLFLASPLTFDPSVVEIFLALSSGASLLIVPTSVKLLPSKLASVLFSHHRVTVLQATPTLLRRFGSQLIKSTVLSATTSLRVLALGGEAFPSLTVLRSWRGEGNKTQIFNVYGITEVSSWATIYRIPEKTLNSTLKCELPVQLGFPLLGTVVEVRDTNGFTIQEGSGQVFLGGRNRVCFLDDEVTVPLGTMRATGDFVTVKDGEIFFLGRKDSQIKRHGKRLNIELVQQVAEELQQVESCAVTWYNQEKLILFMVSKDASVKEYIFKELQKYLPSHAVPDELVLIDSLPFTSHGKIDVSELNKIYLNYINLKSENKLSGKEDLWEKLQYLWKSTLNLPEDLLRVPDESLFLNSGGDSLKSIRLLSEIEKLVGTSVPGLLEIILSSSILEIYNHILQTVVPDEDVTFRKSCATKRKLSDINQEEASGTSLHQKAIMTFTCHNEINAFVVLSRGSQILSLNSTRFLTKLGHCSSACPSDSVSQTNIQNLKGLNSPVLIGKSKDPSCVAKVSEEGKPAIGTQKMELHVRWRSDTGKCVDASPLVVIPTFDKSSTTVYIGSHSHRMKAVDFYSGKVKWEQILGDRIESSACVSKCGNFIVVGCYNGLVYVLKSNSGEKYWMFTTEDAVKSSATMDPTTGLIYIGSHDQHAYALDIYRKKCVWKSKCGGTVFSSPCLNLIPHHLYFATLGGLLLAVNPATGNVIWKHSCGKPLFSSPQCCSQYICIGCVDGNLLCFTHFGEQVWQFSTSGPIFSSPCTSPSEQKIFFGSHDCFIYCCNMKGHLQWKFETTSRVYATPFAFHNYNGSNEMLLAAASTDGKVWILESQSGQLQSVYELPGEVFSSPVVLESMLIIGCRDNYVYCLDLLGGNQK

SEQ ID NO: 105407 - DNA, 136 bp, Artificial Sequence
  derived and/or modified sequence
gaatgaaatgaaatcaaatggaatgtacatgaatggaatagaaaagaatgcatctttctcgaacggaagtgcattgaatggaaaggaatctactggaatggattcgaatggaatggaatgggatggaatggtatgg

SEQ ID NO: 105408 - DNA, 1842 bp, Artificial Sequence
  derived and/or modified sequence
atggtgtccaaggatgccagcgtcaaggaatatatattcaaagagttacagaagtatttaccttcccacgcagttcctgatgagctcgttcttattgattccctgcctttcacaagtcatgggaagatcgacgtatctgaactaaacaagatttatctcaactacattaacctaaagtcagaaaacaagctcagcggaaaggaggatctttgggagaaactgcagtatctgtggaaatctaccctgaatctgccagaagacctgctccgagtgcccgatgagagcctttttttgaactctggaggggactctcttaaaagtatcaggctcttgtccgaaattgagaagctcgtaggcacttcagtccccggacttttggaaatcattctatcgtcatcaattctagaaatttacaatcacattctccagacagtagtgcccgatgaggacgtcacctttcgcaaaagttgcgctacaaagaggaagctgtccgacataaatcaggaggaagctagtgggacatctctgcatcaaaaggctattatgacgttcacatgtcacaacgaaatcaacgcattcgtcgttctcagtcggggctcccaaatcctctctctcaatagtacgaggttcttgaccaagctggggcattgtagctcggcctgcccttcagacagtgtgtctcagacaaacatccagaacttgaaagggctgaattcccctgtccttataggtaaaagcaaggacccctcatgcgtcgctaaagttagcgaggaggggaagcctgccattggcacacaaaaaatggagcttcacgtgcggtggcgcagtgatactgggaaatgcgtggacgcttcccccctggtcgttatcccgacctttgataagagttccactacagtgtatattgggagccatagtcaccgaatgaaggccgttgatttctattccggcaaagtcaaatgggagcagatacttggggaccgcatcgaaagttccgcttgtgtgtccaaatgtggaaacttcatcgtggtcggctgttataatggcctggtgtacgtgctgaagtcgaactcaggagagaaatactggatgtttactaccgaagacgctgtgaagagcagcgccacaatggacccaacaactgggctgatttatataggcagtcacgatcagcacgcatacgccctggatatctatcgcaagaagtgcgtgtggaaatcaaaatgcggtggcacagtgttctcatctccctgcctgaatctgatccctcatcatctatacttcgccactctcggcggcttgctgttagccgttaaccccgctacgggcaacgtcatttggaagcacagttgcggtaagccgctcttttcctctcctcagtgctgctctcagtatatctgcattggttgcgtggatggaaacttactgtgttttactcactttggtgagcaggtgtggcagttttccactagcgggcccattttttcatcaccctgtacatcaccctctgaacagaaaatatttttcggatctcatgattgtttcatttattgctgcaacatgaagggccacctccagtggaagttcgagaccacaagccgtgtatacgctacaccttttgctttccataactataacgggtccaatgagatgctgctggccgccgcctcaaccgatggaaaggtgtggatcctggagagtcagagcggtcagctacaaagcgtgtatgagttgcccggagaagttttcagcagccccgttgtgctggagtctatgctgattatcgggtgtcgcgacaattacgtctattgcctcgacttgctcggaggcaatcagaagtag

SEQ ID NO: 105409 - DNA, 1842 bp, Artificial Sequence
  derived and/or modified sequence
atggtgtccaaggatgcctctgtgaaggagtacatcttcaaggagctgcagaagtacctgcccagccatgctgtgcctgatgagctggtgctgattgacagcctgcccttcaccagccacggcaagattgatgtgtctgagctgaacaagatctacctgaactacatcaacctgaagtctgagaacaagctgagcggcaaggaggacctgtgggagaagctgcagtacctgtggaagagcaccctgaacctgcctgaggacctgctgcgggtgcctgatgagagcctcttcctgaacagcggcggggacagcctgaagagcatccggctgctgtctgaaattgagaagctggtgggcacctctgtgcccggcctgctggagatcatcctgagcagcagcatcctggagatctacaaccacatcctgcagacagtggtgcctgatgaagatgtgaccttcaggaagagctgtgccaccaagaggaagctgagtgacatcaaccaggaggaggccagcggcaccagcctgcaccagaaggccatcatgaccttcacctgccacaatgagatcaatgcctttgtggtgctgagccggggcagccagatcctgagcctgaacagcacccgcttcctgaccaagctgggccactgcagcagcgcctgccccagcgacagcgtgtcccagaccaacatccagaacctgaagggcctgaacagccctgtgctgattggcaagagcaaggaccccagctgtgtggccaaggtgtctgaggagggcaagccagccatcggcacccagaagatggagctgcacgtgcgctggaggagtgacacaggaaaatgtgtggatgccagccccctggtggtgatccccacctttgacaagagcagcaccaccgtgtacatcggcagccacagccacaggatgaaggctgtggacttctacagcggcaaggtgaagtgggagcagatcctgggggacagaattgagagcagcgcctgtgtgtccaaatgtggcaacttcatcgtggtgggctgctacaacggcctggtgtatgtgctgaagagcaacagcggggagaagtactggatgttcaccacagaagatgctgtgaagagcagcgccaccatggaccccaccaccggcctcatctacatcggcagccatgaccagcacgcctatgccctggacatctacaggaagaagtgtgtgtggaagagcaaatgtggcggcaccgtcttcagcagcccctgcctgaacctgatcccccaccacctgtactttgccaccctgggcggcctgctgctggccgtgaacccagccactggaaatgtcatctggaagcacagctgtgggaagcccctcttcagcagcccccagtgctgcagccagtacatctgcatcggctgtgtggatggcaacctgctgtgcttcacccactttggagagcaggtgtggcagttcagcaccagcggccccatcttcagcagcccctgcaccagccccagcgagcagaagatcttcttcggcagccatgactgcttcatctactgctgcaacatgaagggccacctgcagtggaagtttgagaccaccagccgggtgtatgccaccccatttgccttccacaactacaacggcagcaatgagatgctgctggccgccgccagcacagatggcaaggtgtggatcctggagagccagagcggccagctgcagagcgtgtatgagctgcctggagaggtgttcagcagccctgtggtgctggagagcatgctgatcatcggctgccgggacaactacgtgtactgcctggacctgctgggcggcaaccagaagtag

SEQ ID NO: 105410 - DNA, 1842 bp, Artificial Sequence
  derived and/or modified sequence
atggtgagcaaggacgccagcgtgaaggagtacatcttcaaggagttgcaaaaatacctgcccagccacgctgttccggacgaattagtgctgatcgactccctgccatttacatctcatgggaagattgacgtgagcgagctaaataagatttatctcaactatataaacttaaagagtgaaaacaaattaagtggcaaggaggacctgtgggagaaactgcagtacttgtggaaaagcacattgaatctaccagaggacctgcttcgggtccccgatgaatctcttttcctcaactccggcggagacagtcttaaatctataagattattgagcgagatcgagaagttggtgggaacgtctgtgcctggactcctggaaattatcctgagcagctcaatcctcgagatctacaatcatattctccagaccgtggttccagatgaggacgtaacattccgaaagagttgcgctactaagaggaagctttcggacatcaaccaggaagaggcaagcggtacatcgctccatcaaaaagcaattatgactttcacgtgtcacaatgagataaatgccttcgtggtgctgagcagaggcagtcagattttgagcctcaacagcacaagatttctgacaaaactcgggcactgctcgtctgcgtgccctagcgactccgtttcacaaactaacattcagaacttgaaaggcctcaattccccagtcctgataggcaagagcaaagatcccagttgtgtggcgaaggtttcagaggagggcaagcctgctataggtacccagaagatggaattacacgttagatggagatccgacaccggtaaatgcgttgatgcctcaccactggttgtgattccaaccttcgacaagtcctccacgacagtgtatattggtagccactcacatcgtatgaaggcggtggatttttactctggtaaggtgaagtgggagcagattctaggagaccgcattgaaagctctgcctgcgtgagtaaatgcggaaatttcatagtggtaggctgctacaatgggctggtgtacgtgctgaaatcaaacagtggagagaagtactggatgtttacaaccgaagacgccgttaaaagcagtgctaccatggatcctaccacaggactcatttacatcggtagccacgatcagcacgcttacgcactggacatctaccgcaagaagtgtgtatggaaaagtaagtgcggtggtactgtcttttcatccccttgcctgaacctgatcccccatcatctatatttcgccacactgggcggcctgctcctcgccgtcaatcctgcgaccggcaatgtgatatggaagcactcttgtgggaaaccactgtttagctcaccacagtgctgctcacaatacatttgcattggttgtgtggacggtaatctcttatgttttacacactttggcgagcaggtttggcagttctctacctcggggcccattttctcgagcccctgtacctcaccctcggaacagaagatcttcttcgggagtcacgattgttttatttactgttgtaacatgaaggggcatctccagtggaagttcgagacaaccagtcgcgtttatgccacgccatttgcctttcataattacaacggatcaaacgagatgctcttagcagctgctagcactgatgggaaggtgtggattcttgagagtcagtccggccagctacaatccgtttacgaacttcctggggaggtttttagcagcccagtggtactagagagcatgctgatcatcggatgtcgagacaattacgtttactgtttagaccttctcggaggcaatcaaaaatag

SEQ ID NO: 105411 - DNA, 1842 bp, Artificial Sequence
  derived and/or modified sequence
atggtcagtaaggatgcaagcgtcaaggagtatatttttaaagaacttcagaaatacttgcccagtcacgcggtcccagacgagctggtcctaatcgattccctgccttttactagtcacggaaagatcgacgtgtcagagctaaacaaaatatacttaaactatatcaaccttaagagcgaaaacaagctttctggcaaagaagacctctgggaaaagctacaatacctttggaaatctactcttaacctgccggaagacctactgagagtccctgacgagtcactgtttctgaattccggtggagactctttgaagtctattagactgctttccgagattgagaaactcgtgggaacaagcgttccagggctcctcgaaataatactgtcttccagtatcctggaaatttacaaccacatccttcagacggtagtgccggacgaggatgttaccttcagaaagagctgcgcaactaagagaaagctgtcagacatcaaccaggaggaagcttctggcacttccctgcatcaaaaagccatcatgacctttacctgccataatgaaatcaatgccttcgtagtcctctctagagggagccagatcctgtcgctcaattctaccagattcctgaccaaactgggccactgctcatctgcatgcccctccgacagtgttagccaaactaacatccagaatctgaagggccttaatagccctgttctcattggaaagagtaaggatccctcttgtgtggcaaaggtgtctgaggagggcaagcccgctatcgggacacaaaagatggagctacacgtaaggtggaggtctgataccggaaagtgtgtggatgcatcaccattagtagttatcccaacattcgataaatcaagcaccacagtgtatattggaagtcactcccaccggatgaaggcagtcgatttttattcagggaaagttaaatgggaacagattttgggggaccggatcgagtcctccgcctgcgtctcgaaatgtggaaatttcattgttgtcgggtgttataatggtctggtgtatgtcctcaagtccaactccggggaaaagtactggatgttcacaacggaggacgctgtgaagagttccgcaactatggaccccacgaccggactcatttacattggaagccacgaccagcacgcttacgccttggacatctacagaaaaaaatgtgtctggaagtccaaatgcggcggaacagtgttttcatctccctgcctgaacctcataccccaccacctctatttcgctacgctaggcggattgctcctggcagtgaatccagctaccggcaatgtaatctggaaacatagctgcggaaagccgttgtttagttccccacagtgttgcagccagtacatttgcattgggtgcgtggatgggaatctgctctgtttcacccatttcggagagcaggtgtggcagttttcaacatctgggccaatattttcttctccttgtacttccccttcagagcagaagatctttttcggctctcacgactgctttatatattgctgtaatatgaagggacacttacagtggaagttcgaaaccacaagcagagtgtatgccactccgttcgccttccacaattataacggctcaaatgaaatgctcttggctgcagcatctacagacgggaaggtgtggatactcgagtctcagtccgggcaactgcagagtgtatatgagctgccaggagaggttttttcttctcctgtcgtgctggagtccatgttgattataggctgccgggataactatgtgtactgcctggatctgttggggggaaatcaaaaatag

SEQ ID NO: 105412 - DNA, 1842 bp, Artificial Sequence
  derived and/or modified sequence
atggtgagcaaggacgccagcgtgaaggagtacatcttcaaggagctgcagaagtacctgcccagccacgccgtgcccgacgagctggtgctgatcgacagcctgcccttcaccagccacggcaagatcgacgtgagcgagctgaacaagatctacctgaactacatcaacctgaagagcgagaacaagctgagcggcaaggaggacctgtgggagaagctgcagtacctgtggaagagcaccctgaacctgcccgaggacctgctgagagtgcccgacgagagcctgttcctgaacagcggcggcgacagcctgaagagcatcagactgctgagcgagatcgagaagctggtgggcaccagcgtgcccggcctgctggagatcatcctgagcagcagcatcctggagatctacaaccacatcctgcagaccgtggtgcccgacgaggacgtgaccttcagaaagagctgcgccaccaagagaaagctgagcgacatcaaccaggaggaggccagcggcaccagcctgcaccagaaggccatcatgaccttcacctgccacaacgagatcaacgccttcgtggtgctgagcagaggcagccagatcctgagcctgaacagcaccagattcctgaccaagctgggccactgcagcagcgcctgccccagcgacagcgtgagccagaccaacatccagaacctgaagggcctgaacagccccgtgctgatcggcaagagcaaggaccccagctgcgtggccaaggtgagcgaggagggcaagcccgccatcggcacccagaagatggagctgcacgtgagatggagaagcgacaccggcaagtgcgtggacgccagccccctggtggtgatccccaccttcgacaagagcagcaccaccgtgtacatcggcagccacagccacagaatgaaggccgtggacttctacagcggcaaggtgaagtgggagcagatcctgggcgacagaatcgagagcagcgcctgcgtgagcaagtgcggcaacttcatcgtggtgggctgctacaacggcctggtgtacgtgctgaagagcaacagcggcgagaagtactggatgttcaccaccgaggacgccgtgaagagcagcgccaccatggaccccaccaccggcctgatctacatcggcagccacgaccagcacgcctacgccctggacatctacagaaagaagtgcgtgtggaagagcaagtgcggcggcaccgtgttcagcagcccctgcctgaacctgatcccccaccacctgtacttcgccaccctgggcggcctgctgctggccgtgaaccccgccaccggcaacgtgatctggaagcacagctgcggcaagcccctgttcagcagcccccagtgctgcagccagtacatctgcatcggctgcgtggacggcaacctgctgtgcttcacccacttcggcgagcaggtgtggcagttcagcaccagcggccccatcttcagcagcccctgcaccagccccagcgagcagaagatcttcttcggcagccacgactgcttcatctactgctgcaacatgaagggccacctgcagtggaagttcgagaccaccagcagagtgtacgccacccccttcgccttccacaactacaacggcagcaacgagatgctgctggccgccgccagcaccgacggcaaggtgtggatcctggagagccagagcggccagctgcagagcgtgtacgagctgcccggcgaggtgttcagcagccccgtggtgctggagagcatgctgatcatcggctgcagagacaactacgtgtactgcctggacctgctgggcggcaaccagaagtag

SEQ ID NO: 105413 - protein, 857 aa, Artificial Sequence
  derived and/or modified sequence
MTLQELVHKAASCYMDRVAVCFDECNNQLPVYYTYKTVVNAASELSNFLLLHCDFQGIREIGLYCQPGIDLPSWILGILQVPAAYVPIEPDSPPSLSTHFMKKCNLKYILVEKKQINKFKSFHETLLNYDTFTVEHNDLVLFRLHWKNTEVNLMLNDGKEKYEKEKIKSISSEHVNEEKAEEHMDLRLKHCLAYVLHTSGTTGIPKIVRVPHKCIVPNIQHFRVLFDITQEDVLFLASPLTFDPSVVEIFLALSSGASLLIVPTSVKLLPSKLASVLFSHHRVTVLQATPTLLRRFGSQLIKSTVLSATTSLRVLALGGEAFPSLTVLRSWRGEGNKTQIFNVYGITEVSSWATIYRIPEKTLNSTLKCELPVQLGFPLLGTVVEVRDTNGFTIQEGSGQVFLGGRNRVCFLDDEVTVPLGTMRATGDFVTVKDGEIFFLGRKDSQIKRHGKRLNIELVQQVAEELQQVESCAVTWYNQEKLILFMVSKDASVKEYIFKELQKYLPSHAVPDELVLIDSLPFTSHGKIDVSELNKIYLNYINLKSENKLSGKEDLWEKLQYLWKSTLNLPEDLLRVPDESLFLNSGGDSLKSIRLLSEIEKLVGTSVPGLLEIILSSSILEIYNHILQTVVPDEDVTFRKSCATKRKLSDINQEEASGTSLHQKAIMTFTCHNEINAFVVLSRGSQILSLNSTRFLTKLGHCSSACPSDSVSQTNIQNLKGLNSPVLIGKSKDPSCVAKVSEEGKPAIGTQKMELHVRWRSDTGKCVDASPLVVIPTFDKSSTTVYIGSHSHRMKAVDFYSGKVKWEQILGDRIESSACVSKCGNFIVVGLAVLYQWTNLFIPVYLTIRAKNIFWFP

SEQ ID NO: 105414 - DNA, 2574 bp, Artificial Sequence
  derived and/or modified sequence
atgactctccaggaactggtgcacaaggccgcgtcgtgttacatggatcgggtggccgtgtgcttcgatgagtgcaacaatcagttaccagtttactatacatataaaactgttgtgaatgcagccagtgaactctccaacttcttactgctgcactgcgatttccaagggatccgtgagattgggctatattgccagccaggcatcgacctcccatcctggatcttgggcattctgcaggtgcctgctgcatatgtgccaattgaacccgattcacccccatcactttcaactcactttatgaagaagtgtaatttgaaatatatacttgttgaaaagaagcagattaacaaatttaagtcttttcacgagaccctattaaactacgataccttcacagtggagcacaacgatctcgtgctgtttaggcttcactggaagaatacagaagtcaatctgatgctgaatgatgggaaggagaagtatgagaaagagaaaattaaaagcatctcctcagaacacgtcaatgaggaaaaggcagaagaacacatggatctgcggctgaaacattgcttagcctacgtgctgcacacaagcggcactacgggaattccaaagatcgtgcgtgtgccacacaaatgcatcgtaccaaatattcaacacttcagagtgctctttgacatcacccaggaagacgttttgttcttggcttctccattgactttcgatccttctgtcgttgaaattttcctggccctttcttccggcgcttcccttttgatcgtaccaacttccgtgaagttgcttccgtccaaactcgcatcagtcctgttttcccatcaccgggtgaccgtcctgcaggccacacccaccctgcttcgccggtttggctcccagctgatcaaatcaacagttctgtctgcaacgacaagcttacgcgtcttggccctggggggggaagcgtttccctccctgaccgtgctaagaagttggcgtggcgagggaaataagacccaaatcttcaacgtctacggaattaccgaagtgtctagctgggccaccatctataggataccagagaagacactaaatagcacactgaaatgcgaactgcccgtgcagcttgggtttcctctgctgggaacagtggtggaagttagggacactaatggattcacaatccaggagggctcagggcaggtgttcctgggtggcaggaaccgcgtttgttttcttgacgacgaggtcacggtgccgcttggtactatgagagccactggcgattttgtgaccgtgaaagatggagagatttttttcctggggagaaaagactcgcagattaaacgacacggcaaaaggttgaacatcgagctggtccaacaagtggctgaggagctccagcaggtggagagctgtgcggtcacatggtacaaccaggaaaagctgatcctctttatggtgagtaaagacgctagtgtgaaagagtatatattcaaagaattgcaaaagtaccttcccagtcatgctgtacccgatgaacttgtgctgattgactccctgccatttacgtctcacggcaagattgacgtgagcgaactaaataaaatttatttgaattacataaacctcaagtcagagaataagctgtcagggaaagaggacctctgggagaagctgcaatacttatggaagtcaacattaaacctgccagaggatttactgcgtgtgcccgacgagagcctgttcttgaactctggtggcgacagtctgaagagcattcggctgctctctgaaatagagaaactggttggaactagcgtgcctggcttgcttgaaatcatcctgagttccagtatcctggaaatttacaaccatatcttgcagacagtggtccctgatgaggacgtaaccttccggaaatcctgcgctaccaagagaaagctgagcgacataaatcaggaggaagctagcggaaccagcctgcatcagaaagcaattatgacttttacgtgccataatgaaattaatgccttcgtggtgctgagcaggggtagtcagatcctttctctaaactccacaaggtttttaactaagctaggacattgcagttcagcgtgtccatcagattcagtttctcaaactaacattcaaaacttaaaaggtttgaacagcccagttttgattgggaagtcaaaggatccatcatgcgtggctaaggtctctgaagagggaaagccggccattggaactcagaagatggaacttcatgtccgctggaggtccgataccggcaagtgtgtggatgcgagtcccctcgtagtgatacctacttttgataagtctagtaccacggtatatatagggtctcattctcacagaatgaaagccgtcgacttttattctggcaaagtaaagtgggagcaaattctgggtgataggatcgagagctccgcctgcgtgtcgaagtgtgggaactttatcgtggtaggcctcgcagtgctctaccaatggacaaacttattcatcccggtgtatctgactataagagcaaagaacatcttctggtttccttag

SEQ ID NO: 105415 - DNA, 2574 bp, Artificial Sequence
  derived and/or modified sequence
atgaccctgcaggagctggtgcacaaggccgccagctgctacatggacagagtggccgtgtgctttgatgagtgcaacaaccagctgcctgtgtactacacctacaagacagtggtgaatgctgccagcgagctgagcaacttcctgctgctgcactgtgacttccagggcatccgggagatcggcctgtactgccagcccggcatcgacctgcccagctggatcctgggcatcctgcaggtgcctgctgcctacgtgcccatcgagccagacagcccccccagcctgagcacccacttcatgaagaagtgcaacctgaagtacatcctggtggagaagaagcagatcaacaagttcaagagcttccacgagaccctgctgaactatgacaccttcaccgtggagcacaatgacctggtgctcttccggctgcactggaagaacacagaggtgaacctgatgctgaatgatggcaaggagaagtatgagaaggagaagatcaagagcatcagcagcgagcacgtgaatgaggagaaggccgaggagcacatggacctgcggctgaagcactgcctggcctacgtgctgcacaccagcggcaccaccggcatccccaagatcgtgcgggtgccccacaagtgcatcgtgcccaacatccagcacttccgggtgctgtttgacatcacccaggaggatgtgctcttcctggccagccccctgacctttgaccccagcgtggtggagatcttcctggccctgagcagcggggccagcctgctgattgtgcccacctctgtgaagctgctgcccagcaagctggcctctgtgctcttcagccaccaccgggtgacagtgctgcaggccacccccaccctgctgcggcgcttcggcagccagctgatcaagagcacagtgctgagcgccaccaccagcctgcgggtgctggccctgggcggggaggccttccccagcctgactgtgctgcgctcctggagaggagagggcaacaagacccagatcttcaacgtgtatggcatcacagaggtgtcctcctgggccaccatctaccgcatccctgagaagaccctgaacagcaccctgaagtgtgagctgcctgtgcagctgggcttccccctgctgggcaccgtggtggaggtgcgggacaccaacggcttcaccatccaggagggcagcggccaggtgttcctgggcggcaggaacagagtgtgcttcctggatgatgaggtgacagtgcccctgggcaccatgagggccaccggggactttgtgacagtgaaggatggagagatcttcttcctgggcaggaaggacagccagatcaagagacatggcaagaggctgaacatcgagctggtgcagcaggtggccgaggagctgcagcaggtggagagctgtgctgtgacctggtacaaccaggagaagctgatcctcttcatggtgtccaaggatgcctctgtgaaggagtacatcttcaaggagctgcagaagtacctgcccagccatgctgtgcctgatgagctggtgctgattgacagcctgcccttcaccagccacggcaagattgatgtgtctgagctgaacaagatctacctgaactacatcaacctgaagtctgagaacaagctgagcggcaaggaggacctgtgggagaagctgcagtacctgtggaagagcaccctgaacctgcctgaggacctgctgcgggtgcctgatgagagcctcttcctgaacagcggcggggacagcctgaagagcatccggctgctgtctgaaattgagaagctggtgggcacctctgtgcccggcctgctggagatcatcctgagcagcagcatcctggagatctacaaccacatcctgcagacagtggtgcctgatgaagatgtgaccttcaggaagagctgtgccaccaagaggaagctgagtgacatcaaccaggaggaggccagcggcaccagcctgcaccagaaggccatcatgaccttcacctgccacaatgagatcaatgcctttgtggtgctgagccggggcagccagatcctgagcctgaacagcacccgcttcctgaccaagctgggccactgcagcagcgcctgccccagcgacagcgtgtcccagaccaacatccagaacctgaagggcctgaacagccctgtgctgattggcaagagcaaggaccccagctgtgtggccaaggtgtctgaggagggcaagccagccatcggcacccagaagatggagctgcacgtgcgctggaggagtgacacaggaaaatgtgtggatgccagccccctggtggtgatccccacctttgacaagagcagcaccaccgtgtacatcggcagccacagccacaggatgaaggctgtggacttctacagcggcaaggtgaagtgggagcagatcctgggggaccgcatcgagagcagcgcctgtgtgtccaaatgtggcaacttcatcgtggtgggcctggccgtgctgtaccagtggaccaacctcttcatccctgtgtacctgaccatccgggccaagaacatcttctggttcccctag

SEQ ID NO: 105416 - DNA, 3157 bp, Artificial Sequence
  derived and/or modified sequence
gtatggtgcctcgctctgggatagctttacggcttctgggagctgctgcttcgctgtgagaagtatccgcgacgagctatccgggaaagggccgaatgcgatcaaacctaatccgcgagacttgctaaggttctgtgctacaaattgatgtttagataaacttcagtgaaatgactcttcaggaattggtgcataaggctgcctcctgttatatggacagagtagctgtatgttttgatgaatgcaacaaccagcttccagtttactacacctacaagactgtggttaatgctgcttctgaattatcaaattttctgctgttacactgtgactttcaaggaattcgggaaattggtctctactgccaacctgggatagacttaccctcttggattttaggaattctccaagtcccggctgcttatgtacctatcgagccagattcaccaccgtcattatcaactcattttatgaaaaaatgtaatctaaagtatatccttgttgaaaaaaaacaaattaataaatttaaatcttttcatgaaacattattgaactatgatacatttacagtggaacataatgacctagtgctcttcagacttcactggaaaaatactgaggtgaacttgatgctaaatgatggaaaagagaaatatgaaaaagaaaaaataaaaagcataagttctgagcatgtcaatgaagaaaaagcagaagaacacatggatctgaggctaaagcattgcttagcctatgttctacatacatcagggactacagggataccgaagattgtcagagtgcctcataagtgtatagtaccaaatatccagcattttcgggtactttttgacatcacacaagaagatgttttgtttctggcttcacctctgaccttcgatccttctgttgtggaaatatttcttgctctatcaagtggtgcctctctgcttattgtaccaacttccgtcaagttgctcccatcaaaattagccagcgttctcttttcccatcatagagtgactgttttgcaggcaacaccaacattgcttagaagatttggatctcagcttatcaagtcaactgttttgtcagccactacttctcttcgagtattagcccttggtggtgaagcgtttccatcattgacagttctcagaagctggagaggagaaggcaataaaacacaaatatttaatgtttatggtatcacagaggtatcaagttgggcgaccatttataggattccagagaagactcttaactctactctcaaatgtgaattgcctgtacaactgggatttccacttcttggaacagtagttgaagtcagagatactaatggcttcacaattcaggaaggcagtggccaagtatttttaggtggcagaaacagagtgtgttttcttgatgatgaagtgacagtaccacttggcacaatgcgagctacaggagactttgtgactgtgaaagatggagagattttttttttgggacgaaaagacagtcagatcaaacgtcatggcaaacgtcttaacattgaacttgtgcaacaggttgctgaagagcttcagcaagtggagtcttgtgcagttacatggtataatcaggaaaaattaattctcttcatggtgtctaaagatgcttcagtaaaagaatacatctttaaagaactgcagaaatatcttccaagtcatgcagtcccggatgagcttgtattgatcgactctctaccatttacatcccacggcaaaattgatgtttctgagttaaacaagatatatttaaactacataaacttgaagtctgagaataagctcagtgggaaagaggacctttgggaaaaattacagtatttgtggaagtctactctgaatctcccagaagatcttttgagggttcctgatgagtcactcttcttaaatagtggtggagattccttaaagtccatccggctcctcagtgagattgaaaaacttgttggtacatcagtacctgggcttctggaaattattctcagcagttccattttagagatttataatcacatccttcaaacagtggttccagatgaagatgtgacattcaggaagagttgtgccacaaaaaggaaactcagcgacattaatcaagaggaagccagtggaacatctttacatcagaaagccatcatgactttcacttgccacaatgagattaatgcttttgttgtactgagcagagggagtcaaattttgtctctgaattccactaggtttttaacaaagttaggacattgctcttcagcctgtccttctgactcagtttcacagaccaacattcaaaatttgaaaggcttaaattctccagttcttattgggaagtcaaaagatccatcctgtgttgcaaaagtttctgaagaggggaaacctgcgatagggactcagaaaatggagttacatgtgaggtggaggtcagacacaggcaaatgtgtagatgcttcaccgctggttgtaatacccacttttgataagtcatctacaactgtgtacattggttcccattctcatagaatgaaggcagttgacttttactctgggaaggtaaaatgggaacagattttgggagatcgaattgaatcctcagcatgtgtatctaagtgtggaaactttattgtggtgggtttggcagttctctaccagtggaccaatcttttcatccccgtgtacctcaccatcagagcaaaaaatattttttggttcccatgattgctttatctactgttgtaacatgaaaggtcacctgcagtggaaatttgaaactacttcaagggtctatgcaacaccgtttgctttccataactacaatggcagcaatgaaatgttgctggcagcagcatctactgatgggaaagtgtggatcttggaatctcagagtggacaattgcaaagtgtttatgaacttcctggagaagtcttctcttctcctgtggtcctggaatcaatgctcattattgggtgtagagataattatgtttattgtctggatttattgggtggcaatcaaaaataatcaaatacagtccttatttgtataacaaatgtgagatatttgaaaatattttaccattatacatcatgtggacttattttatattaaagaagattatattttggctaag

SEQ ID NO: 105417 - DNA, 2574 bp, Artificial Sequence
  derived and/or modified sequence
atgaccctgcaggagctggtgcacaaggccgccagctgctacatggatcgcgttgccgtgtgctttgacgaatgtaacaatcaactgcctgtgtactacacgtacaagactgtggtcaacgctgcctccgaattgtccaacttcctcctgctgcactgcgacttccaagggatccgggagatagggttatactgccagcccggcatagacctgccaagctggatcctggggattctgcaggtacctgcagcctacgtgccgatcgaacctgactcaccccctagtctttctacacacttcatgaagaagtgcaatctgaaatatattcttgtggagaaaaaacagattaataaattcaagagcttccatgaaacattgttgaattacgatacctttacagtggaacataacgatctggtgctcttccgtctccactggaaaaacactgaggtgaacctcatgttgaatgatggcaaggaaaaatacgagaaggagaaaattaaaagcatcagctctgagcacgtgaatgaggaaaaggccgaagagcatatggatctgcggttgaagcattgtctcgcctatgtgttgcacacctcagggacgacgggtattcctaaaatcgtccgggttccccataagtgcattgtaccaaacatccaacactttagagtgctctttgacataactcaagaagacgtcctatttttggcatccccattaaccttcgatccctctgtggtcgagatcttcctggcattgtccagtggggcttccttactgatcgtcccgacgtcagttaagcttcttcctagtaaactggcatccgtgttattcagccatcaccgcgtgacagtccttcaggccacccccacactgctgcgtaggtttgggtcccagctaatcaaatcaactgtattgagcgccacaacttccctccgggtcctggcactcgggggcgaagcatttccatcactgaccgttctccgctcatggaggggagaagggaacaagacacagatatttaacgtgtatggtatcaccgaagtgagcagctgggccaccatctataggatccctgagaagaccctgaacagcaccctgaagtgtgagctgcctgtgcagttgggcttcccgttgcttggtaccgtcgtggaggtgcgcgacacaaacggttttactattcaggagggttctggccaggtatttctggggggacgaaatcgggtctgtttcctggacgatgaggtgacggtgccccttggtactatgcgtgccactggggatttcgtcacggttaaagatggagagatcttctttctgggtaggaaggactcacagataaaaaggcacgggaaacgactgaacatcgaactggtgcagcaagttgccgaagagttgcagcaggttgagtcatgtgccgtaacatggtacaatcaggagaagcttattctttttatggtgtccaaggatgcctcggtgaaggaatacatctttaaggaactccaaaagtacctcccttcacacgctgtgcccgatgaactggtgttgatcgactcactgccattcacttcccacggaaagatcgacgtgtcagaactgaacaagatctacctgaactatattaatctgaaatctgaaaacaagctctctggaaaggaggacttatgggagaagctgcagtacctatggaagagcaccctgaacttgcctgaggacctgctcagggtgcctgacgagtctctattcctgaattctggtggggactccctgaaatccattcgattactctcagaaattgagaagctagtcggaacatctgtgcctggactcttggagatcattttaagctccagcatattagagatttataaccacattcttcagaccgtggtccccgatgaggacgtgacgttcagaaagtcctgcgcaacgaagagaaaactctctgacatcaaccaggaggaagcatctggcacatcactacatcaaaaagctatcatgacattcacatgccacaatgaaattaatgccttcgtcgtactgagtcgtggctcacaaatcctgtccttgaactctacccgttttttaacaaagttaggccactgttctagcgcgtgtccctcagactcagtctcccagacaaacattcagaatctgaaggggcttaacagccctgtactcatcggcaagtccaaggacccatcttgtgttgcaaaggtttctgaggaaggcaagccagccattgggactcagaagatggagttgcacgtccgatggcgcagcgacacagggaagtgcgttgatgcctcccctctggtcgtgataccaacttttgacaaatcatctaccaccgtctacatcggctctcacagccataggatgaaggctgtggacttttattctggcaaggttaaatgggagcaaatattaggcgaccggatagagtccagtgcctgtgtgtcaaagtgtggcaactttatcgtggtcggcctggcggtcctgtaccagtggacgaaccttttcatccctgtatatctcactatcagagccaagaatattttctggtttccttag

SEQ ID NO: 105418 - DNA, 2574 bp, Artificial Sequence
  derived and/or modified sequence
atgacgctgcaagaactggtccacaaggcagctagctgctatatggatcgcgtagcagtctgcttcgatgagtgcaacaatcagctacctgtgtactacacctacaagacagtcgtgaacgctgccagcgaactcagtaactttctcctattacactgtgatttccaaggaattagagaaattggactgtattgtcagccgggaattgacctgccttcttggatcctcggcattctgcaggtcccagcggcatatgttccaatcgaacccgactcacctccttccctctcaacacatttcatgaagaagtgcaatctaaagtacatcctggtcgaaaaaaaacagattaataaatttaagagcttccacgagactctcctgaactacgacactttcacggtagaacataacgatcttgtgctatttaggctacactggaagaacaccgaagtaaacctgatgcttaacgatggcaaggagaagtatgagaaggagaagataaagtctatcagtagtgagcacgtcaacgaggagaaggcggaggaacatatggacttgagattgaaacattgcctagcttatgtgcttcatacatcgggaacaactggtattccaaagatcgtccgcgtacctcataagtgcattgtacctaacatacagcatttcagggtcctgttcgatatcactcaggaagatgtattgttccttgcgtctcctctcacgttcgatccttcggtcgttgagatcttccttgctctttcttccggcgctagcttgctgattgttccaaccagcgtcaaacttctccctagcaaactggcctcggtgctgtttagccaccatcgcgtcacagtgctccaggccacacccaccctgttaagacggttcggcagccagctgattaagagtaccgtgctctccgctacgactagtctaagggtgttggccctgggtggtgaagcgtttccatccctaacagtgttgcggtcctggaggggggagggaaacaagacacagatttttaatgtgtacgggataaccgaagtgagctcatgggcaactatttataggattccggagaagaccctaaatagtaccttgaaatgtgagctgcctgtgcagctgggattcccactgcttggtaccgttgtggaggttcgggacaccaacgggttcaccattcaggagggtagcgggcaggtttttttgggaggaagaaatcgagtctgtttcttagacgacgaggtcacagttccactggggaccatgagggcaacgggtgactttgtcactgttaaggatggggagatctttttcctgggtaggaaagactcccaaatcaagcgacacggcaaacgactgaacatcgagttagtccaacaggtagcagaggagctccagcaggtcgagtcatgtgcagtcacgtggtacaatcaggagaagctgatcttgttcatggtatcgaaggatgcatctgttaaagagtacatcttcaaagagctccagaagtacttgccttctcatgccgtccctgacgagctagtgctgattgactccctgcccttcacgtctcacgggaagattgacgttagcgagttgaacaaaatttatctcaactacattaatctgaagtccgagaacaagctttctggtaaggaggacttatgggagaagctacagtatctgtggaaaagtaccctgaatctccctgaggacttacttcgggtgccagacgagtccctttttctgaactctgggggagacagtctcaagtccattcgactgctaagcgaaatagaaaagcttgttggtacttccgtcccgggtcttctggagatcatcttaagcagttccattcttgaaatttacaaccatatattgcaaactgtggtaccagacgaggatgtgactttccgaaagtcgtgtgccactaagcgcaagttatctgatattaatcaagaggaggcatctggtacatcccttcatcagaaggccatcatgaccttcacgtgtcacaacgagatcaacgcgtttgttgtgctgtcccggggaagccagattctaagtctgaatagcactcgatttctgaccaaattagggcattgctcaagtgcgtgtccatccgactctgtaagtcagactaacattcagaaccttaagggcctgaactcacccgtgctcattggtaaatcaaaggaccccagctgtgttgccaaagtgtctgaagaaggcaagcccgcaatcggaacacagaagatggaattgcacgtaagatggcggagtgacaccggcaaatgtgtggatgccagtcctctggttgttattcctacttttgataagtcttccacaactgtgtatataggcagtcatagccaccgaatgaaagcggtggacttttatagcggaaaagtgaagtgggagcagattcttggtgatcgcattgagtctagtgcttgcgtgagtaaatgcgggaacttcatcgtggtgggcctggccgtcttataccagtggaccaacctgtttattccagtgtatctgactattagagccaaaaacattttttggttcccttag

SEQ ID NO: 105419 - DNA, 2574 bp, Artificial Sequence
  derived and/or modified sequence
atgaccctgcaggagctggtgcacaaggccgccagctgctacatggacagagtggccgtgtgcttcgacgagtgcaacaaccagctgcccgtgtactacacctacaagaccgtggtgaacgccgccagcgagctgagcaacttcctgctgctgcactgcgacttccagggcatcagagagatcggcctgtactgccagcccggcatcgacctgcccagctggatcctgggcatcctgcaggtgcccgccgcctacgtgcccatcgagcccgacagcccccccagcctgagcacccacttcatgaagaagtgcaacctgaagtacatcctggtggagaagaagcagatcaacaagttcaagagcttccacgagaccctgctgaactacgacaccttcaccgtggagcacaacgacctggtgctgttcagactgcactggaagaacaccgaggtgaacctgatgctgaacgacggcaaggagaagtacgagaaggagaagatcaagagcatcagcagcgagcacgtgaacgaggagaaggccgaggagcacatggacctgagactgaagcactgcctggcctacgtgctgcacaccagcggcaccaccggcatccccaagatcgtgagagtgccccacaagtgcatcgtgcccaacatccagcacttcagagtgctgttcgacatcacccaggaggacgtgctgttcctggccagccccctgaccttcgaccccagcgtggtggagatcttcctggccctgagcagcggcgccagcctgctgatcgtgcccaccagcgtgaagctgctgcccagcaagctggccagcgtgctgttcagccaccacagagtgaccgtgctgcaggccacccccaccctgctgagaagattcggcagccagctgatcaagagcaccgtgctgagcgccaccaccagcctgagagtgctggccctgggcggcgaggccttccccagcctgaccgtgctgagaagctggagaggcgagggcaacaagacccagatcttcaacgtgtacggcatcaccgaggtgagcagctgggccaccatctacagaatccccgagaagaccctgaacagcaccctgaagtgcgagctgcccgtgcagctgggcttccccctgctgggcaccgtggtggaggtgagagacaccaacggcttcaccatccaggagggcagcggccaggtgttcctgggcggcagaaacagagtgtgcttcctggacgacgaggtgaccgtgcccctgggcaccatgagagccaccggcgacttcgtgaccgtgaaggacggcgagatcttcttcctgggcagaaaggacagccagatcaagagacacggcaagagactgaacatcgagctggtgcagcaggtggccgaggagctgcagcaggtggagagctgcgccgtgacctggtacaaccaggagaagctgatcctgttcatggtgagcaaggacgccagcgtgaaggagtacatcttcaaggagctgcagaagtacctgcccagccacgccgtgcccgacgagctggtgctgatcgacagcctgcccttcaccagccacggcaagatcgacgtgagcgagctgaacaagatctacctgaactacatcaacctgaagagcgagaacaagctgagcggcaaggaggacctgtgggagaagctgcagtacctgtggaagagcaccctgaacctgcccgaggacctgctgagagtgcccgacgagagcctgttcctgaacagcggcggcgacagcctgaagagcatcagactgctgagcgagatcgagaagctggtgggcaccagcgtgcccggcctgctggagatcatcctgagcagcagcatcctggagatctacaaccacatcctgcagaccgtggtgcccgacgaggacgtgaccttcagaaagagctgcgccaccaagagaaagctgagcgacatcaaccaggaggaggccagcggcaccagcctgcaccagaaggccatcatgaccttcacctgccacaacgagatcaacgccttcgtggtgctgagcagaggcagccagatcctgagcctgaacagcaccagattcctgaccaagctgggccactgcagcagcgcctgccccagcgacagcgtgagccagaccaacatccagaacctgaagggcctgaacagccccgtgctgatcggcaagagcaaggaccccagctgcgtggccaaggtgagcgaggagggcaagcccgccatcggcacccagaagatggagctgcacgtgagatggagaagcgacaccggcaagtgcgtggacgccagccccctggtggtgatccccaccttcgacaagagcagcaccaccgtgtacatcggcagccacagccacagaatgaaggccgtggacttctacagcggcaaggtgaagtgggagcagatcctgggcgacagaatcgagagcagcgcctgcgtgagcaagtgcggcaacttcatcgtggtgggcctggccgtgctgtaccagtggaccaacctgttcatccccgtgtacctgaccatcagagccaagaacatcttctggttcccctag

SEQ ID NO: 105420 - protein, 841 aa, Artificial Sequence
  derived and/or modified sequence
MTLQELVHKAASCYMDRVAVCFDECNNQLPVYYTYKTVVNAASELSNFLLLHCDFQGIREIGLYCQPGIDLPSWILGILQVPAAYVPIEPDSPPSLSTHFMKKCNLKYILVEKKQINKFKSFHETLLNYDTFTVEHNDLVLFRLHWKNTEVNLMLNDGKEKYEKEKIKSISSEHVNEEKAEEHMDLRLKHCLAYVLHTSGTTGIPKIVRVPHKCIVPNIQHFRVLFDITQEDVLFLASPLTFDPSVVEIFLALSSGASLLIVPTSVKLLPSKLASVLFSHHRVTVLQATPTLLRRFGSQLIKSTVLSATTSLRVLALGGEAFPSLTVLRSWRGEGNKTQIFNVYGITEVSSWATIYRIPEKTLNSTLKCELPVQLGFPLLGTVVEVRDTNGFTIQEGSGQVFLGGRNRVCFLDDEVTVPLGTMRATGDFVTVKDGEIFFLGRKDSQIKRHGKRLNIELVQQVAEELQQVESCAVTWYNQEKLILFMVSKDASVKEYIFKELQKYLPSHAVPDELVLIDSLPFTSHGKIDVSELNKIYLNYINLKSENKLSGKEDLWEKLQYLWKSTLNLPEDLLRVPDESLFLNSGGDSLKSIRLLSEIEKLVGTSVPGLLEIILSSSILEIYNHILQTVVPDEDVTFRKSCATKRKLSDINQEEASGTSLHQKAIMTFTCHNEINAFVVLSRGSQILSLNSTRFLTKLGHCSSACPSDSVSQTNIQNLKGLNSPVLIGKSKDPSCVAKVSEEGKPAIGTQKMELHVRWRSDTGKCVDASPLVVIPTFDKSSTTVYIGSHSHRMKAVDFYSGKVKWEQILGDRIESSACVSKCGNFIVVGKFLNLRFVELN

SEQ ID NO: 105421 - DNA, 2526 bp, Artificial Sequence
  derived and/or modified sequence
atgacactacaggagcttgtgcataaggctgcaagctgctacatggatcgtgtcgctgtgtgttttgacgagtgtaacaaccagctgcctgtatattatacatacaaaacagtggtgaatgctgctagtgagctgtccaacttcctgctacttcattgcgatttccagggtattcgagagatcgggctgtactgtcagccaggaatcgatttgccatcctggattttggggatattgcaagttcctgctgcgtacgtgccgatcgagccggactctcctccgagcctgagcacccacttcatgaaaaagtgtaatctcaagtacattctggtggagaaaaagcaaataaacaaattcaagtcctttcacgaaaccctgcttaactatgacacattcacagtagagcacaatgatctcgttctgtttaggctccactggaagaacactgaggtcaatctaatgcttaatgacggcaaagagaagtacgagaaggaaaaaattaagtcgatctcctctgaacatgtgaacgaggagaaggcggaagagcacatggatctgcggctcaaacattgcctggcttacgttctgcacaccagcggaaccacagggattcccaagatcgtgagagtcccacacaaatgtatcgtccccaacattcagcactttagagtacttttcgacattacacaggaagatgttctgtttctagcaagtccccttacctttgacccctccgtggtggagatctttctcgccctcagcagtggcgctagtttgttgatcgtgccaacgtctgtgaaacttttacccagtaaactagcctctgtgttgttttcacaccatcgtgtgacagtgctccaggccacaccgactttgctcaggcggtttggatcacagttaattaaaagcacagtgctgagtgctaccaccagcctccgcgtgttggcgctgggaggggaggcatttcctagtctcacagtgctccggtcctggcgtggagagggcaataagacgcagatttttaacgtttatggcatcacagaggtttcttcctgggccaccatttacaggatccccgaaaaaaccctgaatagcactttgaagtgtgagcttccagtccaactaggcttcccactgttgggaacggtcgtggaggttagagatacaaacgggttcacaattcaagaggggagcggacaggtgttcctgggcgggcggaatagagtctgtttcttggatgacgaggttaccgtaccattaggcactatgcgggccacaggggatttcgtgacggtaaaggacggggaaatcttttttctcggaaggaaagattcacaaattaaacggcatggcaaaagactaaacatcgagcttgttcagcaagttgccgaagagctgcagcaggtggaaagctgcgctgtgacatggtacaaccaggagaaacttatactttttatggtgagcaaagacgctagcgtcaaagagtacatcttcaaagagttacagaaatacctgccgtcccacgctgttcctgatgaattggtgttgatagattctctgcctttcacctcacacggcaaaatcgatgtatctgagctgaataaaatatatttaaattacatcaatctgaaatctgagaacaaattgtcgggcaaggaagacctttgggagaagctgcagtacctgtggaaatccactctcaacctgcccgaggatctgctgcgtgttcctgacgaatccctgttcctcaattccggaggcgacagcttgaagtccatcagactcctgagcgagattgaaaagctcgtaggcacgtcggttcccggcctcctggaaataatcttgtcttccagcatcctcgaaatttataaccatatcttgcagaccgtcgtgcccgacgaggatgtgacttttcgcaaatcttgcgccaccaaacggaaactgagtgacatcaatcaggaggaagcctctgggaccagcctgcatcagaaagctatcatgaccttcacatgccacaatgaaatcaatgcttttgttgtactgagccgggggagtcagatcctgtctctgaattcaacccgcttcctgactaagttagggcattgcagttcggcttgtcccagcgactccgtcagtcagacaaacattcaaaacttaaagggactgaattcacctgttcttatagggaagtcaaaagaccctagctgcgttgccaaagtgtccgaagaaggaaagcccgccatcggaacgcagaaaatggaactgcatgtgagatggcggtccgataccggtaaatgtgtagatgcatcaccattggttgtgattccaacgtttgataaaagctctacaactgtgtatatagggtcccattcccaccgaatgaaagctgttgatttctatagtggcaaagtgaaatgggaacagattttaggcgaccgcattgaatcaagcgcatgtgttagcaaatgtgggaacttcatcgtggtcgggaaattcctgaacttgcggtttgtggaattaaattag

SEQ ID NO: 105422 - DNA, 2526 bp, Artificial Sequence
  derived and/or modified sequence
atgaccctgcaggagctggtgcacaaggccgccagctgctacatggacagagtggccgtgtgctttgatgagtgcaacaaccagctgcctgtgtactacacctacaagacagtggtgaatgctgccagcgagctgagcaacttcctgctgctgcactgtgacttccagggcatccgggagatcggcctgtactgccagcccggcatcgacctgcccagctggatcctgggcatcctgcaggtgcctgctgcctacgtgcccatcgagccagacagcccccccagcctgagcacccacttcatgaagaagtgcaacctgaagtacatcctggtggagaagaagcagatcaacaagttcaagagcttccacgagaccctgctgaactatgacaccttcaccgtggagcacaatgacctggtgctcttccggctgcactggaagaacacagaggtgaacctgatgctgaatgatggcaaggagaagtatgagaaggagaagatcaagagcatcagcagcgagcacgtgaatgaggagaaggccgaggagcacatggacctgcggctgaagcactgcctggcctacgtgctgcacaccagcggcaccaccggcatccccaagatcgtgcgggtgccccacaagtgcatcgtgcccaacatccagcacttccgggtgctgtttgacatcacccaggaggatgtgctcttcctggccagccccctgacctttgaccccagcgtggtggagatcttcctggccctgagcagcggggccagcctgctgattgtgcccacctctgtgaagctgctgcccagcaagctggcctctgtgctcttcagccaccaccgggtgacagtgctgcaggccacccccaccctgctgcggcgcttcggcagccagctgatcaagagcacagtgctgagcgccaccaccagcctgcgggtgctggccctgggcggggaggccttccccagcctgactgtgctgcgctcctggagaggagagggcaacaagacccagatcttcaacgtgtatggcatcacagaggtgtcctcctgggccaccatctaccgcatccctgagaagaccctgaacagcaccctgaagtgtgagctgcctgtgcagctgggcttccccctgctgggcaccgtggtggaggtgcgggacaccaacggcttcaccatccaggagggcagcggccaggtgttcctgggcggcaggaacagagtgtgcttcctggatgatgaggtgacagtgcccctgggcaccatgagggccaccggggactttgtgacagtgaaggatggagagatcttcttcctgggcaggaaggacagccagatcaagagacatggcaagaggctgaacatcgagctggtgcagcaggtggccgaggagctgcagcaggtggagagctgtgctgtgacctggtacaaccaggagaagctgatcctcttcatggtgtccaaggatgcctctgtgaaggagtacatcttcaaggagctgcagaagtacctgcccagccatgctgtgcctgatgagctggtgctgattgacagcctgcccttcaccagccacggcaagattgatgtgtctgagctgaacaagatctacctgaactacatcaacctgaagtctgagaacaagctgagcggcaaggaggacctgtgggagaagctgcagtacctgtggaagagcaccctgaacctgcctgaggacctgctgcgggtgcctgatgagagcctcttcctgaacagcggcggggacagcctgaagagcatccggctgctgtctgaaattgagaagctggtgggcacctctgtgcccggcctgctggagatcatcctgagcagcagcatcctggagatctacaaccacatcctgcagacagtggtgcctgatgaagatgtgaccttcaggaagagctgtgccaccaagaggaagctgagtgacatcaaccaggaggaggccagcggcaccagcctgcaccagaaggccatcatgaccttcacctgccacaatgagatcaatgcctttgtggtgctgagccggggcagccagatcctgagcctgaacagcacccgcttcctgaccaagctgggccactgcagcagcgcctgccccagcgacagcgtgtcccagaccaacatccagaacctgaagggcctgaacagccctgtgctgattggcaagagcaaggaccccagctgtgtggccaaggtgtctgaggagggcaagccagccatcggcacccagaagatggagctgcacgtgcgctggaggagtgacacaggaaaatgtgtggatgccagccccctggtggtgatccccacctttgacaagagcagcaccaccgtgtacatcggcagccacagccacaggatgaaggctgtggacttctacagcggcaaggtgaagtgggagcagatcctgggggaccgcatcgagagcagcgcctgtgtgtccaaatgtggcaacttcatcgtggtgggcaagttcctgaacctgcgctttgtggagctgaactag

SEQ ID NO: 105423 - DNA, 3004 bp, Artificial Sequence
  derived and/or modified sequence
ggaagatttacgtatggtgcctcgctctgggatagctttacggcttctgggagctgctgcttcgctgtgagaagtatccgcgacgagctatccgggaaagggccgaatgcgatcaaacctaatccgcgagacttgctaaggttctgtgctacaaattgatgtttagataaacttcagtgaaatgactcttcaggaattggtgcataaggctgcctcctgttatatggacagagtagctgtatgttttgatgaatgcaacaaccagcttccagtttactacacctacaagactgtggttaatgctgcttctgaattatcaaattttctgctgttacactgtgactttcaaggaattcgggaaattggtctctactgccaacctgggatagacttaccctcttggattttaggaattctccaagtcccggctgcttatgtacctatcgagccagattcaccaccgtcattatcaactcattttatgaaaaaatgtaatctaaagtatatccttgttgaaaaaaaacaaattaataaatttaaatcttttcatgaaacattattgaactatgatacatttacagtggaacataatgacctagtgctcttcagacttcactggaaaaatactgaggtgaacttgatgctaaatgatggaaaagagaaatatgaaaaagaaaaaataaaaagcataagttctgagcatgtcaatgaagaaaaagcagaagaacacatggatctgaggctaaagcattgcttagcctatgttctacatacatcagggactacagggataccgaagattgtcagagtgcctcataagtgtatagtaccaaatatccagcattttcgggtactttttgacatcacacaagaagatgttttgtttctggcttcacctctgaccttcgatccttctgttgtggaaatatttcttgctctatcaagtggtgcctctctgcttattgtaccaacttccgtcaagttgctcccatcaaaattagccagcgttctcttttcccatcatagagtgactgttttgcaggcaacaccaacattgcttagaagatttggatctcagcttatcaagtcaactgttttgtcagccactacttctcttcgagtattagcccttggtggtgaagcgtttccatcattgacagttctcagaagctggagaggagaaggcaataaaacacaaatatttaatgtttatggtatcacagaggtatcaagttgggcgaccatttataggattccagagaagactcttaactctactctcaaatgtgaattgcctgtacaactgggatttccacttcttggaacagtagttgaagtcagagatactaatggcttcacaattcaggaaggcagtggccaagtatttttaggtggcagaaacagagtgtgttttcttgatgatgaagtgacagtaccacttggcacaatgcgagctacaggagactttgtgactgtgaaagatggagagattttttttttgggacgaaaagacagtcagatcaaacgtcatggcaaacgtcttaacattgaacttgtgcaacaggttgctgaagagcttcagcaagtggagtcttgtgcagttacatggtataatcaggaaaaattaattctcttcatggtgtctaaagatgcttcagtaaaagaatacatctttaaagaactgcagaaatatcttccaagtcatgcagtcccggatgagcttgtattgatcgactctctaccatttacatcccacggcaaaattgatgtttctgagttaaacaagatatatttaaactacataaacttgaagtctgagaataagctcagtgggaaagaggacctttgggaaaaattacagtatttgtggaagtctactctgaatctcccagaagatcttttgagggttcctgatgagtcactcttcttaaatagtggtggagattccttaaagtccatccggctcctcagtgagattgaaaaacttgttggtacatcagtacctgggcttctggaaattattctcagcagttccattttagagatttataatcacatccttcaaacagtggttccagatgaagatgtgacattcaggaagagttgtgccacaaaaaggaaactcagcgacattaatcaagaggaagccagtggaacatctttacatcagaaagccatcatgactttcacttgccacaatgagattaatgcttttgttgtactgagcagagggagtcaaattttgtctctgaattccactaggtttttaacaaagttaggacattgctcttcagcctgtccttctgactcagtttcacagaccaacattcaaaatttgaaaggcttaaattctccagttcttattgggaagtcaaaagatccatcctgtgttgcaaaagtttctgaagaggggaaacctgcgatagggactcagaaaatggagttacatgtgaggtggaggtcagacacaggcaaatgtgtagatgcttcaccgctggttgtaatacccacttttgataagtcatctacaactgtgtacattggttcccattctcatagaatgaaggcagttgacttttactctgggaaggtaaaatgggaacagattttgggagatcgaattgaatcctcagcatgtgtatctaagtgtggaaactttattgtggtgggtaagtttttgaatttgaggtttgtggagttaaattgaattaccatacaataatcttcataggcccaagttaaattttttaaaaatctaaatatgatgggtttggttgctgtccaaaaattatagttaaccctgtgctgattaatattgtgggccttggggtcaagagtccctggatttgaacctacctgtatagctattatgaactctgtgacctttggcaagttactgaacctcttagaatttcactttccttgtgggtaaaatgggaataataataaaatgtgttgctgtatcacaaataccccaaaactcaacaacctagaacaacacaaa

SEQ ID NO: 105424 - DNA, 2526 bp, Artificial Sequence
  derived and/or modified sequence
atgaccctgcaggagctggtgcacaaggccgccagctgctacatggacagggtggctgtgtgtttcgacgagtgcaataaccagctgccggtgtattatacttacaagaccgtcgttaacgctgcaagcgaactatctaatttcttgctcttacattgtgactttcaaggtatccgtgaaatcggactatactgccagcccggtatcgacttaccaagctggatccttggtatcctccaagttccagcggcttatgtgcctattgaacccgattcacctcctagtcttagtacccattttatgaaaaaatgtaacctgaaatacatattggttgaaaaaaaacagatcaacaagttcaagtctttccacgagaccctgttaaactatgatacttttactgtggaacacaatgatcttgtgttgtttcgcctgcactggaagaataccgaggtgaaccttatgttgaatgatggtaaggaaaaatacgagaaagaaaagataaaatccattagctcagagcacgtgaacgaagaaaaagccgaagagcatatggatctacgattaaaacattgcctggcctacgtgctgcacactagcggaacgaccggcattcccaaaattgtccgggtgccacataagtgcatcgtcccgaacatccagcatttcagggttctgttcgacattacccaagaggatgtattattcctcgcatcaccactgacctttgacccttccgttgtcgagatttttttggcgctttcatccggcgcctcactcttgatcgtacccaccagcgtcaaactacttccctccaaattagcatcagtgctgtttagtcaccacagagttactgttttacaagccaccccgacattgctcaggcgttttggatcacaattgattaaaagtactgtgctgagcgccacaacgagcttgcgggtccttgcactgggaggggaagccttcccaagcctgactgtgttgaggtcgtggcggggggaggggaacaaaactcaaatctttaatgtctatgggatcactgaggtctcatcctgggccaccatctatagaatacccgaaaagaccctaaactcaactctcaaatgtgaactaccggtgcagttgggctttccattgctgggcaccgtcgtcgaggttcgcgatactaacgggtttaccatccaggaggggtcaggacaagtgttcctcggcggacgcaacagggtttgtttcctggacgatgaggtgacggtgccactgggaactatgcgtgctactggcgattttgtgacagttaaggatggagagatcttctttcttgggcggaaagattcccagattaagcgccacggtaagcgcctcaacatcgagctggtgcagcaagtcgcagaagaactgcaacaagtggagtcgtgtgctgtcacatggtataatcaagagaagctgatcctgttcatggtttctaaggacgcctctgtcaaggagtatatttttaaagagctgcagaaatacctgccttcccacgctgtgcccgacgagctggttctgatcgacagcctgcccttcacgagccacggaaaaattgacgtcagcgaactgaacaagatttacttaaactatatcaacctgaagtcagagaataaattgtctggaaaggaagacctctgggaaaagctgcaatatctgtggaagagcaccctgaatctccccgaagacctacttcgagtgcccgatgagagcctctttctcaatagtggaggtgacagcttgaagtccatccggctgttgagtgagatcgagaagctggtggggactagcgtgcctggtctccttgagattatcctttcaagttcgatcctggaaatctataaccacatcttgcagacagtggtgcccgatgaagacgtgacgttccggaagtcatgtgcgaccaagcgaaagctgagtgacatcaatcaggaagaagcttccgggacctcactccaccagaaagcaataatgacattcacttgccataacgagatcaacgccttcgttgtcctgagccgggggtcacagattctctccctcaacagtacccggtttctgactaagttaggccattgttcctctgcctgtccgagcgactctgtctcgcagacaaatatccaaaatctgaagggactcaatagcccggtcctaattggcaagagcaaggatccctcatgcgtggcaaaagtgagcgaggaaggcaaacccgctattggtacccagaaaatggaacttcatgtgcggtggagatcagataccggaaagtgcgttgatgcaagcccattggtggttatccccacgtttgataaatcctccaccaccgtgtatataggaagccatagccaccgaatgaaagctgttgatttttatagcggcaaagtcaagtgggaacagattttgggagatcgcatagaatcaagcgcatgcgtctctaagtgcggtaactttattgtggtgggtaaatttttaaatctaaggtttgtcgaactgaactag

SEQ ID NO: 105425 - DNA, 2526 bp, Artificial Sequence
  derived and/or modified sequence
atgactctgcaggaactagtccataaagccgcttcttgttacatggaccgagtcgccgtgtgcttcgacgagtgcaacaaccaactccccgtgtactacacatacaagaccgtggtaaacgctgcctccgagctgagtaatttcctgctgctacactgcgacttccaagggattagggaaatcggattgtattgccagcccggaattgacctgccatcttggatccttggtattctccaggtgcccgctgcttacgtacctattgagccagatagccctccatcactttccacccattttatgaaaaaatgtaaccttaagtatattcttgtcgagaaaaagcagatcaataaattcaagtcctttcatgaaacgttactcaattacgacacctttacagtggaacataatgatctggtgttgtttagactgcactggaagaataccgaagtgaacctgatgctgaacgatggcaaggagaaatatgagaaggagaaaatcaagtcaatctcaagcgagcatgtcaacgaagaaaaggcagaagagcatatggacctgagattaaagcattgtctcgcttacgtgctgcatactagcgggacaacgggcattcccaagattgtgcgcgtcccgcataaatgcatcgtacccaacattcagcatttcagagttctattcgacatcacacaggaggatgttctgtttttggcatctcctttaacatttgacccctccgtcgtggaaattttcctcgccctttcatctggggcttcattgctgattgtgccgacgagcgtgaaacttctcccaagcaagctcgcctcagttctgttttctcaccatagggtgactgtcctacaagccaccccaactctgctaagacgttttggcagtcaactcattaaaagtactgttctctccgccacaacctcactgcgggttctggccctggggggagaggcttttccctctctcaccgtcctccggtcttggagaggagagggcaataagacgcaaatatttaacgtttacggaatcacagaggtctcttcctgggctactatctaccgcataccagagaagaccctcaatagcacccttaaatgtgaacttcctgtgcaactgggctttcccttgctgggtacggttgttgaggtgagagataccaatggtttcaccattcaggagggctctggacaagtgtttctgggtgggagaaatcgggtgtgcttccttgacgatgaagtgacagtgccactaggtaccatgcgtgctaccggggattttgttacagtgaaagatggcgagatcttttttttggggagaaaggattcacagataaaaaggcacggaaagcgattgaatatcgaattggttcaacaggtggctgaggaactgcagcaggtagagtcgtgtgctgtgacctggtataatcaggagaaattaatcctgtttatggtgagcaaggacgcctccgtgaaggagtacatctttaaggagctgcagaaatatcttccaagtcacgccgtgccagacgagcttgttttgattgacagccttccttttacttcccatggcaaaatcgatgtttcagagcttaataaaatttaccttaattacattaacttgaagagcgaaaacaagcttagcgggaaggaagatctgtgggagaaattacagtatttgtggaaatctactcttaatctccccgaggatctcctgcgcgttcctgatgagagtctgtttcttaactccggaggcgatagtctgaagagtattcggctcctctcagagatcgagaagttggtcggtacatctgtgcccggacttctagaaatcatcttgtcgagctccattctagaaatttataaccatatcttgcaaactgtggttccagacgaagacgtgacttttaggaaatcctgcgcaactaagaggaagctgtccgatatcaatcaggaggaagccagcgggacatcactccatcagaaggctattatgacatttacctgccacaatgagataaatgcctttgtggttcttagcagagggtcacagattctcagtctgaacagcactcgatttctcacaaaactaggccactgcagcagcgcatgtccttccgattccgtgagccagacaaacatacagaacctcaaaggactgaactcccccgtcctcataggcaagtcaaaagatccaagttgcgtagcaaaagtttccgaagagggaaaacccgcaatcggcacccagaaaatggagttacacgtgcggtggagatcagatacagggaagtgcgtggatgcaagcccactggtagtgatccctactttcgataaatccagcactaccgtgtacattgggtctcattctcatcgtatgaaggccgtggatttctattctggcaaggtaaagtgggagcagatccttggcgatcggattgaaagctcagcatgtgtgagcaagtgcggcaatttcatcgtcgtcggcaaattcctgaacctgcggtttgtggaattaaactag

SEQ ID NO: 105426 - DNA, 2526 bp, Artificial Sequence
  derived and/or modified sequence
atgaccctgcaggagctggtgcacaaggccgccagctgctacatggacagagtggccgtgtgcttcgacgagtgcaacaaccagctgcccgtgtactacacctacaagaccgtggtgaacgccgccagcgagctgagcaacttcctgctgctgcactgcgacttccagggcatcagagagatcggcctgtactgccagcccggcatcgacctgcccagctggatcctgggcatcctgcaggtgcccgccgcctacgtgcccatcgagcccgacagcccccccagcctgagcacccacttcatgaagaagtgcaacctgaagtacatcctggtggagaagaagcagatcaacaagttcaagagcttccacgagaccctgctgaactacgacaccttcaccgtggagcacaacgacctggtgctgttcagactgcactggaagaacaccgaggtgaacctgatgctgaacgacggcaaggagaagtacgagaaggagaagatcaagagcatcagcagcgagcacgtgaacgaggagaaggccgaggagcacatggacctgagactgaagcactgcctggcctacgtgctgcacaccagcggcaccaccggcatccccaagatcgtgagagtgccccacaagtgcatcgtgcccaacatccagcacttcagagtgctgttcgacatcacccaggaggacgtgctgttcctggccagccccctgaccttcgaccccagcgtggtggagatcttcctggccctgagcagcggcgccagcctgctgatcgtgcccaccagcgtgaagctgctgcccagcaagctggccagcgtgctgttcagccaccacagagtgaccgtgctgcaggccacccccaccctgctgagaagattcggcagccagctgatcaagagcaccgtgctgagcgccaccaccagcctgagagtgctggccctgggcggcgaggccttccccagcctgaccgtgctgagaagctggagaggcgagggcaacaagacccagatcttcaacgtgtacggcatcaccgaggtgagcagctgggccaccatctacagaatccccgagaagaccctgaacagcaccctgaagtgcgagctgcccgtgcagctgggcttccccctgctgggcaccgtggtggaggtgagagacaccaacggcttcaccatccaggagggcagcggccaggtgttcctgggcggcagaaacagagtgtgcttcctggacgacgaggtgaccgtgcccctgggcaccatgagagccaccggcgacttcgtgaccgtgaaggacggcgagatcttcttcctgggcagaaaggacagccagatcaagagacacggcaagagactgaacatcgagctggtgcagcaggtggccgaggagctgcagcaggtggagagctgcgccgtgacctggtacaaccaggagaagctgatcctgttcatggtgagcaaggacgccagcgtgaaggagtacatcttcaaggagctgcagaagtacctgcccagccacgccgtgcccgacgagctggtgctgatcgacagcctgcccttcaccagccacggcaagatcgacgtgagcgagctgaacaagatctacctgaactacatcaacctgaagagcgagaacaagctgagcggcaaggaggacctgtgggagaagctgcagtacctgtggaagagcaccctgaacctgcccgaggacctgctgagagtgcccgacgagagcctgttcctgaacagcggcggcgacagcctgaagagcatcagactgctgagcgagatcgagaagctggtgggcaccagcgtgcccggcctgctggagatcatcctgagcagcagcatcctggagatctacaaccacatcctgcagaccgtggtgcccgacgaggacgtgaccttcagaaagagctgcgccaccaagagaaagctgagcgacatcaaccaggaggaggccagcggcaccagcctgcaccagaaggccatcatgaccttcacctgccacaacgagatcaacgccttcgtggtgctgagcagaggcagccagatcctgagcctgaacagcaccagattcctgaccaagctgggccactgcagcagcgcctgccccagcgacagcgtgagccagaccaacatccagaacctgaagggcctgaacagccccgtgctgatcggcaagagcaaggaccccagctgcgtggccaaggtgagcgaggagggcaagcccgccatcggcacccagaagatggagctgcacgtgagatggagaagcgacaccggcaagtgcgtggacgccagccccctggtggtgatccccaccttcgacaagagcagcaccaccgtgtacatcggcagccacagccacagaatgaaggccgtggacttctacagcggcaaggtgaagtgggagcagatcctgggcgacagaatcgagagcagcgcctgcgtgagcaagtgcggcaacttcatcgtggtgggcaagttcctgaacctgagattcgtggagctgaactag

SEQ ID NO: 105427 - protein, 161 aa, Artificial Sequence
  derived and/or modified sequence
MLADQPRTTKYHSVILQNKESLRIKSSWTWAVGLGSSVSSVHTMRGLERVYAVEASEMAQHTGQLVLQNGFADIITVYQQKVEDVVLPEKVDVLVSEWMGTCLLFEFMIESILYARDAWLKETGSFGPPWLRCTLCPAVLIRIIVARCSSGTTRTSSTSAL

SEQ ID NO: 105428 - protein, 289 aa, Artificial Sequence
  derived and/or modified sequence
MATSGDCPRSESQGEEPAECSEAGLLQEGVQPEEFVAIADYAATDETQLSFLRGEKILILRQTTADWWWGERAGCCGYIPANHVGKHVDEYDPEDTWQDEEYFGSYGTLKLHLEMLADQPRTTKYHSVILQNKESLTDKVILDVGCGTGIISLFCAHYARPRAVYAVEASEMAQHTGQLVLQNGFADIITVYQQKVEDVVLPEKVDVLVSEWMGTCLLFEFMIESILYARDAWLKEDGVIWPTMAALHLVPCSADKDYRSKVLFWDNAYEFNLSALKLEKKSSPSGDDS

SEQ ID NO: 105429 - DNA, 870 bp, Artificial Sequence
  derived and/or modified sequence
atggcaaccagcggggattgtccacggtcagaatctcagggtgaggagccggcagagtgtagtgaagccggcctgctacaggaaggtgtgcagcccgaggagtttgtggcgatcgctgactatgcagccaccgatgagacccagttatccttcctgcggggtgaaaaaatcctcattctgcggcaaacgacggcggattggtggtggggggaaagagccggatgctgcggctatattccagcaaatcacgtggggaagcatgtcgatgagtacgatccggaagacacctggcaggacgaggagtatttcgggagttacgggactttgaagctacatctggagatgttagcagatcaaccccggaccaccaaataccacagcgtgatcctgcaaaataaggagtcactaacagataaggtgattctcgacgtgggatgcggcacagggatcatcagtctcttttgcgctcattatgcccgtccacgggcggtgtatgcagttgaggcttcggaaatggctcaacataccggacagttagtcctccagaacgggttcgccgacattatcaccgtttatcagcagaaagtggaggacgtggtgctacccgagaaagtagacgtgctcgtatccgaatggatgggaacatgtctactgttcgaatttatgatcgagtcaatcctttatgcgagagatgcctggctcaaagaggacggcgtgatttggcctaccatggccgccctccacttggtgccatgttcagcagacaaggactacaggagcaaggtgttattctgggacaacgcttatgagttcaatctgagcgctttgaagctggagaaaaaatcctcgcccagtggggatgactcgtag

SEQ ID NO: 105430 - DNA, 870 bp, Artificial Sequence
  derived and/or modified sequence
atggccaccagcggggactgccccaggtctgagagccagggcgaggagccagcagaatgttctgaggccggcctgctgcaggagggcgtgcagcctgaggagtttgtggccatcgctgactatgctgccacagatgagacccagctgtccttcctgcggggggagaagatcctgatcctgcggcagaccacagctgactggtggtggggcgagagagctggctgctgcggctacatcccagccaaccacgtgggcaagcacgtggatgaatatgaccctgaggacacctggcaggatgaggagtacttcggcagctatggcaccctgaagctgcacctggagatgctggccgaccagcccaggaccaccaagtaccacagcgtcatcctgcagaacaaggagagcctgacagacaaggtgatcctggatgtgggctgcggcaccggcatcatcagcctcttctgtgcccactacgcccggcccagggctgtgtatgctgtggaggccagcgagatggcccagcacacaggccagctggtgctgcagaatggatttgctgacatcatcaccgtgtaccagcagaaggtggaggatgtggtgctgcctgagaaggtggatgtgctggtgtctgagtggatgggcacctgcctgctgtttgagttcatgattgagagcatcctgtatgccagagatgcctggctgaaggaggatggagtcatctggcccaccatggccgccctgcacctggtgccctgcagcgctgacaaggactaccgcagcaaggtgctcttctgggacaatgcctatgagttcaacctgagcgccctgaagctggagaagaagagcagccccagcggagatgacagctag

SEQ ID NO: 105431 - DNA, 870 bp, Artificial Sequence
  derived and/or modified sequence
atggccaccagcggcgactgcccccggagcgagagccagggcgaggagccagcagaatgttccgaggccggactactgcaggagggcgttcagccagaggaattcgtcgccatcgctgactatgcggctaccgatgagactcaactgagctttcttcggggggaaaagatcctcattttgcgtcagacaactgcagactggtggtggggtgagcgggcaggctgctgcggttatatcccagctaatcatgttggcaagcatgtggacgagtatgatcctgaggacacctggcaggacgaagagtacttcggaagttatggaaccttaaagctccacttagagatgttggcggatcagcccaggacgaccaaataccacagcgtgatactgcagaacaaggagtcattaaccgataaggtgatattggacgttgggtgtggcaccggaattatttccctgttctgtgcccattacgcaaggccccgtgccgtgtatgccgtggaagctagcgaaatggctcagcacacgggacaattagtgctgcaaaatgggtttgcggacataatcacggtttatcagcagaaagtcgaggatgtggtcctgcctgagaaggtggatgtcctggtctccgagtggatgggcacgtgtttgttatttgagttcatgatcgagtccattctgtacgctagagatgcctggcttaaggaggacggcgtcatctggcccacgatggctgctcttcatcttgtgccttgtagtgcagacaaagattatcgctccaaggtccttttttgggataacgcatacgagttcaacctgtccgctctcaagcttgagaaaaaatctagcccctccggagacgatagttag

SEQ ID NO: 105432 - DNA, 870 bp, Artificial Sequence
  derived and/or modified sequence
atggcaacatctggcgactgtcctcgctccgaaagccagggggaggaacctgcagagtgttctgaggccggactgctgcaggaaggggtccagccagaggagtttgtagcgattgccgattatgccgcaaccgacgaaacacaactgagcttcttaagaggggagaagatcctgatactacgccagacaacagctgactggtggtggggtgaacgggcagggtgctgtggatacattccggcaaatcatgtagggaagcacgtcgatgagtacgatcctgaagatacgtggcaggacgaagagtactttgggtcctatggaacactgaaactgcacctcgagatgcttgcggatcagcctcggactacgaagtaccacagtgtcattttgcagaataaagagagcctgactgataaggtcatcctggacgtcggctgcggtaccgggattatctcgcttttctgtgcccattacgctcggcctagggccgtgtatgccgtggaagcaagcgaaatggcgcagcataccggccagctggttctgcagaatggtttcgcagacattatcaccgtgtaccagcagaaggtggaggatgtcgtcctgcccgaaaaggtggacgttttggtttctgagtggatgggcacctgtttgctgtttgaattcatgatcgaatctatattatacgccagagacgcttggctaaaagaagacggagtgatatggccaaccatggctgcgttgcacctggtaccctgttccgctgacaaagactacaggtctaaggtgttgttttgggacaatgcctacgaatttaatctgagtgcccttaagctggagaagaagagcagcccttctggggatgatagttag

SEQ ID NO: 105433 - DNA, 1656 bp, Artificial Sequence
  derived and/or modified sequence
ggcctgcgtgcactgcgcttgcgcgggttgagggcggtggctcaggctcctggaaaggaccgtccacccctccgcgctggcggtgtggacgcggaactcagcggagaaacgcgattgagaaatggaaaagaaaatgaaataaatcagcagttatgaggcagagcctaagagaactatggcaacatcaggtgactgtcccagaagtgaatcgcagggagaagagcctgctgagtgcagtgaggccggtctcctgcaggagggagtacagccagaggagtttgtggccatcgcggactacgctgccaccgatgagacccagctcagttttttgagaggagaaaaaattcttatcctgagacaaaccactgcagattggtggtggggtgagcgtgcgggctgctgtgggtacattccggcaaaccatgtggggaagcacgtggatgagtacgaccccgaggacacgtggcaggatgaagagtacttcggcagctatggaactctgaaactccacttggagatgttggcagaccagccacgaacaactaaataccacagtgtcatcctgcagaataaagaatccctgacggataaagtcatcctggacgtgggctgtgggactgggatcatcagtctcttctgtgcacactatgcgcggcctagagcggtgtacgcggtggaggccagtgagatggcacagcacacggggcagctggtcctgcagaacggctttgctgacatcatcaccgtgtaccagcagaaggtggaggatgtggtgctgcccgagaaggtggacgtgctggtgtctgagtggatggggacctgcctgctgtttgagttcatgatcgagtccatcctgtatgcccgggatgcctggctgaaggaggacggggtcatttggcccaccatggctgcgttgcaccttgtgccctgcagtgctgataaggattatcgtagcaaggtgctcttctgggacaacgcgtacgagttcaacctcagcgctctgaagttggagaaaaagtcttccccatctggagatgacagttgatgctttatttggaaagcagtgtgcatatcttgaggggtgatgaacacaagcaaaccaagttgcacctggcttctgcacactcctgcgaaagtcggtgaacattcactccacattgacccctccctagcctggcaggtgacgtcagggtccttcacagacaaacacgcttgggctcggcaggagctgccgtggccacccccgctgcccagtgtctgccctctagaagtaggctgtgtttccaggtgttcacccgtggtgcccacagtgccgacccgtggctgggtcggagctccatgttcctaagctaggtctaggtctacactcctaggacgcacgcatatcagcccgtgtaccctgtgacagtgactgtccccacctcctatgttagtggtgcccttactgccgtcgctcatccactcgtgtgggacgtaggattgcacagggctgtgccagtggcgtgtagggaacactgccctggctcagcgtgcgagctaaggtggtgatgtatgcgatgggactctgcatgggatagtacagttgtgtagacgtcttccaaataaattatgtgttggtccatcgcacatgctcaataaatatttttaaatgagtga

SEQ ID NO: 105434 - DNA, 870 bp, Artificial Sequence
  derived and/or modified sequence
atggccaccagcggcgactgccccagaagcgagagccagggcgaggagcccgccgagtgcagcgaggccggcctgctgcaggagggcgtgcagcccgaggagttcgtggccatcgccgactacgccgccaccgacgagacccagctgagcttcctgagaggcgagaagatcctgatcctgagacagaccaccgccgactggtggtggggcgagagagccggctgctgcggctacatccccgccaaccacgtgggcaagcacgtggacgagtacgaccccgaggacacctggcaggacgaggagtacttcggcagctacggcaccctgaagctgcacctggagatgctggccgaccagcccagaaccaccaagtaccacagcgtgatcctgcagaacaaggagagcctgaccgacaaggtgatcctggacgtgggctgcggcaccggcatcatcagcctgttctgcgcccactacgccagacccagagccgtgtacgccgtggaggccagcgagatggcccagcacaccggccagctggtgctgcagaacggcttcgccgacatcatcaccgtgtaccagcagaaggtggaggacgtggtgctgcccgagaaggtggacgtgctggtgagcgagtggatgggcacctgcctgctgttcgagttcatgatcgagagcatcctgtacgccagagacgcctggctgaaggaggacggcgtgatctggcccaccatggccgccctgcacctggtgccctgcagcgccgacaaggactacagaagcaaggtgctgttctgggacaacgcctacgagttcaacctgagcgccctgaagctggagaagaagagcagccccagcggcgacgacagctag

SEQ ID NO: 105435 - protein, 136 aa, Artificial Sequence
  derived and/or modified sequence
MNLSSASSTEEKAVTTVLWGCELSQERRTWTFRPQLEGKQSCRLLLHTICLGEKAKEEMHRVEILPPANQEDKKMQPVTIASLQASVLPMVSMVGVQLSPPVTFQLRAGSGPVFLSGQERYEKKAGKRRRGNKSQR

SEQ ID NO: 105436 - DNA, 411 bp, Artificial Sequence
  derived and/or modified sequence
atgaatctgtcgagcgccagcagtacggaagagaaggctgtaacaaccgtactctggggatgcgaactgtcacaagagcgcagaacgtggacattcagaccccagcttgagggcaaacaaagctgccgcctacttctacacactatttgtctaggcgagaaggctaaagaggaaatgcatcgcgtcgagattttgccccccgccaaccaggaagataaaaagatgcagcccgtcacaattgcctccctacaggcatctgtccttcctatggtgtcaatggtgggagtacagttatctcctcctgtgacgttccaacttagggctggaagcgggcctgtttttttgagcggacaagaacgctacgaaaaaaaagcagggaagcgaaggcgtggtaacaagagtcagagatag

SEQ ID NO: 105437 - DNA, 411 bp, Artificial Sequence
  derived and/or modified sequence
atgaacctgagcagcgccagcagcacagaggagaaggctgtgaccaccgtgctgtggggctgtgagctgagccaggagaggaggacctggaccttccggccccagctggagggcaagcagagctgccgcctgctgctgcacaccatctgcctgggggagaaggccaaggaggagatgcaccgggtggagatcctgcccccagccaaccaggaggacaagaagatgcagcctgtgaccatcgccagcctgcaggcctctgtgctgcccatggtgtccatggtgggcgtgcagctgagcccccctgtgaccttccagctgcgggccggcagcggccctgtgttcctgagcggccaggagagatatgagaagaaggccggcaagagaagaagaggcaacaagagccagaggtag

SEQ ID NO: 105438 - DNA, 411 bp, Artificial Sequence
  derived and/or modified sequence
atgaacctgagcagcgccagcagcaccgaggagaaggccgtgaccaccgtcttgtggggatgcgagctatcgcaggagagacggacatggacctttcggccacagctcgagggcaaacagagctgtcggctgctgctccatactatctgcctcggagagaaggccaaggaagagatgcatagagtggagattctcccacctgcaaatcaggaagacaaaaagatgcagccagtgacgatcgcgagcctgcaggcttcggtgcttccaatggtttctatggttggagttcagctttcaccacccgtgacgttccagctgagggctggatctggacccgtcttcctttccggtcaggaacgatatgaaaagaaggcaggcaagaggagacgaggtaataagagccagagatag

SEQ ID NO: 105439 - DNA, 925 bp, Artificial Sequence
  derived and/or modified sequence
ctgggacctaagccgcgcgcacacccctttctctgcgtctggtggaggtgcacagaggcttttgagtcaggcccaagcgcagccaggtgacctccccgcggcctttcaagcctgagctcggtggacagctccctctcccgtgagtcccgctgtcctgtacgcgcccggtcgagccccgggctgcgcaccccgctaggagctgcccggccagcccgcttctctgcccggagccatgaatctcagtagcgccagtagcacggaggaaaaggcagtgacgaccgtgctctggggctgcgagctcagtcaggagaggcggacttggaccttcagaccccagctggaggggaagcagagctgcaggctgttgcttcatacgatttgcttgggggagaaagccaaagaggagatgcatcgcgtggagatcctgcccccagcaaaccaggaggacaagaagatgcagccggtcaccattgcctcactccaggcctcagtcctccccatggtctccatggtaggagtgcagctttctcccccagttactttccagctccgggctggctcaggacccgtgttcctcagtggccaggaacgttatgaaaaaaaagctggaaaaagaagaagaggaaataagagccagcgttagagacaagagccctgtgaaaaaggccaaagccacagccagagccaagaagccaggattcaagaaatgaggagccacgccttggggggcacggtgcaaagtgggccttccctgggctgtgctgcaggcacagggtgcccctgtccagcccctccacctgtgtctgaatgcaacaggggtgttgcgggggcaacatgagagcccctcacccccaactctccactttcaggaggcccccagtgaagagccccacctcggggtcacaataaagttgcctggtcagga

SEQ ID NO: 105440 - DNA, 411 bp, Artificial Sequence
  derived and/or modified sequence
atgaatctctcttcagcatctagcactgaagagaaagccgtaactaccgtgctgtggggttgtgagctgtcacaagaaagacggacctggacctttcggccacagctagaggggaaacagagctgtcgcttactgctgcatactatttgcctcggcgagaaggctaaagaggagatgcaccgcgtagaaatccttccccctgccaatcaggaagataagaagatgcagcctgtaactatagccagtctgcaagcctctgttctgcctatggtatccatggtcggagtccagctatccccaccagtcacctttcagctaagggctgggagtggacccgtttttctctcaggccaggagagatatgagaaaaaggctggaaaaagacgtcggggtaacaagagtcagaggtag

SEQ ID NO: 105441 - DNA, 411 bp, Artificial Sequence
  derived and/or modified sequence
atgaacctgagcagcgccagcagcaccgaggagaaggccgtgaccaccgtgctgtggggctgcgagctgagccaggagagaagaacctggaccttcagaccccagctggagggcaagcagagctgcagactgctgctgcacaccatctgcctgggcgagaaggccaaggaggagatgcacagagtggagatcctgccccccgccaaccaggaggacaagaagatgcagcccgtgaccatcgccagcctgcaggccagcgtgctgcccatggtgagcatggtgggcgtgcagctgagcccccccgtgaccttccagctgagagccggcagcggccccgtgttcctgagcggccaggagagatacgagaagaaggccggcaagagaagaagaggcaacaagagccagagatag

SEQ ID NO: 105442 - protein, 494 aa, Artificial Sequence
  derived and/or modified sequence
MSTPAVPQDLQLPPSQRAQSAFKEQRRQKLKEHLLRRKTLFAYKQENEMLSSRDQRVVTSEDQVQEGTKVLKLKTKMADKENMKRPAESKNNTVVGKHCIPLKPSNELTNSTVVIDTHKPKDSNQTPHLLLTEDDPQSQHMTLSQAFHLKNNSKKKQMTTEKQKQDANMPKKPVLGSYRGQIVQSKINSFRKPLQVKDESSAATKKLSATIPKATKPQPVNTSSVTVKSNRSSNMTATTKFVSTTSQNTQLVRPPIRSHHSNTRDTVKQGISRTSANVTIRKGPHEKELLQSKTALSSVKTSSSQGIIRNKTLSRSIASEVIARPASLSNDKLMEKSEPVDQRRHTAGKAIVDSRSAQPKETSEERKARLSEWKAGKGRVLKRPPNSVVTQHEPAGQNEKPVGSFWTTMAEEDEQRLFTEKVNNTFSECLNLINEGCPKEDILVTLNDLIKNIPDAKKLVKYWICLALIEPITSPIENIIAIYEKAILAGAQVR

SEQ ID NO: 105443 - DNA, 1485 bp, Artificial Sequence
  derived and/or modified sequence
atgagcactccagcagtacctcaggatctgcagctccccccctctcagagggcacagtcagcctttaaagaacagaggcggcagaagttgaaagagcaccttcttcgcagaaagaccttgttcgcatacaaacaggagaacgagatgctgtcctctcgagaccaaagagtggtgacatctgaagatcaggttcaggagggaacaaaggtactgaagctcaagacaaagatggcagataaggaaaatatgaagagacctgctgagtccaagaataacacagtagtcggtaaacactgcattcctctaaagccatctaacgaattgaccaactccaccgtagtgatcgatactcacaaacctaaagacagtaatcagaccccccatctgttactaactgaggatgaccctcagtcacagcatatgacactgtcacaagctttccatctgaagaataattccaaaaaaaaacagatgacaactgagaagcaaaaacaggatgccaatatgcccaagaagccagtgcttggctcataccgggggcagatagtccaatctaagatcaactcgttcaggaagcccttgcaggttaaagacgaatctagcgcggccactaaaaagttgtcagcaactatccctaaggcgaccaagcctcagcctgtgaacaccagctctgttacagtgaagtcaaacagatccagtaatatgactgctacaaccaaatttgtgtccactacttctcagaacacccaactggttcgaccaccgatccgcagtcatcattctaatacacgcgacaccgtcaaacagggcatctcccgcactagcgcaaacgttacaattagaaagggcccccatgaaaaggagctgctccagtccaagacagccctatcctctgtaaaaacttcttcttcccagggaattatccgaaacaaaacactgtctcggagcattgcgagcgaggtgatcgcgagacccgcctcattgagcaatgacaaattgatggaaaagagcgagcctgtggaccagaggcggcatacggcaggaaaagccatcgtggactcccgcagcgcccagcccaaagaaaccagcgaagaacggaaggcgagattgtctgagtggaaggctgggaagggtagagtgcttaaaaggcccccaaatagcgtggtgacccagcatgaacctgctggccaaaacgagaaacccgtcggctccttctggacgactatggctgaggaggatgagcagcgcctttttaccgagaaagtgaataacaccttctctgagtgcctgaacctgatcaatgaagggtgcccaaaggaggacattttggtgaccctgaatgacctaattaagaatattcctgacgcaaagaaactggtcaaatactggatatgccttgctctcatagaacctataacatctcccatagagaatatcattgccatctacgagaaggccattcttgccggagcccaggtgagatag

SEQ ID NO: 105444 - DNA, 1485 bp, Artificial Sequence
  derived and/or modified sequence
atgagcaccccagctgtgccccaggacctgcagctgccccccagccagagggcccagagcgccttcaaggagcagaggcggcagaagctgaaggagcacctgctgcggaggaagaccctgtttgcctacaagcaggagaatgagatgctgagcagccgggaccagagggtggtgaccagcgaggaccaggtgcaggagggcaccaaggtgctgaagctgaagaccaagatggctgacaaggagaacatgaagaggcctgctgagagcaagaacaacacagtggtgggcaagcactgcatccccctgaagcccagcaatgagctgaccaacagcacagtggtgattgacacccacaagcccaaggacagcaaccagaccccccacctgctgctgacagaagatgacccccagagccagcacatgaccctgagccaggccttccacctgaagaacaacagcaagaagaagcagatgaccacagagaagcagaagcaggatgccaacatgcccaagaagcctgtgctgggcagctaccggggccagatcgtgcagagcaagatcaacagcttcaggaagcccctgcaggtgaaggatgagagcagcgctgccaccaagaagctgagcgccaccatccccaaggccaccaagccccagcctgtgaacaccagctctgtgacagtgaagagcaacagaagcagcaacatgacagccaccaccaagtttgtgtccaccaccagccagaacacccagctggtgcggccccccatccgcagccaccacagcaacacccgggacacagtgaagcagggcatcagcaggaccagcgccaacgtgaccatcaggaagggcccccatgagaaggagctgctgcagagcaagacagccctgagctctgtgaagaccagcagcagccagggcatcatccggaacaagaccctgagccgcagcatcgccagcgaggtgattgcccggcctgccagcctgagcaatgacaagctgatggagaagtctgagcctgtggaccagaggaggcacacagctgggaaggccatcgtggacagccgcagcgcccagcccaaggagaccagcgaggagaggaaggcccggctgtctgagtggaaggccggcaagggccgggtgctgaagaggcctcccaacagcgtggtgacccagcacgagcctgctggccagaatgagaagcctgtgggcagcttctggaccaccatggccgaggaggatgagcagaggctcttcacagagaaggtgaacaacaccttcagcgagtgcctgaacctgatcaatgaaggctgccccaaggaggacatcctggtgaccctgaatgacctgatcaagaacatcccagatgccaagaagctggtgaagtactggatctgcctggccctgattgagcccatcaccagccccatcgagaacatcatcgccatctatgagaaggccatcctggccggggcccaggtgaggtag

SEQ ID NO: 105445 - DNA, 1485 bp, Artificial Sequence
  derived and/or modified sequence
atgagcacccccgccgtgccccaggacctgcagctgccccccagccagcgcgctcagagcgccttcaaagagcagcggagacagaaactcaaggaacacctgctccggcgtaagactttgttcgcttacaagcaggagaacgagatgctgagttcccgcgaccagcgagtggtgacctctgaagatcaggtgcaggagggtaccaaggtcctcaagctgaagaccaagatggctgataaggaaaacatgaaacgtcctgccgaatctaaaaacaacacagtcgtcggcaagcactgcattccacttaaacccagtaacgagttgactaatagcaccgttgtcattgatacccataagccaaaagatagcaatcagacccctcatcttctgctgaccgaggatgatccacagtcgcagcatatgacactgtctcaggcatttcatctgaagaataacagcaagaagaaacagatgacgacagaaaagcagaagcaggatgccaacatgccaaagaagcctgtgctcggatcctatagaggacagattgttcagagtaaaattaatagtttcaggaagccactgcaggttaaagacgagagctctgctgccactaagaagctctccgctaccatccccaaggcaacaaagccccaaccagtgaatacatcaagcgttactgtgaaaagtaaccgctcctccaacatgaccgcaaccaccaaatttgtgagtacaacctctcagaatactcagctggttagacccccaatccgcagtcaccacagtaacactcgggacaccgtgaaacagggaatctcccgaactagtgcaaacgttacaatccgtaagggtccgcatgagaaagaacttcttcaatcaaaaacagccctgtctagtgtgaagacaagttcctcgcagggcattattcgcaacaagacccttagccgttcaatagcttctgaggtgatcgcacgtcctgcctccttatctaacgacaaactgatggagaagtccgaacctgtcgatcagcggcggcacactgcagggaaggctattgtcgactcccgcagtgctcaacctaaagagactagtgaagaacggaaagcacgcctgagcgaatggaaggccgggaaagggagggttctgaaacggcccccgaacagtgtcgtgacacagcacgaacctgctggccagaatgaaaagcccgtaggtagtttttggaccaccatggccgaggaggatgagcaaaggcttttcacagaaaaggtgaataacacattctccgaatgtctaaacttaataaacgagggctgtcctaaggaagacatcctcgttactttgaatgacctaattaaaaacatccccgatgcaaaaaaactagtgaagtactggatctgcctcgcactcatagagccaatcaccagccccattgagaatattattgctatctacgagaaggccatacttgcaggagcccaggttcggtag

SEQ ID NO: 105446 - DNA, 1485 bp, Artificial Sequence
  derived and/or modified sequence
atgtccactcccgctgtgccacaggatcttcagctcccaccttcccaacgggcacagtccgccttcaaagaacagcgtagacagaaattgaaggaacacctcctgcggcgtaagacactttttgcctacaagcaggagaatgaaatgctcagcagtcgagatcagagagtggttacctctgaggaccaggtccaggaggggaccaaggttttgaagctgaagaccaagatggccgataaagagaatatgaaacgcccagccgagagcaagaataatacggtggttggcaaacactgcatacccttgaaaccatcaaatgagctcaccaatagcacagtcgtcatagacacccacaaaccaaaggactccaatcagactccccaccttctactgacggaggacgacccccagtcacagcacatgactctcagccaggcctttcatttgaaaaacaacagtaagaaaaaacaaatgacaacagagaagcagaagcaggatgcgaacatgcccaaaaaacctgtcctcggatcataccgcggacagatagtacagtccaagattaatagttttcgcaaacctcttcaggtgaaggacgagtcatctgccgctacaaaaaaactctccgccactatcccaaaagccaccaagccacaacctgttaacacatctagcgtaactgttaagtccaataggtcaagtaatatgaccgctacaactaaattcgtgtctactacatctcagaacactcagctggtgaggcctcctattcgatctcaccactccaacactagagacactgtcaagcaagggatctccagaacatccgcgaatgtgactatcaggaaaggccctcacgaaaaagagctcctccagagcaaaacagccttgagcagtgtcaaaacttctagctcacaggggattatcaggaataaaaccctatcaagaagtattgcttccgaggttatcgctcgccctgccagcctgtccaacgacaagttaatggagaagtccgagccagttgaccagagaaggcacaccgctggaaaggcaatcgtggattctcggtcagctcagcctaaagaaactagtgaagaacgaaaagcccgactatcagaatggaaggcaggaaaggggagggttctgaaacggcctccaaatagcgtggtcacacagcacgagccagctggacagaacgagaagccggttgggagcttctggaccactatggccgaggaagatgaacagagattattcaccgaaaaagtgaacaacactttctctgaatgtctgaatctcattaacgagggctgtccgaaggaggatatcctggtgacactgaacgatctgatcaagaacatcccagacgcaaaaaagttggtgaaatactggatctgcctcgccctaatcgaaccaatcacaagtccaatcgaaaacattattgcaatatacgaaaaagccatcctcgctggggcacaagtaaggtag

SEQ ID NO: 105447 - DNA, 1939 bp, Artificial Sequence
  derived and/or modified sequence
ggagacggcagccgcgccgtctgacggcttagccgcggtgcagactgcggcggcggtggtctgaggaagttctatcttggcgctaaagcggagacgcatcccccgacccgaggctacgatgagcacaccggccgtgccccaggacctgcagctgcccccgagtcagagggcgcagtccgcattcaaagagcaaagaagacaaaaactcaaggaacatctgttgagaagaaaaacgctttttgcatacaagcaggaaaatgagatgttatccagtagagatcagagagttgtgacatctgaggaccaagttcaagaagggactaaagtgctgaaacttaaaacaaaaatggctgataaagaaaacatgaagagacctgcagagagcaaaaataatacagtggtggggaaacattgtattcctttaaaaccttcaaatgaactaaccaattcaactgtagtaattgacacacataaacctaaggatagtaatcaaactccgcatttgttactaactgaagatgatccccaaagtcaacatatgacattaagccaggcatttcaccttaaaaacaatagtaaaaagaaacaaatgactacagaaaaacaaaagcaagatgctaacatgcccaagaaacctgtgcttggatcttatcgtggccagattgttcagtctaagattaattcatttagaaaacctctacaagtcaaagatgagagttctgcagcaacaaagaaactttcagccactatacctaaagccacaaaacctcagcctgtaaacaccagcagtgtaacagtgaaaagtaatagatcctccaatatgactgccactactaaatttgtgagcactacatctcagaacacacaacttgtgcgacctcctattagaagtcatcacagtaatacccgggacactgtgaaacaaggcatcagtagaacttctgccaatgttacaatccggaaagggcctcatgaaaaagaactattacaatcaaaaacagctttatctagtgtcaaaaccagttcttctcaaggtataataagaaataagactctatcaagatccatagcatctgaagttatagccaggcctgcttcattgtctaatgataaactgatggaaaagtcagagcccgttgaccagcgaagacatactgcaggaaaagcaattgttgatagtagatcagctcagcccaaagaaacctcggaagagagaaaagctcgtctgagtgagtggaaagctggcaaaggaagagtgctaaaaaggccccctaattcagtagttactcagcatgagcctgcaggacaaaatgaaaaaccagttgggtctttttggactaccatggcagaagaagatgaacaaagattatttactgaaaaagtaaacaacacattttctgaatgcctgaacttgattaatgagggatgtccaaaagaagatatactggtcacactgaatgacctgattaaaaatattccagatgccaaaaagcttgttaagtattggatatgtcttgcacttattgaaccaatcacaagtcctattgaaaatattattgcaatctatgagaaagccattctggcaggggctcaggtaagataaaaatttactgatctttacaattacagtgtagtagacaattcggaattaatttgaaacacatcacaacataacttgagaaaattttctttgtatatgtagtggtaataaatgtttaaaggctgcaaggattgcattataaaagctgtttgttggctttctaagtcttttattcctgtattgggaataatcagattttagaaaatggatataagctgaaatgtatatttaatgaaactttctgcatgaaatgttttagcatattattgtatgcatttcctggttggaagtttactgggagactgaatgtaatattaaaatttgtttattgaatataaa

SEQ ID NO: 105448 - DNA, 1485 bp, Artificial Sequence
  derived and/or modified sequence
atgagcacccccgccgtgccccaggacctgcagctgccccccagccagagagcccagagcgccttcaaggagcagagaagacagaagctgaaggagcacctgctgagaagaaagaccctgttcgcctacaagcaggagaacgagatgctgagcagcagagaccagagagtggtgaccagcgaggaccaggtgcaggagggcaccaaggtgctgaagctgaagaccaagatggccgacaaggagaacatgaagagacccgccgagagcaagaacaacaccgtggtgggcaagcactgcatccccctgaagcccagcaacgagctgaccaacagcaccgtggtgatcgacacccacaagcccaaggacagcaaccagaccccccacctgctgctgaccgaggacgacccccagagccagcacatgaccctgagccaggccttccacctgaagaacaacagcaagaagaagcagatgaccaccgagaagcagaagcaggacgccaacatgcccaagaagcccgtgctgggcagctacagaggccagatcgtgcagagcaagatcaacagcttcagaaagcccctgcaggtgaaggacgagagcagcgccgccaccaagaagctgagcgccaccatccccaaggccaccaagccccagcccgtgaacaccagcagcgtgaccgtgaagagcaacagaagcagcaacatgaccgccaccaccaagttcgtgagcaccaccagccagaacacccagctggtgagaccccccatcagaagccaccacagcaacaccagagacaccgtgaagcagggcatcagcagaaccagcgccaacgtgaccatcagaaagggcccccacgagaaggagctgctgcagagcaagaccgccctgagcagcgtgaagaccagcagcagccagggcatcatcagaaacaagaccctgagcagaagcatcgccagcgaggtgatcgccagacccgccagcctgagcaacgacaagctgatggagaagagcgagcccgtggaccagagaagacacaccgccggcaaggccatcgtggacagcagaagcgcccagcccaaggagaccagcgaggagagaaaggccagactgagcgagtggaaggccggcaagggcagagtgctgaagagaccccccaacagcgtggtgacccagcacgagcccgccggccagaacgagaagcccgtgggcagcttctggaccaccatggccgaggaggacgagcagagactgttcaccgagaaggtgaacaacaccttcagcgagtgcctgaacctgatcaacgagggctgccccaaggaggacatcctggtgaccctgaacgacctgatcaagaacatccccgacgccaagaagctggtgaagtactggatctgcctggccctgatcgagcccatcaccagccccatcgagaacatcatcgccatctacgagaaggccatcctggccggcgcccaggtgagatag

SEQ ID NO: 105449 - protein, 346 aa, Artificial Sequence
  derived and/or modified sequence
MFAEGEEMYLQGSSIWHPACRQAARTEDRNKETRTSSESIISVPASSTSGSPSRVIYAKLGGEILDYRDLAALPKSKAIYDIDRPDMISYSPYISHSAGDRQSYGESPQLLSPTPTEGDQDDRSYKQCRTSSPSSTGSVSLGRYTPTSRSPQHYSRPDTGVKDNIYRKPPIYRQHAARRSDGEDGSLDQDNRKQKSSWLMLKGDADTRTNSPDLDTQSLSHSSGTDRDPLQRMAGDSFHSRFPYSKSDPLPGHGKNGLDQRNANLAPCGADPDASWGMREYKIYPYDSLIVTNRIRVKLPKDVDRTRLERHLSPEEFQEVFGMSIEEFDRLALWKRNDLKKKALLF

SEQ ID NO: 105450 - DNA, 1041 bp, Artificial Sequence
  derived and/or modified sequence
atgttcgctgagggtgaggagatgtatttgcaggggtcaagtatatggcatccagcctgcaggcaggccgccagaacagaagaccgtaacaaagaaactcgcaccagttccgagtccatcatcagtgtgccagctagtagcactagcggctcgccttcccgagtgatatacgccaagctaggcggggaaatcctagactacagggacctggccgcccttcctaaatctaaggcaatttacgacattgaccggcccgatatgatttcttattcaccctacattagccattcggccggagacagacagtcctacggagagtccccacagctcctgagcccaacaccaaccgaaggagatcaggatgatagatcctataagcagtgccgcacctcatctccttcttctaccggcagcgtgtctctaggtaggtatacaccgacttctcgctctccacagcattattctaggcccgataccggggtgaaggacaacatttaccgcaaaccccccatttacagacaacacgccgccagaagatccgatggagaggacggtagccttgaccaagacaaccgtaaacagaaatcatcatggttaatgctgaagggtgatgccgatacacgcaccaactcccccgaccttgatacacagtcgctttctcactcatctggcaccgacagagatcccttgcagcggatggctggcgattcgttccacagtcgtttcccttactctaaatctgacccactgcccggtcacggaaagaatggtctagatcagcggaacgcgaatctggccccgtgtggggcggacccagatgccagttggggaatgcgcgagtataagatatacccatatgactcccttattgttaccaacaggattcgcgtaaagctacctaaagacgtggataggactagactagagcggcacctgtccccagaggagttccaggaggtcttcggaatgtccatagaggaatttgaccgcctggcactgtggaagaggaacgacctgaaaaagaaggctctgttgttctag

SEQ ID NO: 105451 - DNA, 1041 bp, Artificial Sequence
  derived and/or modified sequence
atgttcgctgagggcgaggagatgtacctgcagggaagctcgatttggcacccagcatgcagacaggcagcgagaactgaggacagaaacaaggagactcggacctcttcggaatccattatcagcgtaccggcgagctccacatcaggcagccccagccgggttatctatgccaaactagggggtgaaatattagattatagggatctagcggctcttccaaaatccaaagccatttacgatatcgatcggccggacatgatatcgtactcaccctacatctcacactcagctggcgaccggcagagttacggggagtcacctcaattactttcccctacccctaccgaaggagatcaagacgatcggtcctacaagcagtgcaggacctcatccccgtctagtaccggatcagtcagcctgggccgatacactcccacctctaggtcaccacagcattacagccgtccagacactggtgttaaagacaatatatacaggaagccaccaatctatcgccaacacgccgctcgccgtagtgatggcgaagacgggtccctggatcaggacaacaggaagcaaaagtcctcatggctgatgttaaagggcgacgcagacacgcgaaccaacagtcccgatctcgatacacagtccctgtcccattcttccggcacggaccgggatcctttgcagcgcatggctggagatagcttccacagtcgattcccttatagcaaatctgacccgttaccgggccatggaaagaacgggttggaccaaagaaacgccaatctcgccccttgtggcgcggacccagatgcctcttggggaatgagagagtataaaatctacccatatgacagcctgattgttaccaaccggattcgtgttaagttacccaaggacgtcgataggacacgattagagcggcacctatctcctgaggagtttcaggaggtgttcggtatgtcaattgaggagttcgatagactggccctttggaaacggaacgacctgaaaaaaaaggccttgctgttttag

SEQ ID NO: 105452 - DNA, 1041 bp, Artificial Sequence
  derived and/or modified sequence
atgtttgctgagggggaggagatgtacctgcagggcagcagcatctggcacccagcctgccggcaggccgccaggacagaagatagaaacaaggagaccaggaccagcagcgagagcatcatctctgtgcctgccagcagcaccagcggcagccccagcagggtcatctatgccaagctgggcggggagatcctggactacagagacctggccgccctgcccaagagcaaggccatctatgacatcgacagaccagacatgatctcctacagcccctacatcagccacagcgctggggaccggcagagctatggagagagcccccagctgctgagccccacccccacagaaggagaccaggatgacaggagctacaagcagtgcaggaccagcagccccagcagcacaggctctgtgtccctgggccgctacacccccaccagccgcagcccccagcactacagcaggccagacacaggagtgaaggacaacatctacaggaagccacccatctaccggcagcacgccgcccggcggagtgatggagaagatggcagcctggaccaggacaacaggaagcagaagagctcctggctgatgctgaagggagatgctgacaccaggaccaacagcccagacctggacacccagagcctgagccacagcagcggcacagaccgggaccccctgcagaggatggccggggacagcttccacagccgcttcccctacagcaagagtgaccccctgcccggccacggcaagaatggcctggaccagagaaatgccaacctggccccctgtggggctgaccctgatgcctcctggggcatgagggagtacaagatctacccctatgacagcctcatcgtgaccaaccgcatccgggtgaagctgcccaaggatgtggacaggacccggctggagcggcacctgagccctgaggagttccaggaggtgtttggcatgagcattgaggagtttgaccggctggccctgtggaagagaaatgacctgaagaagaaggccctgctcttctag

SEQ ID NO: 105453 - DNA, 1041 bp, Artificial Sequence
  derived and/or modified sequence
atgttcgccgagggcgaggagatgtacctgcagggcagcagcatctggcatcccgcctgccgtcaggcggcgcgcacagaggaccgaaacaaagaaacaaggacaagtagcgagagcatcatctctgtgcccgcgtcctcaaccagcggcagtcctagtagagtgatctacgcaaaactgggcggcgagatcctggactaccgggatctcgctgctctcccgaaaagcaaagctatctacgacattgacagaccagacatgatttcatactcgccctacatcagccactcagcaggagatagacagtcctacggcgagtcaccccaactcctaagcccgacgccaactgagggggatcaggatgacaggtcatataaacaatgtaggacatcaagcccgtctagcacggggagtgtaagtctggggaggtatacacctaccagcagatcaccacagcactacagtcgccccgacaccggagtcaaggataatatctaccgcaaacctcccatttaccggcaacacgccgcgaggagatccgacggcgaggacggcagtctggatcaggacaaccgtaagcagaagagttcttggctgatgctgaaaggcgatgctgacacccggacgaacagccctgacctggacactcaatctctgtcccacagcagtggcactgaccgagaccctttacaacgcatggccggagattctttccattcaaggttcccgtactctaaatcagatcccttgccgggccatgggaagaacggcctcgatcagcgcaacgccaatctcgcaccttgcggggctgaccctgacgccagctggggaatgcgggagtataagatctatccctatgatagcctaattgtcaccaaccgcatcagagtaaaattacctaaggacgtggatcgcacaaggctggagagacacctgtcccctgaggaattccaggaggtctttgggatgagcatcgaggagttcgacagactcgctctgtggaagcgcaatgatctaaagaagaaagccctgcttttctag

SEQ ID NO: 105454 - DNA, 1041 bp, Artificial Sequence
  derived and/or modified sequence
atgttcgccgagggcgaggagatgtacctgcagggcagcagcatctggcaccccgcctgtcgacaagccgcccggaccgaggatagaaacaaagaaactcgaacttcttcagaatctataatcagtgtgccagccagttccacgagcggttcccctagccgggttatatatgcaaaactcggaggggaaatactggactaccgtgatctcgcagccttgccgaagagcaaggccatctacgatatcgaccgccccgatatgatttcatactcaccatacatatcacactctgctggtgatcgccaatcttacggggaatcaccgcagctcctaagccccacacccacagagggagatcaggacgaccggtcatacaagcaatgccgaacttcctcaccgtctagcaccggctcagtttccctgggacgctatacccccacatcccgaagccctcaacactattcgaggcccgataccggagtgaaagataacatttatagaaaacccccaatttacaggcagcatgcagccagaagatctgacggagaagatggtagcctcgaccaggataaccgcaagcagaagtcaagctggctgatgctcaagggggatgctgacacaaggacaaactctccagaccttgacactcagtctctctctcattcatcaggcaccgatagggatccactgcaacgaatggcaggtgattcattccattctagatttccttattccaagtcagatccactacctggccacggtaagaatggattggaccagagaaatgccaaccttgccccttgtggcgcagatcccgacgcaagctggggtatgcgggaatacaaaatttatccttacgactccctcatcgtgactaaccgaatcagggtcaagctgcctaaggatgtggatcgaactcggctcgagcgacacctcagccccgaagagttccaggaggttttcgggatgtctattgaggaatttgaccggctggcactgtggaagagaaacgacctcaagaagaaagcgcttctgttctag

SEQ ID NO: 105455 - DNA, 1041 bp, Artificial Sequence
  derived and/or modified sequence
atgttcgcagagggggaggaaatgtatctgcaggggtccagcatctggcaccccgcttgccgccaggcagcacggacagaggacaggaacaaggaaaccaggacctcaagcgagagcattatttctgtcccagcttcctcgacctccggctcaccgagtcgcgtgatttatgctaagctgggcggtgaaatactggattaccgggatctggcagccctgcccaagtctaaagcgatctacgatattgacagacccgatatgattagctacagtccttatatctcacacagcgcaggggatcgccagtcctatggagaatcgccccaattactttcacctactccaacagagggcgaccaagatgaccggtcttataaacagtgccgaacttctagcccctcaagcaccgggtccgttagtctaggtcgatacacacccacttcccggagcccccagcactattctaggcctgacacaggcgttaaagataatatttatagaaaaccaccaatctaccgccagcacgcagccagacgatccgacggcgaggacggatcattggaccaggacaacagaaagcaaaagagctcgtggctaatgctgaagggcgacgctgacacccgtactaattcacccgatctcgacacccagagcttgtctcactcatctggaactgaccgggatccccttcagagaatggcaggagattcctttcacagtcgcttcccatatagcaagagcgacccgctgccaggccacggtaagaacggccttgaccagcgaaacgcaaatcttgcgccatgcggcgcagaccccgacgcttcctggggcatgcgcgaatataaaatttatccatatgattctctgattgtgacaaatagaattcgagtcaagcttccaaaggacgtggaccgtaccaggctcgagagacatctgtcaccagaggagtttcaagaagttttcggaatgagcattgaggagttcgatcgcctggccttatggaagaggaacgatttaaagaagaaagcactcctgttctag

SEQ ID NO: 105456 - DNA, 1041 bp, Artificial Sequence
  derived and/or modified sequence
atgtttgccgaaggcgaggaaatgtatttacaaggaagctctatctggcatccagcttgccggcaggcagcccgtactgaagaccgcaataaagagacgcgcaccagcagcgagagcattatcagtgttcctgcctcttcaacatccggttctccaagcagggtgatctatgctaaattaggcggtgagatactggactacagggatctcgctgctctacccaaatcgaaagcaatatatgatattgatcgtccagatatgatctcctatagcccgtacatatcacactccgccggagaccggcagtcctacggtgaatccccccagcttctgtcgccaacaccgactgagggcgaccaagacgatcggagctacaaacagtgtcggactagctcgccctcatcgacaggctcagtctctctcggacgttatacccctaccagcagatccccccaacattacagtagaccagacactggagttaaggataatatctatcggaaaccaccaatctaccggcagcacgcagcacgcagatccgatggcgaagacggcagcctggatcaggataatcgaaaacaaaaatcctcatggctgatgctgaaaggtgatgcggacacacggaccaattctccggacctggacacacagtcgctgagtcatagttctggaactgacagggatccgctccagaggatggcgggagactcttttcactctagattcccgtattcaaagagcgatcccttaccaggacacgggaagaacggtctggatcagcggaatgcaaacctggcaccatgtggcgctgatcccgacgcctcttggggaatgcgagagtacaagatctacccctacgactccctcatcgtgactaaccgcatccgggtgaagctgccaaaagacgtagatcgtacgagactggaacggcacctatcacctgaagaatttcaggaagtgttcggcatgagcatagaagagttcgatcgcctcgctttgtggaaacggaatgatctgaagaaaaaggcgttactcttttag

SEQ ID NO: 105457 - DNA, 2974 bp, Artificial Sequence
  derived and/or modified sequence
agaaggggagctgccgccgccgcggtggcactgcctgatgctcggcccagtgtgccggtgccccgctgggtgacagtggactcccagggcgcagcaggagcaggtgacagactgttggctgaaggtgagggtgtccaccctcgcaggcacacgttccagggagcacggcactcaagcagggccgtcagactgggctctggtgcccagaagctgtgcaggccggagagaagcactaccacccttcctgcgcgctatgtgtcaggtgcggccagatgtttgcagaaggcgaagagatgtatcttcaaggttcctccatctggcatccggcgtgtcgacaagcagccagaactgaagacagaaacaaggaaaccagaacttcctcagagagcatcatttctgtccctgcttccagcacctcagggtctccgagccgtgtgatttatgccaagcttggtggtgagatcctggactacagggacttggcagcccttcctaaaagtaaggccatctatgacatcgaccgccccgacatgatctcctactcaccctacatcagccactctgcaggggacaggcagagctacggcgagtcccctcagttgctctcgccaacgccgaccgagggggatcaggatgaccggtcctacaagcagtgtcggacctccagcccaagctccactgggtcggttagcctcgggcgctacactccgacctcacggtcaccacagcactacagccgtccagacactggcgtaaaagataacatctataggaaaccccctatctacagacagcatgctgccaggcgatcggatggggaggatggaagcttggaccaggataacaggaagcagaagagcagctggctgatgctcaagggggatgcagacacaaggaccaattctccagacctggacacccagtccttgtcccacagcagcgggaccgacagagaccctctccaaaggatggcaggggacagctttcactcacgattcccctattccaaatctgaccctctcccaggacatggaaagaatggcttggaccagcggaatgccaatctggccccctgtggagcagacccggatgccagctggggcatgcgagaatacaagatctatccgtatgactccctcatcgtcacaaaccgaattcgcgtgaaactgcccaaagacgtggaccggacgagactggagagacacttgtcgcccgaggagttccaggaagtgtttgggatgagcatcgaggagtttgaccgcctggccctctggaagaggaatgaccttaagaagaaagcccttttgttctgacggctgccagcctgccccactggtgtgtgccgggcgccgaggccaggggcccctggcgagaaccgcacacacccctcccacacaccttgctctggcttctctgtgtccatggggtgggcgggagggggtcccccagcaggtgcggcccctgcacctgccggcgacactcctgccggtagtttagggccgagacggctagcttcacgccacccttccccgctgtggcttggtgtcagggagaggctgtagagtggctgtgtcgggcatcagatggagcacacaggtggctgcagcccagcccaccttcccagcgttctcgaggtgccctggccccggtgctgggcacgtgggggacagaggtggccgggacgtgagctgtgaggcttgttgatgatggttgctgacaccatcatcgggggtgggcacacggcccttcggagcctgggcagcctggcctcacaggcagactcgcagacggggcagtgagcgtctgggacagtgccaagagtggggtgtgtgatttttgcaggcgtctgtgatgggtctctttagggacaaatgtcaacaagggacaagacagggcaccttccgccagcgcccctccatgcgctgcgttcctcctccagatcgacccctagatgcctacacaatatctttaaagtaacacagaagtttttattttattaaaaagtatagcctacttaaacgcgagatgacatatatagagtttaattttacggtccctccgcaggggagcggcctccagccttattctccaccgctcggatctgtgtggtttcagtctgttcttggtgtggtcctcatacacagagctccctgtctagtttcttttctttttcttttttctttttctcgtcacacaggtaaccttaaagacagacccctctaaagaacgctttgtaaatacatgtgaggtatagccaccactgttttccttgctgttatttttccaagtcttggggagaaaacatcctcctctgatggccaaagccctggaatcaagggtttccacgtaccctgcctaatacccgacgtagctcttgatgcaccgtccttgtgctgtggctggcggtgtctcagcctgaaacataaaccccacatgccccaggagcgatgtgctccctgaaacagacaaccacacgctgttggggagagaaggatggagataggatggagataggatggagatgtggctcttctcatctttgaagccagcagggcatcccggagcaggaggctggccgggctccccaagcgaaggcgttggtgtctgtcattaggtgtgtgttagggtgcagcaccggccgtcacaggatgctgataagcgcgctgagaggtggatgaaacaccaaagtctgtttccccgtccgcagtgggtgttgcctctttgtgtgtgtcccgatgttcctgcctgtgagtcggccttactccgtttccttagcgcccatgacacgccaagtcccgtttcgcactcggcttctcacccgcccagctcggctagggagggggagtttttagcacctaatatgcttcctgccattgcgcaatctgagcctgagcaactggaaacccccatttctcattagtgcaatgtcatatctgatcccaggaagcctggaaaataaaagacgatgcattat

SEQ ID NO: 105458 - DNA, 1041 bp, Artificial Sequence
  derived and/or modified sequence
atgttcgccgagggcgaggagatgtacctgcagggcagcagcatctggcaccccgcctgcagacaggccgccagaaccgaggacagaaacaaggagaccagaaccagcagcgagagcatcatcagcgtgcccgccagcagcaccagcggcagccccagcagagtgatctacgccaagctgggcggcgagatcctggactacagagacctggccgccctgcccaagagcaaggccatctacgacatcgacagacccgacatgatcagctacagcccctacatcagccacagcgccggcgacagacagagctacggcgagagcccccagctgctgagccccacccccaccgagggcgaccaggacgacagaagctacaagcagtgcagaaccagcagccccagcagcaccggcagcgtgagcctgggcagatacacccccaccagcagaagcccccagcactacagcagacccgacaccggcgtgaaggacaacatctacagaaagccccccatctacagacagcacgccgccagaagaagcgacggcgaggacggcagcctggaccaggacaacagaaagcagaagagcagctggctgatgctgaagggcgacgccgacaccagaaccaacagccccgacctggacacccagagcctgagccacagcagcggcaccgacagagaccccctgcagagaatggccggcgacagcttccacagcagattcccctacagcaagagcgaccccctgcccggccacggcaagaacggcctggaccagagaaacgccaacctggccccctgcggcgccgaccccgacgccagctggggcatgagagagtacaagatctacccctacgacagcctgatcgtgaccaacagaatcagagtgaagctgcccaaggacgtggacagaaccagactggagagacacctgagccccgaggagttccaggaggtgttcggcatgagcatcgaggagttcgacagactggccctgtggaagagaaacgacctgaagaagaaggccctgctgttctag

SEQ ID NO: 105459 - protein, 565 aa, Artificial Sequence
  derived and/or modified sequence
MCAVQVKLELGHRAQVRKKPTVEGFTHDWMVFVRGPEHSNIQHFVEKVVFHLHESFPRPKRVCKDPPYKVEESGYAGFILPIEVYFKNKEEPRKVRFDYDLFLHLEGHPPVNHLRCEKLTFNNPTEDFRRKLLKAGGDPNRSIHTSSSSSSSSSSSSSSSSSSSSSSSSSSSSSSSSSSSSSSSSSSTSFSKPHKLMKEHKEKPSKDSREHKSAFKEPSRDHNKSSKESSKKPKENKPLKEEKIVPKMAFKEPKPMSKEPKPDSNLLTITSGQDKKAPSKRPPISDSEELSAKKRKKSSSEALFKSFSSAPPLILTCSADKKQIKDKSHVKMGKVKIESETSEKKKSTLPPFDDIVDPNDSDVEENISSKSDSEQPSPASSSSSSSSSFTPSQTRQQGPLRSIMKDLHSDDNEEESDEVEDNDNDSEMERPVNRGGSRSRRVSLSDGSDSESSSASSPLHHEPPPPLLKTNNNQILEVKSPIKQSKSDKQIKNGECDKAYLDELVELHRRLMTLRERHILQQIVNLIEETGHFHITNTTFDFDLCSLDKTTVRKLQSYLETSGTS

SEQ ID NO: 105460 - protein, 607 aa, Artificial Sequence
  derived and/or modified sequence
MQRAPPFPFMCVSRRRKKCQAQRSLPKPRLPVIHGCLSSPCPQCAVQVKLELGHRAQVRKKPTVEGFTHDWMVFVRGPEHSNIQHFVEKVVFHLHESFPRPKRVCKDPPYKVEESGYAGFILPIEVYFKNKEEPRKVRFDYDLFLHLEGHPPVNHLRCEKLTFNNPTEDFRRKLLKAGGDPNRSIHTSSSSSSSSSSSSSSSSSSSSSSSSSSSSSSSSSSSSSSSSSSTSFSKPHKLMKEHKEKPSKDSREHKSAFKEPSRDHNKSSKESSKKPKENKPLKEEKIVPKMAFKEPKPMSKEPKPDSNLLTITSGQDKKAPSKRPPISDSEELSAKKRKKSSSEALFKSFSSAPPLILTCSADKKQIKDKSHVKMGKVKIESETSEKKKSTLPPFDDIVDPNDSDVEENISSKSDSEQPSPASSSSSSSSSFTPSQTRQQGPLRSIMKDLHSDDNEEESDEVEDNDNDSEMERPVNRGGSRSRRVSLSDGSDSESSSASSPLHHEPPPPLLKTNNNQILEVKSPIKQSKSDKQIKNGECDKAYLDELVELHRRLMTLRERHILQQIVNLIEETGHFHITNTTFDFDLCSLDKTTVRKLQSYLETSGTS

SEQ ID NO: 105461 - DNA, 417 bp, Artificial Sequence
  derived and/or modified sequence
atgaaggatctgcattccgatgacaatgaggaagagagcgacgaggtcgaggacaatgacaacgacagcgagatggagaggccagttaacagaggcgggagtagatctagacgcgtctccctctctgacggcagcgactcggagtcctccagtgcttcgtcgccactgcaccacgagccgcctccgcccctcctcaagacgaacaacaaccaaatcctggaagtgaagagtcctatcaagcagtctaagagtgacaaacagatcaaaaatggagagtgtgacaagattgtcaacctaattgaagagacggggcacttccacatcacaaacaccacttttgacttcgatttgtgctcgttagataaaaccacggttaggaagctgcagtcatatctggaaacatcaggcacatcctag

SEQ ID NO: 105462 - DNA, 489 bp, Artificial Sequence
  derived and/or modified sequence
atgaaagacctgcactcggacgataatgaggaggagagcgacgaagtggaagacaacgataacgactccgaaatggagcgccccgtaaaccgggggggatcgagatctcgcagggtctcccttagtgatggatccgattctgaatcatcaagcgcttcaagccctctgcaccatgagccaccaccacccctacttaaaactaacaataatcaaatcttagaggtgaagtcccctatcaagcagagcaaatctgataagcagattaagaacggggaatgtgacaaagcatacctcgacgagctggtggaactgcatcgccggttaatgaccctgcgcgagaggcacatccttcagcagatcgtcaatctcatcgaagaaaccgggcattttcacataaccaatacaactttcgactttgacctgtgctcgctcgacaaaacgaccgtcaggaagctccagtcttacctggagacaagcgggacttcttag

SEQ ID NO: 105463 - DNA, 417 bp, Artificial Sequence
  derived and/or modified sequence
atgaaagatcttcacagcgatgacaatgaagaagagtccgatgaggtagaggacaatgataatgactccgagatggagcggcctgtgaataggggtggaagcaggagtcgaagagtgagtctgagcgatgggtcggactcagagtccagttccgctagtagcccactgcaccatgaaccaccacctcccctgcttaaaaccaacaataatcaaatcctggaggtgaaatctccaattaaacagagcaagtcagataagcagatcaagaacggggaatgcgacaaaatcgtgaacctaatcgaagagactggtcatttccacattaccaacactacctttgacttcgacttgtgcagtctggataagaccaccgttcgaaagctgcagtcttacttggaaacttcaggtacctcctag

SEQ ID NO: 105464 - DNA, 1698 bp, Artificial Sequence
  derived and/or modified sequence
atgtgcgctgtgcaggtgaaactggagctcgggcatagggctcaggtcaggaagaaacccaccgtggaggggttcacacacgattggatggttttcgttcggggaccagaacactccaatatccagcactttgtggaaaaggtggttttccatctgcacgagtcctttccgcgacccaagagagtgtgcaaggaccctccatataaggtggaggagagcggctacgccggcttcatcctcccaattgaggtgtattttaagaataaggaagagccccgaaaagttagattcgattacgatctctttctgcacttagagggtcatcctccagttaatcatctgagatgcgaaaagctcacgtttaataaccccaccgaagacttccggcgcaaactccttaaggccggtggtgatccaaatagatcaatccacacgagttccagttcttcatcctcgtcttcaagctccagctcatcatcaagcagttcctccagcagcagttcgtcttccagctctagcagcagtagttcatcaagttcttcgtcctccagctctagcagcactagcttcagcaagcctcacaagctcatgaaagagcataaggaaaaaccaagcaaggacagcagagagcacaagtctgcctttaaggagccatcacgggatcacaacaaaagttcaaaagagagctctaagaaaccgaaggagaacaagcctctgaaagaagagaagatcgtcccaaagatggcattcaaggaacctaagcccatgagcaaggagcccaagcccgactccaatcttctcaccataacttccggacaggacaagaaagccccatccaaacgtccaccaatcagcgacagtgaggagctgtcagccaagaagaggaagaagtcttcatctgaggctctctttaaatccttcagcagcgccccacctcttattctgacatgttcagctgacaagaagcagatcaaagataaatcacacgtgaagatgggcaaggtgaagattgagagtgagaccagcgaaaaaaagaaaagcacacttcctccctttgacgacattgtggaccctaacgactcggacgtagaggaaaatatttcgtccaaaagtgactccgagcagccgtcaccagcttcttcaagtagttctagctcttctagctttacgccctcccagacaaggcaacagggccctctacggtctatcatgaaggacctgcattctgatgataacgaggaggagtccgacgaggtggaagacaacgataatgacagcgaaatggagcgtcccgtgaacagaggcggcagcagatccaggagagtttccctatccgacgggtccgatagcgagagctcatccgcaagtagtccactccaccacgagccccccccgcctctgcttaaaactaacaacaaccagatccttgaagtgaagtcccctataaaacagtccaaaagcgataagcaaatcaagaatggcgagtgtgacaaggcatatctggatgagctcgtcgaactccaccgaagactgatgaccctgcgtgaaaggcatatcctgcagcaaatagtcaatctgattgaggaaactggacactttcacatcaccaatacaactttcgattttgacctttgttccctagacaagacaacagtcagaaaactccagtcctacctggagacctccggaacctcttag

SEQ ID NO: 105465 - DNA, 1824 bp, Artificial Sequence
  derived and/or modified sequence
atgcagcgagcccccccctttccatttatgtgtgtgtcccgtaggaggaaaaagtgccaagcccaaaggtccctgcctaagccccggctccctgtgatccacgggtgcctttctagcccctgcccacagtgcgccgtacaggttaaactggaactcggccatagagctcaggttaggaaaaagcccacagtcgaaggcttcacacacgattggatggtgtttgtgagaggccctgaacactccaacatccaacattttgtggagaaagtggttttccacctccatgagtcattcccccggcccaaaagggtgtgtaaggaccccccatataaagttgaggagagcggctacgctggttttatcttgcctattgaggtgtattttaagaataaagaggagccacgcaaggtacgtttcgattacgatcttttcctccacctggagggccatccccccgttaatcacttgcggtgcgaaaaattgactttcaacaaccccaccgaagacttccggcggaagctgctgaaggccggtggagatcccaaccgctctatccatacctccagttctagttccagtagtagctcctcaagttcgtctagttcatcctcttcttcctcgagctcatcttctagctcatctagctcaagctctagcagttcaagctcctcctcaagtagctcttccacctctttttccaagccccataaactgatgaaagaacacaaggagaagccatccaaggattcgagggagcataagagtgcattcaaagagccgagtagagatcacaataagtcatcaaaagagtccagcaaaaagcccaaggagaataagccactgaaagaagagaaaatagtccccaaaatggccttcaaagagcccaaaccaatgtctaaggagcctaaacctgatagcaacctacttacgattacttcgggccaggataaaaaggctcccagcaaacggccaccaatcagcgattctgaggaactcagcgcgaagaagcgcaaaaagtcctcttccgaggccctgtttaagtctttctctagtgctccccctctcatcctaacttgctctgccgacaagaagcagattaaagataagagccacgtcaaaatgggcaaggtgaaaatagagtccgagaccagcgagaagaaaaagtccaccctcccacctttcgatgacatcgtcgaccctaacgactccgacgttgaggaaaacatcagttcgaaatctgactctgaacagcccagtcctgcatcttcaagttctagctctagctcgtctttcaccccctctcagactcgccagcaaggcccattgaggagcattatgaaagacctccacagcgatgacaacgaagaggagtctgacgaggtggaagataacgacaacgactcagaaatggaacggcccgtcaacaggggtggttctcggtcgaggcgagtcagcttgagcgacggcagcgatagcgagagttctagtgccagttctcccctgcaccatgagccacccccacctcttctcaagactaacaacaatcagattctcgaggtaaagtcacccattaagcagtcaaagagtgacaaacagattaagaatggggaatgtgacaaagcatatctcgacgaactcgtggaactgcataggaggcttatgaccctaagagagcgacacatactccagcagatcgtcaaccttatcgaggaaaccggccactttcatatcactaacaccacatttgattttgatctctgcagcctggataagacaaccgtgcgcaaactccaatcttatcttgagactagcggcacttcctag

SEQ ID NO: 105466 - DNA, 417 bp, Artificial Sequence
  derived and/or modified sequence
atgaaggacctgcacagtgatgacaatgaggaggagagtgatgaggtggaggacaatgacaatgattctgagatggagaggcctgtgaacagaggaggcagccgcagcagaagagtgtccctgagtgatggcagtgacagcgagagcagcagcgccagcagccccctgcaccacgagcccccaccacccctgctgaagaccaacaacaaccagatcctggaggtgaagagccccatcaagcagagcaagagtgacaagcagatcaagaatggagaatgtgacaagatcgtgaacctgattgaggagaccggccacttccacatcaccaacaccacctttgattttgacctgtgcagcctggacaagaccaccgtgaggaagctgcagagctacctggagaccagcggcaccagctag

SEQ ID NO: 105467 - DNA, 489 bp, Artificial Sequence
  derived and/or modified sequence
atgaaggacctgcacagtgatgacaatgaggaggagagtgatgaggtggaggacaatgacaatgattctgagatggagaggcctgtgaacagaggaggcagccgcagcagaagagtgtccctgagtgatggcagtgacagcgagagcagcagcgccagcagccccctgcaccacgagcccccaccacccctgctgaagaccaacaacaaccagatcctggaggtgaagagccccatcaagcagagcaagagtgacaagcagatcaagaatggagaatgtgacaaggcctacctggatgagctggtggagctgcaccggcggctgatgaccctgcgggagcggcacatcctgcagcagatcgtgaacctgattgaggagaccggccacttccacatcaccaacaccacctttgattttgacctgtgcagcctggacaagaccaccgtgaggaagctgcagagctacctggagaccagcggcaccagctag

SEQ ID NO: 105468 - DNA, 1698 bp, Artificial Sequence
  derived and/or modified sequence
atgtgtgctgtgcaggtgaagctggagctgggccaccgggcccaggtgaggaagaagcccaccgtggagggcttcacccatgactggatggtgtttgtgcggggccctgagcacagcaacatccagcactttgtggagaaggtggtgttccacctgcacgagagcttcccccggcccaagagggtgtgcaaggaccccccctacaaggtggaggagagcggctacgccggcttcatcctgcccatcgaggtgtacttcaagaacaaggaggagcccaggaaggtgcgctttgattatgacctcttcctgcacctggagggccacccccctgtgaaccacctgcgctgtgagaagctgaccttcaacaaccccacagaggacttccggaggaagctgctgaaggccggcggggaccccaacagaagcatccacaccagcagcagcagcagcagcagcagcagcagcagcagcagcagcagcagcagcagcagcagcagcagcagcagcagcagcagcagcagcagcagcagcagcagcagcagcagcagcagcagcagcagcaccagcttcagcaagccccacaagctgatgaaggagcacaaggagaagcccagcaaggacagccgggagcacaagagcgccttcaaggagcccagccgggaccacaacaagagcagcaaggagagcagcaagaagcccaaggagaacaagcccctgaaggaggagaagatcgtgcccaagatggccttcaaggagcccaagcccatgagcaaggagcccaagccagacagcaacctgctgaccatcaccagcggccaggacaagaaggcccccagcaagaggcctcccatcagtgacagcgaggagctgagcgccaagaagaggaagaagagcagcagcgaggccctcttcaagagcttcagcagcgcccctcctctcatcctgacctgcagcgctgacaagaagcagatcaaggacaagagccacgtgaagatgggcaaggtgaagattgaaagtgagaccagcgagaagaagaagagcaccctgcccccatttgatgacatcgtggaccccaatgacagtgatgtggaggagaacatcagcagcaagagtgacagcgagcagcccagccctgccagcagcagcagcagcagcagcagcagcttcacccccagccagacccggcagcagggccccctgcggagcatcatgaaggacctgcacagtgatgacaatgaggaggagagtgatgaggtggaggacaatgacaatgacagcgagatggagaggcctgtgaacagaggaggcagccgcagccggcgggtgtccctgagtgatggcagtgacagcgagagcagcagcgccagcagccccctgcaccacgagcccccaccacccctgctgaagaccaacaacaaccagatcctggaggtgaagagccccatcaagcagagcaagagtgacaagcagatcaagaatggagaatgtgacaaggcctacctggatgagctggtggagctgcaccggcggctgatgaccctgcgggagcggcacatcctgcagcagatcgtgaacctgattgaggagaccggccacttccacatcaccaacaccacctttgattttgacctgtgcagcctggacaagaccaccgtgaggaagctgcagagctacctggagaccagcggcaccagctag

SEQ ID NO: 105469 - DNA, 1824 bp, Artificial Sequence
  derived and/or modified sequence
atgcagagggccccacccttccccttcatgtgtgtgtccagaagaaggaagaagtgccaggcccagaggagcctgcccaagccccggctgcctgtgatccacggctgcctgagcagcccctgcccccagtgtgctgtgcaggtgaagctggagctgggccaccgggcccaggtgaggaagaagcccaccgtggagggcttcacccatgactggatggtgtttgtgcggggccctgagcacagcaacatccagcactttgtggagaaggtggtgttccacctgcacgagagcttcccccggcccaagagggtgtgcaaggaccccccctacaaggtggaggagagcggctacgccggcttcatcctgcccatcgaggtgtacttcaagaacaaggaggagcccaggaaggtgcgctttgattatgacctcttcctgcacctggagggccacccccctgtgaaccacctgcgctgtgagaagctgaccttcaacaaccccacagaggacttccggaggaagctgctgaaggccggcggggaccccaacagaagcatccacaccagcagcagcagcagcagcagcagcagcagcagcagcagcagcagcagcagcagcagcagcagcagcagcagcagcagcagcagcagcagcagcagcagcagcagcagcagcagcagcagcagcagcaccagcttcagcaagccccacaagctgatgaaggagcacaaggagaagcccagcaaggacagccgggagcacaagagcgccttcaaggagcccagccgggaccacaacaagagcagcaaggagagcagcaagaagcccaaggagaacaagcccctgaaggaggagaagatcgtgcccaagatggccttcaaggagcccaagcccatgagcaaggagcccaagccagacagcaacctgctgaccatcaccagcggccaggacaagaaggcccccagcaagaggcctcccatcagtgacagcgaggagctgagcgccaagaagaggaagaagagcagcagcgaggccctcttcaagagcttcagcagcgcccctcctctcatcctgacctgcagcgctgacaagaagcagatcaaggacaagagccacgtgaagatgggcaaggtgaagattgaaagtgagaccagcgagaagaagaagagcaccctgcccccatttgatgacatcgtggaccccaatgacagtgatgtggaggagaacatcagcagcaagagtgacagcgagcagcccagccctgccagcagcagcagcagcagcagcagcagcttcacccccagccagacccggcagcagggccccctgcggagcatcatgaaggacctgcacagtgatgacaatgaggaggagagtgatgaggtggaggacaatgacaatgacagcgagatggagaggcctgtgaacagaggaggcagccgcagccggcgggtgtccctgagtgatggcagtgacagcgagagcagcagcgccagcagccccctgcaccacgagcccccaccacccctgctgaagaccaacaacaaccagatcctggaggtgaagagccccatcaagcagagcaagagtgacaagcagatcaagaatggagaatgtgacaaggcctacctggatgagctggtggagctgcaccggcggctgatgaccctgcgggagcggcacatcctgcagcagatcgtgaacctgattgaggagaccggccacttccacatcaccaacaccacctttgattttgacctgtgcagcctggacaagaccaccgtgaggaagctgcagagctacctggagaccagcggcaccagctag

SEQ ID NO: 105470 - DNA, 708 bp, Artificial Sequence
  derived and/or modified sequence
tcttaacagctctccattccttgctgacacacatgaacttaggggcacttctgttttcctgagggctacaccgttttcttttgaaagagtctgaacaacccagtcctgccagctccagctccagctccagctccagcttcacaccatcccagaccaggcaacaaggtcctttgaggtctataatgaaagatctgcattctgatgacaatgaggaggaatcagatgaagtggaggataacgacaatgactctgaaatggagaggcctgtaaatagaggaggcagccgaagtcgcagagttagcttaagtgatggcagcgatagtgaaagcagttctgcttcttcacccctacatcacgaacctccaccacccttactaaaaaccaacaacaaccagattcttgaagtgaaaagtccaataaagcaaagcaaatcagataagcaaataaagaatggtgaatgtgacaaggcatacctagatgaactggtagagcttcacagaaggttaatgacattgagagaaagacacattctgcagcagatcgtgaaccttatagaagaaactggacactttcatatcacaaacacaacatttgattttgatctttgctcgctggacaaaaccacagtccgtaaactacagagttacctggaaacatctggaacatcctgaggatataacaactggatgcatcaagaactattgtgtt

SEQ ID NO: 105471 - DNA, 1983 bp, Artificial Sequence
  derived and/or modified sequence
tcttttcaagaagatcattcttaacagctctccattccttgctgacacacatgaacttaggggcacttctgttttcctgagggctacaccgttttcttttgaaagagtctgaacaacccagtcctgccagctccagctccagctccagctccagcttcacaccatcccagaccaggcaacaaggtcctttgaggtctataatgaaagatctgcattctgatgacaatgaggaggaatcagatgaagtggaggataacgacaatgactctgaaatggagaggcctgtaaatagaggaggcagccgaagtcgcagagttagcttaagtgatggcagcgatagtgaaagcagttctgcttcttcacccctacatcacgaacctccaccacccttactaaaaaccaacaacaaccagattcttgaagtgaaaagtccaataaagcaaagcaaatcagataagcaaataaagaatggtgaatgtgacaagatcgtgaaccttatagaagaaactggacactttcatatcacaaacacaacatttgattttgatctttgctcgctggacaaaaccacagtccgtaaactacagagttacctggaaacatctggaacatcctgaggatataacaactggatgcatcaagaactattgtgttttttttttttggttttttttttttttggttgtgattttttgttcttgttgtttatatgaaaacactcaaaatgatgcaaccaaaagggaaaaaataaaaatcaaacaaccttcagctttatttttctttaaagccagtcatcatctcttgataaaggagaggttaaagcaaaccagcctcagcggaccactcttctctccaaggaaatccccgggaagagttagcctggatagccttgaaaacaaacaaatcaaacacaacacaagaaaactcaaagaatgtgtatggtatcatgtatctctctgtggtggttcattccacaggacgaatgcatattcaacacactgccttattacataactgatctatttattatcgcatacagatattctaagtcgttgagggaatgacaccatcagacattataagtacttggtcccgtggatgctctttcaatgcagcacccttgccatcccaagcccagtgaccttactcgtataccgtgccactttccaccaactttttccaagtcctttaactcgttgcagtctgtattttccaccttttgtttttccagttccaggacacagattatcaactggggggaccaaatagccaccttgattttcttctttgtggtctttttcctgaaagttggggcccagtccttggctgtatccatgtaatgatcttggaccatggtagaaaatgcaccaaataggatcatatgaattgctgtctagccttagtcaataaacttgtaggacttttaaacaaaagtgtacctgtaaatgtcctgaatccagcattgttgagctgtcatcaacattcttgtgtctgttttactgttacaatattaggtgaatatggaagtaaaggcattccacaggatcatcatttaaaaaaaaagaattctggtcctgttttctaaaaaaaaaaactgttgtagaaattcttaatttggatctatttattagtcagagtttcagctttcttcagctgccagtgtgttactcatctttatcctaaaaatctggaatcagagatttttgtttgttcacatatgattctcttagacacttttatatttgaaaaaattaaaatctttctttggggaaaaattcttggttattctgccataacagattatgtattaacttgtagattcagtggttcaatacctgtttagttgcttgctaatatttccagaaggatttcttgtattggtgaaagacggttggggatggggggatttttttgttcttgttgtacccttgttttgaaactagaaatctgtcctgtggcatgcaaaagaaagcaaattatttt

SEQ ID NO: 105472 - DNA, 2040 bp, Artificial Sequence
  derived and/or modified sequence
atatttcagccgccgccgccgggagctgcgggcacagtccggggacgcggcgagcagcctcggcggccgcacctccgcaaagcgccgcggccgctacgatgtgtgccgtgcaggtgaagctggagctggggcaccgcgcccaggtgaggaaaaaacccaccgtggagggcttcacccacgactggatggtgttcgtacgcggtccggagcacagtaacatacagcactttgtggagaaagtcgtcttccacttgcacgaaagctttcctaggccaaaaagagtgtgcaaagatccaccttacaaagtagaagaatctgggtatgctggtttcattttgccaattgaagtttattttaaaaacaaggaagaacctaggaaagtccgctttgattatgacttattcctgcatcttgaaggccatccaccagtgaatcacctccgctgtgaaaagctaactttcaacaaccccacagaggactttaggagaaagttgctgaaggcaggaggggaccctaataggagtattcataccagcagcagcagcagcagcagcagtagcagcagcagcagcagcagcagcagcagcagtagcagcagcagcagcagcagcagcagcagcagtagcagcagcagtagcagcagcagcagcagcagtagtaccagtttttcaaagcctcacaaattaatgaaggagcacaaggaaaaaccttctaaagactccagagaacataaaagtgccttcaaagaaccttccagggatcacaacaaatcttccaaagaatcctctaagaaacccaaagaaaataaaccactgaaagaagagaaaatagttcctaagatggccttcaaggaacctaaacccatgtcaaaagagccaaaaccagatagtaacttactcaccatcaccagtggacaagataagaaggctcctagtaaaaggccgcccatttcagattctgaagaactctcagccaaaaaaaggaaaaagagtagctcagaggctttatttaaaagtttttctagcgcaccaccactgatactcacttgttctgctgacaaaaaacagataaaagataaatctcatgtcaagatgggaaaggtcaaaattgaaagtgagacatcagagaagaagaaatcaacgttaccgccatttgatgatattgtggatcccaatgattcagatgtggaggagaatatatcctctaaatctgattctgaacaacccagtcctgccagctccagctccagctccagctccagcttcacaccatcccagaccaggcaacaaggtcctttgaggtctataatgaaagatctgcattctgatgacaatgaggaggaatcagatgaagtggaggataacgacaatgactctgaaatggagaggcctgtaaatagaggaggcagccgaagtcgcagagttagcttaagtgatggcagcgatagtgaaagcagttctgcttcttcacccctacatcacgaacctccaccacccttactaaaaaccaacaacaaccagattcttgaagtgaaaagtccaataaagcaaagcaaatcagataagcaaataaagaatggtgaatgtgacaaggcatacctagatgaactggtagagcttcacagaaggttaatgacattgagagaaagacacattctgcagcagatcgtgaaccttatagaagaaactggacactttcatatcacaaacacaacatttgattttgatctttgctcgctggacaaaaccacagtccgtaaactacagagttacctggaaacatctggaacatcctgaggatataacaactggatgcatcaagaactattgtgttttttttttttggttttttttttttttggttgtgattttttgttcttgttgtttatatgaaaacactcaaaatgatgcaaccaaaagggaaaaaataaaaatcaaacaaccttcagctttatttttctttaaagccagtcatcatctcttgataaaggagaggttaaagcaaaccagcctcagcggaccactcttctctccaaggaaa

SEQ ID NO: 105473 - DNA, 2070 bp, Artificial Sequence
  derived and/or modified sequence
gcatttgttgtcgtgcttgtcgtggctgagtgtgttctccctcttttccccgacccccttcccgactggggataacattccgttacaatcctgtccgatgtagatgcggggcccggggcgcctggggccaagccgggccgggcgggcgggtatatttgggggtgtggagtgtgcgcgcccacgcgcgtgaaacgtggatgcagagggcaccgccgtttccttttatgtgcgtttcaagaaggaggaaaaaatgtcaggcgcaacgttcactgccgaaacctcgccttcctgttattcacggctgtctctcctccccctgcccgcagtgtgccgtgcaggtgaagctggagctggggcaccgcgcccaggtgaggaaaaaacccaccgtggagggcttcacccacgactggatggtgttcgtacgcggtccggagcacagtaacatacagcactttgtggagaaagtcgtcttccacttgcacgaaagctttcctaggccaaaaagagtgtgcaaagatccaccttacaaagtagaagaatctgggtatgctggtttcattttgccaattgaagtttattttaaaaacaaggaagaacctaggaaagtccgctttgattatgacttattcctgcatcttgaaggccatccaccagtgaatcacctccgctgtgaaaagctaactttcaacaaccccacagaggactttaggagaaagttgctgaaggcaggaggggaccctaataggagtattcataccagcagcagcagcagcagcagcagtagcagcagcagcagcagcagcagcagcagcagtagcagcagcagcagcagcagcagcagcagcagtagcagcagcagtagcagcagcagcagcagcagtagtaccagtttttcaaagcctcacaaattaatgaaggagcacaaggaaaaaccttctaaagactccagagaacataaaagtgccttcaaagaaccttccagggatcacaacaaatcttccaaagaatcctctaagaaacccaaagaaaataaaccactgaaagaagagaaaatagttcctaagatggccttcaaggaacctaaacccatgtcaaaagagccaaaaccagatagtaacttactcaccatcaccagtggacaagataagaaggctcctagtaaaaggccgcccatttcagattctgaagaactctcagccaaaaaaaggaaaaagagtagctcagaggctttatttaaaagtttttctagcgcaccaccactgatactcacttgttctgctgacaaaaaacagataaaagataaatctcatgtcaagatgggaaaggtcaaaattgaaagtgagacatcagagaagaagaaatcaacgttaccgccatttgatgatattgtggatcccaatgattcagatgtggaggagaatatatcctctaaatctgattctgaacaacccagtcctgccagctccagctccagctccagctccagcttcacaccatcccagaccaggcaacaaggtcctttgaggtctataatgaaagatctgcattctgatgacaatgaggaggaatcagatgaagtggaggataacgacaatgactctgaaatggagaggcctgtaaatagaggaggcagccgaagtcgcagagttagcttaagtgatggcagcgatagtgaaagcagttctgcttcttcacccctacatcacgaacctccaccacccttactaaaaaccaacaacaaccagattcttgaagtgaaaagtccaataaagcaaagcaaatcagataagcaaataaagaatggtgaatgtgacaaggcatacctagatgaactggtagagcttcacagaaggttaatgacattgagagaaagacacattctgcagcagatcgtgaaccttatagaagaaactggacactttcatatcacaaacacaacatttgattttgatctttgctcgctggacaaaaccacagtccgtaaactacagagttacctggaaacatctggaacatcctgaggatataacaactggatgcatcaagaactattgtgttttttttttttgg

SEQ ID NO: 105474 - DNA, 417 bp, Artificial Sequence
  derived and/or modified sequence
atgaaggacctgcacagcgacgacaacgaggaggagagcgacgaggtggaggacaacgataacgattcggagatggaacggcctgtgaatcgcggaggctcccggagcagaagggttagcctgagcgatgggtcggactccgaatcaagctccgctagctccccactacaccacgaaccgccccctcctctactcaaaaccaataacaaccaaatcctagaggtcaagagtcctattaaacaaagtaagtccgacaagcaaattaaaaacggggaatgtgacaaaattgtgaacctcatcgaggagacggggcattttcacatcacaaatactacatttgacttcgacctgtgctccttagataaaactaccgtgagaaaactccaaagttatctggaaacttctggcacttcctag

SEQ ID NO: 105475 - DNA, 489 bp, Artificial Sequence
  derived and/or modified sequence
atgaaggacctgcacagcgacgacaacgaggaggagagcgacgaggtggaggacaatgacaatgacagtgaaatggagaggcctgtaaatagaggcggatctcgctctcggcgggttagcctctccgatggctcagattccgagagtagttccgcttcttccccgttgcaccatgagccaccccctccccttcttaagacaaataacaatcaaattttggaggttaaaagccccattaagcagtctaaatccgacaaacagatcaagaacggcgagtgcgataaagcctacctagacgagctggtcgaactccaccgtaggctgatgactctccgggaacgccatatcctgcagcagattgtgaacttaatcgaagaaacagggcattttcacatcaccaatacaacattcgacttcgacctttgtagcctcgacaaaaccaccgttcggaagctgcagtcttacctcgagacctctggtacttcatag

SEQ ID NO: 105476 - DNA, 417 bp, Artificial Sequence
  derived and/or modified sequence
atgaaggacctgcacagcgacgacaacgaggaggagagcgacgaggtggaggataacgacaacgattcagagatggagcggcccgtcaaccggggcgggtcccggtccagaagagtgtctctaagcgacgggtccgactcagaatccagctccgcgtctagtccattgcaccatgagccacccccaccgttgctcaaaactaataataatcagatcctggaggttaaatctccaattaagcagtcaaagtcagacaaacagattaagaatggcgagtgcgataagatagtcaatctgatcgaagaaaccggacacttccacatcactaacaccaccttcgatttcgacctttgcagcctggacaagacaacggtccgtaaattgcagtcgtatttggaaaccagcggcacctcctag

SEQ ID NO: 105477 - DNA, 1698 bp, Artificial Sequence
  derived and/or modified sequence
atgtgcgccgtgcaggtgaagctggagctgggccaccgggcccaggttcgtaagaaaccaactgtggagggattcacccacgattggatggtatttgttcggggaccggagcattctaatattcagcactttgtcgagaaggttgtatttcacctgcacgaatccttccccagaccaaaaagggtgtgtaaggacccgccgtataaggtggaggagagcggatacgcgggattcattcttcctatcgaggtctactttaaaaacaaggaggagccacgcaaggttagattcgactacgatctctttttgcacctcgagggtcatccaccagtgaatcacctgcgatgcgaaaaactgactttcaataaccccacagaagacttcagacggaagcttttaaaggcaggtggtgatcctaatcggtcgattcatacatcctcctctagcagtagctcctccagctcctcttcatccagcagcagctcatccagttcctcaagtagcagctcctctagttcctccagctccagctcctcttcatcctcctcaagtagcagttccaccagtttctcaaagcctcacaagctcatgaaggaacacaaggaaaagcccagtaaagattctcgcgaacacaaatcggcctttaaagaacctagtagagatcacaataagtcctctaaagaaagttcgaagaaacctaaagagaacaaaccactgaaggaagaaaagatagtgcctaagatggcttttaaggagcccaagcctatgtctaaagaacccaagccagacagcaacttactcactattacgtcaggtcaagataagaaagcgccttcaaagcggccacctatttccgattccgaagaacttagcgccaaaaaacgcaaaaaaagctcatcggaagccctgttcaagtcctttagctcagccccacccctcatcctgacttgcagcgccgataagaagcagataaaagacaaatcgcacgttaagatggggaaagtcaagatcgagagcgaaacgagcgagaaaaagaagtccacgctccccccgttcgacgatatagtagaccccaatgattctgatgtcgaggagaatatcagctcaaaatctgatagtgagcagccgtccccggcatcatcgagctcatccagctcgtcgagttttactccaagtcagacccggcagcaaggcccactacggtccataatgaaggacctgcacagcgacgacaatgaggaggagtccgacgaggttgaagacaacgacaatgacagcgagatggagcgtccagtgaacagaggtggtagcagatctagacgcgtgtctctgtctgatggttctgatagcgaatccagctccgccagcagcccgctgcaccacgagcctcctcctcctttgctgaaaaccaataacaatcagatcttggaggtgaaatcccctatcaaacagagcaagagcgacaaacagatcaagaatggcgaatgcgacaaagcttatctggatgagctggtggaactgcaccgcaggctcatgaccctcagagagagacacattttacagcagatagttaatcttatagaagagaccgggcactttcatattacgaacacgactttcgattttgatctctgctccctggacaagacaacggtcaggaaactgcagagctaccttgaaacttcaggcacttcatag

SEQ ID NO: 105478 - DNA, 1824 bp, Artificial Sequence
  derived and/or modified sequence
atgcagcgggccccccccttccccttcatgtgcgtgagccggcggcgaaagaaatgtcaggcacaacgaagcttgcctaagccccgactgcccgtgattcacggttgcctaagttctccttgtcctcaatgtgcggtgcaagtaaagctggagcttggacaccgggctcaggtgaggaaaaagcctactgtggagggtttcacccacgactggatggtgtttgtacgtggacccgagcacagcaacatccaacacttcgtggagaaggtggtgtttcatcttcatgagtcatttccacggcctaaacgggtttgcaaggacccaccttacaaagtggaagaatccggttacgccggattcatccttcccattgaggtttacttcaaaaataaggaagagccccggaaggtccgctttgattatgatttattccttcatctcgagggccatccgcccgtcaatcatcttcgctgcgaaaagttgacttttaacaatccaactgaagacttcagacgaaaattacttaaggcgggaggggatcctaaccgttctatccacacctcctcatcatccagctcaagctctagcagctcttcttctagctcttcaagctcttctagctctagctctagtagctctagtagcagcagctctagttcctcatccagcagttctagttcttcctccacctccttcagcaaaccccacaagcttatgaaggagcataaggagaagccatcaaaagactctagagagcacaagtcagcatttaaagagccttccagggatcacaataaatcatcaaaagaatccagtaaaaagccgaaagaaaacaagcccctgaaggaggagaaaatagtcccgaaaatggcgtttaaggaacctaagcccatgtcaaaggagcccaagccagatagtaatttgctgactataacatcagggcaggacaagaaggcacccagcaagagaccaccgatatcggatagcgaggagctctctgccaaaaaacggaaaaaatccagttccgaggcgctgttcaagtcattttccagcgctcctcctctaatactgacctgttctgcggacaagaaacaaattaaagataagtctcatgtcaagatgggcaaagttaagattgagagcgagacatctgaaaagaaaaagtcgactctacccccatttgacgatattgtagatcccaatgattccgacgtggaggagaatatctcttccaagtccgactctgaacagccttccccagcaagcagctcctccagctcttcgagcagtttcacaccgagccagaccaggcagcagggccccctgaggtcgattatgaaagatctgcactcagacgacaatgaggaggaatctgatgaagtcgaggataacgataatgactccgaaatggagaggcctgtcaaccgcgggggttctagatctcgaagagtgagcctgagcgatggcagcgactcagaatcatccagtgcgagttcaccgctccatcatgagccaccaccccctctgttgaagacaaataataaccagattctggaggtaaagagtccaatcaaacaatcgaaatcggataagcaaatcaaaaatggcgagtgtgacaaggcatacctggatgagttggtcgagctccataggcggttgatgactctgagagagcgacacatcctgcagcagatcgtcaatttgattgaggagacgggacatttccatatcaccaataccacatttgacttcgatctgtgctccctcgacaagactacagtaagaaagcttcaatcctatcttgagacttctgggacgtcttag

SEQ ID NO: 105479 - DNA, 417 bp, Artificial Sequence
  derived and/or modified sequence
atgaaggacctgcatagcgatgataatgaggaggagtctgacgaagttgaagacaatgataacgattccgagatggagcgccctgtaaataggggtgggagtcgatctcgaagagtatccctatcagatggcagcgattcagaatcctcatcagccagttctcccctccaccacgaacctccgcctccgctgctaaaaaccaataataaccaaattctcgaggtgaagagccccattaaacagagtaagtcagataaacagatcaagaatggcgagtgcgataagatcgttaacctgattgaggaaacaggacatttccatatcaccaatacaacatttgactttgatctgtgtagcctagataagaccacagtacgcaagctccagagttacttagagacgtcaggaactagctag

SEQ ID NO: 105480 - DNA, 489 bp, Artificial Sequence
  derived and/or modified sequence
atgaaggatctccactcagatgataatgaggaggagtccgacgaagtggaggacaatgataacgattccgaaatggagagaccagtcaatcgcggaggttcaagatcaagacgggtgtcgttaagcgatggtagtgactctgaatccagctccgcctcatcaccactgcaccatgaaccacctccacctttgttaaagacgaacaacaatcaaatcctagaggtgaagagcccgatcaaacagtctaaaagcgataagcagatcaaaaacggggaatgcgataaagcttacctggacgaattagttgaactgcacaggcggcttatgacgctgagggaaagacacatcttgcagcagatcgtcaacctgatcgaggaaaccgggcattttcatatcacaaataccactttcgattttgacctctgttcactcgataagaccacggtcaggaaacttcagagttatctggaaacctctggcacgtcttag

SEQ ID NO: 105481 - DNA, 417 bp, Artificial Sequence
  derived and/or modified sequence
atgaaggatctgcactctgacgacaacgaggaagaaagcgacgaagtggaggacaacgataacgacagcgaaatggaacgcccagtgaatcggggaggcagtagatcacgccgagttagcctgtctgatggctctgattccgagtcttcctcggcttcctcaccgttacaccacgagcctccgcctcctctgttgaaaacaaacaacaatcagatcctggaggtgaaatctccgattaaacagtctaaatccgacaagcaaattaagaacggggagtgtgacaagattgttaatctgatcgaggaaaccggacatttccacatcacaaatacaacatttgactttgatctgtgcagcctcgacaagaccacagtgcgaaagctccagagctacctcgagacttcagggacttcctag

SEQ ID NO: 105482 - DNA, 1698 bp, Artificial Sequence
  derived and/or modified sequence
atgtgtgccgtccaagtgaagctggaactagggcatcgggcacaagtcagaaaaaagcccacagttgaggggttcactcatgattggatggtctttgtgaggggccctgagcacagcaatatacagcattttgtggaaaaagtcgtctttcatttgcacgaatcatttccaagacccaaacgggtgtgcaaagaccccccatacaaggtggaggagagcggatatgcgggttttattctgccgattgaggtgtactttaagaacaaagaggagccaaggaaagtaagattcgactacgatttattcctacacctagagggccacccccctgttaatcacctgcgatgcgaaaagctgacattcaataacccaaccgaggacttccgaagaaaactgttgaaagccggtggtgacccgaatcgaagcattcacacaagttccagcagcagctcctcatctagctcttcatccagttcctcgtcatctagtagctcttcatcttcgtcctcctcatcaagtagctcaagctcgtcaagctcctcaagtagctcttcatcttctacctcatttagtaagccccacaaactcatgaaggagcacaaggagaagccttcaaaggacagtcgggaacataagtctgcgttcaaggagccgtcccgtgatcacaataaaagcagcaaggagagttcaaaaaagcccaaggagaacaaaccgctcaaggaggaaaaaatagtgccaaagatggctttcaaggaacctaagccaatgtccaaggagcctaaacccgacagcaatctcctgaccataacgagtgggcaagacaaaaaagccccatcaaagaggccacctatttccgattcagaggaactttccgccaaaaagaggaaaaagagcagtagcgaggctctcttcaagtcgttctcatcagctccacctctaatcctcacctgttctgctgacaaaaagcagattaaggacaagagtcacgtgaagatgggaaaggtcaaaatcgaaagtgaaacttcagagaaaaaaaagtcgaccttaccgcctttcgacgacattgtggaccccaacgactctgacgttgaggagaacatttccagcaaatctgactctgaacagccctctcccgctagctcctcttccagtagttcatctagctttaccccgtcgcagactcggcagcagggcccactgagaagtataatgaaagacctgcattcagacgataacgaggaggaatcagatgaggtggaagacaacgataatgattccgagatggagagaccggtgaacaggggaggctcacgctcacgtcgcgtctctctgagtgatgggtctgattctgagtcgagcagtgcctcaagtccacttcaccacgaaccgcctcccccactgctaaaaacaaataacaaccagattttggaagtgaaatccccaattaagcagtctaaatccgataagcaaatcaaaaatggtgagtgcgataaggcatacttggatgaactcgtggagctgcaccggaggctgatgaccctccgcgaaagacatatccttcaacagatcgtgaacctgattgaggaaactggccactttcacatcactaatactacatttgatttcgatctctgttccctagacaagacaaccgtcaggaagcttcagtcttacttagagacatcaggcacctcttag

SEQ ID NO: 105483 - DNA, 1824 bp, Artificial Sequence
  derived and/or modified sequence
atgcagcgggcacctccattccctttcatgtgtgtctcgcgcagacggaagaagtgccaggcccagcgatctctcccgaaacccagactccccgtcattcacgggtgcctatcaagcccttgcccccagtgtgccgtgcaggtcaagctggaactgggtcaccgggcacaggttcgcaaaaagccaaccgtagaaggtttcactcacgactggatggtattcgtgagaggacccgagcatagcaatatacagcattttgtggagaaggtggtattccacctgcatgagtcatttcccaggcccaaaagagtgtgtaaggaccccccttacaaggtggaggaatccggatacgcgggattcatcctgccaatcgaggtgtactttaaaaacaaggaggagccacggaaagtgcgctttgactacgatctctttctgcatttggaaggtcacccgcctgtgaaccatctccgctgcgagaagctgactttcaacaaccctaccgaggattttaggaggaagctgctgaaagctggcggagatccaaatcgcagcatccacacaagttctagcagtagttcatcttccagttcaagtagctcgtcctctagcagtagttcgtcctcaagctcgagcagttcgtccagttcatccagctcgtctagcagttccagctcaagtagttcctccaccagtttttccaagccccacaaactgatgaaggaacataaggagaaacctagtaaggattcacgagaacataaatccgccttcaaagaaccgagtcgcgaccataataagtcatccaaagagtccagcaagaaaccaaaggagaataagccacttaaggaggagaaaatagtgcccaaaatggcattcaaggagcctaaacccatgagtaaggagcctaaacccgacagtaatctcctgaccattacgtccgggcaagataagaaggcaccatcaaagaggccacccatctcagacagcgaagaactttcagccaagaaaaggaagaaaagttcgtcagaagccctgttcaaaagttttagctcagcccctccgcttattctaacctgttcagcagataaaaaacaaattaaagacaagagccacgtgaagatgggaaaggttaagatcgagtccgagacaagtgaaaagaaaaagtctacactgcccccattcgacgatatagtcgaccccaatgactctgacgtggaggagaacatttcttctaaaagcgattccgagcagcctagccctgctagctcgtctagcagttcgtcctcaagcttcaccccgtctcaaaccaggcagcagggaccccttagatcaatcatgaaggacctccactcagatgacaacgaggaagaaagcgacgaggttgaggacaacgacaacgacagcgagatggagcgccctgttaaccgcggtggaagccgaagcagacgggtgagcctcagtgacggctcggatagcgaaagcagcagcgcttcttctcccctccaccacgaaccgcctccacccttattgaagactaataataaccagatcctggaggtcaaaagccctatcaagcagagcaagagtgacaagcaaattaaaaatggcgaatgcgataaggcctacctggatgaactcgtggagctccatagaagactgatgacacttagggagcggcacattctccagcagatcgtcaacctcatcgaggaaacgggacatttccatatcacaaacaccacctttgatttcgatctgtgcagcttagacaaaacaacagtgagaaagctgcagtcctatctggagactagtggcacttcctag

SEQ ID NO: 105484 - DNA, 417 bp, Artificial Sequence
  derived and/or modified sequence
atgaaggacctgcacagcgacgacaacgaggaggagagcgacgaggtggaggacaacgacaacgacagcgagatggagagacccgtgaacagaggcggcagcagaagcagaagagtgagcctgagcgacggcagcgacagcgagagcagcagcgccagcagccccctgcaccacgagccccccccccccctgctgaagaccaacaacaaccagatcctggaggtgaagagccccatcaagcagagcaagagcgacaagcagatcaagaacggcgagtgcgacaagatcgtgaacctgatcgaggagaccggccacttccacatcaccaacaccaccttcgacttcgacctgtgcagcctggacaagaccaccgtgagaaagctgcagagctacctggagaccagcggcaccagctag

SEQ ID NO: 105485 - DNA, 489 bp, Artificial Sequence
  derived and/or modified sequence
atgaaggacctgcacagcgacgacaacgaggaggagagcgacgaggtggaggacaacgacaacgacagcgagatggagagacccgtgaacagaggcggcagcagaagcagaagagtgagcctgagcgacggcagcgacagcgagagcagcagcgccagcagccccctgcaccacgagccccccccccccctgctgaagaccaacaacaaccagatcctggaggtgaagagccccatcaagcagagcaagagcgacaagcagatcaagaacggcgagtgcgacaaggcctacctggacgagctggtggagctgcacagaagactgatgaccctgagagagagacacatcctgcagcagatcgtgaacctgatcgaggagaccggccacttccacatcaccaacaccaccttcgacttcgacctgtgcagcctggacaagaccaccgtgagaaagctgcagagctacctggagaccagcggcaccagctag

SEQ ID NO: 105486 - DNA, 1698 bp, Artificial Sequence
  derived and/or modified sequence
atgtgcgccgtgcaggtgaagctggagctgggccacagagcccaggtgagaaagaagcccaccgtggagggcttcacccacgactggatggtgttcgtgagaggccccgagcacagcaacatccagcacttcgtggagaaggtggtgttccacctgcacgagagcttccccagacccaagagagtgtgcaaggaccccccctacaaggtggaggagagcggctacgccggcttcatcctgcccatcgaggtgtacttcaagaacaaggaggagcccagaaaggtgagattcgactacgacctgttcctgcacctggagggccacccccccgtgaaccacctgagatgcgagaagctgaccttcaacaaccccaccgaggacttcagaagaaagctgctgaaggccggcggcgaccccaacagaagcatccacaccagcagcagcagcagcagcagcagcagcagcagcagcagcagcagcagcagcagcagcagcagcagcagcagcagcagcagcagcagcagcagcagcagcagcagcagcagcagcagcagcagcagcaccagcttcagcaagccccacaagctgatgaaggagcacaaggagaagcccagcaaggacagcagagagcacaagagcgccttcaaggagcccagcagagaccacaacaagagcagcaaggagagcagcaagaagcccaaggagaacaagcccctgaaggaggagaagatcgtgcccaagatggccttcaaggagcccaagcccatgagcaaggagcccaagcccgacagcaacctgctgaccatcaccagcggccaggacaagaaggcccccagcaagagaccccccatcagcgacagcgaggagctgagcgccaagaagagaaagaagagcagcagcgaggccctgttcaagagcttcagcagcgccccccccctgatcctgacctgcagcgccgacaagaagcagatcaaggacaagagccacgtgaagatgggcaaggtgaagatcgagagcgagaccagcgagaagaagaagagcaccctgccccccttcgacgacatcgtggaccccaacgacagcgacgtggaggagaacatcagcagcaagagcgacagcgagcagcccagccccgccagcagcagcagcagcagcagcagcagcttcacccccagccagaccagacagcagggccccctgagaagcatcatgaaggacctgcacagcgacgacaacgaggaggagagcgacgaggtggaggacaacgacaacgacagcgagatggagagacccgtgaacagaggcggcagcagaagcagaagagtgagcctgagcgacggcagcgacagcgagagcagcagcgccagcagccccctgcaccacgagccccccccccccctgctgaagaccaacaacaaccagatcctggaggtgaagagccccatcaagcagagcaagagcgacaagcagatcaagaacggcgagtgcgacaaggcctacctggacgagctggtggagctgcacagaagactgatgaccctgagagagagacacatcctgcagcagatcgtgaacctgatcgaggagaccggccacttccacatcaccaacaccaccttcgacttcgacctgtgcagcctggacaagaccaccgtgagaaagctgcagagctacctggagaccagcggcaccagctag

SEQ ID NO: 105487 - DNA, 1824 bp, Artificial Sequence
  derived and/or modified sequence
atgcagagagccccccccttccccttcatgtgcgtgagcagaagaagaaagaagtgccaggcccagagaagcctgcccaagcccagactgcccgtgatccacggctgcctgagcagcccctgcccccagtgcgccgtgcaggtgaagctggagctgggccacagagcccaggtgagaaagaagcccaccgtggagggcttcacccacgactggatggtgttcgtgagaggccccgagcacagcaacatccagcacttcgtggagaaggtggtgttccacctgcacgagagcttccccagacccaagagagtgtgcaaggaccccccctacaaggtggaggagagcggctacgccggcttcatcctgcccatcgaggtgtacttcaagaacaaggaggagcccagaaaggtgagattcgactacgacctgttcctgcacctggagggccacccccccgtgaaccacctgagatgcgagaagctgaccttcaacaaccccaccgaggacttcagaagaaagctgctgaaggccggcggcgaccccaacagaagcatccacaccagcagcagcagcagcagcagcagcagcagcagcagcagcagcagcagcagcagcagcagcagcagcagcagcagcagcagcagcagcagcagcagcagcagcagcagcagcagcagcagcagcagcaccagcttcagcaagccccacaagctgatgaaggagcacaaggagaagcccagcaaggacagcagagagcacaagagcgccttcaaggagcccagcagagaccacaacaagagcagcaaggagagcagcaagaagcccaaggagaacaagcccctgaaggaggagaagatcgtgcccaagatggccttcaaggagcccaagcccatgagcaaggagcccaagcccgacagcaacctgctgaccatcaccagcggccaggacaagaaggcccccagcaagagaccccccatcagcgacagcgaggagctgagcgccaagaagagaaagaagagcagcagcgaggccctgttcaagagcttcagcagcgccccccccctgatcctgacctgcagcgccgacaagaagcagatcaaggacaagagccacgtgaagatgggcaaggtgaagatcgagagcgagaccagcgagaagaagaagagcaccctgccccccttcgacgacatcgtggaccccaacgacagcgacgtggaggagaacatcagcagcaagagcgacagcgagcagcccagccccgccagcagcagcagcagcagcagcagcagcttcacccccagccagaccagacagcagggccccctgagaagcatcatgaaggacctgcacagcgacgacaacgaggaggagagcgacgaggtggaggacaacgacaacgacagcgagatggagagacccgtgaacagaggcggcagcagaagcagaagagtgagcctgagcgacggcagcgacagcgagagcagcagcgccagcagccccctgcaccacgagccccccccccccctgctgaagaccaacaacaaccagatcctggaggtgaagagccccatcaagcagagcaagagcgacaagcagatcaagaacggcgagtgcgacaaggcctacctggacgagctggtggagctgcacagaagactgatgaccctgagagagagacacatcctgcagcagatcgtgaacctgatcgaggagaccggccacttccacatcaccaacaccaccttcgacttcgacctgtgcagcctggacaagaccaccgtgagaaagctgcagagctacctggagaccagcggcaccagctag

SEQ ID NO: 105488 - protein, 1251 aa, Artificial Sequence [sequence omitted]

SEQ ID NO: 105489 - DNA, 3756 bp, Artificial Sequence
  derived and/or modified sequence
atgcccgagaagagactgaccgccgagccccccaccatcaccgaggaggagttcgaggacagcctggccaccgacgacttcctggtggactacttcaacgagttcctgagcctgcccaccttcagcgaggccatcagattcaacgccgactacggcgtgttcgaggtggccaacgacgccccccagttcctggagaagcagctgaagaagatcctgcagaaccagcagcccagaaaccccatctacgacgtggtgagaaagggcaagaacgaggtgaagcccgtgcagatgaacgcccccgacgaggacgagaccatcaacgtgaactacaacatcatgtgcctgagcagagaggagggcatcaagtggatcaagaaggagagactgcccgccttcctggagagcgactgctacttcgagtacagactggccaagctggtgagccaggtgagatggagcaagagcggcatgaacttcaccgtgggcagcaacttcagcccctggatcgtgaagaagccccccagcctgcccccccccgccaccgaggaggacaacctggccagctacacccagaccaaggactggttcgccctggccaagcagagccagcagaccgtgagcaccttcagcctgccctgctgcgtgccctacaacaagctgaagagccccgccatcagcagcgtgagcgagaacttcatcttcgacgacggcgtgcaccccagaaccaagaaggaccccagcaagaccaacaagctgatcagcgagttcgaggaggaggagggcgaggaggaggaggtgagcgtgagcctgcaggacacccccagccaggccctgctgagagtgtacctggagaagaagcaggacgtggacgagagcctgaccatgcacttcagcacctgcgaggagttcctgagcagctacatctacttcatcctgagaggcgccatccagcagatcgtgggcaagcccgtgggcgagacccccgactacatcaacttcaacaacatcaccaaggtgagcttcgacgactgcttcgagagcatccacggcaagaacttcctgagcgagctggtgcagaccaccaaggagagaagcgaggagatcgagcagaccagcctgagcagcaagaacgagagcgccggccccgagagcagagccgactggtgcatcagccacagaacctacgacatcggcaacagaaaggagttcgagagattcaagaagttcatcaagggcaccctgggcgagagatactggtggctgtggatggacatcgagagactgaaggtgctgaaggaccccggcagacaccagagacacctggagaagatgaagaagtgctacctggtgagcaacggcgactactacctgagcgccgagatcctgagcaagttcaagctgctggacggcagccagtggaacgaggagcacctgagaaacatccagagcgaggtgctgaagcccctgctgctgtactgggcccccagattctgcgtgacccacagcgccagcaccaagtacgccagcgccgagctgaagttctggcacctgagacaggccaagcccagaaaggacatcgaccccttcccccagatggccaccctgctgcccctgagacccaagagctgcatcccccagatccccgagatccagaaggaggagttcagcctgagccagccccccaagagccccaacaagagccccgaggtgaagaccgccacccagaagccctggaagagagagctgctgtaccccggcagcagcaaggacgacgtgatcgagaagggcagcaagtacatgagcgagagcagcaaggtgatccacctgaccagcttcaccgacatcagcgagtgcctgaagccccagctggacagaagatacgcctacaccgaggagcccagagtgaagaccgtgagcgacgtgggcgccctgggcggcagcgacatggagaacctgctgcagagcctgtacgtggagaacagagccggcttcttcttcaccaagttctgcgagcacagcggcaacaagctgtggaagaacagcgtgtacttctggttcgacctgcaggcctaccaccagctgttctaccaggagaccctgcagcccttcaaggtgtgcaagcaggcccagtacctgttcgccacctacgtggcccccagcgccaccctggacatcggcctgcagcaggagaagaagaaggagatctacatgaagatccagccccccttcgaggacctgttcgacaccgccgaggagtacatcctgctgctgctgctggagccctggaccaagatggtgaagagcgaccagatcgcctacaagaaggtggagctggtggaggagaccagacagctggacagcacctacttcagaaagctgcaggccctgcacaaggagaccttcagcaagaaggccgaggacaccacctgcgagatcggcaccggcatcctgagcctgagcaacgtgagcaagagaaccgagtactgggacaacgtgcccgccgagtacaagcacttcaagttcagcgacctgctgaacaacaagctggagttcgagcacttcagacagttcctggagacccacagcagcagatggatcctgtgcgccggccagaccctgagcagcagcggcgagacctacagagacagaaaccagagaaaggccaagagcatctacatcaagaacaagtacctgaacaagaagtacttcttcggccccaacagccccgccagcctgtaccagcagaaccaggtgatgcacctgagcggcggctggggcaagatcctgcacgagcagctggacgcccccgtgctggtggagatccagaagcacgtgcagaacagactggagaacgtgtggctgcccctgttcctggccagcgagcagttcgccgccagacagaagatcaaggtgcagatgaaggacatcgccgaggagctgctgctgcagaaggccgagaagaagatcggcgtgtggaagcccgtggagagcaagtggatcagcagcagctgcaagatcatcgccttcagaaaggccctgctgaaccccgtgaccagcagacagttccagagattcgtggccctgaagggcgacctgctggagaacggcctgctgttctggcaggaggtgcagaagtacaaggacctgtgccacagccactgcgacgagagcgtgatccagaagaagatcaccaccatcatcaactgcttcatcaacagcagcatcccccccgccctgcagatcgacatccccgtggagcaggcccagaagatcatcgagcacagaaaggagctgggcccctacgtgttcagagaggcccagatgaccatcttcggcgtgctgttcaagttctggccccagttctgcgagttcagaaagaacctgaccgacgagaacatcatgagcgtgctggagagaagacaggagtacaacaagcagaagaagaagctggccgtgctggaggacgagaagagcggcaaggacggcatcaagcagtacgccaacaccagcgtgcccgccatcaagaccgccctgctgagcgacagcttcctgggcctgcagccctacggcagacagcccacctggtgctacagcaagtacatcgaggccctggagcaggagagaatcctgctgaagatccaggaggagctggagaagaagctgttcgccggcctgcagcccctgaccaacttcaaggccagcagcagcaccatgagcctgaagaagaacatgagcgcccacagcagccagaagtag

SEQ ID NO: 105490 - DNA, 3756 bp, Artificial Sequence
  derived and/or modified sequence
atgcccgagaagaggctgactgcggagccacccaccatcaccgaggaagagttcgaggactctttggcgactgatgacttcttagtcgactatttcaatgagtttttgtcactccctaccttcagcgaggctatcagattcaacgcggactatggagtctttgaagtggccaatgatgctccacaattcctggaaaaacagctgaagaaaattctacagaaccagcagcctcgtaatcccatatacgacgtcgtcagaaaaggaaaaaatgaggtgaaaccagttcagatgaacgctcctgacgaggacgagacaatcaatgtcaattacaacatcatgtgtctgagccgcgaggaaggtatcaagtggattaaaaaagagaggctgccagccttcttggaaagtgactgttattttgagtataggctggccaagctggtctcccaggtgagatggagcaagtccggaatgaacttcaccgtgggttctaatttcagtccctggatcgtcaaaaagccaccttcccttccaccaccagctaccgaagaggacaacttagcatcgtacacccagactaaggattggttcgctcttgccaaacagtcccagcaaacagttagtacattctctctgccttgctgcgtgccgtataacaagttgaagtcccccgctataagctcagtgagcgaaaattttatatttgacgacggagtgcacccacgaactaaaaaggacccgagtaaaacaaataaacttatttcagagtttgaagaggaagaaggagaggaagaggaagtgtctgtgtccctgcaggacaccccttcacaagctctgcttcgagtgtacttggaaaagaagcaagacgtggatgagtccctgactatgcattttagtacatgcgaagaattcctgtctagctacatttacttcatcctccggggtgccatccagcagattgttggtaagcccgttggggaaacaccagattatataaacttcaacaacatcaccaaagtgagctttgatgactgtttcgaaagcattcatggcaagaattttttgtccgagttagtccaaaccacgaaagagaggagcgaagagatcgagcagacatctctgtcctctaaaaacgaatccgccggaccagagtccagggctgattggtgcatctcacatcgaacctatgatatcggcaatcggaaagagttcgagaggtttaagaagtttataaagggcaccctgggtgagcggtactggtggttatggatggacatcgagcgcctgaaagtactgaaagacccgggccgccatcagcgccacctcgaaaagatgaaaaagtgctatcttgtgtcgaatggcgactattatctgagcgcagaaatactaagtaagtttaaactgctggatgggagccaatggaacgaggagcacttgcggaatattcaaagtgaggtgctgaagcccctgctgttatattgggcaccgagattctgtgttacccattcagctagtacgaaatacgcctccgcagaattgaagttttggcacctcagacaggccaagccacgcaaggacattgatccatttccacagatggccaccttgctgcctctgagaccaaaatcgtgtatcccccaaatccctgagatacaaaaggaggaatttagcctgagtcagccaccgaagagcccgaataaatctcctgaggtgaagactgccacgcaaaagccttggaagcgtgagcttttatacccaggttcctccaaggacgatgttattgaaaagggaagtaagtacatgagtgagagttccaaagtcattcacttaaccagttttaccgatattagcgagtgcctgaagccacaactggacaggagatacgcctacactgaggagcctagagtcaaaacggtgtccgatgttggcgcactgggcggatccgacatggaaaatctcctgcagtccttgtacgtggagaacagagccggatttttctttaccaagttttgtgagcattcaggcaacaaactctggaagaacagtgtgtatttctggtttgatctccaggcatatcaccagttgttctaccaggaaacgctccaacccttcaaggtgtgcaagcaggctcaatacctctttgccacctatgtggcaccctccgcaactcttgatattgggttgcagcaagagaaaaagaaagaaatctacatgaagatccagccaccctttgaggatctttttgatacagccgaggaatacatattgttgttgcttctggagccatggaccaagatggtgaagagtgatcagattgcttataaaaaagtcgagttagttgaggagaccaggcagctggacagcacttattttcgtaaattacaggctctccataaggagacgttttccaagaaggccgaggatactacctgcgaaattggtaccgggattctgtccctcagtaatgtgagtaaacgcacagagtactgggacaacgtgccggcagagtataagcattttaaatttagcgacttgctgaataacaaactcgaattcgagcacttcaggcagttcctggaaacccatagctcgagatggatcctgtgtgccgggcaaactctgtcctcttccggcgagacctacagagaccgcaaccagcgtaaggcaaagtccatttatatcaagaataagtatcttaataaaaagtatttcttcggcccaaactctcctgcatccttataccaacaaaatcaggttatgcatctgtcaggcggttggggtaaaatactccatgagcagcttgacgctcccgttctggtagagattcagaaacacgtgcagaaccgattagagaacgtctggctacccctgtttcttgcatctgagcaattcgcagctcggcagaagattaaggtgcagatgaaggacattgccgaggaactgctgcttcaaaaggccgaaaaaaaaatcggagtgtggaaacccgtggaatccaagtggatctcctccagttgtaaaatcattgcctttcgtaaggcgttgctcaatcctgtgactagccggcaattccagagattcgttgcactgaaaggagatctcctggagaacggtttgctgttctggcaggaagttcagaagtacaaggacctgtgccactcccattgcgatgagtcagtgattcaaaaaaagatcacgactattatcaactgtttcatcaatagctctatcccaccagccctccagattgatattccagtggagcaagcccaaaagataatcgagcaccgaaaagaactcggaccctatgtgttcagggaagctcaaatgaccatcttcggcgtcctgtttaaattctggcctcagttctgcgaatttagaaagaatttaactgacgagaatatcatgagtgtgttggaacgtaggcaggaatacaataagcagaagaagaaactggctgttcttgaagatgaaaaatccggaaaggacggcattaagcagtatgccaacacctccgtaccggccatcaaaacggccctgttgagcgactcttttttaggactgcaaccctacggacgccagcccacctggtgctattcgaagtacattgaggctctcgaacaggagagaatccttcttaagattcaagaggaactggaaaagaagttgttcgccggcctgcagccgctgacaaatttcaaggccagttctagtacaatgtctctgaagaaaaatatgagtgctcactcgtctcagaaatag

SEQ ID NO: 105491 - DNA, 3756 bp, Artificial Sequence
  derived and/or modified sequence
atgcctgagaagaggctgacagctgagccccccaccatcacagaggaggagtttgaggacagcctggccacagatgacttcctggtggactacttcaatgagttcctgagcctgcccaccttcagcgaggccatccgcttcaatgctgactatggagtgtttgaggtggccaatgatgccccccagttcctggagaagcagctgaagaagatcctgcagaaccagcagcccaggaaccccatctatgatgtggtgaggaagggcaagaatgaggtgaagcctgtgcagatgaatgccccagatgaagatgagaccatcaacgtgaactacaacatcatgtgcctgagccgggaggagggcatcaagtggatcaagaaggagcggctgcctgccttcctggagagtgactgctactttgagtaccgcctggccaagctggtgtcccaggtgcgctggagcaagagcggcatgaacttcaccgtgggcagcaacttcagcccctggatcgtgaagaagccacccagcctgcccccaccagccacagaggaggacaacctggccagctacacccagaccaaggactggtttgccctggccaagcagagccagcagacagtgtccaccttcagcctgccctgctgcgtgccctacaacaagctgaagagccctgccatcagctctgtgtctgagaacttcatctttgatgatggagtgcaccccaggaccaagaaggaccccagcaagaccaacaagctgatcagcgagtttgaggaggaggagggggaggaggaggaggtgtctgtgtccctgcaggacacccccagccaggccctgctgcgggtgtacctggagaagaagcaggatgtggatgagagcctgaccatgcacttcagcacctgtgaggagttcctgagcagctacatctacttcatcctgcggggggccatccagcagatcgtgggcaagcctgtgggggagaccccagactacatcaacttcaacaacatcaccaaggtgtcctttgatgactgctttgagagcatccacggcaagaacttcctgtctgagctggtgcagaccaccaaggagaggtctgaggagattgagcagaccagcctgagcagcaagaatgaatctgctggccctgagagcagagctgactggtgcatcagccacaggacctatgacatcggcaacaggaaggagtttgagcgcttcaagaagttcatcaagggcaccctgggggagcgctactggtggctgtggatggacatcgagcggctgaaggtgctgaaggaccccggccgccaccagaggcacctggagaagatgaagaagtgctacctggtgtccaatggagactactacctgtctgctgagatcctgagcaagttcaagctgctggatggcagccagtggaatgaggagcacctgaggaacatccagagcgaggtgctgaagcccctgctgctgtactgggccccccgcttctgtgtgacccacagcgccagcaccaagtatgccagcgctgagctgaagttctggcacctgcggcaggccaagcccaggaaggacatcgaccccttcccccagatggccaccctgctgcccctgcggcccaagagctgcatcccccagatccctgagatccagaaggaggagttcagcctgagccagccccccaagagccccaacaagagccctgaggtgaagacagccacccagaagccctggaagcgggagctgctgtacccaggcagcagcaaggatgatgtgattgagaagggcagcaagtacatgtctgagagcagcaaggtgatccacctgaccagcttcacagacatcagtgaatgtctgaagccccagctggacagaagatatgcctacacagaggagccccgggtgaagacagtgtctgatgtgggcgccctgggcggcagtgacatggagaacctgctgcagagcctgtatgtggagaacagagctggcttcttcttcaccaagttctgtgagcacagcggcaacaagctgtggaagaacagcgtgtacttctggtttgacctgcaggcctaccaccagctgttctaccaggagaccctgcagcccttcaaggtgtgcaagcaggcccagtacctgtttgccacctacgtggcccccagcgccaccctggacatcggcctgcagcaggagaagaagaaggagatctacatgaagatccagcccccatttgaggacctgtttgacacagctgaggagtacatcctgctgctgctgctggagccctggaccaagatggtgaagagtgaccagatcgcctacaagaaggtggagctggtggaggagacccggcagctggacagcacctacttcaggaagctgcaggccctgcacaaggagaccttcagcaagaaggccgaggacaccacctgtgagatcggcaccggcatcctgagcctgagcaatgtgtccaagaggacagagtactgggacaacgtgcctgctgagtacaagcacttcaagttcagtgacctgctgaacaacaagctggagtttgagcacttccggcagttcctggagacccacagcagccgctggatcctgtgtgccggccagaccctgagcagcagcggggagacctacagagacaggaaccagaggaaggccaagagcatctacatcaagaacaagtacctgaacaagaagtacttcttcggccccaacagccctgccagcctgtaccagcagaaccaggtgatgcacctgagcggcggctggggcaagatcctgcacgagcagctggatgcccctgtgctggtggagatccagaagcacgtgcagaaccggctggagaatgtgtggctgcccctcttcctggccagcgagcagtttgctgcccggcagaagatcaaggtgcagatgaaggacattgctgaggagctgctgctgcagaaggccgagaagaagattggagtgtggaagcctgtggagagcaagtggatcagcagcagctgcaagatcatcgccttcaggaaggccctgctgaaccctgtgaccagccggcagttccagagatttgtggccctgaagggggacctgctggagaatggcctgctcttctggcaggaggtgcagaagtacaaggacctgtgccacagccactgtgatgaatctgtcatccagaagaagatcaccaccatcatcaactgcttcatcaacagcagcatccccccagccctgcagattgacatccctgtggagcaggcccagaagatcatcgagcacaggaaggagctgggcccctacgtgttccgggaggcccagatgaccatctttggagtgctcttcaagttctggccccagttctgtgagttcaggaagaacctgacagatgagaacatcatgtctgtgctggagcggcggcaggagtacaacaagcagaagaagaagctggccgtgctggaggatgagaagagcggcaaggatggcatcaagcagtatgccaacacctctgtgcctgccatcaagacagccctgctgagtgacagcttcctgggcctgcagccctacggccggcagcccacctggtgctacagcaagtacatcgaggccctggagcaggagcgcatcctgctgaagatccaggaggagctggagaagaagctgtttgctggcctgcagcccctgaccaacttcaaggccagcagcagcaccatgagcctgaagaagaacatgtctgcccacagcagccagaagtag

SEQ ID NO: 105492 - DNA, 3756 bp, Artificial Sequence
  derived and/or modified sequence
atgcccgagaagcggctgaccgccgagccccccaccatcaccgaggaggaatttgaggacagcctggcaaccgatgatttcctggtcgattacttcaatgagtttttgagcctgcctacgttttctgaggccattcggttcaacgctgattacggcgtttttgaggttgccaacgacgcaccacaattcctggagaaacaattaaagaaaatccttcaaaaccagcagccacgcaatcccatatacgacgtggtgcggaagggtaagaatgaggttaaaccagtccagatgaacgcccccgatgaggatgagacaatcaatgtgaactacaatattatgtgtcttagcagggaggagggtatcaagtggattaaaaaggagcgcctccccgctttcttggagagcgactgctattttgaatatcggctcgctaagctggtgtcccaagtgagatggtctaaatccggaatgaatttcaccgtcggctccaacttttcaccatggattgttaaaaaacccccatctttgccccctccagccacggaagaggataaccttgcctcttacacacagaccaaagactggttcgcacttgccaagcagtcacagcagacagtgagcacattctcactcccatgctgcgttccctataacaagctgaagtccccagccatctctagcgtttccgaaaatttcattttcgatgatggcgtgcatcctcggacaaaaaaggaccccagcaagaccaacaaactgatctcagagttcgaggaggaagagggggaagaggaagaggtgtctgtctccctgcaagatacccctagtcaggcactcctaagagtttacttggaaaagaagcaggacgttgacgaatcacttaccatgcacttctctacatgcgaggagttccttagcagctacatctactttattcttcgtggggcaattcagcagattgtgggcaaaccagtgggcgagacacctgactatattaactttaataacatcaccaaagtgtcttttgacgattgcttcgaatcaatccacgggaagaattttcttagcgagctcgtgcaaaccacaaaggaaaggagtgaggagatagaacagacctcactttcatctaagaatgagtctgccgggccagagagtagggctgactggtgcatctcgcatcgtacatatgacatcggaaataggaaggaatttgaacgcttcaagaagtttattaaaggcaccctgggggagcgttactggtggctgtggatggatatcgagcgactaaaagtgcttaaggatccagggcgacaccaacgacatctagaaaagatgaagaagtgttacctcgtgtctaacggggattactacctcagcgcagaaatcctctccaagtttaaactgctggatgggagccaatggaatgaggaacacctgcgaaacatccagtctgaagtgctcaaacccctcctattgtattgggctccaagattctgtgtaacacattcagcgagcaccaaatacgcatcggccgagctgaagttctggcatctgcgccaggccaaacctcgtaaggatattgacccttttccacaaatggccactctgctgccgctcaggccaaagagttgcattccacagataccagaaattcagaaagaggagtttagtctatcccagcccccaaaatcacctaacaaatcccccgaagtgaagactgccactcagaagccttggaagcgggagctgctatatccgggctcaagcaaggatgacgtgattgagaagggcagcaaatacatgagcgagagcagcaaggtgattcacctaacttcttttacagacattagcgaatgcctgaagcctcagctggatcgaaggtacgcttatactgaggaacctcgggtcaaaaccgtgtccgacgtgggcgccctcggcggtagcgacatggaaaatttgctccaatccctctacgttgagaatcgcgccggatttttcttcacaaagttttgcgagcacagcggcaataagctgtggaagaactcagtgtacttctggttcgacctccaggcttatcatcagctgttctatcaggaaactctacaaccattcaaagtatgtaagcaggctcaatacctgttcgcgacctatgttgcaccatcagccactcttgatattggcctgcagcaggaaaagaaaaaggagatctacatgaagatccagccacctttcgaagatctgttcgataccgccgaagagtacattctccttttgctgctggagccatggaccaaaatggtgaagtcagaccaaattgcatataagaaggtggagctcgtggaagaaacgaggcaactggactccacctatttccggaagctgcaggccctccataaggagacattttctaaaaaggcagaagacaccacctgcgaaatcggaaccgggatcctcagcctttcgaatgtttcaaagaggaccgaatattgggacaacgtgccagcggagtacaaacacttcaagttcagcgatttactgaacaataagctggaattcgagcactttaggcagttcctggagacgcactcttcgcgttggatcctgtgtgctggacagacactcagttcaagcggtgagacgtacagagacagaaaccagaggaaggcaaagagtatctacatcaaaaataagtacctcaataaaaagtatttttttggtcccaacagccccgcgagtctctaccagcaaaaccaggtcatgcatctctccggggggtggggaaagattctccacgaacaattagatgcacccgtcttggtggaaatccaaaagcacgtgcaaaaccgtctcgagaacgtatggttacccctctttctggcatccgagcaatttgccgctagacagaaaatcaaagtacagatgaaagacattgccgaagaactgctattacagaaagcggagaaaaaaattggggtgtggaaacccgtagaaagtaagtggataagtagtagctgtaaaataattgccttccggaaggcactgcttaatcctgtgacttctcgccaattccagcggtttgtcgcattaaagggggatctgctggagaacgggctcctgttttggcaggaggtgcaaaagtacaaggacctctgtcactcacactgtgatgaaagcgtcattcagaagaaaataacaaccattatcaactgttttatcaacagctccataccacccgcactgcagatcgacattcctgttgagcaggctcagaagattattgaacatagaaaggagcttggaccgtatgtctttagggaggcccaaatgacgatctttggcgtgctttttaagttctggccgcagttctgtgaatttaggaagaatctgacggacgagaatatcatgagcgtgttggagagacgccaggaatataataagcaaaagaagaaactcgctgtgctggaggatgagaaaagtggaaaggatgggataaagcagtatgcgaacacctccgttcccgccattaagactgccctactgagtgacagtttcctgggccttcaaccttatggcagacagcctacatggtgttactcaaagtatattgaggccctggaacaggagcgaatcctgctgaagattcaggaagagctggagaaaaagctcttcgccgggctgcaacctttgacaaatttcaaagcgagttcttccaccatgagtcttaaaaagaatatgtcagcccactctagtcaaaagtag

SEQ ID NO: 105493 - DNA, 3756 bp, Artificial Sequence
  derived and/or modified sequence
atgcccgaaaagcgcctgaccgccgaaccccctaccattacagaggaggagttcgaggactcactggcaacagatgactttcttgtggactattttaatgagttccttagcctccctactttcagcgaggctatacgattcaacgcggattacggcgtatttgaggttgccaacgacgctccccagtttctggaaaagcagttaaagaaaattcttcagaaccagcagcctagaaatcccatctacgacgtggttcgcaagggcaaaaatgaggtgaagccggttcaaatgaacgcgccagacgaggacgagacaatcaacgtcaactacaatataatgtgcctaagtagggaggagggcatcaagtggatcaagaaagagcggttgcctgctttcctcgaatccgactgctattttgaatatcgactggctaagctcgtaagccaggtgcggtggtccaagtctggcatgaacttcacagttggcagtaatttctctccctggatcgttaaaaaaccgccttccttacctcctcctgcaaccgaagaggataaccttgctagctatacacagaccaaggactggttcgccctggctaagcagtcacagcagaccgtcagcactttttcgctcccatgttgtgttccctacaataaattgaagagtccagctatctcatctgtcagcgaaaactttattttcgatgacggagttcaccctaggaccaagaaggatcccagcaagactaacaagttaatctcggagttcgaggaagaggagggggaagaggaagaagtgtctgtttcgttgcaggacacaccttcgcaggctctactcagggtttacttggagaaaaagcaggacgtggatgagtctttgactatgcacttttctacatgcgaggaattcctgagttcatatatatacttcatcttgagaggtgcgatccaacagattgtgggcaaacccgtgggggagacgcctgactatattaatttcaacaatataactaaagtctcttttgacgattgttttgaatccatccacggaaagaattttctctccgagcttgtgcaaacaacaaaagaaagaagcgaggagattgagcagacctcactgagcagcaagaacgaaagtgctggccctgagtcccgcgctgactggtgtatatctcaccgcacctacgacatcggaaatcgtaaagagtttgaacggtttaagaagttcatcaagggaacgctgggggaaaggtactggtggttgtggatggacatcgagaggctgaaggtcctcaaagaccctggaaggcaccagaggcacctcgagaaaatgaaaaaatgttatttggtgtctaacggggactactacctgtctgccgagatcctgtctaagttcaagttgctcgatgggtcccaatggaatgaagagcaccttcggaacatacagtctgaggtgcttaaacctctcctgctatactgggccccacggttctgcgtcacccattctgcctcaactaagtacgcctctgccgagcttaagttttggcacctcagacaagcaaagccccgaaaggatattgacccattcccacagatggctacgctgctgccactgaggccgaagtcttgtattccacaaatccccgaaatccagaaggaggaattctccctcagccagcccccaaaatcccctaacaaaagtcctgaagtgaagactgctactcaaaaaccctggaaaagagaactgctgtatcctggttcctctaaggacgacgtcatcgagaagggcagcaagtatatgagcgagtccagcaaagtaattcacctgacttcttttacagacatttcagaatgtctcaagccgcagctggaccgcagatacgcctataccgaggagcctcgagtgaaaacagtttccgatgtgggggcacttggcggaagtgatatggaaaacctgctgcagtccctttatgttgagaatcgagcaggattcttctttacaaagttttgtgagcatagcggcaacaaactatggaagaatagcgtgtacttctggttcgacctccaggcttaccatcagttattttaccaggagaccctccagcccttcaaggtttgtaaacaagctcagtacctgttcgcaacttatgttgccccttcagctacactggacattggccttcagcaagaaaagaagaaagaaatttacatgaaaatacagccccctttcgaggacttgttcgatacggcggaagagtacatcctcttactgctcctggaaccttggaccaagatggtaaagagcgatcagatagcgtataagaaggtggaacttgtggaggaaactcgccaattagattctacatacttcaggaagcttcaggccctgcataaagagacgttttctaagaaggcggaagataccacttgcgagataggcaccggcatcctgtcgttgtctaacgtcagcaagagaaccgagtattgggacaacgtgccagctgaatacaagcacttcaaattctccgacctcctgaataataagctggaattcgaacactttaggcagttccttgaaacacattctagtcggtggattctttgtgcgggacagacgctgagctctagcggggaaacttatcgcgataggaaccagcgtaaggccaaaagcatttatataaagaacaaatatttgaacaagaaatattttttcggcccaaacagccctgcatcgctctaccagcaaaatcaggttatgcatttgtcggggggttggggaaagatattgcatgaacagctggacgctccggtgttggtagagatacagaagcacgtacagaaccgtctggaaaacgtctggcttcctctctttctagcgagcgagcaattcgccgctcgacagaaaattaaggtgcaaatgaaggatatcgctgaggaactgctgttacaaaaagccgagaagaagatcggggtgtggaaacctgtggaaagtaaatggatctcaagttcatgcaaaatcatcgcattccggaaggctttgctcaatcccgtgacatcaagacagtttcagcgctttgtggccttgaagggggatctattggagaacggactacttttctggcaggaggttcagaagtataaagatctgtgccattctcactgtgacgaaagtgttattcagaagaagatcaccactattataaattgctttatcaatagctccattcccccagcgctgcaaattgatattccagtggagcaggcccaaaagatcattgaacatagaaaagagctgggaccgtatgtgtttcgggaggcccagatgaccattttcggggttcttttcaagttctggcctcagttctgtgaatttaggaaaaacctgaccgacgagaatatcatgagcgtactggaacggcgacaggagtacaataagcagaaaaagaaactggctgtgctggaggatgagaagagtggtaaagacggaatcaagcagtacgccaatacatccgtgcccgcaattaagaccgcactcctgtctgattctttcctgggtctgcagccatacggaagacagccaacatggtgctactcaaagtatatagaggcccttgaacaggagaggatcttactaaagatacaggaggaactggaaaagaaattgttcgcagggttgcaacctcttacaaactttaaggctagctcttcaacaatgtctcttaagaaaaatatgtctgcccattctagccagaaatag

SEQ ID NO: 105494 - DNA, 4145 bp, Artificial Sequence
  derived and/or modified sequence
ccggcctcggcctccctgggcggccgtattgtctaagctccatagcaaccccggcgcggcgccggccacgctagccagcgtagctccggagcccgcgcgccgtcgccgcgtcgctcaggccctgacccgcgctggacccgcgcgctagggccctgacggcccgcgcgggctccaggcgcgggcagcggggacggcatgcccgagaagaggctcaccgcggagccaccaactattacagaagaagaatttgaagattctctggcaacagatgatttccttgtagactactttaatgaattcctaagccttccaaccttttcagaggcaattagatttaatgcagattatggagtttttgaagtagctaatgatgctccacaatttctggaaaaacaactgaaaaaaattctacaaaaccagcaacctcgaaatcccatttatgatgttgtaaggaaaggaaagaatgaggttaaacctgttcaaatgaatgcccccgatgaagatgagaccattaatgtcaactacaatattatgtgtctcagtcgtgaagaaggtattaagtggatcaaaaaagaaagacttccagcatttctggaaagtgattgttactttgaatacaggttagccaaattggtctcacaagtaagatggagcaagtccggcatgaatttcacagtaggatcaaatttttctccctggatcgtgaaaaaaccacccagtctaccacctcctgccactgaagaagataatcttgcttcctatactcaaacaaaagattggtttgcattagcaaaacaaagtcagcaaacagtatcaaccttttcgttaccctgttgtgtaccctacaacaaacttaaatcaccagctatttcatctgtttctgagaattttatctttgatgatggagttcaccctaggacaaaaaaggacccatctaaaaccaacaaattgatttctgaatttgaagaagaagaaggagaagaagaagaggtgtctgtatctctacaagacactccttctcaagctcttctgagagtataccttgaaaagaaacaggatgttgatgaaagcctgacaatgcatttctcaacatgtgaagaatttttaagctcctatatatactttattttgagaggagcaattcagcaaattgttggaaagccagttggagaaaccccagactatataaacttcaacaatataacaaaagtgtcatttgatgattgttttgagtctattcatggcaagaattttttaagtgaattagttcaaactacaaaggagaggtcagaagagatagaacaaacaagtttaagttcaaagaatgagagcgctggaccagagagcagggcggactggtgtatttctcataggacttatgacattggcaatagaaaggagtttgaaagatttaagaaatttataaaaggtacattgggagagagatattggtggctatggatggatattgagaggttaaaagttcttaaggatcctggaagacatcaaagacatcttgagaagatgaaaaaatgctatctagtgagcaatggagattactacctttctgcagaaatcttatcaaaatttaaactgttagatggatcacagtggaatgaagagcatttaagaaatattcagtctgaagttttaaaacctttacttctgtattgggcaccaagattctgtgttactcattcagcctcaacaaaatatgctagtgctgaactgaaattctggcacctccgtcaagcaaaaccaaggaaggatattgacccttttccacaaatggcaaccctcttgccattaagacccaaatcttgcattccacagatacctgagatccagaaagaagaattcagcttatcacaacctcctaaatctcccaataaatcacctgaagtaaaaacagcaactcaaaagccttggaagcgggagcttttgtatccaggttcttctaaggatgatgtgattgagaaagggtcaaagtacatgtcagaaagcagcaaagtcattcatttaacatcttttactgacatttctgaatgtctcaagccccagctggatagaagatacgcttatacagaagaacctagggttaaaaccgtgtcagatgttggtgccttgggaggatctgacatggaaaatttgttgcaatctttgtatgtagaaaatagagctggattcttctttactaaattctgcgagcattcagggaacaagttgtggaagaacagtgtgtacttttggtttgacctgcaggcttatcatcagcttttctaccaagaaacacttcagccttttaaagtatgcaagcaagcgcaatatctttttgccacatacgttgctccttctgccactcttgacattggactccaacaggaaaagaaaaaagaaatttatatgaaaatacagccaccatttgaagacctttttgacacagcagaggaatatatccttctcctccttcttgagccatggacaaagatggtaaaatcggaccaaattgcttataaaaaggtggagctggtggaagaaactcgacagttagactccacatacttcagaaagctacaggctttgcataaagagacattttccaagaaagctgaggacaccacttgtgaaattggaactggcattttatcactctctaacgtctctaaacgaacagaatattgggataatgttcctgcagaatacaagcattttaagtttagtgatctgcttaacaacaaactggagtttgaacatttccgtcagtttcttgagactcattcttcaagatggatcttatgtgctggacagacattgagcagttccggagaaacttacagagatcgaaatcaaaggaaggcaaaatctatatacattaaaaacaaataccttaataaaaaatatttctttggacccaacagtccagcttctctgtatcagcagaaccaggtaatgcatttaagtggtggctgggggaagattcttcatgagcagcttgatgcacctgttctagttgaaatccagaagcatgtgcaaaataggctagaaaatgtatggctgccattgtttcttgcaagtgaacagtttgcagcacgtcagaagataaaggtacagatgaaagacatagcagaagagctcttactacagaaggctgaaaagaaaatcggggtctggaagcctgtggagagtaagtggatctcttcatcttgtaaaatcattgcttttcgcaaagcattattgaatccagttacttcaagacaatttcaacgttttgtggctctaaaaggagatttattggaaaatggtttactcttttggcaagaagtacaaaaatataaggacttgtgccattctcattgtgatgagtctgtcatccagaagaagattacaactattatcaactgctttattaattccagtattccaccagctttacaaattgacattccagtagagcaagcccagaagattattgaacaccggaaggagttaggaccatatgtatttagagaggcacagatgacaatttttggggttctgtttaaattctggcctcagttctgtgagtttaggaagaatttaacagatgaaaatattatgagtgttttagagagaagacaagaatataataagcagaaaaaaaaattggcagtcctagaagacgaaaaatctggaaaggatggaatcaaacaatatgcaaatacttcagtgcctgctatcaaaactgctttactcagtgattccttcctaggcctccaaccatatggccgacagccaacctggtgctactcaaagtatatagaagccttagaacaggagagaattcttcttaagatccaagaagaactagaaaaaaagttgtttgcaggcttgcaacctctcacaaattttaaggctagctcttcaactatgtctttgaaaaagaatatgtctgcccacagcagccagaagtgacagcattcttgtgaatgtttacatcctgctgctgataggttcaaggaattctttaaaccagattctgctgacatgagaagctccagtgatttgtttttttgaaggtctgtatcagagcaagcctaacatctaaataaagtttgattctggattttccaggtgggaaataaataaagaaaatttggcttgtctta

SEQ ID NO: 105495 - DNA, 1425 bp, Artificial Sequence
  derived and/or modified sequence
atggccgccggcctgctgaccgccggccccagaggcagcaccttcttcagcagcgtgaccgtggccttcgcccaggagagatggagatgcctggtgagcacccccagagacagattcaaggagggcatccccggcaagagcagaagcctggtgctgctgggcctgcccgtgagccagcccggcatgaacagccagctggagcagagagagggcgcctggatgctggagggcgaggacctgagaagccccagccccggctggaagatcatcagcggcagcccccccgagcaggccctgagcgaggccagcttccaggacccctgcgtggagatgccccccggcgacagcgaccacggcaccagcgacctggagaagagcttcaacctgagacccgtgctgagcccccagcagagagtgcccgtggaggccagacccagaaagtgcgagacccacaccgagagcttcaagaacagcgagatcctgaagccccacagagccaagccctacgcctgcaacgagtgcggcaaggccttcagctactgcagcagcctgagccagcaccagaagagccacaccggcgagaagccctacgagtgcagcgagtgcggcaaggccttcagccagagcagcagcctgatccagcaccagagaatccacaccggcgagaagccctacaagtgcagcgagtgcggcagagccttcagccagaacgccaacctgaccaagcaccagagaacccacaccggcgagaagccctacagatgcagcgagtgcgagaaggccttcagcgactgcagcgccctggtgcagcaccagagaatccacaccggcgagaagccctacgagtgcagcgactgcggcaaggccttcagacacagcgccaacctgaccaaccaccagagaacccacaccggcgagaagccctacaagtgcagcgagtgcggcaaggccttcagctactgcgccgccttcatccagcaccagagaatccacaccggcgagaagccctacagatgcgccgcctgcggcaaggccttcagccagagcgccaacctgaccaaccaccagagaacccacaccggcgagaagccctacaagtgcagcgagtgcggcaaggccttcagccagagcaccaacctgatcatccaccagaagacccacaccggcgagaagccctacaagtgcaacgagtgcggcaagttcttcagcgagagcagcgccctgatcagacaccacatcatccacaccggcgagaagccctacgagtgcaacgagtgcggcaaggccttcaaccagagcagcagcctgagccagcaccagagaatccacaccggcgtgaagccctacgagtgcagcgagtgcggcaaggccttcagatgcagcagcgccttcgtgagacaccagagactgcacgccggcgagtag

SEQ ID NO: 105496 - DNA, 1425 bp, Artificial Sequence
  derived and/or modified sequence
atggctgccggtctgctgaccgccggtccgcgcggaagcacctttttttcctcggtgacagtcgccttcgcccaggaaaggtggagatgtctggtcagcaccccccgtgatagatttaaggaggggattccaggcaagagccgatccctcgtcctcctgggattgccggtatctcagcctggcatgaattcccagctcgaacagcgggaaggagcttggatgttggagggcgaagacctgcgctccccatcgcctggatggaagatcatctctggcagcccacccgagcaggcgttgtctgaggccagttttcaggacccttgtgttgagatgccaccaggggactccgatcacggcacctcagacctggagaaaagcttcaacctgcggccggtattgtcaccccagcagagggtgcctgtggaagcacgccctcggaaatgtgagacgcataccgagtcattcaaaaatagtgagatcctcaaacctcacagagccaagccatatgcctgcaacgaatgcggaaaggctttctcttattgctccagcctgagccagcatcagaagtcccacaccggggagaagccgtacgagtgcagcgaatgcggcaaggccttcagccaaagctccagcctgatccagcaccagagaatccacaccggcgagaagccctacaaatgctctgagtgtggtcgggctttcagccaaaacgcaaacttgacaaagcaccagagaacccatacaggagaaaaaccatacaggtgctccgaatgtgaaaaggcattcagcgattgctctgccttggtacagcaccaaaggatccacactggggaaaagccttatgagtgttccgattgtggcaaagcctttagacattcagctaatctcaccaatcaccagaggacccacacaggggagaagccctataaatgcagtgaatgcggaaaagcattctcttactgcgccgcctttatccagcatcagcggatccatactggggagaagccttatcgttgtgccgcatgcggtaaggccttcagccaaagcgccaacctaacaaatcatcagaggacccatacaggagagaagccatataaatgttccgagtgcggaaaggccttcagccagagcaccaatctgattatccaccagaaaacccacacgggcgagaagccttacaaatgcaatgaatgcggtaagttcttttccgaatcctccgcacttatcaggcatcacatcatacacacgggtgaaaagccgtatgagtgcaacgagtgcggaaaagcctttaaccagagcagttctctgagccagcatcaacgcatacataccggcgtgaagccgtacgaatgttcagaatgtggcaaagcattccgctgtagctctgcgtttgtacgccaccagcggctgcacgccggagaatag

SEQ ID NO: 105497 - DNA, 1425 bp, Artificial Sequence
  derived and/or modified sequence
atggctgctggcctgctgacagctggcccccggggcagcaccttcttcagctctgtgacagtggcctttgcccaggagcgctggcgctgcctggtgtccaccccccgggaccgcttcaaggagggcatccctgggaagagccgcagcctggtgctgctgggcctgcctgtgtcccagcccggcatgaacagccagctggagcagcgggagggcgcctggatgctggagggggaggacctgcggagccccagccctggctggaagatcatcagcggcagccccccagagcaggccctgtctgaggccagcttccaggacccctgtgtggagatgcctcctggggacagcgaccacggcaccagtgacctggagaagagcttcaacctgcggcctgtgctgagcccccagcagagggtgcctgtggaggcccggcccaggaaatgtgagacccacacagagagcttcaagaacagcgagatcctgaagccccaccgggccaagccctatgcctgcaatgaatgtgggaaggccttctcctactgcagcagcctgagccagcaccagaagagccacactggagagaagccctatgagtgcagtgaatgtgggaaggccttcagccagagcagcagcctcatccagcaccagaggatccacactggagagaagccctacaagtgcagtgaatgtggccgggccttcagccagaatgccaacctgaccaagcaccagaggacccacactggagagaagccctaccgctgcagtgaatgtgagaaggccttcagtgactgcagcgccctggtgcagcaccagaggatccacactggagagaagccctatgagtgcagcgactgtgggaaggccttccgccacagcgccaacctgaccaaccaccagaggacccacactggagagaagccctacaagtgcagtgaatgtgggaaggccttctcctactgtgccgccttcatccagcaccagaggatccacactggagagaagccctaccgctgtgccgcctgtgggaaggccttcagccagagcgccaacctgaccaaccaccagaggacccacactggagagaagccctacaagtgcagtgaatgtgggaaggccttcagccagagcaccaacctgatcatccaccagaagacccacactggagagaagccctacaagtgcaatgaatgtgggaagttcttcagcgagagcagcgccctgatccgccaccacatcatccacactggagagaagccctatgagtgcaatgaatgtgggaaggccttcaaccagagcagcagcctgagccagcaccagaggatccacactggagtgaagccctatgagtgcagtgaatgtgggaaggccttccgctgcagcagcgcctttgtgcgccaccagaggctgcacgccggggagtag

SEQ ID NO: 105498 - DNA, 1425 bp, Artificial Sequence
  derived and/or modified sequence
atggccgccggcctgctgaccgccggcccccggggcagcaccttctttagctcagtcaccgtcgcatttgcccaggaaaggtggagatgtcttgtatcaactcccagggatcgatttaaagaggggatccccggaaaatcaaggtcattagtccttctcggcctacccgtcagccagcccggtatgaactctcagctggagcagcgggagggagcctggatgctggagggcgaagacctgagaagtcctagtcccggatggaagataatttctggaagccctcccgagcaggcactgtcagaagccagcttccaggacccatgcgtggagatgccaccaggagactctgaccacggcacctccgacctcgaaaagtctttcaacctgcgccccgttctttcccctcaacagagagtgcccgtggaggcccgccctagaaaatgcgagactcacaccgaatccttcaagaatagcgaaatacttaaaccacacagggcaaaaccttacgcttgtaatgaatgcggcaaagccttctcctactgcagtagcctgagccagcaccagaagagccatacaggcgaaaagccatacgaatgctctgaatgtggaaaagcatttagccaaagttcaagtcttatccagcatcagcgaatccacacgggcgagaaaccatacaagtgctcagagtgtgggcgagctttttctcaaaatgccaacctgacaaaacaccaaaggactcacacgggggaaaagccctacagatgttccgaatgcgagaaggcgttcagtgattgttctgcattagtacaacatcaaagaatacataccggagaaaaaccctacgaatgcagcgactgcgggaaagctttccgccactctgcgaatttaacgaaccatcagaggacacataccggagagaaaccctacaaatgttctgaatgtggaaaggcattttcttattgcgctgcctttatccagcaccagaggatccacaccggagagaagccataccggtgcgctgcttgcggtaaagctttttctcagtccgctaatctgaccaaccatcaacgaacccacaccggtgagaaaccctataaatgctccgaatgcgggaaagcatttagccagagcactaatctgattatccatcaaaaaacccacaccggggaaaaaccttacaagtgtaatgaatgcgggaagttctttagcgagagcagcgccctcatacgccaccacattatacacacgggagagaagccctacgaatgcaacgaatgcggaaaggctttcaaccaatcctcctcactgtcgcagcaccaacgcatacacactggagttaagccctacgaatgtagcgaatgcggcaaggcctttaggtgctcctctgcattcgtgaggcatcagcgccttcatgcaggcgagtag

SEQ ID NO: 105499 - DNA, 1425 bp, Artificial Sequence
  derived and/or modified sequence
atggccgcaggcctcctgacagccggacctaggggatctactttcttttctagcgtcacggtggcattcgctcaagaacggtggcggtgtctggtgtctacgccacgagaccgcttcaaggagggtattcctggaaaaagccgttcgctggtcctgctgggactaccagtgtcccaacccggaatgaactctcagctcgaacagagagagggagcatggatgttggaaggagaggatctgaggtcaccgtcaccaggttggaagataatatctggatctcccccagaacaggctctgtctgaggccagcttccaggatccttgcgtcgaaatgccccctggtgactctgatcacggtacatcagacctcgagaagtctttcaacctcaggcctgtgctctccccccaacagagggtgcccgtggaggcaagaccaagaaagtgtgagacgcacaccgagtcattcaagaactctgagatcctgaaaccccacagagctaagccctatgcttgtaacgaatgcgggaaggcttttagctattgcagctcgttgtcccagcaccagaagtcgcatacaggcgaaaaaccctacgaatgctccgaatgcggaaaggccttctcccaaagcagctcactcatacaacaccagcgcatccataccggggagaagccttacaagtgcagcgagtgcgggagagccttcagtcagaacgccaacctgaccaagcatcagcgcacacacacaggagagaagccatacaggtgttcagagtgcgagaaggccttcagcgattgctctgcacttgtgcagcaccagcgtatccacacaggcgaaaagccttacgagtgctctgactgcggcaaggctttcagacattctgccaatctgactaatcaccagcgaactcatactggcgaaaagccatataagtgtagtgagtgcggcaaggctttttcttattgcgccgcttttatccaacatcagagaatccacaccggggagaagccttacaggtgtgcagcctgcgggaaagccttctctcagtccgccaacctgactaaccaccaaaggacccacacaggtgagaagccttacaaatgctcagagtgtggcaaggccttttctcagtcaactaacctgataatacaccaaaaaacacacactggggagaaaccctataagtgtaacgagtgtgggaagtttttctctgagtccagcgcactcatacggcaccacatcattcatactggcgaaaaaccatatgagtgcaacgagtgtggcaaggcttttaaccaatcatcttctctgagccaacaccaacgcatacacaccggcgtcaagccctatgaatgttcagagtgtgggaaagcattcaggtgctctagcgcgtttgtccggcaccagcgtcttcacgcaggcgagtag

SEQ ID NO: 105500 - DNA, 549 bp, Artificial Sequence
  derived and/or modified sequence
atgccccccgggggggggggtgaggttgttttcagctgcccagtgagaaaagttctgaaacccattcagctcactgatccaggaaagattaaaaggatccgcggaatggcctactcagtgcgggtctccccacagatggctaaccgcatcgtggactccgcacgatctatacttaacaaattcatcccagacatctacatctatacagatcatatgaagggggttaactcaggcaaaagcccaggctttggactgtcattagttgcagagacgacgtctggaacgttcttgtctgctgaactggcttcaaatccccaagggcagggggcggccgtactgccggaggacctgggacgaaattgcgcccgcctgctcttggaagaaatttacagggggggttgcgtcgacagtaccaaccaatctttggcactcctcctaatgaccttaggccagcaggatgtgtcaaaagtcctcttaggacccctgtcaccctataccatcgagttcctacgccatcttaaatcctttttccaaatcatgtttaagtag

SEQ ID NO: 105501 - DNA, 549 bp, Artificial Sequence
  derived and/or modified sequence
atgcctcctgggggcggcggggaggtggtgttcagctgccctgtgaggaaggtgctgaagcccatccagctgacagatcctgggaagatcaagaggatccggggcatggcctacagcgtgcgggtgagcccccagatggccaaccgcatcgtggacagcgcccggagcatcctgaacaagttcatcccagacatctacatctacacagaccacatgaagggcgtgaacagcggcaagagccctggcttcggcctgagcctggtggccgagaccaccagcggcaccttcctgtctgctgagctggccagcaacccccagggccagggcgctgctgtgctgcctgaggacctgggcaggaactgtgcccggctgctgctggaggagatctaccggggcggctgtgtggacagcaccaaccagagcctggccctgctgctgatgaccctgggccagcaggatgtgtccaaggtgctgctgggccccctgagcccctacaccatcgagttcctgcggcacctgaagagcttcttccagatcatgttcaagtag

SEQ ID NO: 105502 - DNA, 549 bp, Artificial Sequence
  derived and/or modified sequence
atgccccccggcggcggcggcgaggtggtgttcagctgccccgtgagaaaggtgttgaaacccattcaacttacagatcccggcaagataaaacgaattagaggtatggcttactcagtcagggtcagcccacagatggcgaatcgcatcgtcgacagcgcacggagcatcctgaataaatttatccccgacatctacatttacaccgatcatatgaagggggtcaactccggtaagtctcccggctttggcttatcactggttgccgagactacatccggcacattcctcagtgctgagttggctagcaacccacagggccagggcgccgccgtccttcctgaagatctcgggaggaactgtgcccgcctgttattggaggaaatttacaggggcggctgcgtggattcaaccaaccagtccttggcactcctgctcatgactttgggccagcaggatgtgtccaaagtgctgttaggcccattgtcaccctacacaattgagtttctgcgccatctgaagagcttcttccagataatgttcaaatag

SEQ ID NO: 105503 - DNA, 549 bp, Artificial Sequence
  derived and/or modified sequence
atgcctcccggtggcggtggagaggttgttttctcctgtccggtgcgaaaagtactgaagcccatccaactgacagaccctggaaagattaaacgtatccgcggtatggcatacagcgtgcgcgtgtcccctcagatggccaaccgcatcgtggatagcgcgcgtagtattttaaataagttcatcccggacatctacatttacaccgatcacatgaagggagtaaacagtggaaagagtcccggattcggcctttcgttagtggccgagacaacatctgggactttcctcagtgctgagctcgcgagtaatccccagggccagggtgccgctgtgcttccagaggatttgggccgtaattgtgcaaggctgcttctcgaggaaatctaccgcggaggatgtgtcgatagtacgaaccagagcctcgccttgcttttaatgactctcggacagcaagacgtctctaaggtccttctcggacccctgagtccttatacaatcgagttcctccggcatctgaaatcattcttccagattatgtttaaatag

SEQ ID NO: 105504 - DNA, 549 bp, Artificial Sequence
  derived and/or modified sequence
atgccccccggcggcggcggcgaggtggtgttcagctgccccgtgagaaaggtgctgaagcccatccagctgaccgaccccggcaagatcaagagaatcagaggcatggcctacagcgtgagagtgagcccccagatggccaacagaatcgtggacagcgccagaagcatcctgaacaagttcatccccgacatctacatctacaccgaccacatgaagggcgtgaacagcggcaagagccccggcttcggcctgagcctggtggccgagaccaccagcggcaccttcctgagcgccgagctggccagcaacccccagggccagggcgccgccgtgctgcccgaggacctgggcagaaactgcgccagactgctgctggaggagatctacagaggcggctgcgtggacagcaccaaccagagcctggccctgctgctgatgaccctgggccagcaggacgtgagcaaggtgctgctgggccccctgagcccctacaccatcgagttcctgagacacctgaagagcttcttccagatcatgttcaagtag

SEQ ID NO: 105505 - protein, 180 aa, Artificial Sequence
  derived and/or modified sequence
MSAWPYFIYGPSQPSSRPLRFACSSILGRMPCKQRKDERRTGYDVELTKCYTESRRNLCEEALLKIKGVISFTFQMAVQRCVVRIRSDLKAEALASAIASTKVMKAQQVVKSESGEEMLVPFQDTPVEVEQNTELPDYLPEDESPTKEQDKAVSRVGSHPEGGASWLSTAANFLSRSFYW

SEQ ID NO: 105506 - DNA, 543 bp, Artificial Sequence
  derived and/or modified sequence
atgagcgcctggccctacttcatctacggccccagccagcccagcagcagacccctgagattcgcctgcagcagcatcctgggcagaatgccctgcaagcagagaaaggacgagagaagaaccggctacgacgtggagctgaccaagtgctacaccgagagcagaagaaacctgtgcgaggaggccctgctgaagatcaagggcgtgatcagcttcaccttccagatggccgtgcagagatgcgtggtgagaatcagaagcgacctgaaggccgaggccctggccagcgccatcgccagcaccaaggtgatgaaggcccagcaggtggtgaagagcgagagcggcgaggagatgctggtgcccttccaggacacccccgtggaggtggagcagaacaccgagctgcccgactacctgcccgaggacgagagccccaccaaggagcaggacaaggccgtgagcagagtgggcagccaccccgagggcggcgccagctggctgagcaccgccgccaacttcctgagcagaagcttctactggtag

SEQ ID NO: 105507 - DNA, 543 bp, Artificial Sequence
  derived and/or modified sequence
atgagcgcctggccctactttatttacggccctagtcaacccagtagtagaccgttgcgctttgcctgctcctctattctggggaggatgccatgcaaacaaaggaaggatgagaggcgcaccggatacgacgtcgaacttaccaaatgttataccgaatcgcgtcgcaatctctgtgaagaggccctattaaaaattaagggggtcatctctttcactttccagatggctgtccagcgatgtgtagtgaggattaggagcgatctcaaagctgaagcactcgcctccgccattgcatccacaaaggtgatgaaggctcagcaggttgtgaaatccgaaagcggggaagagatgttggtcccatttcaggacacaccggtggaggtggaacagaatacagagctgccagattatttgcctgaggacgagtctccgaccaaagagcaggataaagccgtttcacgtgttggaagtcatccagagggaggggcaagctggcttagtaccgccgcgaattttctgagcaggtccttctattggtag

SEQ ID NO: 105508 - DNA, 543 bp, Artificial Sequence
  derived and/or modified sequence
atgtctgcctggccctacttcatctacggccccagccagcccagcagccggcccctgcgctttgcctgcagcagcatcctgggccgcatgccctgcaagcagaggaaggatgaaagaagaacaggctatgatgtggagctgaccaagtgctacacagagagcagaagaaacctgtgtgaggaggccctgctgaagatcaagggcgtcatctccttcaccttccagatggctgtgcagagatgtgtggtgcgcatccgcagtgacctgaaggccgaggccctggccagcgccatcgccagcaccaaggtgatgaaggcccagcaggtggtgaagtctgagagcggggaggagatgctggtgcccttccaggacacccctgtggaggtggagcagaacacagagctgcctgactacctgcctgaagatgagagccccaccaaggagcaggacaaggctgtgtcccgggtgggcagccaccctgagggcggggcctcctggctgagcacagctgccaacttcctgagccgctccttctactggtag

SEQ ID NO: 105509 - DNA, 543 bp, Artificial Sequence
  derived and/or modified sequence
atgagcgcctggccctacttcatctacggccccagccagcccagctcccgtcccttgcgtttcgcctgttcatcaattcttggtaggatgccctgcaagcagagaaaggacgagagacgtacagggtatgatgtcgagttaacgaagtgttataccgaatccagaaggaatctgtgtgaagaggcccttctcaagataaaaggggtgatcagtttcacctttcagatggcagtgcagcgatgtgtggtgaggattcgctccgatctgaaggccgaagccttagcaagcgccattgcaagtactaaggtcatgaaagcacagcaagtcgtcaaaagcgagtctggagaagaaatgcttgtaccttttcaggatactcccgtcgaggtcgagcagaataccgagctccctgactatctgcccgaggacgagagtccaacaaaagagcaggataaagccgtgagccgtgtggggtcccacccagagggcggcgcgtcttggctcagcaccgctgccaacttcctgagcagatccttttactggtag

SEQ ID NO: 105510 - DNA, 887 bp, Artificial Sequence
  derived and/or modified sequence
tttgcccgccagcgccttcgctctttggctccctgagttagtccggttgcttgcgatcgccgcggccggggctgcgaaccgaagggctcgctccgcgccgcctgggtctctacctcatccgtaggtgtggccctgatggtgtggcaggctctggactcctaaagctctggagcgaatttaagattttattcatgtgcatggcatagaagatgaattcttccacttccaccatgagtgaagagcctgacgctctatcggtagttaaccagttacgggatctagcagcagatccgttaaacagaagagccatcgtccaggatcagggatgtctgcctggccttattttatttatggaccatcccaaccctccagtcgtccactccgctttgcttgctcttcgatacttggcagaatgccgtgcaaacagagaaaagatgaaaggagaactgggtatgatgttgagcttacaaaatgttatacagaatctcggagaaatctatgtgaagaggctttgttaaaaattaaaggtgttattagctttacttttcaaatggctgttcaaaggtgtgtggtgcgaatccgttcagatttgaaagctgaggctttggcatcagcaatagcatcaaccaaggttatgaaagctcagcaagttgtgaaaagtgaaagtggagaagagatgttggtcccattccaagatactcctgtggaagttgaacagaacacagagctacctgactacctgcctgaggatgagagtcccacaaaggaacaggacaaagcggtgtcccgggtcggctcacacccagaaggtggagctagctggcttagcacagctgcaaactttttatccagatcattttattggtgacttcacttttgggctcaag

SEQ ID NO: 105511 - DNA, 543 bp, Artificial Sequence
  derived and/or modified sequence
atgagtgcttggccatattttatttatggaccaagccagccttccagccgccctttgcgcttcgcttgcagcagcattcttgggagaatgccgtgcaagcagcgtaaggatgaacgccgaacaggatacgacgttgaacttaccaagtgttacacagaaagtcgccgaaatctgtgcgaagaggcattgctgaaaattaagggcgtgatttctttcaccttccagatggccgtacagaggtgtgtagtgcgcatcaggagtgacctgaaagccgaagccctagcgagtgctatcgcgtctacaaaagtgatgaaggcacagcaagtggtgaagagtgagtccggggaggagatgctcgtgccatttcaggacacgccagtcgaggtcgaacagaatacggagctccccgattacctgccggaagacgagtcccccacaaaagaacaggacaaagcggtgagccgcgtcgggagccatcccgaaggaggggcttcctggctgagtactgccgcaaactttctgtctcgaagcttctactggtag

SEQ ID NO: 105512 - protein, 103 aa, Artificial Sequence
  derived and/or modified sequence
MIRAFPTTTPRSLHLFTSSTFLARALPGAFPTGACEERLSVPESTPFTAVLKFAAEEFKVPAATSAIITNDGIGINPAQTAGNVFLKHGSELRIIPRDRVGSC

SEQ ID NO: 105513 - DNA, 312 bp, Artificial Sequence
  derived and/or modified sequence
atgatcagagccttccccaccaccacccccagaagcctgcacctgttcaccagcagcaccttcctggccagagccctgcccggcgccttccccaccggcgcctgcgaggagagactgagcgtgcccgagagcacccccttcaccgccgtgctgaagttcgccgccgaggagttcaaggtgcccgccgccaccagcgccatcatcaccaacgacggcatcggcatcaaccccgcccagaccgccggcaacgtgttcctgaagcacggcagcgagctgagaatcatccccagagacagagtgggcagctgctag

SEQ ID NO: 105514 - DNA, 312 bp, Artificial Sequence
  derived and/or modified sequence
atgatccgggctttcccaacaacaacccccaggtcactgcacctttttacatccagtacattcctcgctcgtgcacttcccggagccttccccaccggcgcctgcgaggagcgcctgagcgtaccagagtcgacgccctttacggctgtgctcaagttcgcagccgaagaattcaaggtgccggcagccacttctgcaattattacaaatgacggcataggcatcaatccagcacaaacagctgggaacgtgttccttaaacatggttcagagttgagaattattcctcgagatcgcgtgggcagttgctag

SEQ ID NO: 105515 - DNA, 312 bp, Artificial Sequence
  derived and/or modified sequence
atgatccgggccttccccaccaccacccccaggagcctgcacctgttcaccagcagcaccttcctggcccgggccctgcccggggccttccccaccggggcctgtgaggagcggctgtctgtgcctgagagcacccccttcaccgctgtgctgaagtttgctgctgaggagttcaaggtgcctgctgccaccagcgccatcatcaccaatgatggcatcggcatcaacccagcccagacagctggaaatgtgttcctgaagcacggcagcgagctgcgcatcatcccccgggacagagtgggcagctgctag

SEQ ID NO: 105516 - DNA, 2534 bp, Artificial Sequence
  derived and/or modified sequence
atgatccgagcttttccaacaactaccccacgcagtcttcatctcttcacttcatctactttcctggctcgcgcccttccaggagcctttcccaccggagcctgcgaggagagactcagtgttcctgaaagtacacctttcacagcagtcttaaagtttgcagcagaagaatttaaagttcctgctgcaacaagtgcaattattaccaatgatggaataggaataaatcctgcacagactgctggaaatgtttttctaaaacatggttcagaactgcggattattcctagagatcgtgttggaagttgttaatatctgctacttggaacatacgattgcctttcagaataaatattggtattttttgttgttgtaaaattgaaatcaggcatttaacatactatgaaaacaccaggagtcaatgattaatgaaaggtgactcatctgtccctttttgttgtccatactcttcctatgaagagggaatgcgtatgaattaaggctactactgtcacagaagatcatagtctttgatgctacctcacaacacaaacaggtagttcgttgggggcaaatgaattagccaactgttaactggaagcttttgataatttttttttttagaacaatttggaacattaaaatttactgaatcgtatatattcatctgagataaaaatataaaaagaattatggaccctggatggcaatttgcttgatagcatctgatttgcagactcataatttgatttttaattaaatatataggttgtgatgaagtgaatagacatatcagtgaacagttaactatattaaatttttatcatttactttttttaagattcagacctcagttatataaatttcagtttaatatcaaccaaaaaattaaaattttaatctaacccttatgtgtataaattggtgtcccataccagcttttaatggtggacctatagaatccagtacttttaatggtgggaatttacagtagaagcatcctttgctgagttatacattcctttatcaatctcttttgatacaacatttaaaacaagtagcttcaagaaaccactggtgttttgaggatagtatttctaaatagcattcaggaacagagtattattgcacagatctgaagatcaaaaaaaagctcaaggaaatacagatcggaagtgctgatgagttatatttattgaaaacccaacttttaaggaagtgctaagatcagtcacccatgtgaataagaagccaggaaaggaaagatggggaagcccagatcaccaggcttctattaaggaggaaagcaacagaggaaacagtgaaggggaacagaagggggtagcaaagtgttacagaaaagcggactggatagacaaaactgcagaaggtgtatgttggggagaactgaaagggaaaacaaaatacttgacatagtcttaagtagaagaaggcagttagagaaaacaaagtatctactggccttgtcaacatacagacttcaaaataccccttatgagaatccaaagaatgatgtgtgtaagggaagattttatttgcccttccggaagaaatcagtatctatgcaaatcttgaaagacgaaatcaaagcccattaatgattcagaatcagtgcttgacctcctgtattctgaatggtgaactctggaagcagggattgtgtctggctctttttagagctggaaatgtagtggctttcattaaatacttgctgtaaagtctttctaagaccaattattatcttagcatgtttcagtatcttctctatcataggccctaagttcattgggggaaaaaaaataagaagattcaacagaatcagcatttgaagtgtaccattggtagttgtttatgaaattaccagatattcataaatgtgacaaatgaacagcaggattatgaattatcaaaggaaaaagtatttgctgaggtgaaaaaatctgatgtttgaggaagtttttatttttatttatttgttttgtttttttttttttgaggcagactctctgtcgccaggcttctcctgcctcagcctcacgagtagctgggactacaggcatgcaccaccacgcccagctaatttttgtatttttagcagagacagggaggaagtttttatttttataaacaaaatctgatgttcagaggccccgtttcttacaataaatgttgagtcttagttaagcaggaatttatgaacacccatttcctgactttttgctttaatttagatttttctccatcctgtttctagcacaaaaatttgcctgctgtgttacaaaaataaatttatgttgtcctgtgccataaagtgatatatttaatatttttattctttggttttgaacattgtaagttcctaaaaacattttattaaacaagtagacattttgttattaaaaaaatgtgatctgtaatttctttgtgcagaatgatttgaagtattgtattcagtttacatgcgttattggtttataattaatatctaatgaaaatacatgttgttatattgt

SEQ ID NO: 105517 - DNA, 312 bp, Artificial Sequence
  derived and/or modified sequence
atgatccgggccttccccaccaccaccccccggagcctgcacctgttcacatcctccacattcttggccagggcgttgcccggggcatttcccacaggagcgtgcgaagagcgactgtccgtgccggaatcaacgcccttcaccgcggttctgaagtttgccgccgaggagtttaaggttcccgctgctacatcagcgattatcactaatgacgggattggcataaacccagcccagactgcgggcaacgtgtttttgaaacacggtagcgagttgcgaattatccctcgagaccgggtgggctcctgctag

SEQ ID NO: 105518 - DNA, 312 bp, Artificial Sequence
  derived and/or modified sequence
atgattagagccttccccactactaccccccgatccctccatctatttacctcatctaccttcctcgcgcgagcgctgcccggtgcttttccaactggggcatgcgaggagaggctgtcagtgcccgagagcaccccctttacagcggttctgaaattcgccgctgaagagttcaaggtcccggcagctacatccgccatcatcacaaacgacggaatcggcattaaccccgctcagaccgctggaaacgtgttccttaaacacggaagcgagttgagaatcatcccaagggaccgcgttgggagctgctag

SEQ ID NO: 105519 - protein, 664 aa, Artificial Sequence
  derived and/or modified sequence
MQAHELFRYFRMPELVDFRQYVRTLPTNTLMGFGAFAALTTFWYATRPKPLKPPCDLSMQSVEVAGSGGARRSALLDSDEPLVYFYDDVTTLYEGFQRGIQVSNNGPCLGSRKPDQPYEWLSYKQWVIIEQGCFAYSMVIVPLYDTLGNEAITYIVNKAELSLVFVDKPEKAKLLLEGVENKLIPGLKIIVVMDAYGSELVERGQRCGVEVTSMKAMEDLGRANRRKPKPPAPEDLAVICFTSGTTGNPKGAMVTHRNIVSDCSAFVKATENTVNPCPDDTLISFLPLAHMFERVVECVMLCHGAKIGFFQGDIRLLMDDLKVLQPTVFPVVPRLLNRMFDRIFGQANTTLKRWLLDFASKRKEAELRSGIIRNNSLWDRLIFHKVQSSLGGRVRLMVTGAAPVSATVLTFLRAALGCQFYEGYGQTECTAGCCLTMPGDWTAGHVGAPMPCNLIKLVDVEEMNYMAAEGEGEVCVKGPNVFQGYLKDPAKTAEALDKDGWLHTGDIGKWLPNGTLKIIDRKKHIFKLAQGEYIAPEKIENIYMRSEPVAQVFVHGESLQAFLIAIVVPDVETLCSWAQKRGFEGSFEELCRNKDVKKAILEDMVRLGKDSGLKPFEQVKGITLHPELFSIDNGLLTPTMKAKRPELRNYFRSQIDDLYSTIKV

SEQ ID NO: 105520 - DNA, 1995 bp, Artificial Sequence
  derived and/or modified sequence
atgcaggcccatgaacttttccgctactttcgcatgccggaattagtggacttcagacaatatgttaggacactccccacaaatactctgatgggattcggggcattcgccgccctgactacattctggtatgcaactagaccgaagccgctgaaaccaccgtgtgacctgagtatgcaatcagtcgaagttgccggctcaggtggggccaggagatctgccctgttggattccgacgaaccccttgtgtatttctatgacgacgtcactacactttacgaaggcttccagaggggtatccaagttagtaacaacggcccatgccttgggagccgcaaacccgatcagccttatgagtggctctcttataagcagtgggtaattattgaacagggttgttttgcctattcaatggttattgtccctctctatgatacactgggaaatgaagccattacctacatcgttaacaaggcagagctgagtcttgtgtttgtcgacaaacccgaaaaagccaaactgctgctcgaaggcgtggaaaataagcttatcccaggactgaagatcattgtcgtgatggacgcctacgggagtgagctggtcgaaaggggccaacggtgcggcgttgaggtgacgtccatgaaggcgatggaagatctgggaagggccaatcggcggaagcccaagccaccggcgccggaggatttggccgtgatctgcttcactagtggaacaacaggcaatccgaaaggcgccatggttacacacaggaacattgtaagtgattgctcagcatttgtgaaggccacagagaacactgttaatccctgtccagacgatactctcatctcattcttgcccctggctcacatgtttgaaagagtcgtggaatgcgtgatgctttgccacggtgcgaaaatagggtttttccagggtgacatcagactgctgatggacgacctgaaagtcctccaaccaacggtatttccagtggtgccccgtctgctcaaccgaatgttcgatcgcattttcggccaggctaacaccacgcttaaacgttggctgctcgattttgcatcgaaacggaaagaggccgagctgagaagcggcatcattcggaacaattccttgtgggatcgccttattttccacaaggtccagtcgtcacttgggggacgcgtgaggctcatggttacaggggcagcccctgtgtcagcgaccgtgttgactttcctcagagctgccctgggctgccaattttacgaggggtacggtcagactgagtgtacagccggctgttgcctgacaatgcccggcgactggacagccggccacgtgggcgcgcccatgccctgtaaccttataaagctggtggacgtggaagagatgaactacatggccgcagagggtgagggagaggtgtgtgttaagggccctaacgttttccagggctaccttaaagatcccgctaagaccgcagaggcactggacaaggacgggtggctgcacactggagatatcggcaaatggctgccaaatggaacgctgaaaatcatcgacaggaagaagcatatttttaagcttgcccagggcgagtacatcgcccccgagaaaatagaaaatatatacatgagaagtgaacccgtcgcccaggtgtttgtgcatggagaaagtctgcaagcattcctgattgcaatcgttgtaccagatgtagagaccctctgttcttgggcccagaaacgaggcttcgagggctcctttgaggagctgtgtcgcaataaagatgtgaaaaaggctatccttgaagatatggtccgccttggaaaggacagcggactaaagccctttgagcaggtgaagggcatcacactgcaccctgaactgttctccattgacaatgggttactcacaccaaccatgaaagccaaaaggccagagctgagaaattacttccgcagccagattgacgatctgtacagtacaattaaagtttag

SEQ ID NO: 105521 - DNA, 1995 bp, Artificial Sequence
  derived and/or modified sequence
atgcaggcccacgagctgttccgctacttcaggatgcctgagctggtggacttccggcagtatgtgaggaccctgcccaccaacaccctgatgggctttggagcctttgctgccctgaccaccttctggtacgccacccggcccaagcccctgaagccaccctgtgacctgtccatgcagagcgtggaggtggccggcagcggcggggccaggagaagtgccctgctggacagtgatgagcccctggtgtacttctatgatgatgtgaccaccctgtatgagggcttccagaggggcatccaggtgagcaacaacggcccctgcctgggcagcaggaagccagaccagccctatgagtggctgagctacaagcagtgggtgatcatcgagcagggctgctttgcctacagcatggtgattgtgcccctgtatgacaccctgggcaatgaggccatcacctacatcgtgaacaaggccgagctgagcctggtgtttgtggacaagccagagaaggccaagctgctgctggagggcgtggagaacaagctgatccctggcctgaagatcatcgtggtgatggatgcctacggcagcgagctggtggagcggggccagagatgtggggtggaggtgacctccatgaaggccatggaggacctgggccgggccaacagaaggaagcccaagcccccagcccctgaggacctggccgtcatctgcttcaccagcggcaccaccggcaaccccaagggggccatggtgacccacagaaatattgtgtctgactgcagcgcctttgtgaaggccacagaaaatacagtgaacccctgcccagatgacaccctcatctccttcctgcccctggcccacatgtttgagcgggtggtggagtgtgtgatgctgtgccacggggccaagattggcttcttccagggcgacatccggctgctgatggatgacctgaaggtgctgcagcccaccgtcttccctgtggtgccccggctgctgaacaggatgtttgaccgcatcttcggccaggccaacaccaccctgaagcgctggctgctggactttgccagcaagaggaaggaggccgagctgcggagcggcatcatccggaacaacagcctgtgggacaggctcatcttccacaaggtgcagagcagcctgggcggccgggtgcggctgatggtgactggagctgcccctgtgtctgccaccgtgctgaccttcctgcgggccgccctgggctgccagttctatgagggctacggccagacagagtgcacagctggctgctgcctgaccatgcctggggactggacagctggccacgtgggcgcccccatgccctgcaacctgatcaagctggtggatgtggaggagatgaactacatggctgctgagggggagggggaggtgtgtgtgaagggccccaacgtgttccagggctacctgaaggaccctgccaagacagctgaggccctggacaaggatggctggctgcacactggagacatcggcaagtggctgcccaacggcaccctgaagatcatcgacaggaagaagcacatcttcaagctggcccagggcgagtacatcgcccctgagaagattgagaacatctacatgaggtctgagcctgtggcccaggtgtttgtgcatggagagagcctgcaggccttcctgattgccatcgtggtgcctgatgtggagaccctgtgctcctgggcccagaagaggggctttgagggcagctttgaggagctgtgcaggaacaaggatgtgaagaaggccatcctggaggacatggtgcggctgggcaaggacagcggcctgaagccctttgagcaggtgaagggcatcaccctgcaccctgagctgttcagcattgacaatggcctgctgacccccaccatgaaggccaagaggcctgagctgaggaactacttccgcagccagattgatgacctgtacagcaccatcaaggtgtag

SEQ ID NO: 105522 - DNA, 1995 bp, Artificial Sequence
  derived and/or modified sequence
atgcaggcccacgagctgttccggtacttccggatgcccgagctggtcgattttcggcagtacgtgcggacactccctaccaatacactaatgggtttcggagcctttgccgcattaaccactttctggtatgccacaagacccaagccgctgaaaccaccctgtgacctgagcatgcagtcagttgaagtagccggaagcggcggcgccaggcgctctgccctgcttgactctgacgagcctctcgtttatttctatgacgatgtcactactctgtacgagggcttccagcgtggcatccaggtgagcaacaacggtccatgtttaggctctaggaagccggatcagccatatgaatggctgagctacaaacaatgggtgattatcgagcaaggctgtttcgcctactccatggtaatcgtgcctttgtacgataccctgggtaacgaggccattacatacatcgtcaacaaagctgagctgtccctggtatttgtcgacaagcccgagaaggccaagctgctgctggagggtgttgagaataaactgatacctgggctgaaaatcatcgtggtgatggacgcttatggatccgaactcgtcgaaagagggcaacggtgcggagtagaggtgactagcatgaaggccatggaagacctcggtcgggctaatcgccggaaacctaagccacctgctccggaagatctggctgtgatctgttttacttcagggacaaccggaaatcctaagggagcgatggtcacacatcggaacatcgtatctgattgtagcgcgttcgtaaaggctactgaaaatactgtaaacccctgtcctgatgacactctgatctctttcctgcccctggctcatatgtttgagcgtgtcgtggagtgtgtaatgctgtgtcacggagcgaaaataggtttctttcagggcgacatcaggctcttaatggatgacctgaaggtcttacagccgacagtgtttcctgtggtccccaggctgttgaataggatgtttgacagaatatttggtcaagctaacacaactctcaagcgatggctgttggactttgcatccaaacggaaggaggccgaactgcgaagcgggatcatccgaaataactccctatgggaccgccttatatttcacaaggtgcagtcctctcttggaggacgcgtgcgcctgatggttactggcgctgcaccggtatcagcaacggtcttgacctttctgagagcggcccttggttgtcaattttatgaaggctatggccagacagagtgcaccgcaggctgctgtttaaccatgccgggcgactggaccgccggtcacgtgggtgcccccatgccctgtaatctgatcaaactggtggacgtggaggagatgaattacatggcagccgaaggcgagggggaggtttgcgtgaaagggcccaatgttttccaaggatacctgaaagacccggccaaaacagctgaggccctagacaaggacggctggctgcacaccggagacataggcaaatggctgcctaatggaactctgaaaatcatagatagaaaaaagcacatattcaaactggcccagggtgagtatattgcacccgagaagattgagaatatctacatgcgatccgaaccagtggcacaggtattcgtgcacggcgagtcattgcaggctttcttaattgccattgttgtccccgacgtggagactttatgcagttgggctcagaaacggggctttgagggtagctttgaggagctgtgccgaaataaagacgtgaagaaagccatactggaagatatggttcgattggggaaggactccgggctcaaacctttcgagcaggtcaagggcatcactctgcaccctgagctcttttcaattgacaatggactgctcaccccaactatgaaggctaagaggccagaacttagaaactattttagatcccaaatcgatgacctttattcaaccatcaaggtgtag

SEQ ID NO: 105523 - DNA, 1995 bp, Artificial Sequence
  derived and/or modified sequence
atgcaggcccatgagctgttccggtatttccggatgccagaactggttgacttcaggcagtacgtgcgcacattgcccactaacaccctcatgggatttggcgcattcgctgcccttacgaccttctggtatgctaccaggccaaaacccctgaagcctccttgcgacttgtccatgcagtctgtagaggtggccggttccggtggcgctagacggtcggctctgttggacagcgatgaacctctagtttatttctatgatgacgtcaccactttatatgagggatttcagaggggaatccaggtatcaaataacggcccatgccttggatctaggaaacctgatcagccatacgagtggctgagttacaaacagtgggtgatcatagagcaaggttgttttgcctactcgatggtcatagttccgctgtatgacacactgggaaacgaagccattacctacatcgtcaataaagctgaactgagtttagtgtttgttgataagccagagaaggctaaactccttctcgaaggggtggaaaataagctgatcccaggtttaaaaataatagtcgtaatggacgcatatgggagcgaattggtggagcgcggtcaacggtgtggagtcgaagtcacttccatgaaggccatggaggatttgggacgtgcaaacaggagaaagccaaagcctcctgcacccgaagacctcgcagttatctgttttacttcgggtacaacaggaaatccgaagggggcaatggtaactcaccgtaacatcgtgagcgactgtagtgcatttgttaaagcaaccgagaacaccgttaacccctgccccgatgatactcttatctcctttctgccactggcccacatgttcgagcgcgtggtggagtgtgtaatgctgtgtcacggcgctaagatcggatttttccagggtgacataagactactgatggatgatctcaaagtgctgcagcccacagtgtttccagtggtcccccgattgttaaaccggatgttcgataggatctttggacaggcaaatactacgttaaaacgttggctcctcgacttcgctagcaaaagaaaagaggccgagctaagatcagggattatcagaaataatagcctgtgggataggctaatcttccacaaagttcaatctagcttgggcggaagagtgaggctgatggtgaccggagccgcaccagtaagcgccacagtgctgacattcctgcgggctgccttgggatgtcagttctatgagggatatggtcagactgaatgtaccgcgggttgctgcttgactatgccgggtgactggacagctggccacgtgggggctccgatgccgtgtaacctgattaagctggtcgacgtggaggaaatgaattacatggctgccgagggtgagggggaagtttgcgtcaaggggcctaacgtatttcaaggatacctgaaagacccggcaaagacggcagaggctctggacaaagacggatggctgcatacgggagatatcggtaagtggctccctaacggaaccctgaagatcattgatcggaagaaacatatattcaaattggcacagggagagtacatcgccccagagaagattgaaaatatttacatgaggtccgaaccggtggcgcaggtgttcgtgcacggggagtctttgcaggcctttctgattgcaatcgtagtgcctgatgtggagactttgtgttcctgggcccagaaaagaggttttgagggaagtttcgaggagctgtgccgcaataaagacgtgaagaaagcaatcttggaggacatggtgagactcggcaaggatagtggacttaaaccgttcgagcaagtcaaaggcatcacccttcatcctgagctgttttcaatagacaacgggctattaaccccaactatgaaagctaaaaggcccgaattgaggaattactttaggtctcagatcgatgatctgtacagcactattaaagtttag

SEQ ID NO: 105524 - DNA, 1995 bp, Artificial Sequence
  derived and/or modified sequence
atgcaggcccacgagctgttcagatacttcagaatgcccgagctggtggacttcagacagtacgtgagaaccctgcccaccaacaccctgatgggcttcggcgccttcgccgccctgaccaccttctggtacgccaccagacccaagcccctgaagcccccctgcgacctgagcatgcagagcgtggaggtggccggcagcggcggcgccagaagaagcgccctgctggacagcgacgagcccctggtgtacttctacgacgacgtgaccaccctgtacgagggcttccagagaggcatccaggtgagcaacaacggcccctgcctgggcagcagaaagcccgaccagccctacgagtggctgagctacaagcagtgggtgatcatcgagcagggctgcttcgcctacagcatggtgatcgtgcccctgtacgacaccctgggcaacgaggccatcacctacatcgtgaacaaggccgagctgagcctggtgttcgtggacaagcccgagaaggccaagctgctgctggagggcgtggagaacaagctgatccccggcctgaagatcatcgtggtgatggacgcctacggcagcgagctggtggagagaggccagagatgcggcgtggaggtgaccagcatgaaggccatggaggacctgggcagagccaacagaagaaagcccaagccccccgcccccgaggacctggccgtgatctgcttcaccagcggcaccaccggcaaccccaagggcgccatggtgacccacagaaacatcgtgagcgactgcagcgccttcgtgaaggccaccgagaacaccgtgaacccctgccccgacgacaccctgatcagcttcctgcccctggcccacatgttcgagagagtggtggagtgcgtgatgctgtgccacggcgccaagatcggcttcttccagggcgacatcagactgctgatggacgacctgaaggtgctgcagcccaccgtgttccccgtggtgcccagactgctgaacagaatgttcgacagaatcttcggccaggccaacaccaccctgaagagatggctgctggacttcgccagcaagagaaaggaggccgagctgagaagcggcatcatcagaaacaacagcctgtgggacagactgatcttccacaaggtgcagagcagcctgggcggcagagtgagactgatggtgaccggcgccgcccccgtgagcgccaccgtgctgaccttcctgagagccgccctgggctgccagttctacgagggctacggccagaccgagtgcaccgccggctgctgcctgaccatgcccggcgactggaccgccggccacgtgggcgcccccatgccctgcaacctgatcaagctggtggacgtggaggagatgaactacatggccgccgagggcgagggcgaggtgtgcgtgaagggccccaacgtgttccagggctacctgaaggaccccgccaagaccgccgaggccctggacaaggacggctggctgcacaccggcgacatcggcaagtggctgcccaacggcaccctgaagatcatcgacagaaagaagcacatcttcaagctggcccagggcgagtacatcgcccccgagaagatcgagaacatctacatgagaagcgagcccgtggcccaggtgttcgtgcacggcgagagcctgcaggccttcctgatcgccatcgtggtgcccgacgtggagaccctgtgcagctgggcccagaagagaggcttcgagggcagcttcgaggagctgtgcagaaacaaggacgtgaagaaggccatcctggaggacatggtgagactgggcaaggacagcggcctgaagcccttcgagcaggtgaagggcatcaccctgcaccccgagctgttcagcatcgacaacggcctgctgacccccaccatgaaggccaagagacccgagctgagaaactacttcagaagccagatcgacgacctgtacagcaccatcaaggtgtag

SEQ ID NO: 105525 - DNA, 2490 bp, Artificial Sequence
  derived and/or modified sequence
gcaaccagcgggccgaggcggcggcgccagcggcgccttaaatagcatccagagccggcgcggggcagggagtgggctgcagtgacagccggcggcggagcggccggtccacggaggagaattcagcttagagaactatcaacacaggacaatgcaagcccatgagctgttccggtattttcgaatgccagagctggttgacttccgacagtacgtgcgtactcttccgaccaacacgcttatgggcttcggagcttttgcagcactcaccaccttctggtacgccacgagacccaaacccctgaagccgccatgcgacctctccatgcagtcagtggaagtggcgggtagtggtggtgcacgaagatccgcactacttgacagcgacgagcccttggtgtatttctatgatgatgtcacaacattatacgaaggtttccagaggggaatacaggtgtcaaataatggcccttgtttaggctctcggaaaccagaccaaccctatgaatggctttcatataaacagtgggtgattattgaacaaggatgctttgcttattcgatggtgatcgttccactttatgatacccttggaaatgaagccatcacgtacatagtcaacaaagctgaactctctctggtttttgttgacaagccagagaaggccaaactcttattagagggtgtagaaaataagttaataccaggccttaaaatcatagttgtcatggatgcctacggcagtgaactggtggaacgaggccagaggtgtggggtggaagtcaccagcatgaaggcgatggaggacctgggaagagccaacagacggaagcccaagcctccagcacctgaagatcttgcagtaatttgtttcacaagtggaactacaggcaaccccaaaggagcaatggtcactcaccgaaacatagtgagcgattgttcagcttttgtgaaagcaacagagaatacagtcaatccttgcccagatgatactttgatatctttcttgcctctcgcccatatgtttgagagagttgtagagtgtgtaatgctgtgtcatggagctaaaatcggatttttccaaggagatatcaggctgctcatggatgacctcaaggtgcttcaacccactgtcttccccgtggttccaagactgctgaaccggatgtttgaccgaattttcggacaagcaaacaccacgctgaagcgatggctcttggactttgcctccaagaggaaagaagcagagcttcgcagcggcatcatcagaaacaacagcctgtgggaccggctgatcttccacaaagtacagtcgagcctgggcggaagagtccggctgatggtgacaggagccgccccggtgtctgccactgtgctgacgttcctcagagcagccctgggctgtcagttttatgaaggatacggacagacagagtgcactgccgggtgctgcctgaccatgcctggagactggaccgcaggccatgttggggccccgatgccgtgcaatttgataaaacttgttgatgtggaagaaatgaattacatggctgccgagggcgagggcgaggtgtgtgtgaaagggccaaatgtatttcagggctacttgaaggacccagcgaaaacagcagaagctttggacaaagacggctggttacacacaggggacattggaaaatggttaccaaatggcaccttgaaaattatcgaccggaaaaagcacatatttaagctggcacaaggagaatacatagcccctgaaaagattgaaaatatctacatgcgaagtgagcctgttgctcaggtgtttgtccacggagaaagcctgcaggcatttctcattgcaattgtggtaccagatgttgagacattatgttcctgggcccaaaagagaggatttgaagggtcgtttgaggaactgtgcagaaataaggatgtcaaaaaagctatcctcgaagatatggtgagacttgggaaggattctggtctgaaaccatttgaacaggtcaaaggcatcacattgcaccctgaattattttctatcgacaatggccttctgactccaacaatgaaggcgaaaaggccagagctgcggaactatttcaggtcgcagatagatgacctctattccactatcaaggtttagtgtgaagaagaaagctcagaggaaatggcacagttccacaatctcttctcctgctgatggccttcatgttgttaattttgaatacagcaagtgtagggaaggaagcgttcgtgtttgacttgtccattcggggttcttctcataggaatgctagaggaaagagaacactgccttacagtcacctcatgttgcagaccatgtttatggtaatacacactttccaaaatgagccttaaaaattgtaaaggggatactataaatgtgctaagttatttgagacttcctcagtttaaaaagtgggttttaaatcttctgtctccctgtttctctaatcaaggggttag

SEQ ID NO: 105526 - protein, 527 aa, Artificial Sequence
  derived and/or modified sequence
MVIVPLYDTLGNEAITYIVNKAELSLVFVDKPEKAKLLLEGVENKLIPGLKIIVVMDAYGSELVERGQRCGVEVTSMKAMEDLGRANRRKPKPPAPEDLAVICFTSGTTGNPKGAMVTHRNIVSDCSAFVKATENTVNPCPDDTLISFLPLAHMFERVVECVMLCHGAKIGFFQGDIRLLMDDLKVLQPTVFPVVPRLLNRMFDRIFGQANTTLKRWLLDFASKRKEAELRSGIIRNNSLWDRLIFHKVQSSLGGRVRLMVTGAAPVSATVLTFLRAALGCQFYEGYGQTECTAGCCLTMPGDWTAGHVGAPMPCNLIKLVDVEEMNYMAAEGEGEVCVKGPNVFQGYLKDPAKTAEALDKDGWLHTGDIGKWLPNGTLKIIDRKKHIFKLAQGEYIAPEKIENIYMRSEPVAQVFVHGESLQAFLIAIVVPDVETLCSWAQKRGFEGSFEELCRNKDVKKAILEDMVRLGKDSGLKPFEQVKGITLHPELFSIDNGLLTPTMKAKRPELRNYFRSQIDDLYSTIKV

SEQ ID NO: 105527 - DNA, 1932 bp, Artificial Sequence
  derived and/or modified sequence
atgaatgcctctaaggagtcccccccgcacgaagatttgatggtgcagatccacagtatcctggcaaaaatcggtccaaaagcagtgaatagcgtgtctctgggaaagaacggcgtcgtcgaactaatgttcaagattattggcccattttcgaagaaaaactcatcattgatcaaggtggccctggacacactcgccgcacttctaaagtcaaaaactaacgcaaggagagctgttgaccgtggctacgtgcaggtgttgttgacaatctatgtagactggcaccgccatgacaacaggcacaggaacatgcttattaggaagggcatcctccagtccctgaagagcgtcacgaacatcaagctgggccgtaaagccttcatcgacgcaaatggcatgaaaatcttatataacacaagtcaagagtgtcttgcagtcagaactttggaccctctggtgaacacgtcttccctgatcatgcgaaaatgtttccccaaaaaccgcctccccctgccaaccatcaaatcctctttccatttccagctgcccgttatccctgttacagggccggtggcacagctctacagtctgcctcccgaagtggacgacgttgttgatgagtctgatgataatgatgatatcgacgttgaagccgagaatgaaaccgagaacgaggacgatctagatcagaattttaagaatgacgacatcgaaaccgacatcaacaagctgaaaccacagcaggagcccggccgaacaattgaagacttaaagatgtacgaacatcttttcccagagcttgttgatgacttccaggattatgatcttattagcaaagagccaaaacctttcgtgttcgagggaaaagtaagaggtccgattgtggtgcctacagccggtgaggagacgtcgggcaattcgggaaacctgagaaaagttgtgatgaaggaaaacatctccagtaagggtgatgagggagagaagaagtccaccttcatggatctggctaaggaggacatcaaggataacgacagaacactgcaacaacaacctggggatcagaaccggacaatttccagcgtgcatggcttgaataacgacattgttaaagcacttgatcgcattacactgcaaaacatcccatcacagactgccccaggattcaccgctgaaatgaaaaaagactgttctctgccactgacggtgcttacatgtgcgaaggcctgcccccacatggctacctgtggaaatgtgctgttcgagggcaggacagtgcagctcggcaaattgtgctgtaccggtgtggagactgaagacgatgaagacacagaatcaaatagctctgtggagcaggcatccgtagaagtgccagatggtccgactctgcacgatcctgacctgtacatcgagatagtaaagaatacaaaatcagtgccagagtacagtgaagtagcctaccccgattacttcggccacattccaccacccttcaaagaaccaatccttgagcgcccttacggcgttcaacgcaccaagatcgcacaagatattgaacggctcatacaccaatcagacatcatcgatagggtggtgtatgatctggacaacccaaattataccattcccgaagagggcgatattctaaagttcaatagtaagttcgaaagcggaaacctccggaaagttatccagataagaaagaacgagtatgaccttattttaaatagtgacatcaatagtaaccactaccatcaatggttctattttgaagtttcaggtatgcggcccggtgtggcctataggtttaatatcattaactgtgagaagtctaactcgcagtttaattacgcgctgccacttatgtcctggatgaagatgaaccttgattcgctcaagaagctcattaccgtgcagaaagtaatgatgagctag

SEQ ID NO: 105528 - DNA, 1932 bp, Artificial Sequence
  derived and/or modified sequence
atgaatgccagcaaggagagcccccctcatgaggacctgatggtgcagatccacagcatcctggccaagattggccccaaggctgtgaacagcgtgtccctgggcaagaatggagtggtggagctgatgttcaagatcatcggccccttcagcaagaagaacagcagcctcatcaaggtggccctggacaccctggccgccctgctgaagagcaagaccaatgcccggcgggctgtggaccggggctacgtgcaggtgctgctgaccatctacgtggactggcacagacatgacaacagacacaggaacatgctgatcaggaagggcatcctgcagagcctgaagtctgtgaccaacatcaagctgggcaggaaggccttcattgatgccaacggcatgaagatcctgtacaacaccagccaggagtgcctggccgtgaggaccctggaccccctggtgaacaccagcagcctcatcatgaggaagtgcttccccaagaaccggctgcccctgcccaccatcaagagcagcttccacttccagctgcctgtgattcctgtgacaggccctgtggcccagctgtacagcctgcccccagaggtggatgatgtggtggatgaaagtgatgacaatgatgacattgatgtggaggctgaaaatgaaacagaaaatgaagatgacctggaccagaacttcaagaatgatgacattgaaacagacatcaacaagctgaagccccagcaggagcccggccgcaccatcgaggacctgaagatgtatgagcacctgtttcctgagctggtggatgacttccaggactatgacctgatcagcaaggagcccaagccctttgtgtttgagggcaaggtgcggggccccatcgtggtgcccacagctggggaggagaccagcggcaacagcggcaacctgaggaaggtggtgatgaaggagaacatcagcagcaaaggagatgaaggagagaagaagagcaccttcatggacctggccaaggaggacatcaaggacaatgacaggaccctgcagcagcagcccggggaccagaacagaaccatcagctctgtgcacggcctgaacaatgacatcgtgaaggccctggaccgcatcaccctgcagaacatccccagccagacagcccctggcttcaccgctgagatgaagaaggactgcagcctgcccctgactgtgctgacctgtgccaaggcctgcccccacatggccacctgtggaaatgtgctgtttgagggccgcacagtgcagctgggcaagctgtgctgcacaggagtggagacagaagatgatgaggacacagagagcaacagctctgtggagcaggcctctgtggaggtgcctgatggccccaccctgcatgaccctgacctgtacattgaaattgtgaagaacaccaagtctgtgcctgagtacagcgaggtggcctacccagactacttcggccacatccccccacccttcaaggagcccatcctggagcggccctacggcgtgcagaggaccaagatcgcccaggacatcgagcggctcatccaccagagcgacatcatcgacagagtggtgtatgacctggacaaccccaactacaccatccctgaggagggggacatcctgaagttcaacagcaagtttgagagcggcaacctgaggaaggtgatccagatcaggaagaatgaatatgacctgatcctgaacagcgacatcaacagcaaccactaccaccagtggttctactttgaggtgtctggcatgaggcctggggtggcctaccgcttcaacatcatcaactgtgagaagagcaacagccagttcaactatgccctgcccctgatgtcctggatgaagatgaacctggacagcctgaagaagctgatcaccgtgcagaaggtgatgatgtcctag

SEQ ID NO: 105529 - DNA, 1932 bp, Artificial Sequence
  derived and/or modified sequence
atgaacgccagcaaggagagccccccccacgaggacctgatggtgcagatccattccattcttgccaagattggacctaaagccgtcaacagcgtaagtctcggtaagaacggagtagttgaactcatgtttaaaatcatcggaccttttagcaaaaagaactcctcgctcatcaaagtggcgctggatacactagctgcgttgctaaaatccaaaacgaatgccaggagagctgttgatagaggatacgtgcaggtgctgcttacaatctatgtagattggcatagacacgacaatagacaccgtaatatgttgataagaaagggcatcctgcagtccctgaagagtgtgaccaacattaaacttggcaggaaggcttttatagacgcaaatggaatgaagattctgtacaatacttcacaggaatgtctggcagtacggacactggatcccctggtcaacacctcgtcacttattatgcgcaaatgcttcccaaagaatagactgcccctgcccactatcaagtccagcttccacttccagctgcctgtgatccccgtgaccggacctgtggcccagctgtacagtctgccgcccgaagtggatgatgttgtagatgaaagcgacgataacgatgacattgatgtcgaagccgagaacgaaaccgaaaatgaagacgacctggaccagaacttcaaaaacgacgacattgagacggatattaataagttgaagcctcaacaagaaccaggtcggactatcgaagacctaaagatgtacgaacacctctttcctgagctggttgatgattttcaggactatgaccttatttccaaggaacctaagccattcgtattcgaggggaaggtacgaggacccatcgtggtccccacagctggtgaagagacttcaggaaactctggaaatctcagaaaggtggtcatgaaagagaacattagcagcaaaggcgacgaaggcgagaagaagtccacgttcatggaccttgcaaaggaggacattaaagataatgataggacacttcagcagcaaccaggagaccagaatcgcactatttcatctgtacatggactcaataacgatatcgtgaaggcactggaccggatcactctgcagaacatcccttcacagaccgcccccggtttcactgcagagatgaaaaaggactgctctctccctttaacagtactaacttgcgctaaggcttgtcctcacatggcaacatgtggaaatgttttgttcgaagggaggacagtacaactgggcaaactgtgctgtacgggtgtggagacagaggacgacgaggacacagaatccaacagctccgtagaacaagcgtctgtggaagtgcctgacggacccaccctgcacgaccccgatctgtacatcgaaatcgtcaaaaataccaagtctgtgccagagtattcagaagtcgcttatcccgactactttggccatatacccccccccttcaaggagcccatcctcgagagaccctatggggtgcaaaggactaagatcgcccaggacattgagcggctgattcaccagtctgatattatcgacagggtggtctacgacttggataatccaaattatactatcccagaagaaggagacattttaaaatttaacagtaagttcgaaagcggaaatctccgaaaggtaatccagatccgcaagaatgagtacgacctgattctcaactccgacataaatagcaaccactaccaccagtggttttactttgaagtgagcgggatgcgtcccggggtggcttataggtttaacattataaattgcgaaaaatcaaatagccaatttaattatgcccttccactcatgagctggatgaaaatgaaccttgactccctcaagaagctgatcaccgtccaaaaagtgatgatgtcctag

SEQ ID NO: 105530 - DNA, 1932 bp, Artificial Sequence
  derived and/or modified sequence
atgaatgctagcaaagaaagcccccctcacgaggaccttatggtgcagatccattcaatcctggcaaagatcggtccgaaggccgttaatagtgtatcactggggaaaaatggtgtagtggaactcatgttcaaaattattggaccattctcgaagaaaaactcctctttaatcaaggttgccctcgatacacttgcagccctgttgaaatccaagacaaatgccaggagagccgttgaccgcggatacgtgcaggtcctgctcacgatctacgtcgattggcatcggcacgataacagacaccggaacatgctgatccgcaagggcattctgcagagccttaagagcgtgactaatataaagctgggccgaaaagccttcatcgatgcaaatggaatgaagattctctataacacctctcaggagtgcctggccgtcagaacacttgacccccttgtcaacacctcttcactgatcatgagaaaatgtttccccaagaatcgccttcctctccccacaatcaagtcctctttccatttccaactgccggtcatccctgtgacagggccagtggcccagctttattcactgccgccagaagttgacgatgtagtggatgagtccgatgataacgacgacattgatgtggaggccgagaatgaaactgagaatgaggatgatctggaccaaaattttaagaatgatgacatcgaaaccgacataaataagctgaaacctcaacaagagccgggtagaaccattgaagacttgaaaatgtacgagcacctctttccagaactagtcgatgacttccaagactacgatctaatatctaaggagccaaaacccttcgtattcgaaggaaaagtccgtgggcctatagtcgtgccaactgccggagaagagacctcgggcaatagtgggaatctccgcaaagtggtgatgaaggaaaacatctcctccaaaggagatgaaggagaaaagaagtcaacctttatggatctggccaaggaagacatcaaggacaatgaccgaacattacagcagcagcccggagaccagaaccgaacaatctcctctgtacatggtctaaacaacgatatcgtgaaagccctggaccggattaccctccaaaacatcccctcccagaccgcacctggcttcacagctgaaatgaagaaggattgttcactccccctcactgtgctcacatgcgctaaggcctgccctcatatggctacatgtggcaatgtgctttttgagggaaggaccgtccagctgggtaagctctgttgcacaggagtcgagaccgaggatgatgaggacactgaatcgaactcttctgtggagcaggcctccgtggaggtgcctgacggtcccacactccacgatcctgatctttatattgagatcgttaagaataccaagtccgtgccagaatattcagaggtcgcttatccagattatttcggtcatattcctccaccctttaaggaacctatccttgaaagaccatatggagtgcagcgaacgaaaatcgcacaggatatcgagaggctgatccatcaatcggacattatcgaccgagtggtatacgacctggacaacccaaactacaccattcccgaggagggcgacattctgaagttcaactctaagttcgagagtggcaacttgaggaaggtgatccagattcgaaagaatgaatacgacctcattctcaatagtgacattaatagtaatcattaccaccagtggttttacttcgaggtctccggcatgaggcctggtgtggcataccggttcaatattatcaattgtgaaaaaagcaactctcagttcaactacgctctgccgctcatgagttggatgaaaatgaatctggatagtctcaagaaattgatcacggtccagaaggttatgatgagctag

SEQ ID NO: 105531 - DNA, 787 bp, Artificial Sequence
  derived and/or modified sequence
ggctcaactggagaagatcaatgctgagccttcagaatcagacactgcccgatatgttacatcaaaaattcttcatctggctcagagtcaagaaaaaacaaggagagaaatgacagccaaaggttctacaggaatggaaattctgctgtcaacattagagaacacaaaagatcttcaaactacacttaatatcttaagcattcttgttgagctggtgtcagctggtggaggtcgaagagtgagtttcttagtcaccaaaggtggttcacaaatattgttgcagttacttatgaatgccagcaaagaatctcccccacatgaggacttaatggtacagattcattctattcttgcaaagattggaccaaaagataaaaaatttggagtaaaggctagaattaatggggctctgaatataaccctgaatttggtcaagcagaatttgcagaatcatcgcttggttctaccttgccttcagcttttacgagtatattctgccaactctgtgaattcagtatccttagggaaaaatggagttgtggaactgatgtttaaaatcattggaccatttagtaagaagaattccagtcttataaaaaacaaatgccaggagagctgtagacagaggatatgtccaagtgcttttaacaatttatgtagattggcaccgccatgataaccggcatagaaacatgctcattcggaaaggaattttacagagtttaaaaagtgttacaaacatcaagttgggaagaaaagcatttattgatgccaatgggatgaaaat

SEQ ID NO: 105532 - DNA, 2317 bp, Artificial Sequence
  derived and/or modified sequence
tctgctgtcaacattagagaacacaaaagatcttcaaactacacttaatatcttaagcattcttgttgagctggtgtcagctggtggaggtcgaagagtgagtttcttagtcaccaaaggtggttcacaaatattgttgcagttacttatgaatgccagcaaagaatctcccccacatgaggacttaatggtacagattcattctattcttgcaaagattggaccaaaagctgtgaattcagtatccttagggaaaaatggagttgtggaactgatgtttaaaatcattggaccatttagtaagaagaattccagtcttataaaggttgctttagacactcttgctgcattgctaaaatcaaaaacaaatgccaggagagctgtagacagaggatatgtccaagtgcttttaacaatttatgtagattggcaccgccatgataaccggcatagaaacatgctcattcggaaaggaattttacagagtttaaaaagtgttacaaacatcaagttgggaagaaaagcatttattgatgccaatgggatgaaaattctgtataatacttcgcaagaatgtctggcagtcaggactctggatcctcttgtcaatacctccagtctgataatgaggaagtgtttcccaaaaaatcgactgccactcccaacaattaaaagttcttttcatttccagttgcctgttattcctgtgactggtcctgtggctcagctctacagcttacctcctgaagtggatgacgtagtagatgaaagtgatgacaacgatgatattgatgtagaagctgaaaacgaaactgagaatgaagatgacctagatcaaaattttaagaatgatgatattgaaacagatattaacaaactaaaaccccagcaagaaccgggacgaacaatagaagatctaaaaatgtatgaacaccttttccctgagcttgttgatgattttcaggactatgatttaatctccaaagaaccaaagccttttgtatttgagggaaaagtacgtggtcctattgttgttcctacggcaggcgaggaaacatctgggaattctggcaatttaagaaaagttgtaatgaaggagaacatatcttctaaaggagatgaaggtgaaaagaagtctacctttatggatctagcaaaagaagatattaaagataatgatagaacattacaacagcagccaggtgatcaaaatagaactatttcatcagtccatggtttaaacaatgatattgtaaaggccttggaccgaattacattgcagaatattccttctcaaacagccccaggttttactgcagaaatgaagaaggactgcagtcttcctcttactgtccttacctgtgctaaagcatgtccacacatggctacttgtggaaatgttctgtttgagggaagaacagttcagctagggaagctttgctgcactggagttgaaactgaagatgatgaagatactgagtcaaattcatcggtagaacaagcatcggttgaagtacctgatggaccaacactccatgacccagacctctatattgagattgtgaaaaatacgaagtctgtcccagaatattcagaggtggcttatcccgattattttggtcacattccgcctccattcaaagagcctattttagaaaggccttatggtgtacaaaggacaaaaattgctcaagatattgaaaggctaatacatcagagtgatatcatagatcgtgtggtatatgacttggataacccaaattacaccattccagaagagggagatattttgaaatttaactccaaatttgagtctgggaatctgcgcaaagtaattcaaattagaaaaaatgaatatgatcttattctgaactcagacataaacagcaatcattatcatcagtggttttactttgaagtcagtggaatgcgaccaggtgttgcttacaggtttaacatcattaactgtgaaaagtccaacagtcagtttaattatgccctaccacttatgtcttggatgaagatgaacctcgattccttgaagaagttgattacagtgcagaaagtaatgatgagttagatattgagttggctgaaaatgtaggagattatgaaccttctgctcaagaagaagtactttctgactctgaattatcaagaacatacctaccttgagcccgctgccatctcttgttaactgcaaagaataaatgaaatatcttggtttttatttcccaggaagcttgagagaaatgagtttatacagagctgactcaaaaagacaaaaagtaacttgggccagtttggtttcaagata

SEQ ID NO: 105533 - DNA, 1932 bp, Artificial Sequence
  derived and/or modified sequence
atgaacgccagcaaggagagccccccccacgaggacctgatggtgcagatccacagcatcctggccaagatcggccccaaggccgtgaacagcgtgagcctgggcaagaacggcgtggtggagctgatgttcaagatcatcggccccttcagcaagaagaacagcagcctgatcaaggtggccctggacaccctggccgccctgctgaagagcaagaccaacgccagaagagccgtggacagaggctacgtgcaggtgctgctgaccatctacgtggactggcacagacacgacaacagacacagaaacatgctgatcagaaagggcatcctgcagagcctgaagagcgtgaccaacatcaagctgggcagaaaggccttcatcgacgccaacggcatgaagatcctgtacaacaccagccaggagtgcctggccgtgagaaccctggaccccctggtgaacaccagcagcctgatcatgagaaagtgcttccccaagaacagactgcccctgcccaccatcaagagcagcttccacttccagctgcccgtgatccccgtgaccggccccgtggcccagctgtacagcctgccccccgaggtggacgacgtggtggacgagagcgacgacaacgacgacatcgacgtggaggccgagaacgagaccgagaacgaggacgacctggaccagaacttcaagaacgacgacatcgagaccgacatcaacaagctgaagccccagcaggagcccggcagaaccatcgaggacctgaagatgtacgagcacctgttccccgagctggtggacgacttccaggactacgacctgatcagcaaggagcccaagcccttcgtgttcgagggcaaggtgagaggccccatcgtggtgcccaccgccggcgaggagaccagcggcaacagcggcaacctgagaaaggtggtgatgaaggagaacatcagcagcaagggcgacgagggcgagaagaagagcaccttcatggacctggccaaggaggacatcaaggacaacgacagaaccctgcagcagcagcccggcgaccagaacagaaccatcagcagcgtgcacggcctgaacaacgacatcgtgaaggccctggacagaatcaccctgcagaacatccccagccagaccgcccccggcttcaccgccgagatgaagaaggactgcagcctgcccctgaccgtgctgacctgcgccaaggcctgcccccacatggccacctgcggcaacgtgctgttcgagggcagaaccgtgcagctgggcaagctgtgctgcaccggcgtggagaccgaggacgacgaggacaccgagagcaacagcagcgtggagcaggccagcgtggaggtgcccgacggccccaccctgcacgaccccgacctgtacatcgagatcgtgaagaacaccaagagcgtgcccgagtacagcgaggtggcctaccccgactacttcggccacatccccccccccttcaaggagcccatcctggagagaccctacggcgtgcagagaaccaagatcgcccaggacatcgagagactgatccaccagagcgacatcatcgacagagtggtgtacgacctggacaaccccaactacaccatccccgaggagggcgacatcctgaagttcaacagcaagttcgagagcggcaacctgagaaaggtgatccagatcagaaagaacgagtacgacctgatcctgaacagcgacatcaacagcaaccactaccaccagtggttctacttcgaggtgagcggcatgagacccggcgtggcctacagattcaacatcatcaactgcgagaagagcaacagccagttcaactacgccctgcccctgatgagctggatgaagatgaacctggacagcctgaagaagctgatcaccgtgcagaaggtgatgatgagctag

SEQ ID NO: 105534 - protein, 188 aa, Artificial Sequence [sequence omitted]

SEQ ID NO: 105535 - protein, 1238 aa, Artificial Sequence
  derived and/or modified sequence
MRTGSAASSAAAAAAAAAASASPATGVCMKTPGGGRRGIRRDPGAEPGAAALRGPRQRPILSRLTNNSRIVGLLAQLEKINAEPSESDTARYVTSKILHLAQSQEKTRREMTAKGSTGMEILLSTLENTKDLQTTLNILSILVELVSAGGGRRVSFLVTKGGSQILLQLLMNASKESPPHEDLMVQIHSILAKIGPKDKKFGVKARINGALNITLNLVKQNLQNHRLVLPCLQLLRVYSANSVNSVSLGKNGVVELMFKIIGPFSKKNSSLIKVALDTLAALLKSKTNARRAVDRGYVQVLLTIYVDWHRHDNRHRNMLIRKGILQSLKSVTNIKLGRKAFIDANGMKILYNTSQLPVIPVTGPVAQLYSLPPEVDDVVDESDDNDDIDVEAENETENEDDLDQNFKNDDIETDINKLKPQQEPGRTIEDLKMYEHLFPELVDDFQDYDLISKEPKPFVFEGKVRGPIVVPTAGEETSGNSGNLRKVVMKENISSKGDEGEKKSTFMDLAKEDIKDNDRTLQQQPGDQNRTISSVHGLNNDIVKALDRITLQNIPSQTAPGFTAEMKKDCSLPLTVLTCAKACPHMATCGNVLFEGRTVQLGKLCCTGVETEDDEDTESNSSVEQASVEVPDGPTLHDPDLYIEIVKNTKSVPEYSEVAYPDYFGHIPPPFKEPILERPYGVQRTKIAQDIERLIHQSDIIDRVVYDLDNPNYTIPEEGDILKFNSKFESGNLRKVIQIRKNEYDLILNSDINSNHYHQWFYFEVSGMRPGVAYRFNIINCEKSNSQFNYGMQPLMYSVQEALNARPWWIRMGTDICYYKNHFSRSSVAAGGQKGKSYYTITFTVNFPHKDDVCYFAYHYPYTYSTLQMHLQKLESAHNPQQIYFRKDVLCETLSGNSCPLVTITAMPESNYYEHICHFRNRPYVFLSARVHPGETNASWVMKGTLEYLMSNNPTAQSLRESYIFKIVPMLNPDGVINGNHRCSLSGEDLNRQWQSPSPDLHPTIYHAKGLLQYLAAVKRLPLVYCDYHGHSRKKNVFMYGCSIKETVWHTNDNATSCDVVEDTGYRTLPKILSHIAPAFCMSSCSFVVEKSKESTARVVVWREIGVQRSYTMESTLCGCDQGKYKGLQIGTRELEEMGAKFCVGLLRLKRLTSPLEYNLPSSLLDFENDLIESSCKVTSPTTYVLDEDEPRFLEEVDYSAESNDELDIELAENVGDYEPSAQEEVLSDSELSRTYLP

SEQ ID NO: 105536 - DNA, 3717 bp, Artificial Sequence
  derived and/or modified sequence
atgcggacaggtagcgcagcctctagcgcagctgcagctgctgccgcagcagcggcaagcgcctcacctgctacgggtgtctgtatgaaaaccccaggaggcggccgaaggggaattcggcgcgacccaggggccgaaccaggcgcagcagcactgcggggccccagacagaggcccatcctttcacgcctaaccaacaattctagaatagtgggtcttctggcccaacttgagaaaattaatgcggagccctccgagagtgatactgcacgatacgtgacctccaagatcctccacctagctcagtcccaggagaagacgcgccgagagatgacagcgaaggggtcaactggaatggaaattttgctgtcgacgctggagaacacaaaagatctgcagaccacactgaatatactctcgatcctggttgagcttgtgtctgccggtggcggcaggcgcgtttcctttctcgtcactaaagggggtagccagatactgcttcaactactgatgaatgcgagcaaggaatcccccccacatgaggacctcatggtccagattcactctattctagcgaaaattgggcctaaggacaagaagtttggagtaaaggcccgcatcaacggcgccctaaacatcaccctcaacctagtgaagcagaacctccagaaccataggctcgtgctaccctgtttgcagcttttacgagtctattctgctaacagcgtgaattcggtgtcgttgggcaaaaatggcgtggtcgaattaatgttcaaaatcatcggcccctttagcaaaaagaattcatccttaattaaagtggctttagacacactggccgctctgctgaaaagtaagaccaacgcccgacgggcagtcgacagagggtatgtgcaggtcctcctcacgatatacgtggactggcacaggcatgacaatagacaccgcaacatgttgatcagaaaaggtattctccagtcccttaagtctgtcacaaatatcaaactcgggcgaaaagcttttatcgatgctaacggcatgaagatactgtataatacgagtcagctgcccgtgattccagttactggtcctgtggcacaactttactctctgccacccgaggtggatgatgtggtggatgagagtgatgataacgatgatattgatgtggaggcggagaatgagactgagaatgaagatgatctggaccagaacttcaagaatgacgatatcgaaaccgacatcaacaaactgaagcctcaacaggaaccgggaaggactattgaagatctcaagatgtacgaacacctgttccccgagctcgtggatgactttcaagactatgatctgatctctaaggaacccaagcctttcgtgtttgaaggaaaggtacggggacccattgttgttcctaccgcaggagaggagaccagcggaaattccgggaaccttaggaaagtggttatgaaggagaacatctctagcaagggcgacgagggagagaagaaatcaactttcatggatcttgccaaggaggacatcaaggacaacgatagaacacttcagcaacaacccggcgaccaaaataggaccatcagctccgttcatggtctgaataacgacatcgtcaaggcacttgatcgcatcaccctccagaacataccatcccagacagcacccggatttaccgctgagatgaagaaggactgcagcttgccgttaacagttttgacttgcgccaaggcttgtccccacatggctacatgtggcaatgtcctgtttgagggacggacagtccaactgggtaagttatgctgtacaggagtcgagactgaagacgatgaagataccgagtctaacagttctgttgagcaggccagcgtagaagtgcctgatggccctaccctccacgacccagacctatacatcgaaattgtgaaaaataccaaatccgtgcccgagtattcagaagtggcctacccagactacttcggacacatacctcctccgtttaaggaacccattctggaacgtccatatggcgtgcaacgcaccaagatcgctcaagatattgagcgattgattcaccagtccgatattatcgatcgggtagtttacgacttggacaatcctaattacaccatcccggaggagggagacatcctgaaattcaattctaagttcgagtcaggcaatcttagaaaggtaattcagattaggaaaaatgaatacgacttgatcctaaattccgatattaactcaaaccactaccaccagtggttctacttcgaagtgtcagggatgcggcccggtgttgcttaccggttcaacatcataaattgcgaaaagtctaacagtcagttcaactacggtatgcagccactgatgtactccgtacaagaagctcttaatgctcgaccctggtggattaggatgggcacggatatctgttattataagaatcatttctcaaggtcctcagtggccgcaggtggacaaaaggggaaaagttattacacaatcacctttacggtgaacttcccccacaaagacgatgtgtgctactttgcataccactacccgtacacctatagcacgctccagatgcatctccagaaacttgagtccgcccataaccctcagcagatatacttcagaaaggacgttttgtgtgagactctcagcggtaactcgtgtcctctcgtgaccataaccgccatgccagaaagcaactactatgaacatatttgccacttccggaacaggccttacgttttcctgtctgccagggtccaccccggagaaacaaatgcatcgtgggttatgaagggcactttggaatatctgatgagcaataaccccactgcccagagcctgcgtgaaagttacatctttaaaattgtgcccatgttgaatccggacggcgtgatcaatggcaaccacagatgcagtctgagcggagaggacctgaatcgccaatggcaatcccctagccccgacctgcacccaaccatctatcacgcgaaagggctgctccaataccttgctgcggtcaagcgccttcccctggtttactgcgattaccacggacacagcagaaaaaaaaatgtcttcatgtatgggtgttctatcaaggagaccgtctggcataccaacgataatgccacttcatgcgacgtggtagaggacaccggttaccggaccctccctaagattctgagccacattgcccccgccttctgtatgagttcatgttctttcgttgtggagaagtccaaagagagtacagcccgcgtggtagtgtggagggagatcggggtgcagagatcttacaccatggagtctactctgtgtggttgcgatcaagggaagtacaagggccttcagatcggcactcgcgagctggaggaaatgggtgcaaaattctgtgtgggcctcctgcgcctgaaacgcttaacatcgcctctcgagtataacctaccgtcttctctgctagactttgaaaatgacctgatcgaatctagctgtaaggtgacgagtccgactacctacgtcctcgacgaagacgagcctcgctttctggaggaggtcgactattccgcagagagtaatgatgagctcgatattgagctggctgagaatgtgggtgattacgagccctctgcccaagaagaggttctcagtgattccgagctttcccgcacctacttgccctag

SEQ ID NO: 105537 - DNA, 3717 bp, Artificial Sequence
  derived and/or modified sequence
atgaggactggatctgctgccagcagcgctgctgctgctgctgctgctgctgctgccagcgccagccctgccactggagtgtgcatgaagacccctgggggcggccggcggggcatccggcgggaccctggagctgagcctggagctgctgccctgcggggcccccggcagaggcccatcctgagccggctgaccaacaacagccgcatcgtgggcctgctggcccagctggagaagatcaatgctgagcccagcgagagtgacacagcccgctacgtgaccagcaagatcctgcacctggcccagagccaggagaagacccggcgggagatgacagccaagggcagcacaggcatggagatcctgctgagcaccctggagaacaccaaggacctgcagaccaccctgaacatcctgagcatcctggtggagctggtgtctgctgggggcggccggcgggtgtccttcctggtgaccaagggcggcagccagatcctgctgcagctgctgatgaatgccagcaaggagagcccccctcatgaggacctgatggtgcagatccacagcatcctggccaagattggccccaaggacaagaagtttggagtgaaggcccgcatcaacggggccctgaacatcaccctgaacctggtgaagcagaacctgcagaaccaccggctggtgctgccctgcctgcagctgctgcgggtgtacagcgccaacagcgtgaacagcgtgtccctgggcaagaatggagtggtggagctgatgttcaagatcatcggccccttcagcaagaagaacagcagcctcatcaaggtggccctggacaccctggccgccctgctgaagagcaagaccaatgcccggcgggctgtggaccggggctacgtgcaggtgctgctgaccatctacgtggactggcacagacatgacaacagacacaggaacatgctgatcaggaagggcatcctgcagagcctgaagtctgtgaccaacatcaagctgggcaggaaggccttcattgatgccaacggcatgaagatcctgtacaacaccagccagctgcctgtgattcctgtgacaggccctgtggcccagctgtacagcctgcccccagaggtggatgatgtggtggatgaaagtgatgacaatgatgacattgatgtggaggctgaaaatgaaacagaaaatgaagatgacctggaccagaacttcaagaatgatgacattgaaacagacatcaacaagctgaagccccagcaggagcccggccgcaccatcgaggacctgaagatgtatgagcacctgtttcctgagctggtggatgacttccaggactatgacctgatcagcaaggagcccaagccctttgtgtttgagggcaaggtgcggggccccatcgtggtgcccacagctggggaggagaccagcggcaacagcggcaacctgaggaaggtggtgatgaaggagaacatcagcagcaaaggagatgaaggagagaagaagagcaccttcatggacctggccaaggaggacatcaaggacaatgacaggaccctgcagcagcagcccggggaccagaacagaaccatcagctctgtgcacggcctgaacaatgacatcgtgaaggccctggaccgcatcaccctgcagaacatccccagccagacagcccctggcttcaccgctgagatgaagaaggactgcagcctgcccctgactgtgctgacctgtgccaaggcctgcccccacatggccacctgtggaaatgtgctgtttgagggccgcacagtgcagctgggcaagctgtgctgcacaggagtggagacagaagatgatgaggacacagagagcaacagctctgtggagcaggcctctgtggaggtgcctgatggccccaccctgcatgaccctgacctgtacattgaaattgtgaagaacaccaagtctgtgcctgagtacagcgaggtggcctacccagactacttcggccacatccccccacccttcaaggagcccatcctggagcggccctacggcgtgcagaggaccaagatcgcccaggacatcgagcggctcatccaccagagcgacatcatcgacagagtggtgtatgacctggacaaccccaactacaccatccctgaggagggggacatcctgaagttcaacagcaagtttgagagcggcaacctgaggaaggtgatccagatcaggaagaatgaatatgacctgatcctgaacagcgacatcaacagcaaccactaccaccagtggttctactttgaggtgtctggcatgaggcctggggtggcctaccgcttcaacatcatcaactgtgagaagagcaacagccagttcaactacggcatgcagcccctgatgtacagcgtgcaggaggccctgaatgcccggccctggtggatccgcatgggcacagacatctgctactacaagaaccacttcagccgcagctctgtggccgccggcggccagaagggcaagagctactacaccatcaccttcaccgtgaacttcccccacaaggatgatgtgtgctactttgcctaccactacccctacacctacagcaccctgcagatgcacctgcagaagctggagagcgcccacaacccccagcagatctacttcaggaaggatgtgctgtgtgagaccctgagcggcaacagctgccccctggtgaccatcacagccatgcctgagagcaactactatgagcacatctgccacttcaggaaccggccctacgtgttcctgagcgcccgggtgcaccctggagagaccaatgcctcctgggtgatgaagggcaccctggagtacctgatgagcaacaaccccacagcccagagcctgcgggagagctacatcttcaagatcgtgcccatgctgaacccagatggagtcatcaatggaaaccaccgctgcagcctgagcggggaggacctgaaccggcagtggcagagccccagcccagacctgcaccccaccatctaccacgccaagggcctgctgcagtacctggccgctgtgaagaggctgcccctggtgtactgtgactaccacggccacagcaggaagaagaatgtgttcatgtatggctgcagcatcaaggagaccgtgtggcacaccaatgacaatgccaccagctgtgatgtggtggaggacaccggctaccgcaccctgcccaagatcctgagccacatcgccccagccttctgcatgagcagctgcagctttgtggtggagaagagcaaggagagcacagcccgggtggtggtgtggagagaaattggagtgcagaggagctacaccatggagagcaccctgtgtggctgtgaccagggcaagtacaagggcctgcagatcggcacccgggagctggaggagatgggcgccaagttctgtgtgggcctgctgcggctgaagaggctgaccagccccctggagtacaacctgcccagcagcctgctggactttgaaaatgacctgattgagagcagctgcaaggtgaccagccccaccacctacgtgctggatgaagatgagccccgcttcctggaggaggtggactacagcgctgagagcaatgatgagctggacatcgagctggctgaaaatgtgggggactatgagcccagcgcccaggaggaggtgctgagtgacagcgagctgagcaggacctacctgccctag

SEQ ID NO: 105538 - DNA, 3717 bp, Artificial Sequence
  derived and/or modified sequence
atgcggaccggcagcgccgccagcagcgccgccgccgccgccgccgcagccgccgcctccgcttctccggccaccggggtgtgcatgaaaacacccggcggaggcagacgggggattagacgcgatccgggagctgaacccggagccgctgccctcagaggcccacggcagaggcctatcctgtcaaggcttaccaataactcacggatcgtgggactgctggcgcagcttgagaaaattaacgccgagcctagcgaaagcgacaccgctcgctacgtgaccagtaagatcctccatctggcccagagtcaggagaaaactagacgggagatgactgccaaaggttcaactgggatggagatactgctatcaacactggaaaatacaaaggacctccaaactaccctgaacatcctatctattctggtagaactcgtctctgccggagggggacggagagtcagctttctcgtgactaagggaggcagtcagatcctgctgcagctcctcatgaacgccagcaaagaaagtcccccccacgaggatctaatggttcagatccatagtatccttgccaagattggcccaaaggacaagaaatttggcgtcaaagcaaggattaacggcgccctgaatattactcttaacctggttaagcagaacctgcaaaatcacaggctggtgctgccatgcttacagctgctccgtgtttactcagcaaattccgtcaattcagtgagcctggggaagaacggtgtcgtggagttgatgttcaagatcatcggacctttcagcaaaaagaattcaagccttattaaagttgccttagataccctggctgccttgctgaagagcaaaacaaatgctcgaagggcagtggacagaggatatgttcaggtactgcttacaatttatgtggactggcaccggcatgacaatcggcataggaacatgctgatccgtaaggggattctgcagtcactcaagagcgtgaccaacatcaaactaggacgaaaagcattcatcgatgctaatggtatgaaaatcttgtacaacaccagccagctacctgtgatccccgtcacagggcctgtggcccagctgtacagcctgccacccgaggtagacgatgtagtggatgaaagtgacgataatgacgatatagacgtcgaagcagagaatgagacagaaaacgaagatgatctggaccagaatttcaaaaacgatgatatcgaaaccgacatcaacaagctgaaaccgcaacaggaaccagggcggacaatcgaagatctgaagatgtatgaacacctcttccccgagctggtggatgacttccaggattacgatctaattagtaaagagccaaaaccatttgttttcgaaggaaaggtgcgcggcccgatcgttgtgccaactgccggcgaagaaacgagcggaaattcagggaatctacgcaaggtcgtcatgaaggagaatatatcgtccaagggagatgaaggagagaagaagtcaaccttcatggatcttgcaaaagaagacattaaagataacgataggacactccagcagcaaccgggcgatcagaatcgcacaatcagcagcgtccacggacttaataacgatatagttaaggctcttgatcgtatcactctccaaaacatcccctcacagaccgcccctgggtttactgcagagatgaagaaagattgcagtctgcctctgacagttcttacgtgtgctaaagcatgcccgcatatggccacttgtggcaacgtcctattcgaaggacgcactgttcaactgggaaagctgtgttgcacaggtgtggaaactgaggacgatgaagataccgagtccaactcatctgtggagcaagcatcagtggaagtaccggacggccctaccctgcacgacccggacctgtatatcgagattgtgaaaaacactaagagtgtgcctgaatattcagaagttgcttaccctgattacttcggccacattcctccaccgttcaaggagccaattttggagcgaccttacggggtacaaaggacgaaaatcgcccaggatatagaacgcctaattcatcagtccgatatcatagacagggtcgtctacgacctcgacaacccgaattacacgatccccgaggaaggagacatcctgaagtttaatagtaagttcgagagcggcaatctccggaaggtgattcaaattcgtaaaaatgaatatgacctgatcctgaactcggacattaactccaatcactaccaccaatggttttacttcgaggtgtctgggatgaggccgggagtggcctaccggtttaacatcatcaattgtgagaaatccaactctcaattcaattatggaatgcagcccctgatgtatagtgttcaggaggctttgaacgctcgcccgtggtggatccgaatggggaccgacatatgctattataaaaaccacttcagtcgctcaagcgttgctgctggggggcagaaggggaaaagctattacacaattacctttaccgtcaactttccacacaaagacgacgtgtgctacttcgcatatcactacccttatacctactctacattacagatgcatctgcaaaaacttgagtccgcccataacccacagcaaatctatttccgcaaggacgtactgtgcgagactctgtccgggaacagttgccctctggtcactataacagccatgccagagagtaattactacgagcacatttgccattttcgcaaccgcccttatgtcttcctgtccgcgcgcgtacatcccggagaaactaacgcaagctgggtcatgaaaggcaccctggagtacctaatgtccaataacccgaccgcccagtctctcagagagtcctatatttttaagatcgttcccatgcttaaccctgatggtgtgattaacggaaaccaccgctgctccctgagcggagaagatctgaatcggcaatggcagtcaccctctcctgacctgcacccgacaatttaccacgcaaagggattgcttcagtatctggccgcggtcaagagacttcctcttgtgtactgcgactatcatggccacagtcgcaagaaaaacgtgtttatgtacgggtgttcaattaaagagacagtgtggcataccaacgataatgcgacttcctgtgacgtcgtggaggataccggatatagaacgttgcctaaaattctttctcacatcgcaccggccttctgtatgagttcttgttctttcgtggtggaaaagtccaaagaatccactgctcgtgtagttgtgtggagggaaataggcgtgcaacgttcatacactatggagagtacactgtgtggatgtgaccagggaaaatacaaggggctccaaatcggaaccagggaattggaggagatgggagcaaagttttgcgtgggcctgttacgactaaagcgtttgactagtcccctagagtacaatctgccaagctccctgctcgattttgaaaatgatctgatcgagagttcctgcaaggtcaccagcccgacaacatatgtgcttgacgaagatgagcccaggtttctggaagaagtggactactcagctgaaagtaatgatgaactggatatcgagctggccgagaatgtaggcgattacgaaccatccgcgcaagaggaagttctctccgattcagagttatctcgcacctatctcccatag

SEQ ID NO: 105539 - DNA, 3717 bp, Artificial Sequence
  derived and/or modified sequence
atgcggactgggtcagccgcttcatccgccgctgcagcggcagctgccgcagctgcaagtgcctcgcccgctacaggagtctgcatgaagacaccaggagggggacggaggggaatcaggcgggaccccggagctgagccgggtgccgctgctctgaggggtccaaggcaacggcctatactgtcccgtctgaccaataacagtcggatagttggactgctggcacagctcgagaaaatcaacgccgagccgtccgagagtgatacagccagatacgtgacatccaaaatattgcatcttgcccagagccaggagaaaacgcgcagggaaatgaccgcaaaaggcagcactggcatggaaatccttctctcaacactcgagaacacaaaggacctgcagaccaccctgaacatcctgtccatcctggtggaactggtctccgctggtggagggagacgtgtatctttcttggtgaccaaagggggatcccagatcttactacaattgttgatgaatgcttcaaaggaaagcccaccgcacgaggatcttatggtccagatacactccattctggccaagataggtccaaaagataagaaatttggcgtcaaggccaggatcaacggggctctaaacatcaccctgaatctagttaagcagaatctgcagaatcatcgccttgtactgccctgtctgcagctgctacgggtgtattctgctaattccgtgaactccgtttctctcgggaagaatggagtggtggaactgatgttcaagatcattggtcccttcagcaagaagaactcttccttgattaaggtagcactggacaccctcgccgcacttttaaaatccaaaaccaacgcgaggcgcgctgtcgatagaggatatgtgcaggtgctgttaactatttacgttgactggcaccgccacgacaacaggcatagaaacatgctgatccgtaaaggtatcctgcaatctctgaaaagtgtgacgaacatcaagctgggccgaaaagccttcatcgatgccaatgggatgaaaatattatataatacatctcagctccccgtcatccctgtcacaggcccagtcgcccagttatattccctcccgccagaggtggatgatgtcgtagacgaatctgatgataacgacgacattgacgttgaggcagagaatgaaacagaaaacgaggatgaccttgaccagaatttcaagaatgatgatatagaaaccgacatcaataaacttaaaccacaacaggagcccggacgcaccatcgaagacctgaagatgtatgaacatctgttccccgaattggtggacgatttccaggattacgacctgataagcaaagagcctaagcctttcgtattcgagggaaaggtgcgcggacccatcgtagtccccacagctggtgaggaaacctctggcaacagcgggaacttacgtaaggtcgttatgaaggaaaacatcagctccaagggcgacgagggggagaagaagtctacgtttatggacttagcaaaagaggatatcaaagacaatgaccggactcttcagcagcagccaggcgatcagaatcgcactatttcaagtgtacacggacttaataatgatattgtaaaggccctggatcggataaccttgcagaatatccctagccagacagccccagggttcaccgctgagatgaagaaggactgcagcctccccttaacagtactgacgtgcgccaaagcatgcccccatatggctacctgtggcaatgtgctttttgaaggccgtaccgtacagctgggtaagctttgttgcaccggcgttgagacagaagacgatgaagacacggagtctaactcaagcgttgagcaggccagcgtcgaagtccctgatggtcctacactgcatgaccctgacctatatatcgaaatcgtgaaaaacactaaaagcgtacctgaatatagcgaggtagcatatcctgattatttcgggcatatcccccctccattcaaagaaccaatcttggagcggccttacggtgtgcagcggactaagattgcccaagacatcgagaggctgattcatcagtctgatatcatcgaccgagtcgtgtacgatttggacaacccaaactacactattcccgaggaaggagacatattgaaattcaattctaagttcgagagtggcaacctgcgcaaggtaattcagatacgcaagaatgaatatgacctgattttgaactccgatataaattctaaccactatcaccaatggttctatttcgaggtgagtggcatgcgccctggggtggcttatagatttaacatcatcaactgcgaaaagagtaacagccagtttaactacgggatgcagcctctgatgtattccgtacaggaggccctgaacgccagaccatggtggattcgtatgggcacagacatctgctattacaagaatcactttagtcggagtagcgttgctgccggtggtcagaagggaaagtcatattacaccattaccttcaccgtcaattttcctcataaagacgatgtctgctatttcgcttatcattatccctacacttactctaccctgcaaatgcacctgcagaaactggagtccgcgcacaacccgcagcagatttatttccggaaggatgtcctatgcgaaactctctccggcaacagttgccctctcgtgaccataacagccatgcccgagagcaattactacgagcatatttgtcactttaggaatcgaccgtatgtgtttctctcggcccgtgtgcaccctggagaaaccaatgccagctgggtgatgaaggggacactggaatatctgatgtcaaataatccgaccgcgcaaagcttgagggagtcctatatctttaaaattgtacccatgctgaatcccgacggggtcattaatgggaaccacagatgttctctgagcggcgaggatctgaaccgtcagtggcagtccccctctcctgatctccacccgacaatctatcacgcgaaaggactcttgcagtacctggctgccgtgaagagattgcccctggtgtattgtgattaccacggacactcaagaaagaaaaacgtgtttatgtacgggtgttccattaaagaaacagtgtggcacacaaacgataacgccacatcgtgtgacgtcgtcgaggacacaggataccggaccctgcccaagatcctctctcacatcgctccagccttctgcatgagttcttgttcgtttgtcgtcgaaaaatctaaggaatcaaccgcacgcgtggttgtgtggcgcgagatcggagttcaaagaagctacacaatggagtcaacgctgtgcggttgtgaccagggcaaatataagggattacagataggaactagagaacttgaagaaatgggagctaaattctgcgttggcttattacggcttaagaggctcactagccctttggaatacaacctgccatcaagcctgctcgactttgaaaacgacttgatcgagagtagctgcaaagttacatcacccacaacatatgtgctggatgaagatgagccacgcttcctggaggaagtggactactcagccgagtcaaacgatgagctggacattgagctggccgagaatgtgggcgactacgaacccagtgcacaggaggaagtgctgagcgactcagagctctctaggacttatctcccctag

SEQ ID NO: 105540 - DNA, 4380 bp, Artificial Sequence
  derived and/or modified sequence
ctgcgcgtgctgggagccggctggcaaggcgtgcggtgggcggggcgccgcgctgacgttgcccgggatgcggacaggttccgccgcctccagcgccgccgccgcagctgccgccgccgccgcctccgcctcgcctgccaccggggtttgtatgaaaacaccgggcggcgggcggcgagggatccgccgtgatccaggtgctgagccgggtgctgcggctctgcgcggtccccgccagcgccccatcctgagccgattatctgcaattatgaaatgaagtaactcaagatgagcaagttaaaagtgataccagaaaaaagccttaccaataattctaggatcgtaggactcctggctcaactggagaagatcaatgctgagccttcagaatcagacactgcccgatatgttacatcaaaaattcttcatctggctcagagtcaagaaaaaacaaggagagaaatgacagccaaaggttctacaggaatggaaattctgctgtcaacattagagaacacaaaagatcttcaaactacacttaatatcttaagcattcttgttgagctggtgtcagctggtggaggtcgaagagtgagtttcttagtcaccaaaggtggttcacaaatattgttgcagttacttatgaatgccagcaaagaatctcccccacatgaggacttaatggtacagattcattctattcttgcaaagattggaccaaaagataaaaaatttggagtaaaggctagaattaatggggctctgaatataaccctgaatttggtcaagcagaatttgcagaatcatcgcttggttctaccttgccttcagcttttacgagtatattctgccaactctgtgaattcagtatccttagggaaaaatggagttgtggaactgatgtttaaaatcattggaccatttagtaagaagaattccagtcttataaaaaacaaatgccaggagagctgtagacagaggatatgtccaagtgcttttaacaatttatgtagattggcaccgccatgataaccggcatagaaacatgctcattcggaaaggaattttacagagtttaaaaagtgttacaaacatcaagttgggaagaaaagcatttattgatgccaatgggatgaaaattctgtataatacttcgcaattgcctgttattcctgtgactggtcctgtggctcagctctacagcttacctcctgaagtggatgacgtagtagatgaaagtgatgacaacgatgatattgatgtagaagctgaaaacgaaactgagaatgaagatgacctagatcaaaattttaagaatgatgatattgaaacagatattaacaaactaaaaccccagcaagaaccgggacgaacaatagaagatctaaaaatgtatgaacaccttttccctgagcttgttgatgattttcaggactatgatttaatctccaaagaaccaaagccttttgtatttgagggaaaagtacgtggtcctattgttgttcctacggcaggcgaggaaacatctgggaattctggcaatttaagaaaagttgtaatgaaggagaacatatcttctaaaggagatgaaggtgaaaagaagtctacctttatggatctagcaaaagaagatattaaagataatgatagaacattacaacagcagccaggtgatcaaaatagaactatttcatcagtccatggtttaaacaatgatattgtaaaggccttggaccgaattacattgcagaatattccttctcaaacagccccaggttttactgcagaaatgaagaaggactgcagtcttcctcttactgtccttacctgtgctaaagcatgtccacacatggctacttgtggaaatgttctgtttgagggaagaacagttcagctagggaagctttgctgcactggagttgaaactgaagatgatgaagatactgagtcaaattcatcggtagaacaagcatcggttgaagtacctgatggaccaacactccatgacccagacctctatattgagattgtgaaaaatacgaagtctgtcccagaatattcagaggtggcttatcccgattattttggtcacattccgcctccattcaaagagcctattttagaaaggccttatggtgtacaaaggacaaaaattgctcaagatattgaaaggctaatacatcagagtgatatcatagatcgtgtggtatatgacttggataacccaaattacaccattccagaagagggagatattttgaaatttaactccaaatttgagtctgggaatctgcgcaaagtaattcaaattagaaaaaatgaatatgatcttattctgaactcagacataaacagcaatcattatcatcagtggttttactttgaagtcagtggaatgcgaccaggtgttgcttacaggtttaacatcattaactgtgaaaagtccaacagtcagtttaattatggtatgcaaccactcatgtattcggttcaggaagcattaaatgccagaccatggtggattcgtatggggactgacatttgttactataaaaatcatttctcaagaagttcagttgctgcaggtgggcaaaagggaaaatcctactatacaattacatttactgtcaattttccacataaagatgatgtttgctactttgcttatcactatccatatacgtattcaactttacagatgcatcttcaaaaattggaatcagcacacaatcctcagcaaatctattttcggaaagatgtgttatgtgaaaccctgtctggaaacagctgccccttggtgactataacagcaatgccagagtctaattattatgaacatatctgccatttcagaaatcgcccttacgttttcttgtctgctcgggtacatcctggagaaactaatgcaagttgggttatgaaaggaacgttggaatatctcatgagcaataaccccactgctcagagcttacgagaatcttatatttttaaaattgtccctatgttaaatccagatggtgtcatcaatggaaatcatcgctgttctttaagtggagaggatttgaataggcagtggcaaagtccaagtccggatttacatcctacaatttaccatgctaaggggctgttgcaatacttggctgcagtgaagcgtttacccttggtttattgtgattatcatggccattcccgaaagaagaatgtatttatgtatggttgcagcatcaaagagacagtgtggcataccaatgataatgcaacttcatgtgatgttgtggaggatacgggatacaggacattgcctaagatactgagccatatcgccccagcattttgcatgagcagctgtagcttcgtagtggaaaaatctaaagaatccacagcacgtgttgtagtttggagggaaataggagtacaaagaagttataccatggagagtactttatgtggctgtgatcagggaaaatacaagggtttacagattggtacccgagaactggaagagatgggagcaaaattttgtgttggtcttttacgtttgaaaagactgacctctccattggagtataatctgccttccagcctgcttgactttgaaaatgatttaattgaatcaagctgcaaagtaactagccctaccacttatgtcttggatgaagatgaacctcgattccttgaagaagttgattacagtgcagaaagtaatgatgagttagatattgagttggctgaaaatgtaggagattatgaaccttctgctcaagaagaagtactttctgactctgaattatcaagaacatacctaccttgagcccgctgccatctcttgttaactgcaaagaataaatgaaatatcttggtttttatttcccaggaagcttgagagaaatgagtttatacagagctgactcaaaaagacaaaaagtaacttgggccagtttggtttcaagataataaatgtgttattaattaatgataaaattggcgcttgttttattttcgatattcaatgcactttatgtagcattgaatgatcaaatattggatttacctttaaaaaaaaaacctgagtatcattgcatgaatttttatctccctatggttatatcctgcatcaagtggataattttgaagtgtgttcagaatataaaattgaaattttagagttgttgaaaatcctgacttgttgaaaactaatatatatgtacatggatttctatagatgtgtttgtttagaagtgggtagatattgcagataagactgttcttcagaatcatgttaactattgggttgtgactgaagtagtccagggtttgccttgaaaccattacattctacatttaccaaattaaacaaataaaaactgtattaaatgttgc

SEQ ID NO: 105541 - DNA, 4222 bp, Artificial Sequence
  derived and/or modified sequence
ctgcgcgtgctgggagccggctggcaaggcgtgcggtgggcggggcgccgcgctgacgttgcccgggatgcggacaggttccgccgcctccagcgccgccgccgcagctgccgccgccgccgcctccgcctcgcctgccaccggggtttgtatgaaaacaccgggcggcgggcggcgagggatccgccgtgatccaggtgctgagccgggtgctgcggctctgcgcggtccccgccagcgccccatcctgagccgccttaccaataattctaggatcgtaggactcctggctcaactggagaagatcaatgctgagccttcagaatcagacactgcccgatatgttacatcaaaaattcttcatctggctcagagtcaagaaaaaacaaggagagaaatgacagccaaaggttctacaggaatggaaattctgctgtcaacattagagaacacaaaagatcttcaaactacacttaatatcttaagcattcttgttgagctggtgtcagctggtggaggtcgaagagtgagtttcttagtcaccaaaggtggttcacaaatattgttgcagttacttatgaatgccagcaaagaatctcccccacatgaggacttaatggtacagattcattctattcttgcaaagattggaccaaaagataaaaaatttggagtaaaggctagaattaatggggctctgaatataaccctgaatttggtcaagcagaatttgcagaatcatcgcttggttctaccttgccttcagcttttacgagtatattctgccaactctgtgaattcagtatccttagggaaaaatggagttgtggaactgatgtttaaaatcattggaccatttagtaagaagaattccagtcttataaaggttgctttagacactcttgctgcattgctaaaatcaaaaacaaatgccaggagagctgtagacagaggatatgtccaagtgcttttaacaatttatgtagattggcaccgccatgataaccggcatagaaacatgctcattcggaaaggaattttacagagtttaaaaagtgttacaaacatcaagttgggaagaaaagcatttattgatgccaatgggatgaaaattctgtataatacttcgcaattgcctgttattcctgtgactggtcctgtggctcagctctacagcttacctcctgaagtggatgacgtagtagatgaaagtgatgacaacgatgatattgatgtagaagctgaaaacgaaactgagaatgaagatgacctagatcaaaattttaagaatgatgatattgaaacagatattaacaaactaaaaccccagcaagaaccgggacgaacaatagaagatctaaaaatgtatgaacaccttttccctgagcttgttgatgattttcaggactatgatttaatctccaaagaaccaaagccttttgtatttgagggaaaagtacgtggtcctattgttgttcctacggcaggcgaggaaacatctgggaattctggcaatttaagaaaagttgtaatgaaggagaacatatcttctaaaggagatgaaggtgaaaagaagtctacctttatggatctagcaaaagaagatattaaagataatgatagaacattacaacagcagccaggtgatcaaaatagaactatttcatcagtccatggtttaaacaatgatattgtaaaggccttggaccgaattacattgcagaatattccttctcaaacagccccaggttttactgcagaaatgaagaaggactgcagtcttcctcttactgtccttacctgtgctaaagcatgtccacacatggctacttgtggaaatgttctgtttgagggaagaacagttcagctagggaagctttgctgcactggagttgaaactgaagatgatgaagatactgagtcaaattcatcggtagaacaagcatcggttgaagtacctgatggaccaacactccatgacccagacctctatattgagattgtgaaaaatacgaagtctgtcccagaatattcagaggtggcttatcccgattattttggtcacattccgcctccattcaaagagcctattttagaaaggccttatggtgtacaaaggacaaaaattgctcaagatattgaaaggctaatacatcagagtgatatcatagatcgtgtggtatatgacttggataacccaaattacaccattccagaagagggagatattttgaaatttaactccaaatttgagtctgggaatctgcgcaaagtaattcaaattagaaaaaatgaatatgatcttattctgaactcagacataaacagcaatcattatcatcagtggttttactttgaagtcagtggaatgcgaccaggtgttgcttacaggtttaacatcattaactgtgaaaagtccaacagtcagtttaattatggtatgcaaccactcatgtattcggttcaggaagcattaaatgccagaccatggtggattcgtatggggactgacatttgttactataaaaatcatttctcaagaagttcagttgctgcaggtgggcaaaagggaaaatcctactatacaattacatttactgtcaattttccacataaagatgatgtttgctactttgcttatcactatccatatacgtattcaactttacagatgcatcttcaaaaattggaatcagcacacaatcctcagcaaatctattttcggaaagatgtgttatgtgaaaccctgtctggaaacagctgccccttggtgactataacagcaatgccagagtctaattattatgaacatatctgccatttcagaaatcgcccttacgttttcttgtctgctcgggtacatcctggagaaactaatgcaagttgggttatgaaaggaacgttggaatatctcatgagcaataaccccactgctcagagcttacgagaatcttatatttttaaaattgtccctatgttaaatccagatggtgtcatcaatggaaatcatcgctgttctttaagtggagaggatttgaataggcagtggcaaagtccaagtccggatttacatcctacaatttaccatgctaaggggctgttgcaatacttggctgcagtgaagcgtttacccttggtttattgtgattatcatggccattcccgaaagaagaatgtatttatgtatggttgcagcatcaaagagacagtgtggcataccaatgataatgcaacttcatgtgatgttgtggaggatacgggatacaggacattgcctaagatactgagccatatcgccccagcattttgcatgagcagctgtagcttcgtagtggaaaaatctaaagaatccacagcacgtgttgtagtttggagggaaataggagtacaaagaagttataccatggagagtactttatgtggctgtgatcagggaaaatacaagggtttacagattggtacccgagaactggaagagatgggagcaaaattttgtgttggtcttttacgtttgaaaagactgacctctccattggagtataatctgccttccagcctgcttgactttgaaaatgatttaattgaatcaagctgcaaagtaactagccctaccacttatgtcttggatgaagatgaacctcgattccttgaagaagttgattacagtgcagaaagtaatgatgagttagatattgagttggctgaaaatgtaggagattatgaaccttctgctcaagaagaagtactttctgactctgaattatcaagaacatacctaccttgagcccgctgccatctcttgttaactgcaaagaataaatgaaatatcttggtttttatttcccaggaagcttgagagaaatgagtttatacagagctgactcaaaaagacaaaaagtaacttgggccagtttggtttcaagataataaatgtgttattaattaatgataaaattggcgcttgttttattttcgatattcaatgcactttatgtagcattgaatgatcaaatattggatttacctttaaaaaaaaaacctgagtatcattgcatgaatttttatctccctatggttatatcctgcatcaagtggataattttgaagtgtgttcagaatataaaattgaaattttagagttgttgaaaatcctgacttgttgaaaactaatatatatgtacatggatttctatagatgtgtttgtttagaagtgggtagata

SEQ ID NO: 105542 - DNA, 3717 bp, Artificial Sequence
  derived and/or modified sequence
atgagaaccggcagcgccgccagcagcgccgccgccgccgccgccgccgccgccgccagcgccagccccgccaccggcgtgtgcatgaagacccccggcggcggcagaagaggcatcagaagagaccccggcgccgagcccggcgccgccgccctgagaggccccagacagagacccatcctgagcagactgaccaacaacagcagaatcgtgggcctgctggcccagctggagaagatcaacgccgagcccagcgagagcgacaccgccagatacgtgaccagcaagatcctgcacctggcccagagccaggagaagaccagaagagagatgaccgccaagggcagcaccggcatggagatcctgctgagcaccctggagaacaccaaggacctgcagaccaccctgaacatcctgagcatcctggtggagctggtgagcgccggcggcggcagaagagtgagcttcctggtgaccaagggcggcagccagatcctgctgcagctgctgatgaacgccagcaaggagagccccccccacgaggacctgatggtgcagatccacagcatcctggccaagatcggccccaaggacaagaagttcggcgtgaaggccagaatcaacggcgccctgaacatcaccctgaacctggtgaagcagaacctgcagaaccacagactggtgctgccctgcctgcagctgctgagagtgtacagcgccaacagcgtgaacagcgtgagcctgggcaagaacggcgtggtggagctgatgttcaagatcatcggccccttcagcaagaagaacagcagcctgatcaaggtggccctggacaccctggccgccctgctgaagagcaagaccaacgccagaagagccgtggacagaggctacgtgcaggtgctgctgaccatctacgtggactggcacagacacgacaacagacacagaaacatgctgatcagaaagggcatcctgcagagcctgaagagcgtgaccaacatcaagctgggcagaaaggccttcatcgacgccaacggcatgaagatcctgtacaacaccagccagctgcccgtgatccccgtgaccggccccgtggcccagctgtacagcctgccccccgaggtggacgacgtggtggacgagagcgacgacaacgacgacatcgacgtggaggccgagaacgagaccgagaacgaggacgacctggaccagaacttcaagaacgacgacatcgagaccgacatcaacaagctgaagccccagcaggagcccggcagaaccatcgaggacctgaagatgtacgagcacctgttccccgagctggtggacgacttccaggactacgacctgatcagcaaggagcccaagcccttcgtgttcgagggcaaggtgagaggccccatcgtggtgcccaccgccggcgaggagaccagcggcaacagcggcaacctgagaaaggtggtgatgaaggagaacatcagcagcaagggcgacgagggcgagaagaagagcaccttcatggacctggccaaggaggacatcaaggacaacgacagaaccctgcagcagcagcccggcgaccagaacagaaccatcagcagcgtgcacggcctgaacaacgacatcgtgaaggccctggacagaatcaccctgcagaacatccccagccagaccgcccccggcttcaccgccgagatgaagaaggactgcagcctgcccctgaccgtgctgacctgcgccaaggcctgcccccacatggccacctgcggcaacgtgctgttcgagggcagaaccgtgcagctgggcaagctgtgctgcaccggcgtggagaccgaggacgacgaggacaccgagagcaacagcagcgtggagcaggccagcgtggaggtgcccgacggccccaccctgcacgaccccgacctgtacatcgagatcgtgaagaacaccaagagcgtgcccgagtacagcgaggtggcctaccccgactacttcggccacatccccccccccttcaaggagcccatcctggagagaccctacggcgtgcagagaaccaagatcgcccaggacatcgagagactgatccaccagagcgacatcatcgacagagtggtgtacgacctggacaaccccaactacaccatccccgaggagggcgacatcctgaagttcaacagcaagttcgagagcggcaacctgagaaaggtgatccagatcagaaagaacgagtacgacctgatcctgaacagcgacatcaacagcaaccactaccaccagtggttctacttcgaggtgagcggcatgagacccggcgtggcctacagattcaacatcatcaactgcgagaagagcaacagccagttcaactacggcatgcagcccctgatgtacagcgtgcaggaggccctgaacgccagaccctggtggatcagaatgggcaccgacatctgctactacaagaaccacttcagcagaagcagcgtggccgccggcggccagaagggcaagagctactacaccatcaccttcaccgtgaacttcccccacaaggacgacgtgtgctacttcgcctaccactacccctacacctacagcaccctgcagatgcacctgcagaagctggagagcgcccacaacccccagcagatctacttcagaaaggacgtgctgtgcgagaccctgagcggcaacagctgccccctggtgaccatcaccgccatgcccgagagcaactactacgagcacatctgccacttcagaaacagaccctacgtgttcctgagcgccagagtgcaccccggcgagaccaacgccagctgggtgatgaagggcaccctggagtacctgatgagcaacaaccccaccgcccagagcctgagagagagctacatcttcaagatcgtgcccatgctgaaccccgacggcgtgatcaacggcaaccacagatgcagcctgagcggcgaggacctgaacagacagtggcagagccccagccccgacctgcaccccaccatctaccacgccaagggcctgctgcagtacctggccgccgtgaagagactgcccctggtgtactgcgactaccacggccacagcagaaagaagaacgtgttcatgtacggctgcagcatcaaggagaccgtgtggcacaccaacgacaacgccaccagctgcgacgtggtggaggacaccggctacagaaccctgcccaagatcctgagccacatcgcccccgccttctgcatgagcagctgcagcttcgtggtggagaagagcaaggagagcaccgccagagtggtggtgtggagagagatcggcgtgcagagaagctacaccatggagagcaccctgtgcggctgcgaccagggcaagtacaagggcctgcagatcggcaccagagagctggaggagatgggcgccaagttctgcgtgggcctgctgagactgaagagactgaccagccccctggagtacaacctgcccagcagcctgctggacttcgagaacgacctgatcgagagcagctgcaaggtgaccagccccaccacctacgtgctggacgaggacgagcccagattcctggaggaggtggactacagcgccgagagcaacgacgagctggacatcgagctggccgagaacgtgggcgactacgagcccagcgcccaggaggaggtgctgagcgacagcgagctgagcagaacctacctgccctag

SEQ ID NO: 105543 - protein, 284 aa, Artificial Sequence
  derived and/or modified sequence
MALAARLWRLLPFRRGAAPGSRLPAGTSGSRGHCGPCRFRGFEVMGNPGTFKRGLLLSALSYLGFETYQVISQAAVVHATAKVEEILEQADYLYESGETEKLYQLLTQYKESEDAELLWRLARASRDVAQLSRTSEEEKKLLVYEALEYAKRALEKNESSFASHKKAIELNPKDATSIHLMGIWCYTFAEMPWYQRRIAKMLFATPPSSTYEKALGYFHRAEQVDPNFYSKNLLLLGKTYLKLHNKKLAAFWLMKAKDYPAHTEEDKQIQTEAAQLLTSFSEKN

SEQ ID NO: 105544 - DNA, 1106 bp, Artificial Sequence
  derived and/or modified sequence
gcccgcctccgtagctgcctgaagtagtgcagggtcagcccgcaagttgcaggtcatggcgctggctgctcgactgtggcgccttctgcctttccgacgtggagccgccccggggtctcgtctccctgcggggacttcgggcagccgcgggcattgcggcccctgtcgattccgcggcttcgaggtaatgggaaacccaggaactttcaaaagaggccttttactctcagctttgtcgtatttgggttttgaaacttaccaggttatctctcaggctgctgtggttcatgccacagccaaagttgaagaaatacttgaacaagcagactacctgtatgaaagcggagaaacagaaaaactttatcagttgctaacccaatacaaggaaagtgaagatgcagagttactgtggcgtttggcacgggcatcacgtgatgtagctcagcttagcagaacctcagaagaggagaaaaagctattggtgtatgaagccctagagtatgcaaaaagagcactagaaaaaaatgaatcaagttttgcatctcataagaaagcaattgaactgaaccctaaagatgctacttcaattcaccttatgggtatttggtgctatacatttgccgaaatgccttggtatcaaagaagaattgctaaaatgctgtttgcaactcctcctagttccacctatgagaaggccttaggctactttcacagggcagaacaagtggatccaaacttctacagcaaaaacttacttcttttaggaaagacatacttgaaactacacaacaaaaagcttgctgctttctggctaatgaaagccaaggactatccagcacacacagaggaggataaacagatacagacagaagctgctcagttgcttacaagtttcagtgagaagaattgagaacttttcagagaagatttatgaaatagctaataaacattgccttttcttttaattctaaacttaatatatgaactataactgttctacggctttttaaatgttgtgaccatttaaccgtgtaaatataaaatattctaggcttcttcacaaataatagggtaaaataaataatcgccataagagtggtagaaat

SEQ ID NO: 105545 - DNA, 855 bp, Artificial Sequence
  derived and/or modified sequence
atggcactggctgctcgcttgtggcgtcttttgccatttagaaggggggccgcacctggaagccgcctgcccgctggtacgtctggaagccggggacattgcggcccctgccggtttagaggttttgaggttatgggcaaccccggcacatttaagcgcggcctgttactgagcgctctctcctatctagggtttgaaacttatcaggtgataagtcaggccgcagtggtccacgccacagctaaggtggaagagattctcgagcaggctgattatctatatgaaagcggggagaccgaaaaactataccagttactcacacagtacaaagaatctgaggacgcagagctcctctggcgtttggcaagggcttctcgcgacgtagcccaactgagtcgcacatctgaagaggagaaaaagctcctggtctacgaagcactggagtacgctaagagagcactggaaaagaacgagtccagctttgcttctcataagaaagcgattgagctcaacccaaaggacgccacttccatccacctgatgggaatctggtgttatacatttgcggaaatgccatggtaccagcgacggattgcaaaaatgctgtttgccaccccgcctagttcaacatacgagaaggcacttggctactttcatcgagcagaacaggtggatcccaatttttatagtaagaatctgcttcttttgggcaagacctacctcaaacttcacaacaagaagctcgcagctttttggctgatgaaggccaaggattatcctgcccacaccgaagaagacaagcagatacagacggaggcggcccagcttttgacttccttttccgagaagaactag

SEQ ID NO: 105546 - DNA, 855 bp, Artificial Sequence
  derived and/or modified sequence
atggccctggccgcccggctgtggaggctgctgcccttcagaagaggagctgcccctggcagccggctgcctgctggcaccagcggcagccggggccactgcggcccctgccgcttccggggctttgaggtgatgggcaaccctggcaccttcaagaggggcctgctgctgagcgccctgagctacctgggctttgagacctaccaggtgatcagccaggccgctgtggtgcacgccacagccaaggtggaggagatcctggagcaggccgactacctgtatgagagcggggagacagagaagctgtaccagctgctgacccagtacaaggagagtgaagatgctgagctgctgtggaggctggcccgggccagcagagatgtggcccagctgagcaggaccagcgaggaggagaagaagctgctggtgtatgaggccctggagtatgccaagagggccctggagaagaatgaaagcagctttgccagccacaagaaggccatcgagctgaaccccaaggatgccaccagcatccacctgatgggcatctggtgctacacctttgctgagatgccctggtaccagaggcgcatcgccaagatgctgtttgccaccccacccagcagcacctatgagaaggccctgggctacttccacagagctgagcaggtggaccccaacttctacagcaagaacctgctgctgctgggcaagacctacctgaagctgcacaacaagaagctggccgccttctggctgatgaaggccaaggactacccagcccacacagaggaggacaagcagatccagacagaagctgcccagctgctgaccagcttcagcgagaagaactag

SEQ ID NO: 105547 - DNA, 855 bp, Artificial Sequence
  derived and/or modified sequence
atggccctggccgcccggctgtggcggctgctgcccttccggcggggggcagcacccgggtcaagacttcctgcgggtacttccggctcacgaggccattgcggaccttgcagatttcgtggatttgaagtcatgggtaatcccggcaccttcaaacgcgggctattgctgtctgcattatcttaccttggcttcgagacttatcaagtcatctcccaggctgccgtggtgcacgcgactgctaaggttgaggagatcttggaacaagcagactatctatacgaaagcggagaaaccgaaaagctgtatcagctgctaacccagtataaagaatcagaagatgcggagctcctctggcggctggctcgcgcttcccgggatgtggcacagctgtcgcgcacctcggaggaagaaaaaaaactgctggtatatgaggcgctcgagtacgctaagagggctttagagaaaaatgaaagttcctttgccagccacaaaaaagccatcgaattgaaccccaaagacgccacaagcatccacctgatgggtatttggtgttatacctttgccgagatgccatggtatcaaaggaggatcgccaaaatgctgttcgccactcccccgagctcgacctacgaaaaagctctgggctactttcaccgcgctgaacaggtggacccaaatttttactccaagaacctcctgctgttggggaagacctatctgaaactgcacaataagaaactcgccgcgttctggctgatgaaggctaaggattatcccgcccacaccgaggaggataagcagatccagactgaggcagcccaattattaacatccttttcagaaaagaactag

SEQ ID NO: 105548 - DNA, 855 bp, Artificial Sequence
  derived and/or modified sequence
atggctctcgccgcaagactgtggcgtctgctgccttttaggcgcggagccgctcctggcagcaggctgccagcgggaacatctggctcacgcggacattgcggcccttgcaggtttcggggattcgaagtgatgggcaatcctggtactttcaaacgcggactcctgttatccgctctgagttacctgggctttgaaacataccaggtgatcagccaagcagctgtggtccatgcaacagccaaagtggaggagattctggagcaggcagattacctgtatgagtcaggcgagacagagaagctctaccagctgctcactcagtacaaagaatccgaggatgccgaacttctgtggagattggcgagggctagtcgggacgtggcccaactatctagaaccagcgaagaggaaaagaaactcttggtatacgaggctcttgaatacgcaaaacgggctctggagaagaatgaaagcagcttcgcaagccataagaaggccatagaactgaacccaaaggatgctacatctatccacttaatggggatctggtgttacaccttcgcggaaatgccctggtaccagcgtcgtatcgctaaaatgctgttcgccacgcccccaagctccacttatgagaaggccctgggttatttccatcgggctgagcaggttgaccctaacttctacagcaaaaacctcttactgctcggaaaaacttaccttaagctgcataataagaaattggccgctttctggctgatgaaggctaaagactaccctgcacacactgaggaggataagcagatccagacagaggctgctcagctgctcacatctttcagcgagaaaaactag

SEQ ID NO: 105549 - DNA, 855 bp, Artificial Sequence
  derived and/or modified sequence
atggccctggccgccagactgtggagactgctgcccttcagaagaggcgccgcccccggcagcagactgcccgccggcaccagcggcagcagaggccactgcggcccctgcagattcagaggcttcgaggtgatgggcaaccccggcaccttcaagagaggcctgctgctgagcgccctgagctacctgggcttcgagacctaccaggtgatcagccaggccgccgtggtgcacgccaccgccaaggtggaggagatcctggagcaggccgactacctgtacgagagcggcgagaccgagaagctgtaccagctgctgacccagtacaaggagagcgaggacgccgagctgctgtggagactggccagagccagcagagacgtggcccagctgagcagaaccagcgaggaggagaagaagctgctggtgtacgaggccctggagtacgccaagagagccctggagaagaacgagagcagcttcgccagccacaagaaggccatcgagctgaaccccaaggacgccaccagcatccacctgatgggcatctggtgctacaccttcgccgagatgccctggtaccagagaagaatcgccaagatgctgttcgccaccccccccagcagcacctacgagaaggccctgggctacttccacagagccgagcaggtggaccccaacttctacagcaagaacctgctgctgctgggcaagacctacctgaagctgcacaacaagaagctggccgccttctggctgatgaaggccaaggactaccccgcccacaccgaggaggacaagcagatccagaccgaggccgcccagctgctgaccagcttcagcgagaagaactag

SEQ ID NO: 105550 - protein, 220 aa, Artificial Sequence
  derived and/or modified sequence
MSAAGAGAGVEAGFSSEELLSLRFPLHRACRDGDLATLCSLLQQTPHAHLASEDSFYGWTPVHWAAHFGKLECLVQLVRAGATLNVSTTRYAQTPAHIAAFGGHPQCLVWLIQAGANINKPDCEGETPIHKAARSGSLECISALVANGAHVEFISQSSVHSCLPGELQHGVTFDPSVLIQCLKPEKCQWPDSSRHCTNPGFPRVCPVSLEPPELSSEPFL

SEQ ID NO: 105551 - DNA, 663 bp, Artificial Sequence
  derived and/or modified sequence
atgagcgccgccggcgccggcgccggcgtggaggccggcttcagcagcgaggagctgctgagcctgagattccccctgcacagagcctgcagagacggcgacctggccaccctgtgcagcctgctgcagcagaccccccacgcccacctggccagcgaggacagcttctacggctggacccccgtgcactgggccgcccacttcggcaagctggagtgcctggtgcagctggtgagagccggcgccaccctgaacgtgagcaccaccagatacgcccagacccccgcccacatcgccgccttcggcggccacccccagtgcctggtgtggctgatccaggccggcgccaacatcaacaagcccgactgcgagggcgagacccccatccacaaggccgccagaagcggcagcctggagtgcatcagcgccctggtggccaacggcgcccacgtggagttcatcagccagagcagcgtgcacagctgcctgcccggcgagctgcagcacggcgtgaccttcgaccccagcgtgctgatccagtgcctgaagcccgagaagtgccagtggcccgacagcagcagacactgcaccaaccccggcttccccagagtgtgccccgtgagcctggagccccccgagctgagcagcgagcccttcctgtag

SEQ ID NO: 105552 - DNA, 663 bp, Artificial Sequence
  derived and/or modified sequence
atgagtgctgccggcgccggagctggcgtggaagcaggattctcttcggaagaactgctctctctgcgctttcccctgcaccgcgcctgcagagacggcgacctggccacactgtgcagtttgctgcaacagactcctcacgcccacctggccagcgaggactccttctacggctggacaccagtgcattgggctgcgcattttggaaagctggaatgtttggtgcagttggtccgagccggcgccaccctgaatgtcagtaccactcggtatgctcagacaccagcgcacatcgcagcattcggcggccaccctcagtgtctggtttggctgattcaagctggcgcgaatatcaataagccagactgcgagggcgagactcccattcacaaagccgccaggtcgggctctcttgagtgtatatccgctttggtggcaaacggcgctcatgtggaattcatctctcagtcatctgtccacagctgcctgcccggcgaactccagcatggagttacattcgatccctctgtgcttattcagtgtttgaagcccgagaaatgtcagtggccggattcaagtcgccactgtactaacccgggctttccacgggtctgcccggtgtcgctggaacccccggagctaagcagcgagcccttcctgtag

SEQ ID NO: 105553 - DNA, 663 bp, Artificial Sequence
  derived and/or modified sequence
atgtctgctgctggggccggggccggcgtggaggccggcttcagcagcgaggagctgctgagcctgcgcttccccctgcaccgggcctgcagagatggagacctggccaccctgtgcagcctgctgcagcagacccctcatgcccacctggcctctgaagattccttctacggctggacccctgtgcactgggccgcccactttgggaagctggagtgcctggtgcagctggtgcgggccggggccaccctgaatgtgtccaccaccaggtatgcccagaccccagcccacatcgccgcctttggaggccacccccagtgcctggtgtggctgatccaggccggggccaacatcaacaagccagactgtgagggggagacccccatccacaaggccgcccggagcggcagcctggagtgcatcagcgccctggtggccaatggagcccacgtggagttcatcagccagagctctgtgcacagctgcctgcccggggagctgcagcacggcgtgacctttgaccccagcgtgctgatccagtgcctgaagccagagaagtgccagtggccagacagcagccgccactgcaccaaccctggcttcccccgggtgtgccctgtgtccctggagcccccagagctgagcagcgagcccttcctgtag

SEQ ID NO: 105554 - DNA, 663 bp, Artificial Sequence
  derived and/or modified sequence
atgagcgccgccggcgccggcgccggcgtggaggccggcttcagctccgaggagttgctgagtcttaggttccccctgcatagggcctgcagggacggggacctggccacgctgtgcagtctgctgcagcagacaccccacgcacacctcgctagtgaggattccttctatggttggactccagtgcactgggccgctcattttgggaagctggaatgtttggtccagttggtgcgggcaggcgcaacactgaacgtatcgactactaggtacgcccaaaccccagcccacattgcagcttttgggggacatccccagtgcctcgtatggttgatccaggctggtgctaacataaataagccagattgcgaaggcgagaccccaattcacaaggcggctagaagtggatcactcgagtgcatttctgccttggtggcgaatggagcccatgtggagtttatttcacaatcttctgtccactcttgcctgcccggggagttgcagcacggggtgacatttgatcccagcgtactgattcagtgtctgaagcccgagaagtgtcagtggcccgatagtagtaggcactgcacaaatcctggcttcccgcgagtgtgccccgtgtcactcgaacctccagagctcagcagcgagccctttctgtag

SEQ ID NO: 105555 - DNA, 663 bp, Artificial Sequence
  derived and/or modified sequence
atgtcagccgctggagcaggcgcaggcgtggaggcaggctttagcagtgaagaactcctgtcgctgcgctttccactccacagagcttgcagggatggggacctcgctacactctgcagcctgctgcagcaaaccccccacgcacatttggctagtgaggactccttttatggctggaccccagtccattgggccgcacatttcgggaagttggagtgcctcgttcagttggttagagccggtgcaactctgaatgtaagcaccacccggtatgcgcagacccctgctcacatcgccgctttcggtggccaccctcagtgccttgtgtggctcatccaggccggagctaatataaacaaaccggactgcgagggcgaaacgcccatccacaaagccgcacgctctgggagcttagagtgcatctcggccttagtggccaatggggctcacgtcgaattcatcagccagtcctccgtgcacagttgcctgccaggggagctgcagcacggggtgacatttgatccatccgtcctcatccagtgcctgaagcccgagaaatgccaatggcccgacagttcaaggcactgtacgaatcccggtttcccccgagtgtgccctgtctcactggaaccccctgagctcagctctgagccattcttatag

SEQ ID NO: 105556 - protein, 555 aa, Artificial Sequence
  derived and/or modified sequence
MDFPGPHEKGLVLQELKVEPDNSSQATGEGCGHRLVLSSVSDYFAAMFTSDVCEAKQEEIKMEGIDPNALWDLVQFAYTGCLELKEDTIENLLAAACLLQLPQVVEVCCHFLMKLLHPSNCLGIRAFADAQGCIELMKVAHSYTMENIMEVIRNQEFLLLPAEELHKLLASDDVNVPDEETIFHALMMWVKYDMQSRCNDLSMLLAFIRLPLLPPQILADLENHALFKNDLECQKLILEAMKYHLLPERRTLMQSPRTKPRKSTVGTLYAVGGMDNNKGATTIEKYDLRTNLWIQAGMMNGRRLQFGVAVIDDKLFVIGGRDGLKTLNTVECYNPKTKTWTVLPPMSTHRHGLGVTVLEGPIYAVGGHDGWSYLNTVERWDPQSQQWTFVASMSIARSTVGVAALNGKLYSVGGRDGSSCLSSMEYYDPHTNKWNMCAPMCKRRGGVGVATCDGFLYAVGGHDAPASNHCSRLLDYVERYDPKTDTWTMVAPLSMPRDAVGVCLLGDRLYAVGGYDGQTYLNTMESYDPQTNEWTQMASLNIGRAGACVVVIKQP

SEQ ID NO: 105557 - DNA, 1668 bp, Artificial Sequence
  derived and/or modified sequence
atggatttccctggacctcacgaaaagggattggtcctgcaggaactgaaggtagagcctgataactcctcccaggctactggcgaggggtgcggccatcggttagtgctctcctccgttagcgactacttcgctgctatgttcacatcagacgtgtgtgaggcaaaacaagaggaaattaagatggaagggatcgatcccaatgctctttgggacctggtgcagttcgcctacactggatgcttagaactgaaggaggacacaatcgaaaacctgctggcagcggcttgcctgctgcaactacctcaagtagttgaggtatgttgccacttcctcatgaaactcttgcatccttctaattgtctgggcattcgggctttcgccgacgcacagggttgtatagagctaatgaaagtcgcccacagttatactatggaaaacattatggaggtgattcgtaatcaggaatttctgctccttcccgcagaggagctgcacaaactgctcgcatccgatgacgttaatgtgcccgatgaagaaactatttttcatgccctcatgatgtgggtcaaatatgatatgcagtctcggtgtaacgacctgtccatgctgttggcgttcattcgacttcccctgctaccacctcaaatcctggccgatctcgaaaatcatgcattgttcaagaatgacctggagtgccaaaaattgatcctcgaggccatgaagtaccacctcctgccggagcggcgtaccctgatgcagtccccacggactaagcctcggaagagtaccgtgggcaccctgtacgccgttgggggcatggacaataataaaggggcgacaaccattgagaagtatgacctgcgtacgaacctgtggattcaggcaggaatgatgaatggcaggaggctccagttcggggtcgcagttatcgacgacaagctctttgtcatcggcggtcgagatggacttaaaaccttgaatactgtcgagtgctacaatccaaagaccaaaacctggacggtgcttcctccaatgtctactcaccgacacggactgggcgtcacagtactcgagggccccatttacgccgttggtggacatgatggatggtcgtacctgaataccgtggagcgctgggatccccagagccagcagtggactttcgtcgcatctatgtcaatcgccaggagcaccgttggcgtggccgcactgaacggaaagttgtactctgtggggggaagggacgggtcctcttgtctctccagcatggagtactatgacccccataccaataagtggaacatgtgtgcacccatgtgcaaaagacgtggcggtgtcggcgtggctacttgcgatggcttcctctatgcagttgggggccatgacgcgcccgcctccaaccactgcagtaggttactagattacgtggaaagatatgacccgaagacagacacgtggacaatggtggcccctctgagtatgcctcgagacgccgtgggagtttgccttctgggggaccgactgtacgccgtcggcggctatgatggacagacctatttgaataccatggagagctatgaccctcagactaacgagtggacacagatggcctccctcaatatcgggagagccggagcctgcgtggtcgtcatcaagcaaccctag

SEQ ID NO: 105558 - DNA, 2137 bp, Artificial Sequence
  derived and/or modified sequence
aaaagacttcgatgtgaagcacattctgcgactccgctggaaactcttcagccacccgtctccttccaccggcggcccggcggggggaggctgcctgcaacaggacggcagtggcagctttgagcactggggacccagccagagtcgcctgctcaaaagccaagagagaagcggtgtgagcactttctggaagaagccttcctcctcttcctcttcatcgtcctccccgtcctcttcctcctcttccttcaatccgctgaatggcaccctgcttccagttgccacgaggctgcagcaaggggctcctgggcagggcactcagcagccagccaggactctcttctacgtggagtcactagaggaggaggtggtgccaggcatggactttcctggaccacacgaaaaagggctggttctgcaagagctcaaagtggagccagacaactctagccaggcaacaggtgaaggatgtggacacaggcttgttctgagttcagtctccgactattttgcggccatgtttacaagtgatgtttgtgaagccaagcaagaggagatcaaaatggaaggcatagaccccaatgctctctgggaccttgtccaatttgcatatacaggctgcttggaattaaaagaggacaccattgagaaccttcttgctgcagcgtgccttcttcagcttccacaggtggtggaagtgtgctgccacttcctcatgaagcttttgcatccatctaactgtttaggaattcgagccttcgcagatgctcaaggatgcattgagttaatgaaggtggcccacagctacacaatggaaaacataatggaagttatcagaaatcaagagtttttactccttccagctgaggagctccataaactactggccagtgatgatgtcaatgttcctgatgaagaaaccatcttccatgcattgatgatgtgggtcaagtatgacatgcagagtagatgcaatgacctgagcatgcttcttgcctttataagactgccactgcttccaccacagatattggctgacctagaaaatcatgcattatttaagaatgatctggaatgtcaaaagctgattctagaagcaatgaaataccatctattgccagaaagaagaactttaatgcaaagtccgagaactaaacccagaaaatctacagtcggaactttgtatgctgtaggaggaatggataacaacaaaggagctacaactatagagaaatatgatctgagaacaaatctgtggatccaggcagggatgatgaatggcagaaggctgcagtttggtgtggctgttattgatgacaaactctttgtaattggaggtcgagatggcttaaagacattgaacactgttgaatgttacaatcccaaaaccaagacatggactgtcttaccaccaatgtcaacacacagacatggtctaggtgtaacagtacttgaaggccctatttatgctgtgggaggccatgatggctggagctatctgaatacagtggaaaggtgggatccacagagtcaacaatggacatttgtagccagtatgtcaattgctcggagcacagttggtgtagcagcattgaatggcaagttgtattcagttggaggtcgtgatggaagttcctgtttgagttcaatggaatattatgatcctcatacaaataagtggaacatgtgtgctcccatgtgtaagaggagagggggtgtcggagtggccacatgtgacggttttctttatgcagtaggaggtcatgatgctcctgcttcaaatcactgttcccggctactggattatgtagaaagatatgatcccaaaacagacacttggaccatggtggctcctttgagtatgcccagagatgctgttggggtctgtctccttggtgacagattatatgctgttggtggctatgatggacagacatacctcaacactatggaatcctatgacccacaaactaatgagtggacacagatggcttccttgaatattgggagagcaggtgcctgtgtggtagtcatcaagcaaccttgacttattgatattttacttggaaagattttacttgctggagtggttatttttatattgaatggcaagaatgagaacttccagagatgaaaa

SEQ ID NO: 105559 - DNA, 1668 bp, Artificial Sequence
  derived and/or modified sequence
atggacttccctggcccccatgagaagggcctggtgctgcaggagctgaaggtggagccagacaacagcagccaggccactggagagggctgcggccaccggctggtgctgagctctgtgtctgactactttgctgccatgttcaccagtgatgtgtgtgaggccaagcaggaggagatcaagatggagggcatcgaccccaatgccctgtgggacctggtgcagtttgcctacacaggctgcctggagctgaaggaggacaccatcgagaacctgctggccgccgcctgcctgctgcagctgccccaggtggtggaggtgtgctgccacttcctgatgaagctgctgcaccccagcaactgcctgggcatccgggcctttgctgatgcccagggctgcatcgagctgatgaaggtggcccacagctacaccatggagaacatcatggaggtgatccggaaccaggagttcctgctgctgcctgctgaggagctgcacaagctgctggccagtgatgatgtgaatgtgcctgatgaggagaccatcttccacgccctgatgatgtgggtgaagtatgacatgcagagccgctgcaatgacctgtccatgctgctggccttcatccggctgcccctgctgcccccccagatcctggccgacctggagaaccacgccctcttcaagaatgacctggagtgccagaagctgatcctggaggccatgaagtaccacctgctgcctgagaggaggaccctgatgcagagccccaggaccaagcccaggaagagcacagtgggcaccctgtatgctgtgggcggcatggacaacaacaagggggccaccaccatcgagaagtatgacctgcggaccaacctgtggatccaggccggcatgatgaatggccggcggctgcagtttggagtggccgtgattgatgacaagctgtttgtgattggaggaagagatggcctgaagaccctgaacacagtggagtgctacaaccccaagaccaagacctggacagtgctgccccccatgagcacccacagacatggcctgggcgtgacagtgctggagggccccatctatgctgtgggcggccatgatggctggagctacctgaacacagtggagcgctgggacccccagagccagcagtggacctttgtggcctccatgagcatcgcccggagcacagtgggcgtggccgccctgaatggcaagctgtacagcgtgggcggcagagatggcagcagctgcctgagctccatggagtactatgacccccacaccaacaagtggaacatgtgtgcccccatgtgcaagagaagaggaggagtgggcgtggccacctgtgatggcttcctgtatgctgtgggcggccatgatgccccagccagcaaccactgcagccggctgctggactatgtggagagatatgaccccaagacagacacctggaccatggtggcccccctgtccatgcccagagatgctgtgggcgtgtgcctgctgggggaccggctgtatgctgtgggcggctatgatggccagacctacctgaacaccatggagagctatgacccccagaccaatgagtggacccagatggccagcctgaacatcggccgggccggggcctgtgtggtggtgatcaagcagccctag

SEQ ID NO: 105560 - DNA, 1668 bp, Artificial Sequence
  derived and/or modified sequence
atggacttccccggcccccacgagaagggcctggtgctgcaggagctaaaagtggaaccagataactctagccaagcgactggtgagggctgcggtcataggttagtcctttctagcgtatctgactactttgccgcaatgttcaccagcgatgtctgcgaagctaaacaggaggagattaaaatggagggaatcgacccaaatgccctatgggatctggtacaattcgcctacactggctgtttagagcttaaggaggatacaatcgaaaatctgcttgcagctgcatgtctcctgcagctgccacaagtggtagaagtctgctgccattttctgatgaagttgctgcacccttcaaactgcctgggcattagagcatttgccgacgcccaggggtgcattgagctgatgaaggttgctcattcatatactatggaaaatatcatggaggtaataaggaaccaagagtttcttctcctccccgcggaggaattacacaagctgctggcctcagatgatgttaacgtgcccgacgaggagaccattttccacgccttgatgatgtgggtgaaatatgacatgcagtcaagatgcaatgatttgtctatgttactggcattcatacgcttgccactcctcccccctcagattttggccgacttagagaatcacgctctctttaaaaatgacctcgaatgccagaagctaatcctggaggctatgaagtatcatttgctgccggaaagaagaacgctcatgcagtctccccggacaaaaccccgcaagtccaccgtgggaaccctctatgctgtagggggaatggataacaataagggcgccaccacaatagagaaatacgatctcagaaccaacctgtggatccaggccgggatgatgaacggacggcgtctgcagttcggtgtcgccgtcattgatgacaagctcttcgtcatcggaggaagagatgggctgaagacactgaataccgttgagtgctacaatcctaaaacaaagacgtggaccgttctcccgcctatgagtacccatagacacggcctgggtgtcactgtactcgagggacctatctatgccgtcggcggacatgacgggtggtcttatttaaacacggtggaaaggtgggatccacagagccaacaatggacgtttgttgctagcatgagtattgctagatccacggtgggtgtcgccgccctgaatggcaaactgtactcagtaggcggtagggatgggagctcttgtttatcctccatggagtattacgatccgcacactaacaaatggaacatgtgcgcccctatgtgcaaacgaaggggcggcgtgggtgtcgctacttgtgatggattcctctatgccgtgggcggccatgatgctcccgcttccaaccactgcagtagactcctggattatgtcgaaagatatgatccgaagacagatacatggacgatggtagctcccctgtcgatgcccagggacgctgttggcgtgtgcctgctgggcgatcggctctacgccgtggggggatacgacggtcaaacctatttgaatacaatggagagctacgaccctcagactaacgaatggactcagatggcatccctcaatattgggcgggctggcgcttgcgttgtagtgataaagcagccgtag

SEQ ID NO: 105561 - DNA, 1668 bp, Artificial Sequence
  derived and/or modified sequence
atggatttcccaggaccccatgaaaaaggattggtactgcaagagcttaaagtcgaacccgataactcgagccaggcaactggcgagggatgcgggcaccggcttgttctctcctctgtgagtgactatttcgcagcgatgttcacgagtgatgtgtgcgaggctaaacaagaggaaatcaagatggaggggatcgaccccaacgcactgtgggatctcgtgcagtttgcctacactggctgcctggagctgaaggaagataccattgagaacttgcttgctgctgcttgtctgctgcagctgccccaggtggtggaggtctgctgtcatttcttgatgaagttgttgcacccttcgaactgcctgggcatacgcgcattcgctgacgcccagggatgcattgagcttatgaaagtagcccattcatataccatggaaaatatcatggaggtcattcgcaatcaagaattcttactgttgcctgctgaggaactgcataaactgctcgccagcgacgacgtaaacgttcctgatgaggaaacaattttccatgccctgatgatgtgggtaaagtatgatatgcagtctaggtgtaatgacctgtctatgctgctcgccttcatcaggctccccctcttaccccctcaaattttagctgacttggagaatcacgccctattcaaaaacgacttggagtgtcagaagcttattttagaagccatgaagtatcacctccttcccgagaggcggacccttatgcaatcgcccaggaccaagccgaggaagtccacagtcggaaccctctatgccgttggcggtatggataacaacaagggggcaaccaccatcgagaaatatgatttacgtacaaatctgtggatacaggccggtatgatgaatggccgtcgcctccagttcggagttgcagtgattgatgacaaactgttcgtgatcgggggtcgggatggactgaaaacacttaataccgtcgagtgctacaatcccaagacaaaaacatggaccgtgttaccccctatgtccactcatcggcacggtcttggagtgactgtcttggaaggcccaatctacgctgtgggaggccacgacggctggtcctacttgaacaccgtggagagatgggacccgcagtctcagcagtggacattcgtggccagtatgagtatagccaggtctactgtaggtgttgccgctctcaacgggaagttatattccgtgggaggacgcgatgggtcctcgtgcctcagctccatggaatactacgaccctcatacaaacaaatggaacatgtgtgcgccaatgtgtaagagaagaggaggcgtcggagtcgcaacctgcgatggtttcctgtatgccgtaggaggacacgacgctccggcatccaatcattgcagtagattacttgactacgtggagaggtacgatcccaagacagacacatggacaatggtggcgccactgagcatgcctcgcgatgccgtgggggtttgtctcctgggcgatcggctctatgccgtcggcggttacgatgggcagacatatctgaatactatggagagctatgatccacagaccaacgaatggacacaaatggcgagcctgaacatcggaagggcaggcgcatgtgtggtagtgataaaacagccatag

SEQ ID NO: 105562 - DNA, 1668 bp, Artificial Sequence
  derived and/or modified sequence
atggacttccccggcccccacgagaagggcctggtgctgcaggagctgaaggtggagcccgacaacagcagccaggccaccggcgagggctgcggccacagactggtgctgagcagcgtgagcgactacttcgccgccatgttcaccagcgacgtgtgcgaggccaagcaggaggagatcaagatggagggcatcgaccccaacgccctgtgggacctggtgcagttcgcctacaccggctgcctggagctgaaggaggacaccatcgagaacctgctggccgccgcctgcctgctgcagctgccccaggtggtggaggtgtgctgccacttcctgatgaagctgctgcaccccagcaactgcctgggcatcagagccttcgccgacgcccagggctgcatcgagctgatgaaggtggcccacagctacaccatggagaacatcatggaggtgatcagaaaccaggagttcctgctgctgcccgccgaggagctgcacaagctgctggccagcgacgacgtgaacgtgcccgacgaggagaccatcttccacgccctgatgatgtgggtgaagtacgacatgcagagcagatgcaacgacctgagcatgctgctggccttcatcagactgcccctgctgcccccccagatcctggccgacctggagaaccacgccctgttcaagaacgacctggagtgccagaagctgatcctggaggccatgaagtaccacctgctgcccgagagaagaaccctgatgcagagccccagaaccaagcccagaaagagcaccgtgggcaccctgtacgccgtgggcggcatggacaacaacaagggcgccaccaccatcgagaagtacgacctgagaaccaacctgtggatccaggccggcatgatgaacggcagaagactgcagttcggcgtggccgtgatcgacgacaagctgttcgtgatcggcggcagagacggcctgaagaccctgaacaccgtggagtgctacaaccccaagaccaagacctggaccgtgctgccccccatgagcacccacagacacggcctgggcgtgaccgtgctggagggccccatctacgccgtgggcggccacgacggctggagctacctgaacaccgtggagagatgggacccccagagccagcagtggaccttcgtggccagcatgagcatcgccagaagcaccgtgggcgtggccgccctgaacggcaagctgtacagcgtgggcggcagagacggcagcagctgcctgagcagcatggagtactacgacccccacaccaacaagtggaacatgtgcgcccccatgtgcaagagaagaggcggcgtgggcgtggccacctgcgacggcttcctgtacgccgtgggcggccacgacgcccccgccagcaaccactgcagcagactgctggactacgtggagagatacgaccccaagaccgacacctggaccatggtggcccccctgagcatgcccagagacgccgtgggcgtgtgcctgctgggcgacagactgtacgccgtgggcggctacgacggccagacctacctgaacaccatggagagctacgacccccagaccaacgagtggacccagatggccagcctgaacatcggcagagccggcgcctgcgtggtggtgatcaagcagccctag

SEQ ID NO: 105563 - protein, 652 aa, Artificial Sequence
  derived and/or modified sequence
MGCCSSASSAAQSSKREWKPLEDRSCTDIPWLLLFILFCIGMGFICGFSIATGAAARLVSGYDSYGNICGQKNTKLEAIPNSGMDHTQRKYVFFLDPCNLDLINRKIKSVALCVAACPRQELKTLSDVQKFAEINGSALCSYNLKPSEYTTSPKSSVLCPKLPVPASAPIPFFHRCAPVNISCYAKFAEALITFVSDNSVLHRLISGVMTSKEIILGLCLLSLVLSMILMVIIRYISRVLVWILTILVILGSLGGTGVLWWLYAKQRRSPKETVTPEQLQIAEDNLRALLIYAISATVFTVILFLIMLVMRKRVALTIALFHVAGKVFIHLPLLVFQPFWTFFALVLFWVYWIMTLLFLGTTGSPVQNEQGFVEFKISGPLQYMWWYHVVGLIWISEFILACQQMTVAGAVVTYYFTRDKRNLPFTPILASVNRLIRYHLGTVAKGSFIITLVKIPRMILMYIHSQLKGKENACARCVLKSCICCLWCLEKCLNYLNQNAYTATAINSTNFCTSAKDAFVILVENALRVATINTVGDFMLFLGKVLIVCSTGLAGIMLLNYQQDYTVWVLPLIIVCLFAFLVAHCFLSIYEMVVDVLFLCFAIDTKYNDGSPGREFYMDKVLMEFVENSRKAMKEAGKGGVADSRELKPMIK

SEQ ID NO: 105564 - protein, 654 aa, Artificial Sequence
  derived and/or modified sequence
MGCCSSASSAAQSSKREWKPLEDRSCTDIPWLLLFILFCIGMGFICGFSIATGAAARLVSGYDSYGNICGQKNTKLEAIPNSGMDHTQRKYVFFLDPCNLDLINRKIKSVALCVAACPRQELKTLSDVQKFAEINGSALCSYNLKPSEYTTSPKSSVLCPKLPVPASAPIPFFHRCAPVNISCYAKFAEALITFVSDNSVLHRLISGVMTSKEIILGLCLLSLVLSMILMVIIRYISRVLVWILTILVILGSLGGTGVLWWLYAKQRRSPKETVTPEQLQIAEDNLRALLIYAISATVFTVILFLIMLVMRKRVALTIALFHVAGKVFIHLPLLVFQPFWTFFALVLFWVYWIMTLLFLGTTGSPVQNEQGFVEFKISGPLQYMWWYHVVGLIWISEFILACQQMTVAGAVVTYYFTRDKRNLPFTPILASVNRLIRYHLGTVAKGSFIITLVKIPRMILMYIHSQLKGKENACARCVLKSCICCLWCLEKCLNYLNQNAYTATAINSTNFCTSAKDAFVILVENALRVATINTVGDFMLFLGKVLIVCSTGLAGIMLLNYQQDYTVWVLPLIIVCLFAFLVAHCFLSIYEMVVDVLFLCFAIDTKYNDGSPGREFYMDKVLMEFVENSRKAMKEAGKGGVADSRELKPMLKKR

SEQ ID NO: 105565 - DNA, 1959 bp, Artificial Sequence
  derived and/or modified sequence
atgggctgctgcagcagcgccagcagcgccgcccagagcagcaagagagagtggaagcccctggaggacagaagctgcaccgacatcccctggctgctgctgttcatcctgttctgcatcggcatgggcttcatctgcggcttcagcatcgccaccggcgccgccgccagactggtgagcggctacgacagctacggcaacatctgcggccagaagaacaccaagctggaggccatccccaacagcggcatggaccacacccagagaaagtacgtgttcttcctggacccctgcaacctggacctgatcaacagaaagatcaagagcgtggccctgtgcgtggccgcctgccccagacaggagctgaagaccctgagcgacgtgcagaagttcgccgagatcaacggcagcgccctgtgcagctacaacctgaagcccagcgagtacaccaccagccccaagagcagcgtgctgtgccccaagctgcccgtgcccgccagcgcccccatccccttcttccacagatgcgcccccgtgaacatcagctgctacgccaagttcgccgaggccctgatcaccttcgtgagcgacaacagcgtgctgcacagactgatcagcggcgtgatgaccagcaaggagatcatcctgggcctgtgcctgctgagcctggtgctgagcatgatcctgatggtgatcatcagatacatcagcagagtgctggtgtggatcctgaccatcctggtgatcctgggcagcctgggcggcaccggcgtgctgtggtggctgtacgccaagcagagaagaagccccaaggagaccgtgacccccgagcagctgcagatcgccgaggacaacctgagagccctgctgatctacgccatcagcgccaccgtgttcaccgtgatcctgttcctgatcatgctggtgatgagaaagagagtggccctgaccatcgccctgttccacgtggccggcaaggtgttcatccacctgcccctgctggtgttccagcccttctggaccttcttcgccctggtgctgttctgggtgtactggatcatgaccctgctgttcctgggcaccaccggcagccccgtgcagaacgagcagggcttcgtggagttcaagatcagcggccccctgcagtacatgtggtggtaccacgtggtgggcctgatctggatcagcgagttcatcctggcctgccagcagatgaccgtggccggcgccgtggtgacctactacttcaccagagacaagagaaacctgcccttcacccccatcctggccagcgtgaacagactgatcagataccacctgggcaccgtggccaagggcagcttcatcatcaccctggtgaagatccccagaatgatcctgatgtacatccacagccagctgaagggcaaggagaacgcctgcgccagatgcgtgctgaagagctgcatctgctgcctgtggtgcctggagaagtgcctgaactacctgaaccagaacgcctacaccgccaccgccatcaacagcaccaacttctgcaccagcgccaaggacgccttcgtgatcctggtggagaacgccctgagagtggccaccatcaacaccgtgggcgacttcatgctgttcctgggcaaggtgctgatcgtgtgcagcaccggcctggccggcatcatgctgctgaactaccagcaggactacaccgtgtgggtgctgcccctgatcatcgtgtgcctgttcgccttcctggtggcccactgcttcctgagcatctacgagatggtggtggacgtgctgttcctgtgcttcgccatcgacaccaagtacaacgacggcagccccggcagagagttctacatggacaaggtgctgatggagttcgtggagaacagcagaaaggccatgaaggaggccggcaagggcggcgtggccgacagcagagagctgaagcccatgatcaagtag

SEQ ID NO: 105566 - DNA, 1965 bp, Artificial Sequence
  derived and/or modified sequence
atgggctgctgcagcagcgccagcagcgccgcccagagcagcaagagagagtggaagcccctggaggacagaagctgcaccgacatcccctggctgctgctgttcatcctgttctgcatcggcatgggcttcatctgcggcttcagcatcgccaccggcgccgccgccagactggtgagcggctacgacagctacggcaacatctgcggccagaagaacaccaagctggaggccatccccaacagcggcatggaccacacccagagaaagtacgtgttcttcctggacccctgcaacctggacctgatcaacagaaagatcaagagcgtggccctgtgcgtggccgcctgccccagacaggagctgaagaccctgagcgacgtgcagaagttcgccgagatcaacggcagcgccctgtgcagctacaacctgaagcccagcgagtacaccaccagccccaagagcagcgtgctgtgccccaagctgcccgtgcccgccagcgcccccatccccttcttccacagatgcgcccccgtgaacatcagctgctacgccaagttcgccgaggccctgatcaccttcgtgagcgacaacagcgtgctgcacagactgatcagcggcgtgatgaccagcaaggagatcatcctgggcctgtgcctgctgagcctggtgctgagcatgatcctgatggtgatcatcagatacatcagcagagtgctggtgtggatcctgaccatcctggtgatcctgggcagcctgggcggcaccggcgtgctgtggtggctgtacgccaagcagagaagaagccccaaggagaccgtgacccccgagcagctgcagatcgccgaggacaacctgagagccctgctgatctacgccatcagcgccaccgtgttcaccgtgatcctgttcctgatcatgctggtgatgagaaagagagtggccctgaccatcgccctgttccacgtggccggcaaggtgttcatccacctgcccctgctggtgttccagcccttctggaccttcttcgccctggtgctgttctgggtgtactggatcatgaccctgctgttcctgggcaccaccggcagccccgtgcagaacgagcagggcttcgtggagttcaagatcagcggccccctgcagtacatgtggtggtaccacgtggtgggcctgatctggatcagcgagttcatcctggcctgccagcagatgaccgtggccggcgccgtggtgacctactacttcaccagagacaagagaaacctgcccttcacccccatcctggccagcgtgaacagactgatcagataccacctgggcaccgtggccaagggcagcttcatcatcaccctggtgaagatccccagaatgatcctgatgtacatccacagccagctgaagggcaaggagaacgcctgcgccagatgcgtgctgaagagctgcatctgctgcctgtggtgcctggagaagtgcctgaactacctgaaccagaacgcctacaccgccaccgccatcaacagcaccaacttctgcaccagcgccaaggacgccttcgtgatcctggtggagaacgccctgagagtggccaccatcaacaccgtgggcgacttcatgctgttcctgggcaaggtgctgatcgtgtgcagcaccggcctggccggcatcatgctgctgaactaccagcaggactacaccgtgtgggtgctgcccctgatcatcgtgtgcctgttcgccttcctggtggcccactgcttcctgagcatctacgagatggtggtggacgtgctgttcctgtgcttcgccatcgacaccaagtacaacgacggcagccccggcagagagttctacatggacaaggtgctgatggagttcgtggagaacagcagaaaggccatgaaggaggccggcaagggcggcgtggccgacagcagagagctgaagcccatgctgaagaagagatag

SEQ ID NO: 105567 - DNA, 1959 bp, Artificial Sequence
  derived and/or modified sequence
atgggttgctgctccagcgcaagctccgccgcacagagcagtaaaagggagtggaaacccctggaagacaggtcctgtacagatatcccctggttgttgttgttcatcttattctgcatcggcatgggctttatctgcggctttagtattgctaccggcgctgccgctcgcctggtgtccggatacgacagttacggcaacatctgcggacaaaagaatacgaaactagaggcgatcccgaactcaggcatggaccacacccagcggaagtatgtctttttcctggatccatgcaatctagatttgataaatagaaagataaagagcgttgcactgtgcgttgctgcatgtcctcggcaggagttaaaaactctgtcagacgtgcaaaagtttgcagagataaatggctctgcactgtgcagttacaatctgaagccctccgaatatacaacaagccctaagtcgagtgtgctgtgcccaaaacttcccgtgccagcgtctgcccccataccatttttccaccgatgcgcgccagttaatatttcctgctacgcaaagttcgccgaggctctcatcaccttcgtgtcggacaacagcgtcctgcatcgtctcatatctggcgttatgacaagcaaagagatcattctgggtttgtgtctactctccctcgtgctctcaatgatcctaatggtgataattcgctacatctccagggtccttgtgtggatcctcacaatcctggtcatcctgggatcattgggcgggacgggggtactatggtggctctatgccaagcagagaaggagccccaaggaaacagtgaccccagagcagttacagattgctgaggacaacctcagggcactgcttatatacgccataagcgccaccgtctttaccgtgatactgttcctcatcatgctggttatgaggaaacgggtggctcttactatagcattgttccacgtggccggaaaagtgtttatccatttgcccttgttagtgtttcagcctttttggacattcttcgcgctggtcttattctgggtgtactggataatgaccctcctcttcctggggacaacaggctcgcctgtccagaacgagcaggggttcgtggaatttaaaataagtgggccactgcaatatatgtggtggtatcatgtggtgggtttaatctggatttcggaatttatactcgcctgccagcagatgaccgtagccggagccgtggttacctattattttactagggacaaacggaatcttccatttacacctatcctggccagcgtgaatagactgattaggtaccatctgggtaccgtcgctaaaggcagctttattataacgcttgtaaaaatcccgcgtatgatcctgatgtatatccatagccagctgaagggcaaagagaatgcttgtgctaggtgcgtgctgaaaagttgcatctgttgtctttggtgtttggaaaaatgtttgaactaccttaaccaaaatgcatatactgcgacggcaataaactccactaatttttgtacctccgctaaagacgccttcgtaatcttggtggaaaacgccttaagggtggcgacaattaacacagtcggtgattttatgctcttcctcggcaaagtcctgatcgtctgctccactggattggccggtatcatgcttttgaattatcagcaggattatacagtgtgggtcctcccattgatcattgtctgcctcttcgcgtttctagttgcccattgcttcttatcgatatatgaaatggtggttgacgtactctttctgtgcttcgccatcgacaccaagtacaatgacggcagcccaggaagggagttttatatggacaaagttttgatggaattcgtggagaattcgagaaaagccatgaaagaggctggaaaaggcggtgttgctgactcacgtgaattgaaacctatgatcaaatag

SEQ ID NO: 105568 - DNA, 1965 bp, Artificial Sequence
  derived and/or modified sequence
atgggctgttgtagctctgcttcgtccgctgcacagagctcgaaaagagagtggaaaccattggaagatcggtcttgcactgacatcccatggctgctgctgtttattttgttctgcatcggaatgggttttatctgcggattctctatcgccaccggagctgcggcaagactcgtaagcggctatgattcctacggtaacatctgcggtcagaaaaatacaaagctcgaggctattcccaattcaggaatggatcatacccagagaaaatatgtgttttttttagatccctgcaacctggacctgattaatagaaagatcaaaagcgtggccctgtgtgttgccgcttgtcccagacaagaattgaaaacacttagcgatgtacagaagtttgcggagattaacggctctgctctttgttcatataatctcaaacccagcgagtatacaacttctccaaaaagttccgtactctgccctaaactgcccgtgcctgcgtctgcacccattcccttttttcataggtgcgctcccgtaaatatctcatgttacgccaagtttgccgaggctttgattactttcgtctccgataatagtgtcttgcatcgcctcatcagtggagtcatgacgtccaaagaaatcatccttgggctgtgtctgctcagcctagtcctttcaatgattctgatggtgattattcgctacatcagtcgtgtgctggtttggatcttgactatcctggtgattttggggagccttggcggcactggtgtgctctggtggctgtatgctaagcagcggcgttctccaaaagaaacagtgacacctgagcaactgcagatcgccgaggacaatctgagagccctcctgatctatgcaatatcagccactgttttcaccgtgatcttattccttatcatgctggttatgcgaaagcgggtcgcccttaccatcgccttgttccatgttgccggtaaggtgttcattcacctgcccctcctggtcttccagcccttctggaccttcttcgccctagtgttgttttgggtgtattggattatgaccttgctattcttgggaaccaccggaagtcctgttcagaatgaacaaggattcgttgagttcaaaatttcgggacctttgcaatacatgtggtggtatcacgtggtcggcctgatctggatttctgagttcatcttggcttgtcagcaaatgacagtagctggagcagtcgtaacgtattactttacccgggacaagcggaatttgccatttaccccaatactggccagtgtgaacagactcatcaggtatcatcttgggacagtcgccaaaggcagtttcattattaccctcgtcaaaatacccaggatgatactgatgtacatccattcccagctcaaaggtaaagagaacgcgtgtgctcggtgcgtactgaagtcctgtatctgttgcctgtggtgcctggagaaatgcctcaactatctgaatcagaatgcctacacagcgaccgcgattaactccacaaatttttgcacgagtgcaaaggacgcattcgtgatcctcgtcgagaacgccttgcgcgttgctacaatcaatacggtgggagacttcatgctgttcctgggaaaggtcctcatagtgtgctctaccggcctcgccggcattatgctgctgaactaccagcaggattacactgtttgggtgctcccacttataatagtgtgtttatttgcttttctcgtggctcactgttttctgagcatctacgaaatggtggtagatgtcctgtttctttgctttgctatcgacacaaaatacaatgatggtagtccaggccgggagttttatatggacaaagtgcttatggaattcgtggagaattctcgaaaagctatgaaggaggccggcaaagggggtgtcgcggattctcgggagctcaaacctatgctgaaaaagagatag

SEQ ID NO: 105569 - DNA, 1959 bp, Artificial Sequence
  derived and/or modified sequence
atgggctgctgcagcagcgccagcagcgctgcccagagcagcaagcgggagtggaagcccctggaggacaggagctgcacagacatcccctggctgctgctcttcatcctcttctgcatcggcatgggcttcatctgtggcttcagcatcgccaccggggctgctgcccggctggtgtctggctatgacagctatggcaacatctgtggccagaagaacaccaagctggaggccatccccaacagcggcatggaccacacccagaggaaatatgtgttcttcctggacccctgcaacctggacctgatcaacaggaagatcaagtctgtggccctgtgtgtggccgcctgcccccggcaggagctgaagaccctgagtgatgtgcagaagtttgctgagatcaatggaagtgccctgtgcagctacaacctgaagcccagcgagtacaccaccagccccaagagctctgtgctgtgccccaagctgcctgtgcctgccagcgcccccatccccttcttccaccgctgtgcccctgtgaacatcagctgctacgccaagtttgctgaggccctgatcacctttgtgtctgacaacagcgtgctgcacaggctcatcagcggcgtgatgaccagcaaggagatcatcctgggcctgtgcctgctgagcctggtgctgtccatgatcctgatggtgatcatccgctacatcagccgggtgctggtgtggatcctgaccatcctggtgatcctgggcagcctgggcggcaccggggtgctgtggtggctgtatgccaagcagaggaggagccccaaggagaccgtgaccccagagcagctgcagattgctgaggacaacctgcgggccctgctgatctatgccatcagcgccaccgtcttcaccgtcatcctcttcctgatcatgctggtgatgaggaagagggtggccctgaccatcgccctcttccacgtggccggcaaggtgttcatccacctgcccctgctggtgttccagcccttctggaccttctttgccctggtgctcttctgggtgtactggatcatgaccctgctcttcctgggcaccaccggcagccctgtgcagaatgagcagggctttgtggagttcaagatcagcggccccctgcagtacatgtggtggtaccacgtggtgggcctcatctggatcagcgagttcatcctggcctgccagcagatgacagtggccggggctgtggtgacctactacttcacccgggacaagaggaacctgcccttcacccccatcctggcctctgtgaacagactcatccgctaccacctgggcaccgtggccaagggcagcttcatcatcaccctggtgaagatccccaggatgatcctgatgtacatccacagccagctgaagggcaaggaaaatgcctgtgcccgctgtgtgctgaagagctgcatctgctgcctgtggtgcctggagaagtgcctgaactacctgaaccagaatgcctacacagccacagccatcaacagcaccaacttctgcaccagcgccaaggatgcctttgtgatcctggtggagaatgccctgcgggtggccaccatcaacacagtgggggacttcatgctgttcctgggcaaggtgctgattgtgtgcagcacaggcctggccggcatcatgctgctgaactaccagcaggactacacagtgtgggtgctgcccctcatcatcgtgtgcctgtttgccttcctggtggcccactgcttcctgagcatctatgagatggtggtggatgtgctcttcctgtgctttgccatcgacaccaagtacaatgatggcagccctggccgggagttctacatggacaaggtgctgatggagtttgtggagaacagcaggaaggccatgaaggaggccggcaagggcggcgtggccgacagccgggagctgaagcccatgatcaagtag

SEQ ID NO: 105570 - DNA, 1965 bp, Artificial Sequence
  derived and/or modified sequence
atgggctgctgcagcagcgccagcagcgctgcccagagcagcaagcgggagtggaagcccctggaggacaggagctgcacagacatcccctggctgctgctcttcatcctcttctgcatcggcatgggcttcatctgtggcttcagcatcgccaccggggctgctgcccggctggtgtctggctatgacagctatggcaacatctgtggccagaagaacaccaagctggaggccatccccaacagcggcatggaccacacccagaggaaatatgtgttcttcctggacccctgcaacctggacctgatcaacaggaagatcaagtctgtggccctgtgtgtggccgcctgcccccggcaggagctgaagaccctgagtgatgtgcagaagtttgctgagatcaatggaagtgccctgtgcagctacaacctgaagcccagcgagtacaccaccagccccaagagctctgtgctgtgccccaagctgcctgtgcctgccagcgcccccatccccttcttccaccgctgtgcccctgtgaacatcagctgctacgccaagtttgctgaggccctgatcacctttgtgtctgacaacagcgtgctgcacaggctcatcagcggcgtgatgaccagcaaggagatcatcctgggcctgtgcctgctgagcctggtgctgtccatgatcctgatggtgatcatccgctacatcagccgggtgctggtgtggatcctgaccatcctggtgatcctgggcagcctgggcggcaccggggtgctgtggtggctgtatgccaagcagaggaggagccccaaggagaccgtgaccccagagcagctgcagattgctgaggacaacctgcgggccctgctgatctatgccatcagcgccaccgtcttcaccgtcatcctcttcctgatcatgctggtgatgaggaagagggtggccctgaccatcgccctcttccacgtggccggcaaggtgttcatccacctgcccctgctggtgttccagcccttctggaccttctttgccctggtgctcttctgggtgtactggatcatgaccctgctcttcctgggcaccaccggcagccctgtgcagaatgagcagggctttgtggagttcaagatcagcggccccctgcagtacatgtggtggtaccacgtggtgggcctcatctggatcagcgagttcatcctggcctgccagcagatgacagtggccggggctgtggtgacctactacttcacccgggacaagaggaacctgcccttcacccccatcctggcctctgtgaacagactcatccgctaccacctgggcaccgtggccaagggcagcttcatcatcaccctggtgaagatccccaggatgatcctgatgtacatccacagccagctgaagggcaaggaaaatgcctgtgcccgctgtgtgctgaagagctgcatctgctgcctgtggtgcctggagaagtgcctgaactacctgaaccagaatgcctacacagccacagccatcaacagcaccaacttctgcaccagcgccaaggatgcctttgtgatcctggtggagaatgccctgcgggtggccaccatcaacacagtgggggacttcatgctgttcctgggcaaggtgctgattgtgtgcagcacaggcctggccggcatcatgctgctgaactaccagcaggactacacagtgtgggtgctgcccctcatcatcgtgtgcctgtttgccttcctggtggcccactgcttcctgagcatctatgagatggtggtggatgtgctcttcctgtgctttgccatcgacaccaagtacaatgatggcagccctggccgggagttctacatggacaaggtgctgatggagtttgtggagaacagcaggaaggccatgaaggaggccggcaagggcggcgtggccgacagccgggagctgaagcccatgctgaagaagaggtag

SEQ ID NO: 105571 - DNA, 1959 bp, Artificial Sequence
  derived and/or modified sequence
atgggctgctgcagcagcgccagcagcgccgcccagagcagcaagcgggagtggaagcctttggaagaccggtcttgtacagacatcccttggctacttctcttcattctcttctgtattgggatggggtttatttgtgggttctcgattgcgacgggagctgccgcgaggcttgtcagtggctacgattcctacggcaacatctgtggccagaagaacactaagctggaagccatacccaactccggcatggaccacacacaaagaaagtatgtcttcttcttagacccctgtaacttagatttgattaataggaagataaaatccgtcgccttgtgtgtggctgcctgcccacgccaggaactgaaaaccctctccgatgtccagaagtttgctgaaatcaacgggtctgctctatgctcctataacctaaaaccttctgagtataccacgagcccaaaatccagcgtgttgtgccccaagctgccagtacctgccagcgcaccaatccccttcttccacagatgcgctcctgtgaatatttcatgttatgccaagttcgccgaagcattgattacgtttgtttcagataatagcgtcctacatcgcttgattagcggcgtgatgacctccaaagagatcatccttgggctgtgcctgctgtctctggtgctttctatgatcctgatggttattataaggtacatatcacgggttcttgtgtggattttgacaattctggtcatactggggtctctcggcgggacaggcgtgttatggtggctgtatgccaagcagcgccggagtccaaaagagacagtgacccccgagcaactccaaattgctgaggacaacctgagagcccttttaatttatgcgatatctgcgacagttttcacagtgatcttgttcctcatcatgcttgtgatgcgcaagagggtggctctgactatcgccctgttccatgtcgccggtaaagtgtttatccacctgccactcctggtcttccagcccttttggactttttttgcgctggttcttttctgggtgtattggatcatgacactgctattcctgggtacaacggggtcccccgtgcagaacgaacagggcttcgtggagttcaaaattagcggcccacttcagtacatgtggtggtaccacgtggtgggcctgatctggatctccgaattcattcttgcctgtcagcagatgaccgtggccggcgctgttgtcacatactattttacacgggacaagcggaatctacccttcacaccgatcctggcatccgtcaaccggctaattcgttaccacttggggaccgtggctaaagggtcttttatcatcacactggtgaaaattccgcgaatgattctaatgtatatccatagccagctcaagggtaaagagaatgcctgcgccagatgcgtactcaagtcttgtatttgttgcctgtggtgtctcgagaagtgcctgaattatttgaatcagaatgcttataccgccacggcaatcaatagtacaaatttttgtaccagcgctaaagacgctttcgtcattcttgtggagaatgcgctgcgggtcgcgacgatcaacactgtgggggattttatgctgtttttgggcaaagttctcattgtctgctccaccggtctcgcgggtattatgctcctcaactaccagcaggattacactgtgtgggtgctgccactaatcatcgtgtgtctttttgccttccttgtggcgcactgctttctctcaatatatgagatggttgtagacgtgctgtttctgtgttttgctatcgacacaaagtataacgacggctcacccggaagagaattttacatggataaagtcctcatggaatttgtggagaacagccgcaaagccatgaaggaagcaggcaagggcggcgtcgccgactctagagaattgaaaccgatgattaagtag

SEQ ID NO: 105572 - DNA, 1965 bp, Artificial Sequence
  derived and/or modified sequence
atgggctgctgcagcagcgccagcagcgccgcccagagcagcaagagagagtggaagcccttggaagaccgatcctgcaccgacatcccttggctgcttttgttcattctgttctgtatcggaatgggctttatttgcggcttctctatcgccaccggcgctgcagccagactagtttccggatatgactcctacggcaacatatgtggccagaagaacactaaactggaggcaattccaaacagtggaatggaccatacacaacgcaagtacgtttttttcctggatccctgcaacctggatctgattaatcggaaaattaaatctgtggcactgtgtgtggcagcttgcccaagacaagaactcaagaccctctcagatgttcagaaatttgctgagattaatggaagcgctctatgttcctacaacctgaagcccagtgagtacaccacctcgcctaagtcctccgtgctctgccctaagctgcccgtgccggcctcagctcccatccccttctttcaccgctgcgcacccgttaacatcagctgttacgccaaatttgccgaagccctgatcactttcgttagtgacaacagcgtcctccatcgccttataagtggcgtgatgacaagtaaggagatcattcttggtctatgcctgctgtctcttgtgctgagcatgattctgatggttatcattaggtatatttccagagtcctggtttggatcctcaccattctcgtgatcttgggatccctgggggggacaggcgtactgtggtggctatatgccaaacagcgccgttcccctaaagaaacagtgactcctgagcagctgcagatcgccgaggataacctccgtgcgcttttgatctatgctatttctgcaacagtttttacggttatactttttcttatcatgctcgtgatgaggaagcgggtggcccttacaattgcactgttccacgtggccggcaaagtgttcatccatctacccctcctcgtcttccagcctttctggacgttttttgccctcgttctgttttgggtctactggatcatgactcttttgttcctcggaacaacaggtagccccgtacagaatgagcagggattcgtggaatttaaaatttctggacccctccagtacatgtggtggtatcacgtggtgggactcatttggatatccgaattcatccttgcttgccagcaaatgaccgtggctggagctgtggtgacgtactactttacaagagataagcggaatttgccattcacaccaattctggcgagcgtgaatcgtctgatcaggtatcatctcgggacagtcgccaaaggcagtttcatcatcaccttagtcaagatcccgaggatgatattgatgtatatacacagtcagctcaaggggaaagaaaacgcttgtgcccgatgtgtgttgaagtcatgtatctgctgtctgtggtgtctggagaaatgcttgaactatttaaaccagaatgcttacacagcaaccgcgatcaattcaacaaacttttgcacaagcgcaaaagatgcatttgtgatcctcgtggagaacgccctccgggtggctactatcaatacagtgggggacttcatgctctttttaggcaaagtgttaatcgtgtgcagtacaggcctggccgggattatgttgctcaattatcagcaggactataccgtttgggtgctgccgttgatcattgtttgtctgttcgccttcttggttgcacactgcttcctgagcatctacgaaatggtcgtggacgtgcttttcctgtgctttgctattgatactaagtacaacgatgggagtcccgggcgggagttctatatggacaaggtcctaatggagttcgtagaaaacagccgcaaagcaatgaaggaggctggcaaaggaggcgtggccgattctcgcgaactgaagccaatgcttaagaagcggtag

SEQ ID NO: 105573 - DNA, 1959 bp, Artificial Sequence
  derived and/or modified sequence
atgggctgttgcagctccgcttcatccgcagcccagtcatccaaaagagagtggaagcctctggaggacagaagttgcaccgacataccatggctactgctatttatactgttttgcatcggcatgggattcatttgcggcttctccatcgctactggagccgctgctcgcctggtgagcgggtacgactcatatgggaacatctgcggccaaaagaataccaagctcgaggcgatccccaacagtggtatggaccacacccaacggaaatatgtgttcttcctggacccctgtaatttagatcttatcaataggaaaattaagtcagttgcactgtgtgtggccgcatgccctagacaggagctcaaaaccttgtcagatgtccaaaagtttgcagagatcaatggcagcgccctgtgttcatacaacctcaagcctagcgagtacaccacatccccaaaatcctcagtgctgtgccccaaactcccagttcccgcaagtgcaccaattcccttctttcaccggtgcgcccctgttaacataagctgttacgctaaatttgccgaggccctgattaccttcgtgagcgacaatagtgtactgcacaggttgatttcaggcgtcatgacatccaaagaaatcatactcggattatgtctgctctcactggttctatctatgatccttatggttataatcaggtatatctccagagtgttggtgtggattctgacaattctggtgattctggggagtttaggcggaaccggcgtgctgtggtggctctatgcaaagcaacgccgatcccctaaggagacagtcaccccggaacagttgcaaatcgccgaggataacctgagagccttgcttatatacgccataagcgccaccgtgtttacagtcatactttttctgataatgctagtgatgcgcaagcgggttgcactgaccattgcgttatttcacgtggccggtaaggtatttatccatctgcccctactggtgttccagcctttctggaccttcttcgccttagtgctcttttgggtatattggatcatgacccttctgttcctcgggacgaccggcagtcctgtacagaacgagcagggctttgtggagtttaagatttcaggcccactacagtatatgtggtggtatcatgtcgtgggtctgatttggatttctgagtttatattagcttgtcaacagatgacagtggccggtgctgttgtgacctactatttcaccagggacaagcgcaacttaccttttactcctattcttgcctctgtgaatcggttgattagataccatctgggcaccgtggccaaagggagtttcattatcaccctggtcaaaattccgagaatgatactgatgtacatccacagtcagctgaagggtaaagaaaacgcatgtgccaggtgtgttctcaagagttgcatttgttgcctctggtgccttgaaaaatgtctgaattatctgaaccagaacgcctacaccgccaccgcgattaactctaccaacttctgtacctccgcaaaggatgccttcgttatcctggttgagaatgcattgcgggtcgccaccataaataccgtgggagatttcatgctgttcctcggcaaggtcctcatcgtgtgctccaccggactggccggtattatgcttctcaactaccagcaggactataccgtgtgggtgttgcccctgatcatcgtgtgtctgttcgccttcctggtggcacattgcttcctctctatctacgaaatggtcgtcgacgtgctgtttctgtgcttcgcaatcgacacaaaatacaatgatggctcaccagggagagagttttatatggacaaggtcctgatggagtttgtggaaaacagtagaaaagctatgaaggaggccggaaagggcggagttgccgattccagggaacttaagcccatgataaaatag

SEQ ID NO: 105574 - DNA, 1965 bp, Artificial Sequence
  derived and/or modified sequence
atgggatgttgtagctccgcctcctcagctgcgcagtcctcgaaaagggagtggaagccactcgaggaccgctcatgcacagacataccctggcttttgctcttcatcctgttctgcatcggtatgggtttcatctgtgggttctccatagcaacaggggcagcagccaggctcgtgagtggctatgatagctacggaaatatctgcggccagaaaaatactaagctagaagccattccaaacagtggcatggatcacacgcagagaaaatacgttttctttctggacccttgcaatctcgatctgataaaccgaaaaatcaagtccgtggctctgtgcgtggccgcttgtcccagacaggagctgaaaacactgtcagatgtgcaaaaattcgccgagataaatgggagtgctctttgcagttataaccttaaaccatccgagtatactacttcacctaagtcttcagtcctctgccccaaactgccagtgccagccagcgctcccatcccctttttccacagatgcgcgcctgtgaatatctcatgctatgctaaatttgcagaggctctgatcacattcgtatcggataactcggtgctccatcggctgatcagcggcgttatgacctctaaagaaatcattctaggcctgtgtctattgtccttggttctgagcatgatcctgatggtcattatccgatatatctccagagtgctggtgtggatccttactattcttgttatactgggatctctggggggaaccggggttctttggtggttatacgcgaagcagaggagatcacctaaggaaacggtgacacctgaacagctccagattgccgaagataacctccgggcattgctgatctacgccatcagtgcgaccgtcttcacagtgatcctctttctgatcatgcttgtgatgcgaaagcgagtcgctctgaccatagctttgtttcacgtggcaggtaaggtattcattcatctgccactgctcgtatttcagcctttctggaccttcttcgctctagtgctattctgggtctattggattatgaccctcttgttcctgggaacgaccggtagcccagtgcagaatgaacagggtttcgtcgaatttaagatctccggaccactccagtacatgtggtggtatcacgtcgtggggctgatctggatcagcgagttcatactggcctgccagcagatgacagtggccggagcagtcgtcacgtactattttacccgcgacaagcggaatctccctttcacccccatattagcgtcggtaaatcgtttaatccgttaccacttaggcacggtggctaagggaagttttataattacgcttgtcaagattcctcgcatgatcctcatgtacattcattcacaactgaagggcaaagagaatgcctgtgcacgctgtgtactgaagtcgtgtatctgctgcctatggtgccttgagaaatgtctgaattatctaaaccagaacgcctataccgccactgccattaattctactaatttctgcacaagcgctaaagacgcgtttgtcatcctcgttgaaaacgctctgagagtagccaccatcaataccgtaggagacttcatgctctttctcggaaaggtgctcatcgtttgttccacggggctggccggtatcatgctgctaaactaccagcaggattacacagtgtgggtgctgcctttaatcatcgtatgcctgtttgctttcctggttgcacactgctttttaagcatttacgagatggttgttgatgttctatttctgtgctttgctattgataccaaatacaatgacggttccccaggacgagagttttatatggacaaagttctgatggagtttgtggagaacagccgcaaagcgatgaaagaggctggaaagggaggtgtagctgacagccgtgaattgaagcccatgttgaagaagagatag

SEQ ID NO: 105575 - DNA, 9640 bp, Artificial Sequence
  derived and/or modified sequence
agcagctgctgcagcaggagcagagcaggagacgcgtagccgccgtcgccgccgccgggggatgtggccggcgcctgcctctagccgcgccgcctcttgagtaccagccgccgctgcagccgccgccgccgcctagccgtgcggtgccaggccgcgccctccccgggcgcccgccggctcgcatgccgaggggctccggggcgtagctgcgcgcccggcgccgcctccgggctccttcggccccgccatgggctgctgcagctccgcctcctccgccgcgcagagctccaaacgagaatggaagccgctggaggaccgtagctgcacagacataccatggctgctgctcttcatcctcttctgcattgggatgggatttatttgtggcttttcaatagcaacaggtgcagcagcaagactagtgtcaggatacgacagctatggaaatatctgtgggcagaaaaatacaaagttggaagcaataccaaacagtggcatggaccacacccagcggaagtatgtattctttttggatccatgcaacctggacttgataaaccggaagattaagtctgtagcactgtgtgtagcagcgtgtccaaggcaagaactgaaaactctgagtgatgttcagaagtttgcagagataaatggttcagccctatgtagctacaacctaaagccttctgaatacactacatctccaaaatcttctgttctctgccccaaactaccagttccagcgagtgcacctattccattcttccatcgctgtgctcctgtgaacatttcctgctatgccaagtttgcagaggccctgatcacctttgtcagtgacaatagtgtcttacacaggctgattagtggagtaatgaccagcaaagaaattatattgggactttgcttgttatcactagttctatccatgattttgatggtgataatcaggtatatatcaagagtacttgtgtggatcttaacgattctggtcatactcggttcacttggaggcacaggtgtactatggtggctgtatgcaaagcaaagaaggtctcccaaagaaactgttactcctgagcagcttcagatagctgaagacaatcttcgggccctcctcatttatgccatttcagctacagtgttcacagtgatcttattcctgataatgttggttatgcgcaaacgtgttgctcttaccatcgccttgttccacgtagctggcaaggtcttcattcacttgccactgctagtcttccaacccttctggactttctttgctcttgtcttgttttgggtgtactggatcatgacacttctttttcttggcactaccggcagtcctgttcagaatgagcaaggctttgtggagttcaaaatttctgggcctctgcagtacatgtggtggtaccatgtggtgggcctgatttggatcagtgaatttattctagcatgtcagcagatgacagtggcaggagctgtggtaacatactattttactagggataaaaggaatttgccatttacacctattttggcatcagtaaatcgccttattcgttaccacctaggtacggtggcaaaaggatctttcattatcacattagtcaaaattccgcgaatgatccttatgtatattcacagtcagctcaaaggaaaggaaaatgcttgtgcacgatgtgtgctgaaatcttgcatttgttgcctttggtgtcttgaaaagtgcctaaattatttaaatcagaatgcatacacagccacagctatcaacagcaccaacttctgcacctcagcaaaggatgcctttgtcattctggtggagaatgctttgcgagtggctaccatcaacacagtaggagattttatgttattccttggcaaggtgctgatagtctgcagcacaggtttagctgggattatgctgctcaactaccagcaggactacacagtatgggtgctgcctctgatcatcgtctgcctctttgctttcctagtcgctcattgcttcctgtctatttatgaaatggtagtggatgtattattcttgtgttttgccattgatacaaaatacaatgatgggagccctggcagagaattctatatggataaagtgctgatggagtttgtggaaaacagtaggaaagcaatgaaagaagctggtaagggaggcgtcgctgattccagagagctaaagccgatgattaagtaatgctgggaggaataaagaagggacagaaacatggaacataaagcattgaaaattccggtgcttgggcttcggcttcagagtaacgtcagtggcttagggttaaacggccattttattcaaatgcttgctatacaatctgaaaacacactggcaggtgctcctctccttggcaattcattgagtatccagagttctacgatgtttaactgaagaattggctaatgttttgatcctccagtgtgactgttgtttttgtttgggggtgggtttggggttttttgcttttttattcctgaagcttaccagatatgaatggctaatactccattgttctgcttgttgtaatggtgaatgctttaagaaaaaaaagtgtaatttgctaagaataattcatgatctgtttatgcgataactcctttttgttacaatttttttaaaaaaagctatttttgttaatgtaaagtaaatatttcagagcaaattttttaaacttattgcactaaatacaggctctgtacaaaaaaaaaaaaaaaaaaaaagcctcagcattttatcattccatggaaggagaatcttttgaaagaaagcattgcctcctaccagaactagacagtgaattagatcggtattatggaaatgcatacaagtaatgtcactagggcttaataagcagccgtttgctaatgtgcttcctttcaaagggttggacctttaaattgctgcaaaaggtaaattgtatttttttttaagtattggtgttctttactctagctaggctaaaatttgctaaatgccttggtttcttttaaaagttcatgtaatatttctgatttttcagaatatttgcaataagagtctggattttaaaaaacacatgcatacacacaattaagagctcatgtcttagcaagatctgggaaaccaacattgcgagagtagctattttgaaagaataattctccagaagttaacatctaatatctagtatcaccaaacagtatcgctgttctcttttattcatttgaaatgaatataattatataactaacaattgtccaaatagatgagagagcaaatcatgtgagaaaattcagaataccatctgtttcatagccgcacagattttggactttcacaaacattgggaactaaatttagaattggcaaaagtctagaagatgggtatcaaaacagaagacattccaggagctagcaattttaagaggtgtccctccaaagtgacctgatggaagtcctgaacttggaaattaggttctactcacttggacatccctgcatcatggactgttgctgctccctgttccatatgctcgcaatctcagctatttggaagctaccaggaatgctttctaattatcatttgcaactagaactgtaatcagaaagaaattttgtatttttgtataacttgattgtgtgccattttatataacaggtcctgttttacaaataaattttgttttactaacattgtgtttagaaattataatctatgtgtaaccatgtcatttgagttgcaaattaattgccaggctgttttccttaagtaaattcatgtgccgtgtagaaatatgcagatatgcattacacaggcacacacagagagatatttaatatgtggaatatcactctttcatgagctttattccttgattaatttgataaagcctcacagaggattttaagcaatatttaaatgtgttgaggttatgtttggatattcctgctgcctcttttcattcatttcaagtcattcttcagctagctatgggctgccttattgctattcgctcactgcttccatcttctgcccaagtgagaagaatagatgaagaacagaaatttctctgtgaaatgtggatacccgaataatttcataaatcattgattctatgtggtggtttttgtcttcttctgtggtgaatcttcaaaactgtattcaggactcatatttctagagttttaattggggtcctctattgtcaattgtagtagtgaccagagtatcgtggtttttgccatcagataattaaggctctggtgcataatttagactttctaagctcctgcctgaagaataaggtcttccataatatggaagagaaaagttatatttcagtgtaaatccaagagacccatcttctatgagaggcttaccagtgcattagtaataaaacattagcaatttagctagagcactgagattgtataatccttgcatggatgagcagagctcaaagccagttgttcctttaaagcatttaatgcaatggctaatgtttaggattaaagtttttattttatcctataagataattaagtcctaagtcactacaacttaagtagcttaactgtatgttggtacccaaactttttctataatggttaaggaggaggcacttactgagtttattttaaagttatgctagaaatgtttttcttttgtagagatgctctctctctctctctctttttttttttttttttttttttttttccgtgagggcattaggctgctgattgtaagttatttccaataccactgatcttggtatctgccaagggcttccttgccttccctgggcagttttaggatttcaccctagtagggggtatgaggcactgacccctttattctggacccaaactgctttagagcagagttaatacctctccctccctcttcaaaacagctacaggaactgcaggcaccacatatgtgtgaggccacatcactgcccctgaggcttcaactatttccaccatgcactattactagctactaacagccattttaagagatctcctagcctgcaaggtagaattctgggatcagttccaaaaccagaactgccagtaatggtgacttgaatattttatttgatttttggtcagtaaccttgtcatttaaattggactttccaatagccttaacatggcctctgagaagtttcctccagaaaggtctttaagctttcgcttttcaataagtaagttctttactgcttttctactgctactttaaaaaaaaaacaacaacaacaaataaaactctcagagtctggaggcttatcagtgcacctgccacagttaatttctgtattcttttcatacattccatctgacacatacgagtgcactataatggcttgcctagaactggtaagaagtggtctgtgaatgtatattgaaaaaatgtgggttcataagtaaaagcgtaacgcagatatttgtgtattctgtattcacagcgtaggctgccttttgctttaaatgcatattcatgtatctttgtgtgctaagaatgcatgttagcccttttgaaaagtaggcactattcatacacagtagcttcttggaattaactcatctttgttaacttagtggcacatagtccaaatttttaaaaagcaagacccttgaatatgccaagagaaaatctaaagctagcaaacttaaaaaacaaaacaaaaattacacgtcgtgtacagttatgaatttagaatagcacactttttccattcagatttcatacatttgagccaaattcttatactccatgttttaattttaaaaggataattttaatccaagatttaaatctttgaaaatatctttcttatagaaaactttaatgcagtttttaaacttactgatttctgtggaaaacctttcttttctatagaaatactgtagtgccctttcttcccatcttgattttgtacatgtaaagacaaatgatgattcagtttcaatattgcatgaacaattgccactttgtaaattatatggacagaatgtgttctaaggaaattcgttagtaaatttgtgaaaaacatgtgagattgttcgagacctattaggctattcttcagttttgatgctcagttttacaacttaaatgattttctccaggacacggagctcagaataataaagcttttattaatggtctagtgaagatctagttgaacatggaaacattgtaatttacaaatgtctcagaaatttctcacttttatttgctaagacctgaatttaatatttgatattcaaaaacaagttattttgaagagacaatgggtctctttgagcttaagaaagctatggactatctttccttcaaatgcacatcacatgtctgtgaacactcaaaatgctcatagaatttcagggccctcagacggccagcttccacccctgtaccccctcaggggctaatgaacccaagtcaaaaggctgctctaaagttgttctgataatgtgttttgaaatgaggaagtgattaggcctccactagagatacttttgagatgatgcttaccaccttctgacctggaatcatttttataacttaaagactttatgtaatttagtagcaggttagggaatagaaaccacactaatctgaaggaataacaagatgatcaacactgaatcttcatgacagtaagattttctttccttggaggtatgagggtgtgtatgtgtgtgtgtgtgtgtgtgtgtttgtgtgtgtgtgtgtgtgtcctggcggttatttgggggcaaggtaccagattatttgcagtgagccaaaaaaaaaaaaatatccaagaagaaataaatagggaatccttgtaattaatccatctaccaaaacacttgattctttttattgtagctcagctatgacattatgacattatgtggcttagtgttatcagtatactactgtcttaaaatatatttgtcaacatgtccagttccaacaacagttgaagatgatgataaattagcaaactcaagggtagtccatagttggcaaaaaataaatttggtagaaagttggaggagcagatgctgaaggtagaaatgcaaaagatgttttttcttcctgcataaatcacggaggtgtgttctgttttagtgttttccagtcacccactagagcagcttcagattcctctgccaatagaactccacccccagtcccttacctactctatcttctttagggaagcatgtggatttcttcacatctgcaccttactattaggtaagggtgctgcatctacatggaaggctccctgggcccttgaaaaagcaggcagaaactcatcaaggggtttgaagttcttgtgaaatttgatcccagtggctcatgacttatagtcaggcatcaaaccatttcctactttttcaggctgaagaaagtggaaatataactggctggtgaagaaaggagaaaagtcagccccctaccccaccccacactcctagaaaagtttgggggttttttttgtttgtttttggtgtttttttgagacggagtctcgctctatcgccagcttagagtgcagtggctcaatcttagctcactgcaacctccacctcccaggttcaagtgattctcctgcatcagcctcctgagtagctgggaccacaggcatgtgccaccacacccagctaatttttgtatttttagtagagacggggtttcaccacgttggccaggccaatctcgaactcctgacctcaggtgatccacccgcctcagcctcccaaagtgctgggattacaggcatgagccaccgcgcccggcctagaagagttttaatgaaccttccacagtagtaaatgcagagaccactggtggaaattcccatgttggatagaaaagggcgtaagtccagtctaagtatctaaatgtgatatgcccttttgtcacagaagtgtaagacttaaagggaatattctgaccttcgtgtatgaatctgatccacccatcctgtcagctaggattataatttgaactgtcgtttcaggagcatgtgttaaatcatatgagtaaaaaaaaagtagacattgaaaagaagacttgggaataattgggcagatagaatgggttccatggatcattctagttgccactagaaaatgtgagctccttcttcatttaccatgttgataatccggtggtgactttttttttttttttgtaaattgtattagataccccacaggaatgtgacaataataggatagctttgggggctggtgatttgaaacagggactattaagtagattttcccccatcctctaggttcctgtagtctgtgctcagaacttggtttttggcccctattgtttttgcctattttgattttcagagatgatcacatggggacagttaacttttcttctgctgtgttgccttaatgctactagattgtgttgtgttgttggagttttctgacttcttccctataaaaagatactgagagctccataatgaaagaagttgttatactttctcagaatattctggaccactgaatgcacttctaatagagctttaatctaaagaagttagttcagtggttattaactgattttattacaggagaaaaaaactttaacaaaaaggcagggagaaaagtgtgaagggcatcaagcaaaatgacaggggcttcaaaaaacaaccaaagacaaaaccctatcttctgaagaccaaaggtccaactttacttactggctggcacagcctttctgaactccttgagtttagaatagagctcctagaataataaggcggccaaatttaaagatcagtcaatacagtagggacctgctattgatctctcaggcactgagtcttcacatccagtgtcaagcccagcccagcatatggggtgatatgagcagaaaacacacatcggtgtgtcttgatttctcgcagctgtgtaatgtggcatgagaagtatgttttggtgccacatatttctcaatctgatgcctttttgtctttttttttttttgccatttgcatcctatttcatagtgccaaaatgaatttttgtatcttgtcttgtctttgtccattataaactggaggatcacagttaagccttccatgaattcatagtttggaatcatttaccttaccattattttggatttttttcttattacagtgtcactacactgtattcatgtgggggaacaaacatgtaggtgcttgaacatgccccacagacacagttgtagccctagtatttgtgacggtcattattgacacagtgcagactttgcagatggagcattatgctctcagaggactttaaaaatatgtatattaagcaattaactttctggagttggagttatcaaatcttgctgggaaattaacttccaagagctctgaattggatggaattccatctggcttcagagaacaatcagcctatatgaaacggagctttgaaatgtttttcttgtgcagaaatacgaactagaaagaaaagtgctgatctaatgctaagttttctctgtgtactgactcagttgccagaattataatgaaaactgtattttagtctaacaaatgtatagaattttttatgtaataaataaaattttataggaaagaa

SEQ ID NO: 105576 - DNA, 3088 bp, Artificial Sequence
  derived and/or modified sequence
agcagctgctgcagcaggagcagagcaggagacgcgtagccgccgtcgccgccgccgggggatgtggccggcgcctgcctctagccgcgccgcctcttgagtaccagccgccgctgcagccgccgccgccgcctagccgtgcggtgccaggccgcgccctccccgggcgcccgccggctcgcatgccgaggggctccggggcgtagctgcgcgcccggcgccgcctccgggctccttcggccccgccatgggctgctgcagctccgcctcctccgccgcgcagagctccaaacgagaatggaagccgctggaggaccgtagctgcacagacataccatggctgctgctcttcatcctcttctgcattgggatgggatttatttgtggcttttcaatagcaacaggtgcagcagcaagactagtgtcaggatacgacagctatggaaatatctgtgggcagaaaaatacaaagttggaagcaataccaaacagtggcatggaccacacccagcggaagtatgtattctttttggatccatgcaacctggacttgataaaccggaagattaagtctgtagcactgtgtgtagcagcgtgtccaaggcaagaactgaaaactctgagtgatgttcagaagtttgcagagataaatggttcagccctatgtagctacaacctaaagccttctgaatacactacatctccaaaatcttctgttctctgccccaaactaccagttccagcgagtgcacctattccattcttccatcgctgtgctcctgtgaacatttcctgctatgccaagtttgcagaggccctgatcacctttgtcagtgacaatagtgtcttacacaggctgattagtggagtaatgaccagcaaagaaattatattgggactttgcttgttatcactagttctatccatgattttgatggtgataatcaggtatatatcaagagtacttgtgtggatcttaacgattctggtcatactcggttcacttggaggcacaggtgtactatggtggctgtatgcaaagcaaagaaggtctcccaaagaaactgttactcctgagcagcttcagatagctgaagacaatcttcgggccctcctcatttatgccatttcagctacagtgttcacagtgatcttattcctgataatgttggttatgcgcaaacgtgttgctcttaccatcgccttgttccacgtagctggcaaggtcttcattcacttgccactgctagtcttccaacccttctggactttctttgctcttgtcttgttttgggtgtactggatcatgacacttctttttcttggcactaccggcagtcctgttcagaatgagcaaggctttgtggagttcaaaatttctgggcctctgcagtacatgtggtggtaccatgtggtgggcctgatttggatcagtgaatttattctagcatgtcagcagatgacagtggcaggagctgtggtaacatactattttactagggataaaaggaatttgccatttacacctattttggcatcagtaaatcgccttattcgttaccacctaggtacggtggcaaaaggatctttcattatcacattagtcaaaattccgcgaatgatccttatgtatattcacagtcagctcaaaggaaaggaaaatgcttgtgcacgatgtgtgctgaaatcttgcatttgttgcctttggtgtcttgaaaagtgcctaaattatttaaatcagaatgcatacacagccacagctatcaacagcaccaacttctgcacctcagcaaaggatgcctttgtcattctggtggagaatgctttgcgagtggctaccatcaacacagtaggagattttatgttattccttggcaaggtgctgatagtctgcagcacaggtttagctgggattatgctgctcaactaccagcaggactacacagtatgggtgctgcctctgatcatcgtctgcctctttgctttcctagtcgctcattgcttcctgtctatttatgaaatggtagtggatgtattattcttgtgttttgccattgatacaaaatacaatgatgggagccctggcagagaattctatatggataaagtgctgatggagtttgtggaaaacagtaggaaagcaatgaaagaagctggtaagggaggcgtcgctgattccagagagctaaagccgatgctgaagaaaaggtgactggtctcatgagccctgaagaatgaactcagaggaggttgtttacatgaggttctcccactcaccagctgttgagagtctgcgattatgaagagcaggatcttattacttcaatgaaagcatgtaacaagtttctcaaaccaccaacagccaagtggatttggtacagtgcggctgtctaataaataatcaaaagcatttgatagaaatctgtcttgcagcactgtcttcacatttaatgttgctttctcttctagtctcgggtatgtttaaatgattcccttttctcactctagcgccaatactggcctgaaggctagatccccagcgaaattcttgttcaggctgggtctgtcgactttgactctgctatttatagagccaatgtgggttaataactactatttattgagtgcccgttccatgccaagcattaggctgggtgctttacataagtttaatcctcacaatagccctgtaaggttgcacctattatctccactttgaccacgaagaaacggagactcagagagtttgtatcctatgtgtaagatcacacagttgtcagagtcaggattcaaatctagttctaactccaaagctctccacactaacattgttttgcttattattgctccaaagataattaccccaacaccttatcaatgctatacttcctctcataatggcagtgtaggtatgtgggaagtgtctgagatggaggaccagggagtctttagaggcgcaaaagaatcacagaattatcttctaaaaaaaaacacaatattctttgagatcaggagttgataaaatatggcccccagctatttttgtaaataaaggtttattgggaacacagccacacccaatccttca

SEQ ID NO: 105577 - protein, 2580 aa, Artificial Sequence
  derived and/or modified sequence
MAEEGAVAVCVRVRPLNSREESLGETAQVYWKTDNNVIYQVDGSKSFNFDRVFHGNETTKNVYEEIAAPIIDSAIQGYNGTIFAYGQTASGKTYTMMGSEDHLGVIPRAIHDIFQKIKKFPDREFLLRVSYMEIYNETITDLLCGTQKMKPLIIREDVNRNVYVADLTEEVVYTSEMALKWITKGEKSRHYGETKMNQRSSRSHTIFRMILESREKGEPSNCEGSVKVSHLNLVDLAGSERAAQTGAAGVRLKEGCNINRSLFILGQVIKKLSDGQVGGFINYRDSKLTRILQNSLGGNAKTRIICTITPVSFDETLTALQFASTAKYMKNTPYVNEVSTDEALLKRYRKEIMDLKKQLEEVSLETRAQAMEKDQLAQLLEEKDLLQKVQNEKIENLTRMLVTSSSLTLQQELKAKRKRRVTWCLGKINKMKNSNYADQFNIPTNITTKTHKLSINLLREIDESVCSESDVFSNTLDTLSEIEWNPATKLLNQENIESELNSLRADYDNLVLDYEQLRTEKEEMELKLKEKNDLDEFEALERKTKKDQENELSSKVELLREKEDQIKKLQEYIDSQKLENIKMDLSYSLESIEDPKQMKQTLFDAETVALDAKRESAFLRSENLELKEKMKELATTYKQMENDIQLYQSQLEAKKKMQVDLEKELQSAFNEITKLTSLIDGKVPKDLLCNLELEGKITDLQKELNKEVEENEALREEVILLSELKSLPSEVERLRKEIQDKSEELHIITSEKDKLFSEVVHKESRVQGLLEEIGKTKDDLATTQSNYKSTDQEFQNFKTLHMDFEQKYKMVLEENERMNQEIVNLSKEAQKFDSSLGALKTELSYKTQELQEKTREVQERLNEMEQLKEQLENRDSTLQTVEREKTLITEKLQQTLEEVKTLTQEKDDLKQLQESLQIERDQLKSDIHDTVNMNIDTQEQLRNALESLKQHQETINTLKSKISEEVSRNLHMEENTGETKDEFQQKMVGIDKKQDLEAKNTQTLTADVKDNEIIEQQRKIFSLIQEKNELQQMLESVIAEKEQLKTDLKENIEMTIENQEELRLLGDELKKQQEIVAQEKNHAIKKEGELSRTCDRLAEVEEKLKEKSQQLQEKQQQLLNVQEEMSEMQKKINEIENLKNELKNKELTLEHMETERLELAQKLNENYEEVKSITKERKVLKELQKSFETERDHLRGYIREIEATGLQTKEELKIAHIHLKEHQETIDELRRSVSEKTAQIINTQDLEKSHTKLQEEIPVLHEEQELLPNVKEVSETQETMNELELLTEQSTTKDSTTLARIEMERLRLNEKFQESQEEIKSLTKERDNLKTIKEALEVKHDQLKEHIRETLAKIQESQSKQEQSLNMKEKDNETTKIVSEMEQFKPKDSALLRIEIEMLGLSKRLQESHDEMKSVAKEKDDLQRLQEVLQSESDQLKENIKEIVAKHLETEEELKVAHCCLKEQEETINELRVNLSEKETEISTIQKQLEAINDKLQNKIQEIYEKEEQFNIKQISEVQEKVNELKQFKEHRKAKDSALQSIESKMLELTNRLQESQEEIQIMIKEKEEMKRVQEALQIERDQLKENTKEIVAKMKESQEKEYQFLKMTAVNETQEKMCEIEHLKEQFETQKLNLENIETENIRLTQILHENLEEMRSVTKERDDLRSVEETLKVERDQLKENLRETITRDLEKQEELKIVHMHLKEHQETIDKLRGIVSEKTNEISNMQKDLEHSNDALKAQDLKIQEELRIAHMHLKEQQETIDKLRGIVSEKTDKLSNMQKDLENSNAKLQEKIQELKANEHQLITLKKDVNETQKKVSEMEQLKKQIKDQSLTLSKLEIENLNLAQKLHENLEEMKSVMKERDNLRRVEETLKLERDQLKESLQETKARDLEIQQELKTARMLSKEHKETVDKLREKISEKTIQISDIQKDLDKSKDELQKKQDRQNHQVKPEKRLLSDGQQHLTESLREKCSRIKELLKRYSEMDDHYECLNRLSLDLEKEIEFQKELSMRVKANLSLPYLQTKHIEKLFTANQRCSMEFHRIMKKLKYVLSYVTKIKEEQHESINKFEMDFIDEVEKQKELLIKIQHLQQDCDVPSRELRDLKLNQNMDLHIEEILKDFSESEFPSIKTEFQQVLSNRKEMTQFLEEWLNTRFDIEKLKNGIQKENDRICQVNNFFNNRIIAIMNESTEFEERSATISKEWEQDLKSLKEKNEKLFKNYQTLKTSLASGAQVNPTTQDNKNPHVTSRATQLTTEKIRELENSLHEAKESAMHKESKIIKMQKELEVTNDIIAKLQAKVHESNKCLEKTKETIQVLQDKVALGAKPYKEEIEDLKMKLVKIDLEKMKNAKEFEKEISATKATVEYQKEVIRLLRENLRRSQQAQDTSVISEHTDPQPSNKPLTCGGGSGIVQNTKALILKSEHIRLEKEISKLKQQNEQLIKQKNELLSNNQHLSNEVKTWKERTLKREAHKQVTCENSPKSPKVTGTASKKKQITPSQCKERNLQDPVPKESPKSCFFDSRSKSLPSPHPVRYFDNSSLGLCPEVQNAGAESVDSQPGPWHASSGKDVPECKTQ

SEQ ID NO: 105578 - DNA, 7743 bp, Artificial Sequence
  derived and/or modified sequence
atggctgaggagggcgccgttgccgtctgcgtgagggttcggccccttaattctcgcgaggagtctctgggcgaaacagctcaggtttactggaagacagacaacaacgtgatataccaggtcgatgggtctaaaagttttaactttgacagggtgttccacgggaatgagacaaccaaaaacgtctatgaagagattgcagctcccatcatcgatagcgccatccagggctataacggaacgatatttgcatacggccagactgcctcgggtaagacatacaccatgatggggtccgaggatcatctgggcgtcatcccacgggcgattcacgatattttccagaagatcaagaagtttcccgaccgtgaatttctgttgagggtgtcctacatggaaatctataatgaaactataacagatctactgtgtgggacccagaagatgaaacctcttatcatacgggaagatgtgaatcgcaatgtgtacgtggccgatctgacagaggaagtggtttacacttcagagatggcgctgaaatggatcacgaagggcgagaaatcccgccactacggagagacaaagatgaaccagcggtccagtcggtcacacacgatcttcaggatgattctggaaagcagggagaaaggtgagcccagtaattgcgaaggctcagttaaggtttcacatctgaacctcgtcgacctcgctggttccgaacgagctgcacagaccggtgcagctggtgtccgtctcaaagaaggctgtaatattaatcgatcactatttatcctcggccaggtgatcaagaagctgtccgacggacaggtgggcggcttcatcaactatagggactcaaagctgacgcggatccttcagaactccctgggaggaaatgccaagacaaggattatttgcaccatcacaccagtgtcttttgatgagaccctaaccgctctccagttcgcgtcaacagctaaatacatgaagaacacaccatatgtgaatgaagtttccaccgacgaggccctgctgaaaaggtatcgaaaggagatcatggatctcaaaaaacagctggaggaagtcagtttagagacgcgggctcaggccatggagaaggatcagcttgctcagctgctggaggagaaagacctgcttcagaaagtccagaatgaaaagattgagaatctgacaagaatgctggtgacatccagctctctgaccctccaacaggagctgaaagccaagcgaaagcgacgcgttacatggtgcttggggaagatcaacaaaatgaagaatagcaactatgcagaccaattcaatatccccacaaacatcactaccaaaacccataaactgtctatcaatcttctgcgtgagatcgatgagagcgtgtgttccgaaagcgacgtgttcagtaatacgctggatacactgagtgagatagaatggaatccggcaactaaactcctcaaccaggagaatatagagtctgaactcaactcacttcgcgccgactatgataatttagtgctggattatgagcagctccgcacagagaaagaagaaatggaactgaagctaaaggagaagaacgacctggacgaattcgaagccctggaaaggaagactaagaaggatcaggaaaacgaactgtcctctaaagtcgagctgctgagggaaaaggaagatcaaatcaaaaagctgcaagaatacatcgactcacagaaacttgagaatatcaaaatggacctgagctactccctggagagtatagaggatcctaagcagatgaaacagacgctctttgacgctgagaccgtcgcgctcgacgctaaacgagagtctgcgttcttgaggagcgaaaacctcgagctgaaagaaaaaatgaaagagctcgcaaccacttataagcagatggaaaatgacatccagctctaccaatcccaactggaggcaaaaaaaaaaatgcaggtcgatctagagaaggaactccagtctgcatttaatgaaatcacgaagctgacctctctgatcgatggcaaagtgcctaaggacctgttatgtaatctggagctggaaggaaaaatcacagatctgcaaaaggagctgaataaagaggtagaggaaaacgaggcactgcgagaggaggttatcctgctgagtgagctcaaaagccttccgtccgaggtcgagcgcctgcggaaagagattcaagacaagagtgaggaattacacattattacaagtgaaaaggataaactgttcagcgaggtcgtgcataaggaaagcagagtgcagggactgttagaagagatcggcaagacgaaagacgacctcgccaccacccagagcaattataaaagtacggatcaggaatttcagaatttcaagacgctccatatggactttgagcagaagtacaagatggtactggaagaaaatgaacggatgaatcaggagatcgttaaccttagcaaggaggcccagaagtttgacagttccctgggagctctcaagacggaactgagctataaaacccaggagcttcaagaaaagacgagagaggtccaagagaggctgaatgagatggagcagctgaaagagcagttagagaaccgtgactctacattacagaccgttgagcgcgagaagacccttattaccgaaaagctgcagcaaacattagaagaagtgaagacgttaacacaagagaaagatgatttaaaacagctgcaggaatcattgcagatcgaacgcgaccagcttaaatctgacattcatgatacagtgaacatgaatatcgacacccaggagcagcttcgcaacgccctcgagtcccttaaacagcaccaggaaacgatcaatacactgaagagcaaaatctcagaggaggtatccaggaatttgcatatggaggagaacactggtgaaactaaggatgagttccagcaaaaaatggtaggaatagataagaaacaagatctggaagctaaaaacacccagacattgacagctgatgtgaaggataacgagattatcgagcagcagaggaaaatcttctccctgattcaggaaaaaaatgaactgcaacagatgctggagagcgttattgccgagaaagagcagttgaaaactgatctaaaggagaacattgagatgaccatcgaaaaccaagaggaactgagactgctcggagacgaactcaaaaagcaacaagaaatagtggctcaagaaaaaaatcatgccatcaagaaagagggggaactttctcgcacttgcgaccggctcgcggaagtggaggagaaactcaaagagaagagccagcagctgcaggagaagcagcagcagctccttaatgttcaggaggagatgtctgagatgcagaaaaagataaacgaaattgaaaatttgaagaatgaactgaagaacaaagaactgaccttggaacatatggagacggaaagactggaactggcccagaagttaaatgagaattatgaagaggttaagtcaatcacaaaggagcgtaaggtccttaaggaactgcagaagtcttttgaaactgaacgcgaccatctgcgggggtacattcgggagatcgaggctacaggactccaaactaaggaggaactgaagatagcacatatccatctcaaggagcaccaggaaaccattgacgagttgagacgctctgtatcagaaaagaccgctcagatcataaatacgcaggacttggagaagagtcacaccaagcttcaggaggaaattcctgtacttcatgaggagcaagagttactgcccaacgtgaaggaagtctcagaaactcaagaaactatgaatgaactcgagttactgaccgagcagtctaccaccaaggattcaaccaccctcgcgcgcatcgaaatggagcgactgcggttgaacgagaaattccaggagagccaggaggaaatcaagagcctcacaaaagagcgagataatcttaaaactatcaaggaggccctggaggtcaagcacgaccagctgaaggaacacatccgcgagacgctggcgaagatccaggaaagccaatccaagcaggaacaaagcctgaatatgaaggagaaagacaatgagactacaaagattgtctcggagatggaacaatttaagcctaaggactctgcgcttctgcgcatagagattgagatgcttggccttagcaagaggctgcaggagtcccacgatgagatgaaaagtgttgccaaggagaaggacgacttacagaggttgcaggaagtgctccagtccgagtccgaccagctcaaggaaaatatcaaggagattgtcgccaaacacctggaaactgaagaggaactaaaggtcgcacactgttgcctcaaagaacaggaagaaactattaacgagctgagggtcaacttatctgagaaagagactgagatttctactattcagaagcagctggaggcaatcaatgacaagctgcaaaataagatccaggaaatttatgagaaggaggagcaattcaatatcaaacagatctcggaagttcaggagaaagttaacgaactgaaacagttcaaagagcaccggaaggctaaagactccgctctgcagagcatcgaaagtaaaatgttggaactgactaacaggctgcaggaaagccaggaggaaatccagatcatgatcaaggaaaaggaggagatgaagcgagtgcaggaggcgttacaaattgagcgcgatcaactcaaggagaacaccaaggaaatcgtggccaagatgaaggagtcccaagagaaagaataccagtttctgaagatgactgccgtgaacgaaacccaggagaagatgtgtgagatagagcatctcaaagagcaatttgagacccagaaactgaatctcgaaaacatcgagactgagaacatccgcctcacccagatcctgcacgagaaccttgaggaaatgcgctctgtcactaaggagagagacgatttaaggtcagtggaggagacactgaaagtcgaaagggaccaactgaaggagaatctcagagagacgataactagagacctcgagaaacaggaagaactcaagatcgttcacatgcatctgaaagaacaccaggagaccatcgacaagctgagaggaatcgttagcgagaagacaaatgagatctccaatatgcagaaggacctggagcattcgaacgacgcgctgaaggcacaagacctaaaaatccaggaagaactgcgaatcgctcacatgcacctgaaggaacagcaagagacaatcgataaactgagagggattgtgagcgagaaaactgacaaactgtccaacatgcaaaaagatttggaaaattcaaacgccaagctccaggaaaaaatccaagaactgaaagcaaatgagcaccagctgatcaccttaaaaaaggatgttaatgagactcagaagaaagtctctgagatggaacagctgaagaaacagatcaaggatcaaagcttgactctctccaagctagagatagaaaatctgaatcttgcacagaaactgcacgagaatctggaggagatgaaaagtgtgatgaaggagcgggacaatcttaggcgagtcgaagaaacgctgaagctcgagcgcgaccaattgaaggagtccctacaggagactaaagcccgtgatctcgaaattcagcaggagttaaagacagctcgaatgttgtctaaggagcataaggagaccgttgataagttgcgagagaaaatttccgagaaaacaatccagatttctgacatacagaaagacctcgacaaatccaaggatgagcttcaaaaaaaacaagatagacagaatcatcaggtgaaaccagagaaacggctgttgtctgacgggcagcagcacctaacagaatccttacgagaaaagtgctccagaatcaaggaactcctgaagcgatattcggaaatggatgatcattacgagtgcctgaatcgtctgtctctggatctcgagaaggaaatcgagtttcagaaggaactgagcatgagagtgaaagctaacctgtccctgccctaccttcaaacaaaacacattgagaagctattcaccgcaaatcagcgctgcagcatggagttccaccggatcatgaagaagctgaagtacgtacttagctatgtgaccaaaatcaaagaggagcagcacgagtcaatcaataaattcgagatggacttcatcgatgaggtcgagaagcagaaggaacttcttatcaagatccagcatctacagcaggattgcgatgtcccatcgagagagctgcgggatttgaaactgaaccagaacatggaccttcatatcgaagaaattctcaaagacttttcagagagtgaatttccttctatcaagacagaattccagcaagtgctctcaaacaggaaggagatgactcagtttctggaagagtggctgaacactcgatttgatatcgaaaaacttaaaaacggcattcaaaaggagaatgatcgcatctgtcaggtgaataacttcttcaataatcgcataatcgcgattatgaacgagtcgactgaatttgaagagcgtagcgcaacaataagcaaagagtgggagcaggatctcaagagcctgaaggagaagaatgagaaactgttcaaaaattaccagactctcaaaacgtccttagctagtggtgcccaagtgaaccccactacccaagataacaagaaccctcatgttacgtcaagggcgacacaactcactaccgagaagattagggaactggagaactcgctgcacgaggccaaggagtccgctatgcacaaggagagcaaaataatcaagatgcagaaggaacttgaagttacgaacgacattatcgcgaagctgcaggcaaaagtacatgaatccaacaagtgcctggagaagacaaaggagacaatacaagtgctacaggacaaggtagccctgggagcaaaaccctacaaagaggaaattgaggatctgaagatgaaactcgtgaagatcgaccttgagaagatgaagaacgccaaagaattcgagaaagaaattagtgcaactaaggctaccgtcgaatatcagaaagaagtgataaggctcctgcgtgagaacctcaggaggtcacagcaggctcaggatacctcggtgatctccgagcatacagaccctcagccttcgaacaagccactcacctgcggaggaggttccggcatcgtgcaaaacaccaaggcactgattcttaaatccgaacatatcaggctggagaaagagattagcaaactgaagcagcaaaatgagcagctcatcaagcagaagaacgagctgctgagcaacaatcaacacctttctaatgaggtgaagacatggaaggaacgcacattgaaaagagaggctcataagcaggtgacctgcgagaactcaccaaagtcacctaaggtcacaggcacggccagtaaaaagaaacagatcacaccttcccaatgtaaagaaaggaacctccaagatcccgtgccgaaagagagtccgaaaagttgttttttcgattcccggagcaagtctcttcccagtccccaccccgtcagatacttcgataatagctcactggggctctgccctgaggtgcagaatgcaggggccgagtcggtggacagccaacccggtccttggcatgcctcaagcggcaaagacgtccctgaatgcaagacacagtag

SEQ ID NO: 105579 - DNA, 7743 bp, Artificial Sequence
  derived and/or modified sequence
atggccgaggagggcgctgtggccgtgtgtgtgcgggtgcggcccctgaacagccgggaggagagcctgggggagacagcccaggtgtactggaagacagacaacaacgtcatctaccaggtggatggcagcaagagcttcaactttgacagagtcttccacggcaatgagaccaccaagaatgtgtatgaggagattgctgcccccatcattgattctgccatccagggctacaacggcaccatctttgcctacggccagacagccagcggcaagacctacaccatgatgggcagcgaggaccacctgggcgtcatcccccgggccatccatgacatcttccagaagatcaagaagttcccagaccgggagttcctgctgcgggtgtcctacatggagatctacaatgagaccatcacagacctgctgtgtggcacccagaagatgaagcccctcatcatccgggaggatgtgaacagaaatgtgtatgtggccgacctgacagaggaggtggtgtacaccagcgagatggccctgaagtggatcaccaagggggagaagagccgccactatggagagaccaagatgaaccagaggagcagccgcagccacaccatcttcaggatgatcctggagagccgggagaagggggagcccagcaactgtgagggctctgtgaaggtgagccacctgaacctggtggacctggccggcagcgagcgggccgcccagacaggagctgctggggtgcggctgaaggagggctgcaacatcaacagaagcctcttcatcctgggccaggtgatcaagaagctgagtgatggccaggtgggcggcttcatcaactacagagacagcaagctgacccgcatcctgcagaacagcctgggcggcaatgccaagacccgcatcatctgcaccatcacccctgtgtcctttgatgagaccctgacagccctgcagtttgccagcacagccaagtacatgaagaacaccccctacgtgaatgaggtgtccacagatgaggccctgctgaagcgctacaggaaggagatcatggacctgaagaagcagctggaggaggtgtccctggagacccgggcccaggccatggagaaggaccagctggcccagctgctggaggagaaggacctgctgcagaaggtgcagaatgagaagattgagaacctgaccaggatgctggtgaccagcagcagcctgaccctgcagcaggagctgaaggccaagaggaagagaagagtgacctggtgcctgggcaagatcaacaagatgaagaacagcaactatgctgaccagttcaacatccccaccaacatcaccaccaagacccacaagctgagcatcaacctgctgcgggagattgatgagagcgtgtgcagcgagagtgatgtgttcagcaacaccctggacaccctgtctgaaattgagtggaacccagccaccaagctgctgaaccaggagaacatcgagagcgagctgaacagcctgcgggctgactatgacaacctggtgctggactatgagcagctgaggacagagaaggaggagatggagctgaagctgaaggagaagaatgacctggatgaatttgaggccctggagaggaagaccaagaaggaccaggagaatgagctgagcagcaaggtggagctgctgcgggagaaggaggaccagatcaagaagctgcaggagtacatcgacagccagaagctggagaacatcaagatggacctgagctacagcctggagagcattgaggaccccaagcagatgaagcagaccctgtttgatgctgagaccgtggccctggatgccaagcgggagagcgccttcctgcggtctgagaacctggagctgaaggagaagatgaaggagctggccaccacctacaagcagatggagaatgacatccagctgtaccagagccagctggaggccaagaagaagatgcaggtggacctggagaaggagctgcagagcgccttcaatgagatcaccaagctgaccagcctgattgatggcaaggtgcccaaggacctgctgtgcaacctggagctggagggcaagatcacagacctgcagaaggagctgaacaaggaggtggaggagaatgaggccctgcgggaggaggtgatcctgctgtctgagctgaagagcctgcccagcgaggtggagcggctgaggaaggagatccaggacaagtctgaggagctgcacatcatcaccagcgagaaggacaagctgttcagcgaggtggtgcacaaggagagccgggtgcagggcctgctggaggagatcggcaagaccaaggatgacctggccaccacccagagcaactacaagagcacagaccaggagttccagaacttcaagaccctgcacatggactttgagcagaagtacaagatggtgctggaggagaatgaaagaatgaaccaggagatcgtgaacctgagcaaggaggcccagaagtttgacagcagcctgggcgccctgaagacagagctgagctacaagacccaggagctgcaggagaagacccgggaggtgcaggagcggctgaatgagatggagcagctgaaggagcagctggagaacagagacagcaccctgcagacagtggagcgggagaagaccctcatcacagagaagctgcagcagaccctggaggaggtgaagaccctgacccaggagaaggatgacctgaagcagctgcaggagagcctgcagatcgagcgggaccagctgaagagtgacatccatgacacagtgaacatgaacatcgacacccaggagcagctgagaaatgccctggagagcctgaagcagcaccaggagaccatcaacaccctgaagagcaagatcagcgaggaggtgtccaggaacctgcacatggaggagaacacaggagagaccaaggatgagttccagcagaagatggtgggcatcgacaagaagcaggacctggaggccaagaacacccagaccctgacagcagatgtgaaggacaatgagatcatcgagcagcagaggaagatcttcagcctcatccaggagaagaatgagctgcagcagatgctggagagcgtgattgctgagaaggagcagctgaagacagacctgaaggagaacatcgagatgaccatcgagaaccaggaggagctgcggctgctgggagatgagctgaagaagcagcaggagatcgtggcccaggagaagaaccacgccatcaagaaggagggggagctgagcaggacctgtgaccggctggccgaggtggaggagaagctgaaggagaagagccagcagctgcaggagaagcagcagcagctgctgaatgtgcaggaggagatgtctgagatgcagaagaagatcaatgaaattgagaacctgaagaatgagctgaagaacaaggagctgaccctggagcacatggagacagagcggctggagctggcccagaagctgaatgaaaattatgaggaggtgaagagcatcaccaaggagaggaaggtgctgaaggagctgcagaagagctttgaaacagagcgggaccacctgcggggctacatccgggagattgaggccaccggcctgcagaccaaggaggagctgaagatcgcccacatccacctgaaggagcaccaggagaccattgatgagctgcggcgctctgtgtctgagaagacagcccagatcatcaacacccaggacctggagaagagccacaccaagctgcaggaggagatccctgtgctgcacgaggagcaggagctgctgcccaacgtgaaggaggtgtctgagacccaggagaccatgaatgagctggagctgctgacagagcagagcaccaccaaggacagcaccaccctggccagaattgagatggagcggctgcggctgaatgagaagttccaggagagccaggaggagatcaagagcctgaccaaggagcgggacaacctgaagaccatcaaggaggccctggaggtgaagcatgaccagctgaaggagcacatccgggagaccctggccaagatccaggagagccagagcaagcaggagcagagcctgaacatgaaggagaaggacaatgagaccaccaagatcgtgtctgagatggagcagttcaagcccaaggacagcgccctgctgcgcatcgagattgagatgctgggcctgagcaagaggctgcaggagagccatgatgagatgaagtctgtggccaaggagaaggatgacctgcagaggctgcaggaggtgctgcagagcgagagtgaccagctgaaggagaacatcaaggagatcgtggccaagcacctggagacagaggaggagctgaaggtggcccactgctgcctgaaggagcaggaggagaccatcaatgagctgcgggtgaacctgtctgagaaggagacagagatcagcaccatccagaagcagctggaggccatcaatgacaagctgcagaacaagatccaggagatctatgagaaggaggagcagttcaacatcaagcagatcagcgaggtgcaggagaaggtgaatgagctgaagcagttcaaggagcacaggaaggccaaggacagcgccctgcagagcattgagagcaagatgctggagctgaccaaccggctgcaggagagccaggaggagatccagatcatgatcaaggagaaggaggagatgaagagggtgcaggaggccctgcagatcgagcgggaccagctgaaggagaacaccaaggagatcgtggccaagatgaaggagagccaggagaaggagtaccagttcctgaagatgacagctgtgaatgagacccaggagaagatgtgtgaaattgagcacctgaaggagcagtttgagacccagaagctgaacctggagaacatcgagacagagaacatccggctgacccagatcctgcacgagaacctggaggagatgaggtctgtgaccaaggagagagatgacctgcggtctgtggaggagaccctgaaggtggagcgggaccagctgaaggagaacctgcgggagaccatcacccgggacctggagaagcaggaggagctgaagatcgtgcacatgcacctgaaggagcaccaggagaccatcgacaagctgcggggcatcgtgtctgagaagaccaatgagatcagcaacatgcagaaggacctggagcacagcaatgatgccctgaaggcccaggacctgaagatccaggaggagctgagaattgcccacatgcacctgaaggagcagcaggagaccatcgacaagctgcggggcatcgtgtctgagaagacagacaagctgagcaacatgcagaaggacctggagaacagcaatgccaagctgcaggagaagatccaggagctgaaggccaatgagcaccagctgatcaccctgaagaaggatgtgaatgagacccagaagaaggtgtctgagatggagcagctgaagaagcagatcaaggaccagagcctgaccctgagcaagctggagattgagaacctgaacctggcccagaagctgcacgagaacctggaggagatgaagtctgtgatgaaggagcgggacaacctgcggcgggtggaggagaccctgaagctggagcgggaccagctgaaggagagcctgcaggagaccaaggcccgggacctggagatccagcaggagctgaagacagccaggatgctgagcaaggagcacaaggagaccgtggacaagctgcgggagaagatcagcgagaagaccatccagatcagtgacatccagaaggacctggacaagagcaaggatgagctgcagaagaagcaggaccggcagaaccaccaggtgaagccagagaagaggctgctgagtgatggccagcagcacctgacagagagcctgcgggagaagtgcagccgcatcaaggagctgctgaagcgctacagcgagatggatgaccactatgagtgcctgaaccggctgagcctggacctggagaaggagattgagttccagaaggagctgtccatgagggtgaaggccaacctgagcctgccctacctgcagaccaagcacatcgagaagctgttcaccgccaaccagcgctgcagcatggagttccaccgcatcatgaagaagctgaagtatgtgctgtcctatgtgaccaagatcaaggaggagcagcacgagagcatcaacaagtttgagatggacttcattgatgaggtggagaagcagaaggagctgctgatcaagatccagcacctgcagcaggactgtgatgtgcccagccgggagctgcgggacctgaagctgaaccagaacatggacctgcacatcgaggagatcctgaaggacttcagcgagagcgagttccccagcatcaagacagagttccagcaggtgctgagcaacaggaaggagatgacccagttcctggaggagtggctgaacaccaggtttgatattgagaagctgaagaatggcatccagaaggaaaatgaccgcatctgccaggtgaacaacttcttcaacaaccgcatcatcgccatcatgaatgaaagcacagaatttgaggagaggtctgccaccatcagcaaggagtgggagcaggacctgaagagcctgaaggagaagaatgagaagctgttcaagaactaccagaccctgaagaccagcctggccagcggggcccaggtgaaccccaccacccaggacaacaagaacccccacgtgaccagccgggccacccagctgaccacagagaagatccgggagctggagaacagcctgcacgaggccaaggagagcgccatgcacaaggagagcaagatcatcaagatgcagaaggagctggaggtgaccaatgacatcatcgccaagctgcaggccaaggtgcatgagagcaacaagtgcctggagaagaccaaggagaccatccaggtgctgcaggacaaggtggccctgggcgccaagccctacaaggaggagattgaggacctgaagatgaagctggtgaagattgacctggagaagatgaagaatgccaaggagtttgagaaggagatcagcgccaccaaggccaccgtggagtaccagaaggaggtgatccggctgctgcgggagaacctgcggcgcagccagcaggcccaggacaccagcgtcatcagcgagcacacagacccccagcccagcaacaagcccctgacctgtggcggcggcagcggcatcgtgcagaacaccaaggccctgatcctgaagtctgagcacatccggctggagaaggagatcagcaagctgaagcagcagaatgagcagctgatcaagcagaagaatgagctgctgagcaacaaccagcacctgagcaatgaggtgaagacctggaaggagaggaccctgaagcgggaggcccacaagcaggtgacctgtgagaacagccccaagagccccaaggtgactggaacagccagcaagaagaagcagatcacccccagccagtgcaaggagaggaacctgcaggaccctgtgcccaaggagagccccaagagctgcttctttgacagccgcagcaagagcctgcccagcccccaccctgtgcgctactttgacaacagcagcctgggcctgtgcccagaggtgcagaatgctggagctgagagcgtggacagccagcccggcccctggcacgccagcagcggcaaggatgtgcctgagtgcaagacccagtag

SEQ ID NO: 105580 - DNA, 7743 bp, Artificial Sequence
  derived and/or modified sequence
atggccgaggagggcgccgtggccgtgtgcgtgcgggtgcggcccctcaactcacgagaggaatcgctgggagaaaccgcccaggtgtactggaagacagataataacgtgatatatcaggtcgacggatctaaatccttcaatttcgacagagtcttccacggaaacgaaaccactaagaacgtttacgaagagatcgctgctccgattatagattccgcaattcagggctacaatggcaccattttcgcctatggccagaccgccagtggcaagacttatacaatgatgggctccgaagatcatctgggagtcatccctcgtgctattcacgacatcttccagaaaataaaaaagttccccgatcgggagttcctgctgagggtctcctatatggaaatttataatgaaacaataacagatttgctgtgtgggacgcagaagatgaaacccctgatcatcagggaggatgtgaataggaacgtgtatgtggctgacctgactgaagaggttgtgtatacctcggagatggctcttaagtggattactaagggtgaaaagagtcgccactatggcgagacaaaaatgaaccaacggagcagccggagccatacgatcttccggatgattctcgaatcccgggagaaaggcgagcccagcaactgcgagggatctgtgaaagtcagccatctgaatctggtagatcttgcagggtccgaacgcgccgctcagaccggcgctgctggggttcgccttaaagaaggctgcaatatcaatcggtccctgttcatcctgggacaggttattaaaaaactatcggacgggcaggtgggaggcttcatcaactatagggacagcaaacttacccgtatccttcagaattccttggggggcaatgctaaaactcgaatcatttgtactatcacccccgtatccttcgatgagacgctgacggcgcttcagtttgcttcaactgctaaatacatgaagaacacaccatatgtcaacgaagtatcaaccgacgaggccttgctgaaaaggtacagaaaggaaattatggacctgaaaaaacagctggaggaggtgagtctcgagactagagcccaagcaatggagaaggatcagctggcccaactgctggaggaaaaggacctgttgcagaaagtgcagaatgaaaagatcgagaatctgacccggatgctagtgacgagcagcagccttaccttgcagcaggaactgaaggctaaacggaaaaggcgggtcacatggtgcctgggaaaaatcaataagatgaagaattctaactatgctgatcagtttaatatcccaactaatatcaccaccaagacccataaacttagcataaatttgctccgggagatcgatgaaagcgtctgcagtgaaagtgatgtgttcagtaacacccttgacaccctttctgagattgaatggaaccccgcgacaaagctgctgaatcaagagaacattgagtccgagctcaacagcctaagagctgactatgataatctagtgctggattacgaacagctgaggaccgagaaagaggagatggaactgaaactgaaggaaaagaacgacctggacgagttcgaagctctagaacgaaagacaaagaaggatcaggagaacgagctctcaagtaaagtggaacttttgcgggagaaggaggatcagattaagaagctgcaggaatacatagacagtcagaaacttgaaaatataaaaatggacctgagctactccttggagagtattgaggatcccaagcagatgaaacaaaccttatttgacgcagagaccgtagccttagatgccaaacgtgagtctgcctttctgagatctgaaaatctggagctgaaagaaaaaatgaaggaattggccaccacctataagcagatggaaaacgatatccaattgtatcagtcccagctggaggcgaaaaaaaaaatgcaggttgaccttgagaaagagctgcaatccgcattcaatgagataaccaagttgacctctctgattgatggaaaggttcccaaggaccttctatgtaatctggagctggaggggaaaattaccgatttgcaaaaagaattgaacaaggaagttgaggagaatgaggctttgcgagaggaagtgatcctgctctccgaactgaagagcctccccagtgaggtggagagattgcggaaggagatccaggataaatccgaggagctacacatcataacctctgagaaagacaaattgttttccgaggtagtgcataaagaatcccgggtgcagggcctcttggaagagatcggtaagaccaaagacgatctggctaccacccaatccaactataagagtaccgaccaagagtttcagaacttcaaaacactccatatggactttgaacagaagtacaagatggtcctggaggaaaatgagaggatgaatcaggagattgttaacctgagtaaggaagctcagaagtttgacagctctctcggcgctttgaagactgaattgtcctacaagacccaggaactgcaggagaagactagggaagtccaagagcgacttaatgagatggaacagctgaaggagcaactggagaaccgagatagcacactgcaaacagtagaaagagagaagactctgattaccgaaaaacttcaacagactctagaagaagttaaaacccttacccaggagaaggacgacctcaaacaactccaggaatccctccagatcgagcgcgaccaattaaaatctgatattcacgacacagttaacatgaatattgacacgcaggagcagcttcgcaacgctttggagtcactgaaacaacaccaggagacaattaacactctgaaaagtaaaatctccgaggaagtctcgcggaacttacatatggaagaaaatacaggcgaaactaaggatgaatttcaacagaaaatggtcgggatagacaaaaagcaggaccttgaggcaaagaacacacagacccttacggcagacgtaaaagataatgaaattatagaacagcagcgcaagatttttagtctgatccaagagaagaacgaattgcagcagatgctcgagtccgttatagccgaaaaagagcagttgaagacagaccttaaggaaaatatagaaatgacaattgagaaccaagaagaactgcgacttctgggcgatgagctgaagaagcagcaggagattgtggcccaagagaaaaatcacgccatcaaaaaagaaggggagttgagcaggacttgcgataggctcgcagaagtggaggaaaaattgaaggagaagagtcagcagttacaggagaaacaacagcagctgctgaatgttcaggaggagatgtcagaaatgcagaaaaaaatcaacgagattgagaatctgaaaaacgagttgaagaataaggagctaacacttgaacacatggagactgaacgactcgaactagcccaaaagctgaatgaaaattatgaagaagtcaaatctatcacaaaagaaagaaaagtgctcaaggaactccagaagtccttcgagacagaacgggaccacctcagggggtatatccgtgaaattgaggcaaccgggctgcaaactaaagaggaactcaagatcgcccacatccacctaaaagaacaccaagagacaatagacgagcttcggcggtccgtgagcgagaagactgcccaaatcattaacacacaggacttagagaagtcccacactaaactgcaagaggagatcccagtcctgcacgaagagcaggaactgttacccaatgtgaaggaagttagcgaaacccaggaaactatgaatgaattagaactattgacagagcaaagtactacaaaggatagcaccactctggcccgtatagaaatggagaggttgaggctgaacgagaagttccaagagagtcaggaagaaatcaaaagcctgaccaaggaacgagataatttgaaaaccattaaagaggcccttgaagtgaaacatgatcagctaaaggagcatattcgggaaacccttgcaaaaatccaggagtcccagtccaagcaggaacagtccctaaatatgaaggagaaggacaacgaaactacaaaaattgtcagtgagatggaacagttcaagccgaaggattccgccctgcttagaatagaaattgaaatgttgggattgagcaagcgactccaggagtcacacgatgagatgaaatctgtggcgaaagagaaggacgatctccaacgcctccaggaagtcctgcagtcagaatccgatcaactcaaggagaacattaaggaaattgttgctaagcacttggagactgaggaagaactaaaggtggctcattgttgtttgaaagaacaagaggagacgatcaatgagctcagggtcaatctctccgagaaagagacagagatctcgaccattcagaagcaactggaagctatcaacgacaagcttcagaataaaattcaagagatctatgagaaggaagagcagttcaacattaagcagatctccgaagtgcaggaaaaagtcaatgagctaaagcagttcaaggaacacaggaaggctaaagactcggcactgcagagcattgaatcaaaaatgctggagctcacaaaccggctgcaggagtctcaagaggagatccaaattatgattaaggaaaaggaggagatgaagagagtgcaggaggccctgcagatcgagcgagaccagttaaaggaaaatacaaaggagattgttgctaaaatgaaagagagccaggaaaaagagtaccagttcctgaagatgacggctgtaaacgaaacccaagagaagatgtgcgaaatagagcatttaaaagagcagtttgaaacgcagaagctcaaccttgagaacatcgagaccgaaaacattcgccttactcagattctacacgagaatctggaggaaatgaggtctgtcactaaggaaagagatgacctgcggtcagtcgaagagaccctgaaagttgagagggaccagcttaaggaaaacctgcgcgagaccatcacccgggatcttgagaaacaggaagagctcaagatcgttcatatgcacctgaaggaacaccaggagactattgataagctgcggggcatcgtgtcagagaaaacaaatgagatttccaacatgcagaaggatctcgagcacagcaatgacgcacttaaagcacaagacttgaagatacaggaggagttgagaatagcccatatgcacttaaaagaacagcaggaaacgatcgataagctgcgggggatcgtgtctgagaaaacagataagctgtctaacatgcaaaaggacctggagaatagtaatgcaaagctgcaggagaaaatccaggagcttaaggcgaatgaacaccagctgattaccctgaagaaagacgtgaacgaaacccaaaagaaggtgtcggagatggagcaactcaaaaaacagattaaagatcagtcactgacactgtcaaagctggaaattgagaacctgaatcttgctcaaaaattgcacgagaacctcgaagagatgaagtcggtgatgaaggagagggataaccttagacgggtggaggagaccttgaagttagagcgtgatcagcttaaagagagtctccaggagacaaaagcgagagacttggagatccaacaggaactgaaaaccgcaagaatgcttagtaaagagcacaaggagactgtggacaagctgagggagaagatctctgagaagaccattcagattagcgacattcaaaaggacctggacaaaagcaaggacgaactgcaaaaaaagcaggacaggcagaaccaccaagtaaaacctgagaagaggctcctgagcgatggccaacagcacctgactgagtccctccgagaaaagtgttctcggattaaagagctgctgaagcggtattcagaaatggacgaccattatgagtgcctgaatcgcctgtccctagacctggaaaaagaaattgagtttcagaaagaactctccatgcgggtgaaggccaatctgagcctgccctaccttcagaccaaacatatcgaaaaactgtttactgcgaatcaacggtgttccatggaatttcatagaatcatgaaaaaacttaagtatgttctttcatacgtgaccaaaattaaggaggaacagcacgagtctatcaacaagttcgagatggattttatcgacgaggttgagaaacaaaaggaactcctgatcaagatccagcatctccagcaggattgtgacgtgcctagccgcgaactccgcgacctcaaactgaaccaaaatatggacctgcatattgaggaaatactgaaggatttctctgagtcagagttccctagtattaaaaccgagtttcagcaagtgttgagcaaccggaaagaaatgacacagttcctggaagaatggttgaacacccgcttcgacattgagaagcttaagaacggaatccagaaagaaaatgaccgaatttgccaggtgaataacttcttcaataaccgtatcatcgccattatgaacgagagcacagagtttgaagagagaagcgctacaatttcaaaagagtgggaacaagatctaaagtctctgaaagagaaaaacgaaaagctctttaagaactaccaaacgttgaagacaagtctcgccagcggagctcaggtgaatccaacaacacaggacaataaaaaccctcatgtgacctcgagggccacgcagctgactaccgagaagatccgcgaattggaaaactcattgcacgaggcgaaagagtccgcaatgcataaagagagcaagatcatcaagatgcagaaggagctggaagtaacgaacgatatcatagctaaactgcaagctaaagtacatgagtccaataaatgtctcgagaagactaaggaaaccattcaagtcctacaggacaaagtggctctgggagccaaaccttacaaagaggaaattgaggatcttaagatgaagctggtcaagatcgacttggaaaagatgaaaaacgccaaagagttcgaaaaagaaatctctgccaccaaggctacagttgaatatcaaaaagaggtcattaggctgctgagagagaacctaaggcggtcgcagcaggcccaggatacttctgttatctccgagcatactgaccctcagccctctaataaacccctgacttgtgggggcggatccgggatcgttcagaacacaaaagctctgattctgaagagcgagcacatccgcctggagaaagagatttcaaagctcaagcagcagaacgaacagctaattaagcaaaaaaacgagctactttctaacaaccagcatctgagcaatgaggtgaagacatggaaagaacgaaccctcaaacgggaggcccataagcaggtcacctgcgagaactctcctaaaagccccaaggtgacaggcaccgctagcaagaagaagcagatcacaccatctcagtgcaaggagcggaatctgcaggatcctgtgcctaaagagagcccaaaaagctgtttctttgacagcagatcaaaatcattgcctagcccccatccagtacgttactttgacaacagctctttgggtttgtgtccagaagtgcaaaatgctggtgctgaaagtgtcgactcgcagcccggaccgtggcacgctagctccgggaaagacgtgcccgagtgcaagacacaatag

SEQ ID NO: 105581 - DNA, 7742 bp, Artificial Sequence
  derived and/or modified sequence
atggccgaagagggagccgtagctgtctgcgtgcgagtcagaccgttaaactctagggaggagtcgctgggagagacagctcaagtgtattggaagacagacaataatgtgatctatcaagtggatggttctaagtccttcaatttcgacagagtgtttcacgggaacgaaacaacgaaaaacgtgtacgaggagatagcagccccaattatcgactccgccatccagggatacaatggcacaatctttgcctatggccagaccgcaagcggaaaaacctatacaatgatggggagcgaggaccatcttggtgtgatcccaagggcgattcatgacattttccaaaaaattaaaaaattccccgatagggaatttctactgcgggtgagctatatggagatctataatgagactatcaccgatttactctgtggcacccagaagatgaaaccgctgatcatcagggaggacgtgaacaggaacgtgtacgttgccgatctaacagaagaagtcgtgtacacatctgaaatggccctgaagtggataaccaaaggagaaaagtcgcgccactacggcgagacgaagatgaaccagcgaagctcgagaagccacacaatttttcggatgatacttgagagccgcgaaaagggggaacctagcaactgcgaggggtctgtgaaagtttctcacctgaatctggtggatcttgctggctccgaacgagctgcccaaacaggagcagcgggagtccgactgaaagagggctgtaacattaatagaagtttgtttatcctcggccaggtgataaaaaaactctctgacggccaggtgggagggtttattaactaccgggattccaagttgacacgcatcttgcaaaactcgctaggcggtaatgctaaaacccgaatcatttgtactattacccccgtctccttcgacgagaccctgaccgctttgcaatttgcatccacagccaagtacatgaaaaatacaccttatgtgaacgaggtctcaacagatgaagcattattgaaaagatatcggaaagaaatcatggacctcaagaaacagctagaagaggtttcgttggagaccagagcccaagccatggagaaagaccaactggcgcagctcttagaggagaaggaccttcttcagaaggtgcagaacgaaaaaatcgaaaatttaaccagaatgttggtcacttcgtccagtctcacactgcagcaggagctgaaggcaaagcgtaagcgccgagtgacctggtgcctggggaagatcaacaaaatgaaaaattctaactatgcagatcagttcaacatcccaaccaatatcacgaccaagacacataagttatccataaatctgctcagggaaatagatgagtccgtgtgctcagaatcagacgtcttcagcaacacactagataccctgtccgagatagagtggaaccctgcaaccaagttactgaaccaggagaacatagagtctgaattaaactccctgcgagccgattacgacaacttagtcctcgattacgagcagctgcggactgagaaggaagaaatggaactcaagctgaaggaaaagaatgacctggacgagtttgaagccctagaacgaaaaacgaagaaagaccaggagaatgagctctcgagcaaagtggaactgctgcgagagaaagaggaccaaatcaaaaaattacaagaatatatagattcccaaaaattggagaacatcaagatggacctgagctactcactggaatcaattgaagatcctaaacagatgaaacaaacgctgttcgatgccgagacggtggcactggacgccaaacgtgaatctgcattcctgagaagcgagaacctggagctcaaagagaagatgaaggagctggctaccacctacaaacagatggaaaatgacatacagctgtaccagagccagttggaggcaaaaaaaaagatgcaggtggatttggagaaggaattgcagtctgccttcaacgagataacaaaactaactagcttgattgacggtaaagtgccaaaagatctgctgtgtaatcttgaactagaaggcaagatcacagatctccaaaaggaactgaacaaagaggtggaggaaaacgaggcactgagggaggaagtcatattgttgagtgagctgaagagcctgccctccgaggtggagcgcctccggaaagagatccaggataaatcagaggaactccacatcatcacatctgaaaaggacaaacttttcagcgaggtggtgcacaaagagagccgagtccagggtttgctagaagaaatcggaaaaactaaggacgacctggcaacaacccagagcaactataagtcgaccgatcaggaattccaaaatttcaaaactctgcatatggactttgaacaaaagtataagatggtgctcgaggagaacgaaagaatgaaccaagaaattgtaaacttgtctaaggaggcccagaaatttgattcatccctcggcgcactgaagactgagttgagctacaaaacccaggagctacaggagaaaacacgggaggtccaggagcggctgaacgagatggagcagctcaaggagcagctcgaaaaccgcgatagtaccctgcagaccgtggaaagggagaaaaccctgatcactgagaaactccagcaaaccctagaggaggtgaagacgttgacccaggaaaaggacgaccttaagcagctgcaagaatctcttcagattgaacgtgatcaacttaaatccgacatccacgataccgtgaatatgaacatcgatacacaggaacagcttagaaatgccctcgagtcacttaagcaacatcaggagaccatcaacacactgaagtcaaagatcagcgaagaggtttctagaaatctgcatatggaagagaatacaggagagaccaaggatgagtttcagcagaaaatggtggggatcgacaaaaagcaagatctggaggcgaagaatacacagacactcacagctgatgtgaaagataatgaaatcatcgaacaacagcgcaaaatcttttctctcattcaggagaaaaacgaacttcagcaaatgctggaatctgtgattgctgaaaaggagcaactcaaaacggaccttaaggagaatattgagatgaccattgaaaatcaggaggagcttaggctgctaggtgatgagctgaagaagcagcaagaaattgtggcccaggaaaaaaatcacgctattaaaaaagagggcgaactgtcacggacatgcgacagactggccgaagttgaagagaaactcaaggagaaatctcagcagctccaggaaaagcaacagcagctactgaacgttcaagaggagatgagtgaaatgcaaaaaaagatcaatgagatagagaacttaaaaaacgagctaaagaacaaggaactgactctggagcacatggagacggagcggctggaactggcacagaaacttaatgagaactatgaggaggtgaagagtatcactaaggagaggaaggtgcttaaggagctccagaagtccttcgaaaccgagcgggatcatttgaggggatatattagggagattgaagccactgggctgcaaaccaaagaagagctgaaaattgcccatatccacttaaaagaacatcaggaaaccatcgatgagcttcgcagatcagtttccgagaaaacagcacagatcataaatacccaggacctggaaaagagtcataccaagctgcaagaagaaatccccgtacttcacgaggaacaggagctcctgccaaatgtcaaggaggtttccgaaacacaggaaacaatgaacgagcttgagctgttgaccgaacagtctaccacaaaggactctactacgttagcgagaatcgaaatggagcgactgagactgaacgaaaagttccaggaatctcaggaagagatcaagagtttaacaaaggaaagagataaccttaagactatcaaagaagccctagaagtcaagcacgaccagttaaaggaacatatacgcgagaccctagccaagattcaggaatcccagtctaaacaggaacagtcgcttaacatgaaggaaaaggataacgaaactacaaaaatagtcagcgagatggaacagtttaaacctaaggattcagccctgcttcgtatcgaaattgagatgttgggtctgagcaagcgtctccaggaatcccatgatgaaatgaagtccgttgcaaaggagaaggacgatttgcagagactgcaggaagtactgcagtcagaaagcgatcagctgaaggagaacattaaagaaatagtcgcaaaacacctggaaaccgaagaagagcttaaggtcgcacattgttgtctcaaagaacaagaggagactatcaacgagttacgcgtaaacctgtcagagaaagagaccgaaatttccacaatccaaaagcagctggaagccattaatgacaagcttcagaacaagatacaagagatttatgaaaaggaagaacagttcaacatcaagcagatttctgaagtgcaagagaaagttaacgaactgaaacagttcaaagaacatcgtaaggcaaaggattccgctctacaatccatcgagagtaagatgctcgagttgaccaatcgcttacaggagagccaggaggagattcagatcatgataaaagagaaagaggaaatgaagcgagttcaggaggctttacagattgagagggatcaactgaaagagaacaccaaagaaattgtcgccaagatgaaagaaagccaggagaaagagtatcaattcttaaagatgacagcggtcaatgaaacgcaagaaaagatgtgcgaaattgaacacctgaaagaacagtttgaaacccagaagctcaacctggagaacattgagaccgagaacatccggttgacccaaattctgcatgaaaatctggaagagatgcgatctgtcaccaaagagagagacgatcttaggtctgtagaggaaactctgaaggttgagcgggatcaactcaaagagaacctgagagagactattacaagggacctggaaaagcaggaggagctgaagatcgttcacatgcatctgaaagagcatcaggagacgatcgataaactcagggggattgtttctgagaagaccaacgaaatcagtaatatgcagaaggatttggagcacagcaacgatgctttaaaagctcaggatcttaaaatccaggaagagttaagaatcgctcatatgcacctaaaggaacaacaagaaacgatcgataagctccggggaatcgtgagtgaaaagacagataagctgtcaaacatgcagaaggaccttgagaacagcaacgcaaaactccaggaaaagatccaagagttaaaggcgaacgagcaccagctgataacactaaaaaaggatgtcaatgaaactcagaagaaagttagtgagatggagcagttaaaaaagcagataaaggatcagtccctgacactatcaaaactggaaatagagaacttgaatttagcacaaaaactgcatgaaaacctggaagagatgaagagcgtaatgaaggaacgcgacaaccttcgccgagtcgaggaaactctcaaacttgaacgggaccaactcaaagagagtttgcaggagacaaaggcaagggatctcgaaattcagcaagagctgaagacggccagaatgttgagcaaggagcataaagagacggtggacaaactcagagagaaaatatctgaaaaaacaattcagataagtgacattcagaaggacctggacaaatccaaggatgagctccagaaaaagcaggatagacagaatcatcaggtgaagcccgaaaaacgacttctctccgatggtcagcaacacctgactgaatctttgcgtgagaaatgcagcaggattaaggaactcctaaagcggtactcagagatggatgaccactatgagtgcctcaacagactgtctctggatctcgaaaaggagatagagtttcagaaggagttgagtatgagagtcaaggccaacctgagtctcccttatctgcagactaagcacatcgagaagctgtttacggccaaccagcgctgctctatggaatttcaccgcatcatgaagaaattgaaatatgtgcttagttatgtgactaaaataaaggaggagcagcacgagtccataaacaagttcgagatggacttcatcgatgaggtggagaagcaaaaagaattgttaattaagatccagcatctgcagcaggattgtgacgtgccttcgcgcgaactacgtgatctgaaattgaatcagaatatggaccttcatatcgaggaaatcctgaaagatttctctgaatctgagtttccgtcaataaaaactgagttccagcaggtgttgagtaaccggaaggagatgactcagttcctggaagaatggctaaacacaaggttcgatatcgaaaaactgaagaacggcatccaaaaagagaatgatcgcatctgtcaggtgaacaatttttttaacaataggattatcgccatcatgaatgaatctactgagttcgaagagagatccgcaacgatcagcaaagagtgggaacaggatctgaagtccttgaaagaaaagaacgagaagctgtttaagaactaccagactctaaaaaccagtctcgcctcaggcgctcaggtcaatcctactacacaagacaacaagaatccacatgtgacaagtagggcgacacagttgacaacagaaaagatccgggagttagagaacagtctgcacgaagcaaaagagtctgccatgcacaaggagagcaagatcattaagatgcagaaggagctagaagtgaccaacgatattatcgccaagctgcaagctaaggtgcatgagtccaataagtgccttgagaagaccaaagagacgatccaggtgttgcaggacaaagttgcgcttggagctaaaccttataaagaggagatcgaagatttaaagatgaagctagtgaagatcgatttggagaaaatgaagaacgccaaggagttcgaaaaggagattagtgcgaccaaggcgactgtcgaataccagaaagaagtcattaggctgctgcgtgagaacctcaggaggtcccagcaagctcaggataccagcgtgatctctgaacacacagacccccagccatccaacaagccactgacgtgcgggggtggctccggtattgtccagaatactaaagctctgatcctgaaaagcgagcacatcagactcgaaaaggagatttcaaagctgaagcagcagaacgaacagctcattaaacaaaagaatgaactgctgagcaataatcagcacctgtccaatgaggtgaagacatggaaagaaagaacactaaaacgggaggcgcacaagcaggtcacctgtgagaacagtcctaaaagcccgaaggttacagggacagcaagtaaaaaaaagcagattactccaagtcaatgcaaagagcggaacctgcaggaccccgtacccaaagagagccccaaatcttgttttttcgattctcgaagcaaatctttaccaagcccccaccccgtccgctacttcgataactctagtctgggcctgtgcccagaggtgcagaatgccggtgctgaatccgtagatagccagcccggtccttggcacgcttcttcaggaaaggacgtgcccgaatgcaagactcagta

SEQ ID NO: 105582 - DNA, 8241 bp, Artificial Sequence
  derived and/or modified sequence
aaatttaaaggcggggcggcctgtgagccctgaagtgccggccgcggagggtcctggccattttcctgggaccagttcagcctgataggatggcggaggaaggagccgtggccgtctgcgtgcgagtgcggccgctgaacagcagagaagaatcacttggagaaactgcccaagtttactggaaaactgacaataatgtcatttatcaagttgatggaagtaaatccttcaattttgatcgtgtctttcatggtaatgaaactaccaaaaatgtgtatgaagaaatagcagcaccaatcatcgattctgccatacaaggctacaatggtactatatttgcctatggacagactgcttcaggaaaaacatataccatgatgggttcagaagatcatttgggagttatacccagggcaattcatgacattttccaaaaaattaagaagtttcctgatagggaatttctcttacgtgtatcttacatggaaatatacaatgaaaccattacagatttactctgtggcactcaaaaaatgaaacctttaattattcgagaagatgtcaataggaatgtgtatgttgctgatctcacagaagaagttgtatatacatcagaaatggctttgaaatggattacaaagggagaaaagagcaggcattatggagaaacaaaaatgaatcaaagaagcagtcgttctcataccatctttaggatgattttggaaagcagagagaagggtgaaccttctaattgtgaaggatctgttaaggtatcccatttgaatttggttgatcttgcaggcagtgaaagagctgctcaaacaggcgctgcaggtgtgcggctcaaggaaggctgtaatataaatcgaagcttatttattttgggacaagtgatcaagaaacttagtgatggacaagttggtggtttcataaattatcgagatagcaagttaacacgaattctccagaattccttgggaggaaatgcaaagacacgtattatctgcacaattactccagtatcttttgatgaaacacttactgctctccagtttgccagtactgctaaatatatgaagaatactccttatgttaatgaggtatcaactgatgaagctctcctgaaaaggtatagaaaagaaataatggatcttaaaaaacaattagaggaggtttctttagagacgcgggctcaggcaatggaaaaagaccaattggcccaacttttggaagaaaaagatttgcttcagaaagtacagaatgagaaaattgaaaacttaacacggatgctggtgacctcttcttccctcacgttgcaacaggaattaaaggctaaaagaaaacgaagagttacttggtgccttggcaaaattaacaaaatgaagaactcaaactatgcagatcaatttaatataccaacaaatataacaacaaaaacacataagctttctataaatttattacgagaaattgatgaatctgtctgttcagagtctgatgttttcagtaacactcttgatacattaagtgagatagaatggaatccagcaacaaagctactaaatcaggagaatatagaaagtgagttgaactcacttcgtgctgactatgataatctggtattagactatgaacaactacgaacagaaaaagaagaaatggaattgaaattaaaagaaaagaatgatttggatgaatttgaggctctagaaagaaaaactaaaaaagatcaagagaatgaactcagttcaaaagtagagctgcttagagaaaaggaagaccagattaagaagctacaggaatacatagactctcaaaagctagaaaatataaaaatggacttgtcatactcattggaaagcattgaagacccaaaacaaatgaagcagactctgtttgatgctgaaactgtagcccttgatgccaagagagaatcagcctttcttagaagtgaaaatctggagctgaaggagaaaatgaaagaacttgcaactacatacaagcaaatggaaaatgatattcagttatatcaaagccagttggaggcaaaaaagaaaatgcaagttgatctggagaaagaattacaatctgcttttaatgagataacaaaactcacctcccttatagatggcaaagttccaaaagatttgctctgtaatttggaattggaaggaaagattactgatcttcagaaagaactaaataaagaagttgaagaaaatgaagctttgcgggaagaagtcattttgctttcagaattgaaatctttaccttctgaagtagaaaggctgaggaaagagatacaagacaaatctgaagagctccatataataacatcagaaaaagataaattgttttctgaagtagttcataaggagagtagagttcaaggtttacttgaagaaattgggaaaacaaaagatgacctagcaactacacagtcgaattataaaagcactgatcaagaattccaaaatttcaaaacccttcatatggactttgagcaaaagtataagatggtccttgaggagaatgagagaatgaatcaggaaatagttaatctctctaaagaagcccaaaaatttgattcgagtttgggtgctttgaagaccgagctttcttacaagacccaagaacttcaggagaaaacacgtgaggttcaagaaagactaaatgagatggaacagctgaaggaacaattagaaaatagagattctacgctgcaaactgtagaaagggagaaaacactgattactgagaaactgcagcaaactttagaagaagtaaaaactttaactcaagaaaaagatgatctaaaacaactccaagaaagcttgcaaattgagagggaccaactcaaaagtgatattcacgatactgttaacatgaatatagatactcaagaacaattacgaaatgctcttgagtctctgaaacaacatcaagaaacaattaatacactaaaatcgaaaatttctgaggaagtttccaggaatttgcatatggaggaaaatacaggagaaactaaagatgaatttcagcaaaagatggttggcatagataaaaaacaggatttggaagctaaaaatacccaaacactaactgcagatgttaaggataatgagataattgagcaacaaaggaagatattttctttaatacaggagaaaaatgaactccaacaaatgttagagagtgttatagcagaaaaggaacaattgaagactgacctaaaggaaaatattgaaatgaccattgaaaaccaggaagaattaagacttcttggggatgaacttaaaaagcaacaagagatagttgcacaagaaaagaaccatgccataaagaaagaaggagagctttctaggacctgtgacagactggcagaagttgaagaaaaactaaaggaaaagagccagcaactccaagaaaaacagcaacaacttcttaatgtacaagaagagatgagtgagatgcagaaaaagattaatgaaatagagaatttaaagaatgaattaaagaacaaagaattgacattggaacatatggaaacagagaggcttgagttggctcagaaacttaatgaaaattatgaggaagtgaaatctataaccaaagaaagaaaagttctaaaggaattacagaagtcatttgaaacagagagagaccaccttagaggatatataagagaaattgaagctacaggcctacaaaccaaagaagaactaaaaattgctcatattcacctaaaagaacaccaagaaactattgatgaactaagaagaagcgtatctgagaagacagctcaaataataaatactcaggacttagaaaaatcccataccaaattacaagaagagatcccagtgcttcatgaggaacaagagttactgcctaatgtgaaagaagtcagtgagactcaggaaacaatgaatgaactggagttattaacagaacagtccacaaccaaggactcaacaacactggcaagaatagaaatggaaaggctcaggttgaatgaaaaatttcaagaaagtcaggaagagataaaatctctaaccaaggaaagagacaaccttaaaacgataaaagaagcccttgaagttaaacatgaccagctgaaagaacatattagagaaactttggctaaaatccaggagtctcaaagcaaacaagaacagtccttaaatatgaaagaaaaagacaatgaaactaccaaaatcgtgagtgagatggagcaattcaaacccaaagattcagcactactaaggatagaaatagaaatgctcggattgtccaaaagacttcaagaaagtcatgatgaaatgaaatctgtagctaaggagaaagatgacctacagaggctgcaagaagttcttcaatctgaaagtgaccagctcaaagaaaacataaaagaaattgtagctaaacacctggaaactgaagaggaacttaaagttgctcattgttgcctgaaagaacaagaggaaactattaatgagttaagagtgaatctttcagagaaggaaactgaaatatcaaccattcaaaagcagttagaagcaatcaatgataaattacagaacaagatccaagagatttatgagaaagaggaacaatttaatataaaacaaattagtgaggttcaggaaaaagtgaatgaactgaaacaattcaaggagcatcgcaaagccaaggattcagcactacaaagtatagaaagtaagatgctcgagttgaccaacagacttcaagaaagtcaagaagaaatacaaattatgattaaggaaaaagaggaaatgaaaagagtacaggaggcccttcagatagagagagaccaactgaaagaaaacactaaagaaattgtagctaaaatgaaagaatctcaagaaaaagaatatcagtttcttaagatgacagctgtcaatgagactcaggagaaaatgtgtgaaatagaacacttgaaggagcaatttgagacccagaagttaaacctggaaaacatagaaacggagaatataaggttgactcagatactacatgaaaaccttgaagaaatgagatctgtaacaaaagaaagagatgaccttaggagtgtggaggagactctcaaagtagagagagaccagctcaaggaaaaccttagagaaactataactagagacctagaaaaacaagaggagctaaaaattgttcacatgcatctgaaggagcaccaagaaactattgataaactaagagggattgtttcagagaaaacaaatgaaatatcaaatatgcaaaaggacttagaacactcaaatgatgccttaaaagcacaggatctgaaaatacaagaggaactaagaattgctcacatgcatctgaaagagcagcaggaaactattgacaaactcagaggaattgtttctgagaagacagataaactatcaaatatgcaaaaagatttagaaaattcaaatgctaaattacaagaaaagattcaagaacttaaggcaaatgaacatcaacttattacgttaaaaaaagatgtcaatgagacacagaaaaaagtgtctgaaatggagcaactaaagaaacaaataaaagaccaaagcttaactctgagtaaattagaaatagagaatttaaatttggctcagaaacttcatgaaaaccttgaagaaatgaaatctgtaatgaaagaaagagataatctaagaagagtagaggagacactcaaactggagagagaccaactcaaggaaagcctgcaagaaaccaaagctagagatctggaaatacaacaggaactaaaaactgctcgtatgctatcaaaagaacacaaagaaactgttgataaacttagagaaaaaatttcagaaaagacaattcaaatttcagacattcaaaaggatttagataaatcaaaagatgaattacagaaaaagcaggaccgacagaaccaccaagtaaaacctgaaaaaaggttactaagtgatggacaacagcaccttacggaaagcctgagagaaaagtgctctagaataaaagagcttttgaagagatactcagagatggatgatcattatgagtgcttgaatagattgtctcttgacttggagaaggaaattgaattccaaaaagagctttcaatgagagttaaagcaaacctctcacttccctatttacaaaccaaacacattgaaaaactttttactgcaaaccagagatgctccatggaattccacagaatcatgaagaaactgaagtatgtgttaagctatgttacaaaaataaaagaagaacaacatgaatccatcaataaatttgaaatggattttattgatgaagtggaaaagcaaaaggaattgctaattaaaatacagcaccttcaacaagattgtgatgtaccatccagagaattaagggatctcaaattgaaccagaatatggatctacatattgaggaaattctcaaagatttctcagaaagtgagttccctagcataaagactgaatttcaacaagtactaagtaataggaaagaaatgacacagtttttggaagagtggttaaatactcgttttgatatagaaaagcttaaaaatggcatccagaaagaaaatgataggatttgtcaagtgaataacttctttaataacagaataattgccataatgaatgaatcaacagagtttgaggaaagaagtgctaccatatccaaagagtgggaacaggacctgaaatcactgaaagagaaaaatgaaaaactatttaaaaactaccaaacattgaagacttccttggcatctggtgcccaggttaatcctaccacacaagacaataagaatcctcatgttacatcaagagctacacagttaaccacagagaaaattcgagagctggaaaattcactgcatgaagctaaagaaagtgctatgcataaggaaagcaagattataaagatgcagaaagaacttgaggtgactaatgacataatagcaaaacttcaagccaaagttcatgaatcaaataaatgccttgaaaaaacaaaagagacaattcaagtacttcaggacaaagttgctttaggagctaagccatataaagaagaaattgaagatctcaaaatgaagcttgtgaaaatagacctagagaaaatgaaaaatgccaaagaatttgaaaaggaaatcagtgctacaaaagccactgtagaatatcaaaaggaagttataaggctattgagagaaaatctcagaagaagtcaacaggcccaagatacctcagtgatatcagaacatactgatcctcagccttcaaataaacccttaacttgtggaggtggcagcggcattgtacaaaacacaaaagctcttattttgaaaagtgaacatataaggctagaaaaagaaatttctaagttaaagcagcaaaatgaacagctaataaaacaaaagaatgaattgttaagcaataatcagcatctttccaatgaggtcaaaacttggaaggaaagaacccttaaaagagaggctcacaaacaagtaacttgtgagaattctccaaagtctcctaaagtgactggaacagcttctaaaaagaaacaaattacaccctctcaatgcaaggaacggaatttacaagatcctgtgccaaaggaatcaccaaaatcttgtttttttgatagccgatcaaagtctttaccatcacctcatccagttcgctattttgataactcaagtttaggcctttgtccagaggtgcaaaatgcaggagcagagagtgtggattctcagccaggtccttggcacgcctcctcaggcaaggatgtgcctgagtgcaaaactcagtagactcctctttgtcacttctctggagatccagcattccttatttggaaatgactttgtttatgtgtctatccctggtaatgatgttgtagtgcagcttaatttcaattcagtctttactttgccactagagttgaaagataagggaacaggaaatgaatgcattgtggtaatttagaatggtgatagcaataccttcttcttgcatatggtaatacttttaaaagttgaattgttttatttatttgtatattttgtaaagaataaagttattgaaagaaatgtaaagttatctacatgacttagcatattccaaagcataatacatacattaatataaaacatcattttattaacaaaattgtaaatgtttttaataccttacacattcaataaatgtttagtagttctg

SEQ ID NO: 105583 - DNA, 7743 bp, Artificial Sequence
  derived and/or modified sequence
atggccgaggagggcgccgtggccgtgtgcgtgagagtgagacccctgaacagcagagaggagagcctgggcgagaccgcccaggtgtactggaagaccgacaacaacgtgatctaccaggtggacggcagcaagagcttcaacttcgacagagtgttccacggcaacgagaccaccaagaacgtgtacgaggagatcgccgcccccatcatcgacagcgccatccagggctacaacggcaccatcttcgcctacggccagaccgccagcggcaagacctacaccatgatgggcagcgaggaccacctgggcgtgatccccagagccatccacgacatcttccagaagatcaagaagttccccgacagagagttcctgctgagagtgagctacatggagatctacaacgagaccatcaccgacctgctgtgcggcacccagaagatgaagcccctgatcatcagagaggacgtgaacagaaacgtgtacgtggccgacctgaccgaggaggtggtgtacaccagcgagatggccctgaagtggatcaccaagggcgagaagagcagacactacggcgagaccaagatgaaccagagaagcagcagaagccacaccatcttcagaatgatcctggagagcagagagaagggcgagcccagcaactgcgagggcagcgtgaaggtgagccacctgaacctggtggacctggccggcagcgagagagccgcccagaccggcgccgccggcgtgagactgaaggagggctgcaacatcaacagaagcctgttcatcctgggccaggtgatcaagaagctgagcgacggccaggtgggcggcttcatcaactacagagacagcaagctgaccagaatcctgcagaacagcctgggcggcaacgccaagaccagaatcatctgcaccatcacccccgtgagcttcgacgagaccctgaccgccctgcagttcgccagcaccgccaagtacatgaagaacaccccctacgtgaacgaggtgagcaccgacgaggccctgctgaagagatacagaaaggagatcatggacctgaagaagcagctggaggaggtgagcctggagaccagagcccaggccatggagaaggaccagctggcccagctgctggaggagaaggacctgctgcagaaggtgcagaacgagaagatcgagaacctgaccagaatgctggtgaccagcagcagcctgaccctgcagcaggagctgaaggccaagagaaagagaagagtgacctggtgcctgggcaagatcaacaagatgaagaacagcaactacgccgaccagttcaacatccccaccaacatcaccaccaagacccacaagctgagcatcaacctgctgagagagatcgacgagagcgtgtgcagcgagagcgacgtgttcagcaacaccctggacaccctgagcgagatcgagtggaaccccgccaccaagctgctgaaccaggagaacatcgagagcgagctgaacagcctgagagccgactacgacaacctggtgctggactacgagcagctgagaaccgagaaggaggagatggagctgaagctgaaggagaagaacgacctggacgagttcgaggccctggagagaaagaccaagaaggaccaggagaacgagctgagcagcaaggtggagctgctgagagagaaggaggaccagatcaagaagctgcaggagtacatcgacagccagaagctggagaacatcaagatggacctgagctacagcctggagagcatcgaggaccccaagcagatgaagcagaccctgttcgacgccgagaccgtggccctggacgccaagagagagagcgccttcctgagaagcgagaacctggagctgaaggagaagatgaaggagctggccaccacctacaagcagatggagaacgacatccagctgtaccagagccagctggaggccaagaagaagatgcaggtggacctggagaaggagctgcagagcgccttcaacgagatcaccaagctgaccagcctgatcgacggcaaggtgcccaaggacctgctgtgcaacctggagctggagggcaagatcaccgacctgcagaaggagctgaacaaggaggtggaggagaacgaggccctgagagaggaggtgatcctgctgagcgagctgaagagcctgcccagcgaggtggagagactgagaaaggagatccaggacaagagcgaggagctgcacatcatcaccagcgagaaggacaagctgttcagcgaggtggtgcacaaggagagcagagtgcagggcctgctggaggagatcggcaagaccaaggacgacctggccaccacccagagcaactacaagagcaccgaccaggagttccagaacttcaagaccctgcacatggacttcgagcagaagtacaagatggtgctggaggagaacgagagaatgaaccaggagatcgtgaacctgagcaaggaggcccagaagttcgacagcagcctgggcgccctgaagaccgagctgagctacaagacccaggagctgcaggagaagaccagagaggtgcaggagagactgaacgagatggagcagctgaaggagcagctggagaacagagacagcaccctgcagaccgtggagagagagaagaccctgatcaccgagaagctgcagcagaccctggaggaggtgaagaccctgacccaggagaaggacgacctgaagcagctgcaggagagcctgcagatcgagagagaccagctgaagagcgacatccacgacaccgtgaacatgaacatcgacacccaggagcagctgagaaacgccctggagagcctgaagcagcaccaggagaccatcaacaccctgaagagcaagatcagcgaggaggtgagcagaaacctgcacatggaggagaacaccggcgagaccaaggacgagttccagcagaagatggtgggcatcgacaagaagcaggacctggaggccaagaacacccagaccctgaccgccgacgtgaaggacaacgagatcatcgagcagcagagaaagatcttcagcctgatccaggagaagaacgagctgcagcagatgctggagagcgtgatcgccgagaaggagcagctgaagaccgacctgaaggagaacatcgagatgaccatcgagaaccaggaggagctgagactgctgggcgacgagctgaagaagcagcaggagatcgtggcccaggagaagaaccacgccatcaagaaggagggcgagctgagcagaacctgcgacagactggccgaggtggaggagaagctgaaggagaagagccagcagctgcaggagaagcagcagcagctgctgaacgtgcaggaggagatgagcgagatgcagaagaagatcaacgagatcgagaacctgaagaacgagctgaagaacaaggagctgaccctggagcacatggagaccgagagactggagctggcccagaagctgaacgagaactacgaggaggtgaagagcatcaccaaggagagaaaggtgctgaaggagctgcagaagagcttcgagaccgagagagaccacctgagaggctacatcagagagatcgaggccaccggcctgcagaccaaggaggagctgaagatcgcccacatccacctgaaggagcaccaggagaccatcgacgagctgagaagaagcgtgagcgagaagaccgcccagatcatcaacacccaggacctggagaagagccacaccaagctgcaggaggagatccccgtgctgcacgaggagcaggagctgctgcccaacgtgaaggaggtgagcgagacccaggagaccatgaacgagctggagctgctgaccgagcagagcaccaccaaggacagcaccaccctggccagaatcgagatggagagactgagactgaacgagaagttccaggagagccaggaggagatcaagagcctgaccaaggagagagacaacctgaagaccatcaaggaggccctggaggtgaagcacgaccagctgaaggagcacatcagagagaccctggccaagatccaggagagccagagcaagcaggagcagagcctgaacatgaaggagaaggacaacgagaccaccaagatcgtgagcgagatggagcagttcaagcccaaggacagcgccctgctgagaatcgagatcgagatgctgggcctgagcaagagactgcaggagagccacgacgagatgaagagcgtggccaaggagaaggacgacctgcagagactgcaggaggtgctgcagagcgagagcgaccagctgaaggagaacatcaaggagatcgtggccaagcacctggagaccgaggaggagctgaaggtggcccactgctgcctgaaggagcaggaggagaccatcaacgagctgagagtgaacctgagcgagaaggagaccgagatcagcaccatccagaagcagctggaggccatcaacgacaagctgcagaacaagatccaggagatctacgagaaggaggagcagttcaacatcaagcagatcagcgaggtgcaggagaaggtgaacgagctgaagcagttcaaggagcacagaaaggccaaggacagcgccctgcagagcatcgagagcaagatgctggagctgaccaacagactgcaggagagccaggaggagatccagatcatgatcaaggagaaggaggagatgaagagagtgcaggaggccctgcagatcgagagagaccagctgaaggagaacaccaaggagatcgtggccaagatgaaggagagccaggagaaggagtaccagttcctgaagatgaccgccgtgaacgagacccaggagaagatgtgcgagatcgagcacctgaaggagcagttcgagacccagaagctgaacctggagaacatcgagaccgagaacatcagactgacccagatcctgcacgagaacctggaggagatgagaagcgtgaccaaggagagagacgacctgagaagcgtggaggagaccctgaaggtggagagagaccagctgaaggagaacctgagagagaccatcaccagagacctggagaagcaggaggagctgaagatcgtgcacatgcacctgaaggagcaccaggagaccatcgacaagctgagaggcatcgtgagcgagaagaccaacgagatcagcaacatgcagaaggacctggagcacagcaacgacgccctgaaggcccaggacctgaagatccaggaggagctgagaatcgcccacatgcacctgaaggagcagcaggagaccatcgacaagctgagaggcatcgtgagcgagaagaccgacaagctgagcaacatgcagaaggacctggagaacagcaacgccaagctgcaggagaagatccaggagctgaaggccaacgagcaccagctgatcaccctgaagaaggacgtgaacgagacccagaagaaggtgagcgagatggagcagctgaagaagcagatcaaggaccagagcctgaccctgagcaagctggagatcgagaacctgaacctggcccagaagctgcacgagaacctggaggagatgaagagcgtgatgaaggagagagacaacctgagaagagtggaggagaccctgaagctggagagagaccagctgaaggagagcctgcaggagaccaaggccagagacctggagatccagcaggagctgaagaccgccagaatgctgagcaaggagcacaaggagaccgtggacaagctgagagagaagatcagcgagaagaccatccagatcagcgacatccagaaggacctggacaagagcaaggacgagctgcagaagaagcaggacagacagaaccaccaggtgaagcccgagaagagactgctgagcgacggccagcagcacctgaccgagagcctgagagagaagtgcagcagaatcaaggagctgctgaagagatacagcgagatggacgaccactacgagtgcctgaacagactgagcctggacctggagaaggagatcgagttccagaaggagctgagcatgagagtgaaggccaacctgagcctgccctacctgcagaccaagcacatcgagaagctgttcaccgccaaccagagatgcagcatggagttccacagaatcatgaagaagctgaagtacgtgctgagctacgtgaccaagatcaaggaggagcagcacgagagcatcaacaagttcgagatggacttcatcgacgaggtggagaagcagaaggagctgctgatcaagatccagcacctgcagcaggactgcgacgtgcccagcagagagctgagagacctgaagctgaaccagaacatggacctgcacatcgaggagatcctgaaggacttcagcgagagcgagttccccagcatcaagaccgagttccagcaggtgctgagcaacagaaaggagatgacccagttcctggaggagtggctgaacaccagattcgacatcgagaagctgaagaacggcatccagaaggagaacgacagaatctgccaggtgaacaacttcttcaacaacagaatcatcgccatcatgaacgagagcaccgagttcgaggagagaagcgccaccatcagcaaggagtgggagcaggacctgaagagcctgaaggagaagaacgagaagctgttcaagaactaccagaccctgaagaccagcctggccagcggcgcccaggtgaaccccaccacccaggacaacaagaacccccacgtgaccagcagagccacccagctgaccaccgagaagatcagagagctggagaacagcctgcacgaggccaaggagagcgccatgcacaaggagagcaagatcatcaagatgcagaaggagctggaggtgaccaacgacatcatcgccaagctgcaggccaaggtgcacgagagcaacaagtgcctggagaagaccaaggagaccatccaggtgctgcaggacaaggtggccctgggcgccaagccctacaaggaggagatcgaggacctgaagatgaagctggtgaagatcgacctggagaagatgaagaacgccaaggagttcgagaaggagatcagcgccaccaaggccaccgtggagtaccagaaggaggtgatcagactgctgagagagaacctgagaagaagccagcaggcccaggacaccagcgtgatcagcgagcacaccgacccccagcccagcaacaagcccctgacctgcggcggcggcagcggcatcgtgcagaacaccaaggccctgatcctgaagagcgagcacatcagactggagaaggagatcagcaagctgaagcagcagaacgagcagctgatcaagcagaagaacgagctgctgagcaacaaccagcacctgagcaacgaggtgaagacctggaaggagagaaccctgaagagagaggcccacaagcaggtgacctgcgagaacagccccaagagccccaaggtgaccggcaccgccagcaagaagaagcagatcacccccagccagtgcaaggagagaaacctgcaggaccccgtgcccaaggagagccccaagagctgcttcttcgacagcagaagcaagagcctgcccagcccccaccccgtgagatacttcgacaacagcagcctgggcctgtgccccgaggtgcagaacgccggcgccgagagcgtggacagccagcccggcccctggcacgccagcagcggcaaggacgtgcccgagtgcaagacccagtag

SEQ ID NO: 105584 - DNA, 1143 bp, Artificial Sequence
  derived and/or modified sequence
atgagcctgagcgactggcacctggccgtgaagctggccgaccagcccctgacccccaagagcatcctgagactgcccgagaccgagctgggcgagtacagcctgggcggctacagcatcagcttcctgaagcagctgatcgccggcaagctgcaggagagcgtgcccgaccccgagctgatcgacctgatctactgcggcagaaagctgaaggacgaccagaccctggacttctacggcatccagcccggcagcaccgtgcacgtgctgagaaagagctggcccgagcccgaccagaagcccgagcccgtggacaaggtggccgccatgagagagttcagagtgctgcacaccgccctgcacagcagcagcagctacagagaggccgtgttcaagatgctgagcaacaaggagagcctggaccagatcatcgtggccacccccggcctgagcagcgaccccatcgccctgggcgtgctgcaggacaaggacctgttcagcgtgttcgccgaccccaacatgctggacaccctggtgcccgcccaccccgccctggtgaacgccatcgtgctggtgctgcacagcgtggccggcagcgcccccatgcccggcaccgacagcagcagcagaagcatgcccagcagcagctacagagacatgcccggcggcttcctgttcgagggcctgagcgacgacgaggacgacttccaccccaacaccagaagcacccccagcagcagcacccccagcagcagacccgccagcctgggctacagcggcgccgccggccccagacccatcacccagagcgagctggccaccgccctggccctggccagcacccccgagagcagcagccacacccccacccccggcacccagggccacagcagcggcaccagccccatgagcagcggcgtgcagagcggcacccccatcaccaacgacctgttcagccaggccctgcagcacgccctgcaggccagcggccagcccagcctgcagagccagtggcagccccagctgcagcagctgagagacatgggcatccaggacgacgagctgagcctgagagccctgcaggccaccggcggcgacatccaggccgccctggagctgatcttcgccggcggcgccccctag

SEQ ID NO: 105585 - DNA, 1143 bp, Artificial Sequence
  derived and/or modified sequence
atgtccctgagtgattggcacctcgctgttaagctcgcggaccaacctcttacaccgaagtctattctgcggctgccagagactgagctgggtgagtactccctgggtggatatagcattagtttcttgaagcagctcattgcagggaaattgcaagagagcgtaccagaccccgaactgatcgacctaatttactgcgggcgcaaactgaaagatgaccagacactggatttctacgggattcagccaggatctactgttcatgtgctgagaaaatcctggccagagcctgaccagaagcccgagcccgtggataaggtagccgccatgcgcgagttccgagtgttgcacactgcacttcacagcagctcctcttaccgcgaagccgtgtttaagatgctgagcaataaggagtctcttgaccagatcattgttgccacaccaggactttcgtcagatccaatagcactgggcgtcctccaagataaagatctgttctcagttttcgcagatcctaacatgctagacaccttggtgcccgcccaccctgcactggtaaacgctattgtgctcgtgcttcactccgtggccggctctgccccaatgccaggaacagattcctcatcacgaagcatgccatcttcatcctatagagacatgcccggggggttcctgttcgagggtctgtctgacgacgaagacgatttccatcctaacacgcggtctaccccctccagtagcacaccctcctccagacccgctagcttaggctattcaggagctgctggcccacgccccattacccagtctgagctggctacggcgctcgccctcgctagcactccagaatccagttcccacaccccaactcctggcacccagggacactctagcggaacctctcccatgtcctcgggagttcagtcaggaacacctatcaccaacgaccttttcagtcaggcattgcagcatgccttgcaggctagcggacaaccctccctccaatcgcagtggcaacctcagcttcagcagctcagagacatgggtattcaagatgatgagctctccctacgcgcgctgcaggcaactggcggagacatacaggctgctctggaactgattttcgcaggtggcgcaccctag

SEQ ID NO: 105586 - DNA, 1143 bp, Artificial Sequence
  derived and/or modified sequence
atgtcattatctgattggcatctggcggtcaagctggcagaccagccccttactcccaaaagtatactccggttacccgaaacagaactgggagagtattccctgggcggatacagcatcagctttctgaaacaactgatagcaggcaagcttcaagagtcagtgcctgaccctgaacttattgatctcatctattgcgggcgcaagctgaaggacgatcaaaccctggatttttatggcattcagccaggcagcacagtccacgtgctacgcaagtcctggcccgaaccagatcaaaagcccgagccagtggacaaagtggccgctatgagggaatttcgggtactccacactgctttacacagtagtagctcttatcgcgaggccgtgttcaaaatgttgagtaacaaagagtcccttgatcagattatcgtagccacgcctggcttgtcgagcgaccccattgccttaggagttctgcaggacaaggacttgttcagcgtgtttgctgatcctaacatgttagataccctggtcccagcacatcctgcacttgtgaacgcaattgtcctcgtactacattccgtggccgggtctgctcccatgccaggcacggatagctcaagccgctccatgccaagctcctcgtatcgcgacatgcctggcgggtttttattcgaggggctgtctgatgacgaggatgattttcaccccaacacacggtctacaccttctagcagtaccccctcttctaggcccgcctctctgggttacagtggagccgcaggtccccgccctataacccagtccgagctcgctacggccctggctcttgcctctacccccgaatccagttcccacactcccacacccggtacccaaggccacagttcagggacatctccaatgagtagtggtgtacagtccgggacgccaattactaatgacctgttttctcaggctctgcagcacgccctgcaggcaagcggccaacccagcctccaaagccaatggcagccacaactgcagcagctacgcgacatgggaattcaggacgatgagctgtcgttgagggcgctacaagccacaggtggagatattcaggctgcgttggagctcatcttcgccgggggtgccccttag

SEQ ID NO: 105587 - DNA, 1143 bp, Artificial Sequence
  derived and/or modified sequence
atgagcctgagtgactggcacctggccgtgaagctggccgaccagcccctgacccccaagagcatcctgcggctgcctgagacagagctgggggagtacagcctgggcggctacagcatctccttcctgaagcagctgattgctgggaagctgcaggagagcgtgcctgaccctgagctgattgacctgatctactgcggcaggaagctgaaggatgaccagaccctggacttctacggcatccagcccggcagcacagtgcacgtgctgaggaagtcctggccagagccagaccagaagccagagcctgtggacaaggtggccgccatgagggagttccgggtgctgcacacagccctgcacagcagcagcagctaccgggaggccgtgttcaagatgctgagcaacaaggagagcctggaccagatcatcgtggccaccccaggcctgagcagtgaccccatcgccctgggcgtgctgcaggacaaggacctcttctctgtgtttgctgaccccaacatgctggacaccctggtgcctgcccacccagccctggtgaatgccatcgtgctggtgctgcacagcgtggccggcagcgcccccatgcctggaacagacagcagcagccgctccatgcccagcagcagctacagagacatgcctgggggcttcctgtttgagggcctgagtgatgatgaagatgacttccaccccaacaccaggagcacccccagcagcagcacccccagcagcaggcctgccagcctgggctacagcggggccgccggcccccggcccatcacccagagcgagctggccacagccctggccctggccagcaccccagagagcagcagccacacccccaccccaggcacccagggccacagcagcggcaccagccccatgagcagtggagtgcagagcggcacccccatcaccaatgacctcttcagccaggccctgcagcacgccctgcaggccagcggccagcccagcctgcagagccagtggcagccccagctgcagcagctgcgggacatgggcatccaggatgatgagctgagcctgcgggccctgcaggccactggaggagacatccaggccgccctggagctgatctttgctgggggcgccccctag

SEQ ID NO: 105588 - DNA, 1143 bp, Artificial Sequence
  derived and/or modified sequence
atgagcctgagcgactggcacctggccgtgaagctggccgaccagccgctgacaccgaaatccatattacgcctccctgagaccgaactcggtgagtattctttgggcggctatagtatctccttccttaagcagctcatagctggtaaactgcaggagagcgtcccagaccccgaactcatcgacctgatttattgcggtagaaaacttaaggacgaccaaacccttgacttctatggaatccagccaggttcgacagttcacgtcctccgcaagagttggcctgagcccgaccaaaagcctgagcccgttgataaagttgctgcgatgagagagttccgagttctgcacactgctcttcatagctcctcttcttatcgggaggcagttttcaagatgttatccaacaaagagagcctggatcaaatcattgttgccacacccggtttgtccagtgacccaatcgcacttggcgtgctgcaggataaagatctgttctccgtgttcgccgaccccaacatgctggacaccctggtgccggcccacccagccctcgtgaacgccattgtcctcgtgctccattccgttgcgggctcagcccctatgcctgggacagattctagcagccgttctatgccctcgtcaagctaccgggatatgcccgggggcttcttattcgaaggactgtccgatgatgaggacgactttcatccaaatactaggagcacaccgagcagcagtactccaagcagccgcccagcgagcctcggatactctggggctgcaggccctagaccaataacacagagcgagctcgcaacggccctggcactcgcttccaccccagagtcatcctcacatacccctacgcccgggactcagggccacagctcagggaccagcccgatgagcagcggtgtccagagcgggacaccgatcacaaatgatctgttttcccaggcattgcaacacgctttacaggcttccggacagccgtccctccagagccaatggcaaccacagttgcagcagctgagagatatgggaatccaggacgatgagctcagtctacgtgccctccaggccaccggcggagatattcaagctgctctggaactgatctttgccggaggggctccttag

SEQ ID NO: 105589 - DNA, 1143 bp, Artificial Sequence
  derived and/or modified sequence
atgagcctgagcgactggcacctggccgtgaagctggccgaccagcccctgacgccaaagtctattctccgattgcctgaaactgaactgggagaatattcactgggggggtatagcatctcattcctcaagcagctgatcgctggtaaacttcaggagagtgtcccagatcccgagctgatagatctgatctactgtggccgcaagctgaaagacgaccagacactggacttttacggcattcagccgggcagtaccgtccacgtacttaggaagagctggcccgagcccgatcagaagcccgagcctgtggataaagtggcagccatgcgggagtttagggtcctgcacacagcactgcactcttcctcttcatatcgtgaagcagtattcaaaatgctgtcaaataaggaaagcttggatcagatcattgtggccacccccggactgagttctgacccaatcgctcttggggttctccaagacaaggacctgttcagcgtgtttgcggaccctaacatgctggataccttggtcccagctcacccagccttagttaacgcaatcgtgctagtgctgcactctgtcgctggatctgctccgatgccaggtaccgacagttcaagccggtctatgccgtcaagctcctaccgtgacatgccaggcggctttctgttcgaagggctctcagacgacgaggacgatttccatccaaatacgaggagtacccctagttcttctaccccatcgagtcggccggcctcactcggatactctggtgcagcaggccctcgtccaatcactcagtctgaattggccacagcccttgccctcgcatcaaccccggagtcctcctctcatacccccaccccagggactcaggggcacagctccggcacctcacccatgtcgagcggagtccagtctgggacccccatcacgaatgatcttttctctcaggcccttcagcacgcgctgcaagcatccggccagccttccctgcagagccagtggcagcctcaactccagcagctgcgcgatatgggtattcaagatgatgaacttagtcttcgggccctccaggcaaccggcggcgacattcaggccgcactggagttgatcttcgccgggggggcaccgtag

SEQ ID NO: 105590 - DNA, 1143 bp, Artificial Sequence
  derived and/or modified sequence
atgagcctgtcagactggcaccttgcagtgaaacttgctgatcagccactgactcccaagagcatcctgaggttgcccgagactgaattaggtgagtactcacttgggggttatagtatcagcttcctgaagcagctgatcgccggtaaattgcaagaatccgtacccgatccagaattgattgatctgatttattgtggcagaaagctgaaagatgatcagaccctggatttctatggaatccaaccaggaagcaccgtccacgttctccgcaagagctggcccgaacccgaccagaagcccgaaccggtcgacaaggtggctgcaatgcgtgagtttagggtgctgcacacagccctgcacagctcatcgtcctatcgtgaagctgtcttcaagatgttatctaataaagagagtctggatcagatcatcgtggctactccgggactgtccagcgatccaatcgctctcggtgttctgcaagacaaggatctgttttccgtgtttgccgacccaaatatgttagacacgctggttcctgcacacccagctctggtaaacgccatagtgctggtgttgcattccgttgcaggctctgccccaatgccaggtaccgactcctcgagtagatcaatgccctcttctagctaccgtgacatgcccggtggatttctgttcgaaggtctctccgacgacgaagacgacttccaccccaacacaaggagtaccccaagcagctcgacgccatcttcgaggccagcctccctgggttactctggggctgctggccctcgacccataacgcaatcagagcttgccacggctcttgcgctggcctcgacccctgagagctcctcacatacaccaactccgggaacacagggccattccagcggcacctcccccatgtcttccggggtgcagagcgggacccctattaccaacgatctattttctcaggcactacaacacgcccttcaagcttctggccagcctagcctccaaagccaatggcagccccagttgcaacaactgagggacatgggcatccaggatgacgagctgtctctcagggcgctgcaggccacgggcggagacattcaggcagcccttgagctcatattcgctggcggagcaccatag

SEQ ID NO: 105591 - DNA, 1143 bp, Artificial Sequence
  derived and/or modified sequence
atgtcgctgagcgattggcacttggctgtgaaactggctgaccagcccctgacaccaaagtcaatcctccgtctgcccgaaaccgaacttggcgaatacagtctgggcggttatagcatctcattcctcaaacagctgatagccggtaaactgcaagaatccgtgcccgacccggaactgatcgatctaatatactgcggacgaaaactgaaggacgaccaaactctggacttttacggcattcaacctggaagtaccgtgcacgtgttgcgcaaaagttggccagagcccgatcagaaacctgaaccagtagataaggtagctgccatgcgggaattccgggtgctccacactgcccttcacagcagttcctcatatagagaggctgtgtttaagatgctttccaacaaggagtcactcgatcagattatagtggcgacccccggtctgagctccgaccccattgctctcggcgtgctgcaagataaggatctgttttctgtctttgctgatccaaacatgctcgacacacttgtcccagctcatcctgccctggtgaatgcaattgtgctggtgctgcactccgtggccggtagcgcacctatgccaggcacggactcatcaagcaggtctatgccgagcagctcttatcgcgacatgccaggagggttcctgttcgaagggctgtctgatgatgaagatgacttccaccccaatacgcgttctaccccaagttccagtacaccatcctccagacccgcaagtctcggttatagtggagccgctggaccaaggccgattacccaatctgagctggccactgcactcgcactcgcctccactccggaaagtagcagccacacccccacgcccggaactcaaggccactcttcaggcactagccctatgtcatccggagtccagtcaggcacacccattactaatgacttgttcagccaagcgttgcagcacgccctccaggcctctgggcagccatcattgcagagccagtggcagccccaactgcaacaactaagagatatgggcatacaggatgacgagctaagcttacgcgctctccaggccacaggcggtgacatccaagcagctctagaactcatttttgccggaggtgccccttag

SEQ ID NO: 105592 - DNA, 1360 bp, Artificial Sequence
  derived and/or modified sequence
tccggtttccggcgagagggccagagtgagtgtttacaccggcggcagtgcggccgggttccttccgcgggacggggagaaagagagagcgcgaaagagagaggatgtctctctcagactggcacctggcggtgaagctggctgaccagccacttactccaaagtctattcttcggttgccagagacagaactgggagaatactcgctagggggctatagtatttcatttctgaagcagcttattgctggcaaactccaggagtctgttccagaccctgagctgattgatctgatctactgtggtcggaagctaaaagatgaccagacacttgacttctatggcattcaacctgggtccactgtccatgttctgcgaaagtcctggcctgaacctgatcagaaaccggaacctgtggacaaagtggctgccatgagagagttccgggtgttgcacactgccctgcacagcagctcctcttacagggaggcggtctttaagatgctcagcaataaggagtctctggatcagatcattgtggccaccccaggcctcagcagtgaccctattgctcttggggttctccaggacaaggacctcttctctgtcttcgctgatcccaatatgcttgatacgttggtgcctgctcacccagccctcgtcaatgccattgtcctggttctgcactccgtagcaggcagtgccccaatgcctgggactgactcctcttcccggagcatgccctccagctcataccgggatatgccaggtggcttcctgtttgaagggctctcagatgatgaggatgactttcacccaaacaccaggtccacaccctctagcagtactcccagctcccgcccagcctccctggggtacagtggagctgctgggccccggcccatcacccagagtgagctggccaccgccttggccctggccagcactccggagagcagctctcacacaccgactcctggcacccagggtcattcctcagggacctcaccaatgtcctctggtgtccagtcagggacgcccatcaccaatgatctcttcagccaagccctacagcatgcccttcaggcctctgggcagcccagccttcagagccagtggcagccccagctgcagcagctacgtgacatgggcatccaggacgatgagctgagcctgcgggccctgcaggccaccggtggggacatccaagcagccctggagctcatctttgctggaggagccccatgaactccctgcttcccctgaacccccagcaagttgcagaggctactgcccttgggaggcactcatgaaggtgcctccatctctcccttccccaatatacctgatggtcaactctc

SEQ ID NO: 105593 - protein, 380 aa, Artificial Sequence
  derived and/or modified sequence
MSLSDWHLAVKLADQPLTPKSILRLPETELGEYSLGGYSISFLKQLIAGKLQESVPDPELIDLIYCGRKLKDDQTLDFYGIQPGSTVHVLRKSWPEPDQKPEPVDKVAAMREFRVLHTALHSSSSYREAVFKMLSNKESLDQIIVATPGLSSDPIALGVLQDKDLFSVFADPNMLDTLVPAHPALVNAIVLVLHSVAGSAPMPGTDSSSRSMPSSSYRDMPGGFLFEGLSDDEDDFHPNTRSTPSSSTPSSRPASLGYSGAAGPRPITQSELATALALASTPESSSHTPTPGTQGHSSGTSPMSSGVQSGTPITNDLFSQALQHALQASGQPSLQSQWQPQLQQLRDMGIQDDELSLRALQATGGDIQAALELIFAGGAP

SEQ ID NO: 105594 - DNA, 1427 bp, Artificial Sequence
  derived and/or modified sequence
gtttccggcgagagggccagagtgagtgtttacaccggcggcagtgcggccgggttccttccgcgggacgggtgagggcgctggggccctgggcagcgcgggctcgatgtgtgtcagccaagtagctggtcccactggagcgggagaaagagagagcgcgaaagagagaggatgtctctctcagactggcacctggcggtgaagctggctgaccagccacttactccaaagtctattcttcggttgccagagacagaactgggagaatactcgctagggggctatagtatttcatttctgaagcagcttattgctggcaaactccaggagtctgttccagaccctgagctgattgatctgatctactgtggtcggaagctaaaagatgaccagacacttgacttctatggcattcaacctgggtccactgtccatgttctgcgaaagtcctggcctgaacctgatcagaaaccggaacctgtggacaaagtggctgccatgagagagttccgggtgttgcacactgccctgcacagcagctcctcttacagggaggcggtctttaagatgctcagcaataaggagtctctggatcagatcattgtggccaccccaggcctcagcagtgaccctattgctcttggggttctccaggacaaggacctcttctctgtcttcgctgatcccaatatgcttgatacgttggtgcctgctcacccagccctcgtcaatgccattgtcctggttctgcactccgtagcaggcagtgccccaatgcctgggactgactcctcttcccggagcatgccctccagctcataccgggatatgccaggtggcttcctgtttgaagggctctcagatgatgaggatgactttcacccaaacaccaggtccacaccctctagcagtactcccagctcccgcccagcctccctggggtacagtggagctgctgggccccggcccatcacccagagtgagctggccaccgccttggccctggccagcactccggagagcagctctcacacaccgactcctggcacccagggtcattcctcagggacctcaccaatgtcctctggtgtccagtcagggacgcccatcaccaatgatctcttcagccaagccctacagcatgcccttcaggcctctgggcagcccagccttcagagccagtggcagccccagctgcagcagctacgtgacatgggcatccaggacgatgagctgagcctgcgggccctgcaggccaccggtggggacatccaagcagccctggagctcatctttgctggaggagccccatgaactccctgcttcccctgaacccccagcaagttgcagaggctactgcccttgggaggcactcatgaaggtgcctccatctctcccttccccaatatacctgatggtcaactctc

SEQ ID NO: 105595 - protein, 559 aa, Artificial Sequence
  derived and/or modified sequence
MGDVKESKMQITPETPGRIPVLNPFESPSDYSNLHEQTLASPSVFKSTKLPTPGKFRWSIDQLAVINPVEIDPEDIHRQALYLSHSRIDKDVEDKRQKAIEEFFTKDVIVPSPWTDHEGKQLSQCHSSKCTNINSDSPVGKKLTIHSEKSDAACQTLLSLPVDFNLENILGDYFRADEFADQSPGNLSSSSLRRKLFLDGNGSISDSLPSASPGSPHSGVQTSLEMFYSIDLSPVKCRSPLQTPSSGQFSSSPIQASAKKYSLGSITSPSPISSPTFSPIEFQIGETPLSEQRKFTVHSPDASSGTNSNGITNPCIRSPYIDGCSPIKNWSPMRLQMYSGGTQYRTSVIQIPFTLETQGEDEEDKENIPSTDVSSPAMDAAGIHLRQFSNEASTHGTHLVVTAMSVTQNQSSASEKELALLQDVEREKDNNTVDMVDPIEIADETTWIKEPVDNGSLPMTDFVSGIAFSIENSHMCMSPLAESSVIPCESSNIQMDSGYNTQNCGSNIMDTVGAESYCKESDAQTCEVESKSQAFNMKQDHTTQRCWMKTASPFQCSSP

SEQ ID NO: 105596 - DNA, 1680 bp, Artificial Sequence
  derived and/or modified sequence
atgggcgacgtgaaggagagcaagatgcagatcacccccgagacccccggcagaatccccgtgctgaaccccttcgagagccccagcgactacagcaacctgcacgagcagaccctggccagccccagcgtgttcaagagcaccaagctgcccacccccggcaagttcagatggagcatcgaccagctggccgtgatcaaccccgtggagatcgaccccgaggacatccacagacaggccctgtacctgagccacagcagaatcgacaaggacgtggaggacaagagacagaaggccatcgaggagttcttcaccaaggacgtgatcgtgcccagcccctggaccgaccacgagggcaagcagctgagccagtgccacagcagcaagtgcaccaacatcaacagcgacagccccgtgggcaagaagctgaccatccacagcgagaagagcgacgccgcctgccagaccctgctgagcctgcccgtggacttcaacctggagaacatcctgggcgactacttcagagccgacgagttcgccgaccagagccccggcaacctgagcagcagcagcctgagaagaaagctgttcctggacggcaacggcagcatcagcgacagcctgcccagcgccagccccggcagcccccacagcggcgtgcagaccagcctggagatgttctacagcatcgacctgagccccgtgaagtgcagaagccccctgcagacccccagcagcggccagttcagcagcagccccatccaggccagcgccaagaagtacagcctgggcagcatcaccagccccagccccatcagcagccccaccttcagccccatcgagttccagatcggcgagacccccctgagcgagcagagaaagttcaccgtgcacagccccgacgccagcagcggcaccaacagcaacggcatcaccaacccctgcatcagaagcccctacatcgacggctgcagccccatcaagaactggagccccatgagactgcagatgtacagcggcggcacccagtacagaaccagcgtgatccagatccccttcaccctggagacccagggcgaggacgaggaggacaaggagaacatccccagcaccgacgtgagcagccccgccatggacgccgccggcatccacctgagacagttcagcaacgaggccagcacccacggcacccacctggtggtgaccgccatgagcgtgacccagaaccagagcagcgccagcgagaaggagctggccctgctgcaggacgtggagagagagaaggacaacaacaccgtggacatggtggaccccatcgagatcgccgacgagaccacctggatcaaggagcccgtggacaacggcagcctgcccatgaccgacttcgtgagcggcatcgccttcagcatcgagaacagccacatgtgcatgagccccctggccgagagcagcgtgatcccctgcgagagcagcaacatccagatggacagcggctacaacacccagaactgcggcagcaacatcatggacaccgtgggcgccgagagctactgcaaggagagcgacgcccagacctgcgaggtggagagcaagagccaggccttcaacatgaagcaggaccacaccacccagagatgctggatgaagaccgccagccccttccagtgcagcagcccctag

SEQ ID NO: 105597 - DNA, 1680 bp, Artificial Sequence
  derived and/or modified sequence
atgggagacgtcaaggaatccaagatgcaaatcacacccgagactccaggaaggattccagttcttaacccttttgaaagtccttccgattatagtaatctgcatgagcagacactggcctctcccagcgtgtttaaaagcacaaaactgccaactcccggcaaatttcggtggagcattgatcagctcgccgttataaaccctgtggagatcgacccagaggacatacaccgacaggccctgtatctctctcacagtaggattgataaagacgtggaagacaaaagacagaaggccatcgaagagttcttcactaaggacgtgattgtgccctcaccctggactgatcatgagggcaaacaactgtcccagtgtcattccagcaaatgcaccaacattaatagtgacagtcccgttggcaagaaattgaccattcattccgagaagtcagacgccgcctgtcagactctgctctcgcttccagtcgatttcaacctagagaacatactgggcgattactttcgggccgatgagtttgccgatcagagcccaggtaacttgagcagttctagtctgcggagaaaactgtttcttgatgggaatggctccataagcgattccctcccttcggctagtccaggcagtccgcactcaggcgtgcaaacttccctggagatgttttattcgatcgatctctctccagtgaagtgcaggagtccattgcaaacacccagttcaggtcagttctcttccagccctatacaggcttctgctaagaagtatagcctcggttcgatcaccagtccctctcccatttcgtccccaacattttccccgattgaattccagatcggagaaactcctctgtccgagcagaggaagttcaccgtccactctccagatgcatccagcggaactaactctaacggcataacgaacccatgtatcagaagcccctacattgacggctgtagccccatcaaaaactggtccccaatgcgcctccagatgtactcgggcggcacccaatatcgcacatctgttattcagattccgtttacgctggagacacagggagaggacgaggaagacaaagagaatataccttccacagatgtgtcgtccccggctatggacgccgctgggatacacctccgacagttttctaatgaagccagcacacatggcactcacctagtggtgaccgccatgagtgttacacaaaaccagtcatcggccagcgaaaaggaacttgctttattgcaggatgtagaaagagagaaagataacaatacggttgacatggttgatccaatagagattgccgacgagacgacatggatcaaagaacctgtggacaacggcagcctacctatgactgactttgtgtccggcatcgcttttagtatcgagaattcacacatgtgcatgagtcctctcgctgagtcttccgtgatcccttgcgagtctagcaatatccagatggattcaggatataacacccagaactgtggaagcaacatcatggacaccgtgggcgctgagtcatactgcaaagagagcgatgcccagacctgtgaagtggaaagtaaatcgcaagccttcaatatgaaacaagatcatacaacccagagatgctggatgaagactgcttcccctttccaatgttcttcgccttag

SEQ ID NO: 105598 - DNA, 1680 bp, Artificial Sequence
  derived and/or modified sequence
atgggagatgtgaaggagagcaagatgcagatcaccccagagaccccaggccgcatccctgtgctgaacccctttgagagccccagcgactacagcaacctgcacgagcagaccctggccagccccagcgtcttcaagagcaccaagctgcccaccccaggcaagttccgctggagcattgaccagctggccgtcatcaaccctgtggagattgatcctgaggacatccaccggcaggccctgtacctgagccacagcagaattgacaaggatgtggaggacaagaggcagaaggccatcgaggagttcttcaccaaggatgtgattgtgcccagcccctggacagaccacgagggcaagcagctgagccagtgccacagcagcaagtgcaccaacatcaacagcgacagccctgtgggcaagaagctgaccatccacagcgagaagagtgatgctgcctgccagaccctgctgagcctgcctgtggacttcaacctggagaacatcctgggggactacttccgggcagatgaatttgctgaccagagccctggcaacctgagcagcagcagcctgcggaggaagctgttcctggatggaaatggcagcatcagtgacagcctgcccagcgccagccctggcagcccccacagcggcgtgcagaccagcctggagatgttctacagcattgacctgagccctgtgaagtgccgcagccccctgcagacccccagcagcggccagttcagcagcagccccatccaggccagcgccaagaagtacagcctgggcagcatcaccagccccagccccatcagcagccccaccttcagccccatcgagttccagatcggggagacccccctgtctgagcagaggaagttcaccgtgcacagcccagatgccagcagcggcaccaacagcaatggcatcaccaacccctgcatccgcagcccctacattgatggctgcagccccatcaagaactggagccccatgaggctgcagatgtacagcggcggcacccagtaccgcaccagcgtcatccagatccccttcaccctggagacccagggagaagatgaggaggacaaggagaacatccccagcacagatgtgagcagccctgccatggatgctgctggcatccacctgcggcagttcagcaatgaggccagcacccacggcacccacctggtggtgacagccatgtctgtgacccagaaccagagcagcgccagcgagaaggagctggccctgctgcaggatgtggagcgggagaaggacaacaacacagtggacatggtggaccccattgaaattgctgatgagaccacctggatcaaggagcctgtggacaatggcagcctgcccatgacagactttgtgtctggcatcgccttcagcattgagaacagccacatgtgcatgagccccctggccgagagcagcgtcatcccctgtgagagcagcaacatccagatggattctggctacaacacccagaactgtggcagcaacatcatggacacagtgggcgctgagagctactgcaaggagagtgatgcccagacctgtgaggtggagagcaagagccaggccttcaacatgaagcaggaccacaccacccagcgctgctggatgaagacagccagccccttccagtgcagcagcccctag

SEQ ID NO: 105599 - DNA, 1680 bp, Artificial Sequence
  derived and/or modified sequence
atgggcgacgtgaaggagagcaagatgcagatcacccccgagacccctggccgcatccctgtgctgaacccgtttgaatcaccttcggattactctaatttacatgagcaaacactggcaagcccctccgtctttaagagcacgaagctaccaaccccagggaaattccggtggtcaattgaccagctggccgtgatcaaccctgtagaaattgaccccgaagatatccacagacaggcattatatttatcacattctaggatcgacaaggacgtggaagacaagcggcaaaaggccattgaagaattctttaccaaggatgtgatcgtgccttctccttggacagatcatgaggggaaacagttgagtcagtgccactcttccaaatgtactaatatcaacagcgatagtccagtgggaaagaagttgactatacactcggaaaagtccgacgccgcttgccagacattactcagtctgccagtggatttcaatcttgagaatattctaggggactactttagggccgatgagttcgcggaccagtcaccgggtaatctgagtagtagctctttaagacgtaagttgtttctcgatgggaacggcagcatctcagacagccttccaagcgccagtcccggctcaccacactctggcgtccaaacctcacttgaaatgttctacagcattgacctctctcccgttaaatgtagaagtcccttacagaccccttcctctggccagttctctagctcgccaatccaagcgtccgccaagaagtacagcctcggctccatcacgtcaccttctcccatcagctccccgacatttagcccgatcgagtttcaaatcggagagactccactgtctgagcagagaaaattcaccgtccactcaccggacgccagtagcggcacaaactccaatgggataactaatccttgtatcaggtccccatacattgacggctgctcccccataaagaactggtccccaatgcgccttcagatgtatagcggaggaacccagtaccggacaagtgtcatacagattcctttcaccctagagacccagggtgaggacgaggaggacaaagagaatattccttctacggatgtctcttcaccagccatggacgccgcgggaattcacctgagacagttcagcaatgaggcaagcacccatggcacccatcttgtcgtaacagcaatgagtgtgacccaaaaccagagcagcgcctccgagaaggaactggcgctcctgcaggacgtcgaaagagagaaggataacaatacagttgacatggtcgatcccattgagattgcagacgagacgacctggattaaagaaccagttgataacgggtcactacccatgacagatttcgtgagcggtatcgccttttcaattgaaaattcacatatgtgcatgtcgccattagccgagagctccgtgattccctgtgagtctagcaatatccaaatggacagtggctataatactcagaactgcgggagtaacattatggacacagtaggcgccgagagctattgtaaggaatccgatgcacagacttgcgaggtggagagtaaatctcaggccttcaatatgaagcaggaccatacaactcagcggtgctggatgaagacggccagtccgttccagtgttctagtccatag

SEQ ID NO: 105600 - DNA, 1680 bp, Artificial Sequence
  derived and/or modified sequence
atgggggacgtgaaggagagtaagatgcagattaccccagaaacgccgggtcggataccggtcctcaacccttttgaaagcccatcagactatagtaatctgcatgaacagaccctggcttcaccctcagtgttcaaaagcactaagctgccgacgcccggaaaatttcgctggtcaatcgatcaactggccgtgatcaaccctgtggagatcgacccagaggacattcacagacaagctctctacctgagccactccaggatcgataaggatgtggaggataaaagacagaaagccatcgaagagttcttcacaaaagatgtgattgtgccaagcccctggactgaccacgaggggaagcagctgtcccaatgccatagctcgaaatgtaccaacattaatagtgacagccctgtgggtaagaaattaacgatccactctgaaaaatccgatgcagcttgccagaccctgctttcccttcccgtggactttaacctggaaaacattctaggagattacttccgcgcagatgagttcgctgatcagagccctgggaatctgtctagcagctctctgcgccgaaagctgtttctagacgggaatggatccatcagcgactccctacctagcgctagtcccggatctcctcatagcggtgtacagaccagcctggaaatgttttattcaattgacctgtctcctgtgaagtgccgctctccactgcagacgccctcaagcggccagttctcgagcagccctattcaagcaagcgctaagaaatactcacttggctcaataaccagtccgtcccccattagctctcctacctttagccccatcgagttccagatcggagaaacacccctctccgaacagcggaagtttactgtgcatagtcccgatgccagtagtggcaccaattctaacggtatcaccaatccttgcattagatctccatatattgacggatgtagtccaatcaagaactggtctcccatgagactgcagatgtactctggaggcacccaataccggaccagcgtgattcaaatcccctttacactggagacccaaggcgaggatgaagaagacaaggagaacataccgagtacagacgtttcgagtccagctatggatgccgcaggtatccacctccgtcagttttctaacgaagcctccacccatggaacacatttagtcgtaactgctatgtctgtcacccagaaccagagctctgccagcgaaaaggaactcgctctcctgcaggatgtggaacgtgagaaggacaacaacaccgtagatatggtggatcctattgagattgccgatgagacgacgtggatcaaagagcccgtcgacaatggctctctcccaatgaccgactttgtgtcaggcattgcattttctattgagaattcccacatgtgtatgtcaccactcgcagagtcatctgtgatcccatgcgaatcctccaacatacagatggatagtgggtataatacgcagaactgtggcagcaatattatggatactgtgggtgctgagtcctactgcaaggaatctgatgcgcagacctgcgaggtcgaatcaaagtctcaggcatttaacatgaagcaggatcataccacacagagatgctggatgaaaaccgcctctcccttccagtgcagcagcccatag

SEQ ID NO: 105601 - protein, 489 aa, Artificial Sequence
  derived and/or modified sequence
MNKLSPVLLFLNQQNYQIDKDVEDKRQKAIEEFFTKDVIVPSPWTDHEGKQLSQCHSSKCTNINSDSPVGKKLTIHSEKSDAACQTLLSLPVDFNLENILGDYFRADEFADQSPGNLSSSSLRRKLFLDGNGSISDSLPSASPGSPHSGVQTSLEMFYSIDLSPVKCRSPLQTPSSGQFSSSPIQASAKKYSLGSITSPSPISSPTFSPIEFQIGETPLSEQRKFTVHSPDASSGTNSNGITNPCIRSPYIDGCSPIKNWSPMRLQMYSGGTQYRTSVIQIPFTLETQGEDEEDKENIPSTDVSSPAMDAAGIHLRQFSNEASTHGTHLVVTAMSVTQNQSSASEKELALLQDVEREKDNNTVDMVDPIEIADETTWIKEPVDNGSLPMTDFVSGIAFSIENSHMCMSPLAESSVIPCESSNIQMDSGYNTQNCGSNIMDTVGAESYCKESDAQTCEVESKSQAFNMKQDHTTQRCWMKTASPFQCSSP

SEQ ID NO: 105602 - DNA, 1470 bp, Artificial Sequence
  derived and/or modified sequence
atgaacaagctgagccccgtgctgctgttcctgaaccagcagaactaccagatcgacaaggacgtggaggacaagagacagaaggccatcgaggagttcttcaccaaggacgtgatcgtgcccagcccctggaccgaccacgagggcaagcagctgagccagtgccacagcagcaagtgcaccaacatcaacagcgacagccccgtgggcaagaagctgaccatccacagcgagaagagcgacgccgcctgccagaccctgctgagcctgcccgtggacttcaacctggagaacatcctgggcgactacttcagagccgacgagttcgccgaccagagccccggcaacctgagcagcagcagcctgagaagaaagctgttcctggacggcaacggcagcatcagcgacagcctgcccagcgccagccccggcagcccccacagcggcgtgcagaccagcctggagatgttctacagcatcgacctgagccccgtgaagtgcagaagccccctgcagacccccagcagcggccagttcagcagcagccccatccaggccagcgccaagaagtacagcctgggcagcatcaccagccccagccccatcagcagccccaccttcagccccatcgagttccagatcggcgagacccccctgagcgagcagagaaagttcaccgtgcacagccccgacgccagcagcggcaccaacagcaacggcatcaccaacccctgcatcagaagcccctacatcgacggctgcagccccatcaagaactggagccccatgagactgcagatgtacagcggcggcacccagtacagaaccagcgtgatccagatccccttcaccctggagacccagggcgaggacgaggaggacaaggagaacatccccagcaccgacgtgagcagccccgccatggacgccgccggcatccacctgagacagttcagcaacgaggccagcacccacggcacccacctggtggtgaccgccatgagcgtgacccagaaccagagcagcgccagcgagaaggagctggccctgctgcaggacgtggagagagagaaggacaacaacaccgtggacatggtggaccccatcgagatcgccgacgagaccacctggatcaaggagcccgtggacaacggcagcctgcccatgaccgacttcgtgagcggcatcgccttcagcatcgagaacagccacatgtgcatgagccccctggccgagagcagcgtgatcccctgcgagagcagcaacatccagatggacagcggctacaacacccagaactgcggcagcaacatcatggacaccgtgggcgccgagagctactgcaaggagagcgacgcccagacctgcgaggtggagagcaagagccaggccttcaacatgaagcaggaccacaccacccagagatgctggatgaagaccgccagccccttccagtgcagcagcccctag

SEQ ID NO: 105603 - DNA, 1470 bp, Artificial Sequence
  derived and/or modified sequence
atgaataagctcagcccggttctcttattcctgaatcagcagaattatcaaattgacaaggacgtggaggacaagcgccagaaagccattgaggagttctttaccaaagatgtgattgtgcctagtccatggacagaccacgaggggaagcagctgtcacaatgccacagcagcaaatgcaccaatataaattctgatagccccgtggggaagaaactcacgatccattcggaaaagagcgacgctgcatgccagacactgcttagcttgccagtcgattttaacctggaaaatatcctgggtgattacttccgggctgacgaattcgcggaccagagcccgggcaacctgtcctcctcctctctcaggcgaaaactgtttttggacgggaatggaagcatcagtgacagcctgcccagcgccagtcccggatctcctcatagcggcgttcagaccagtcttgagatgttctattcaatcgatctgtcccccgtcaagtgcagatctccccttcagacaccttccagcggccagttcagctcaagtcctatacaggcctctgcaaagaaatactccctgggaagcattacgtcacccagtccgatctcttctcccacattcagtcctatagaattccagatcggcgaaacacccctctcagagcagagaaaatttacagtacacagtcctgatgcttcctccgggactaactcaaacggtattacgaatccctgcatccgctccccttatatagatggatgctctcccattaagaattggagccctatgagactgcagatgtacagcggtggaacccaatatcgaaccagcgtcattcagataccctttacactggagacacaaggggaagatgaggaggataaggagaatatacccagcactgacgtgagctcacccgcgatggatgctgccggcatacacctccgccagttcagcaacgaggcaagtacccatgggacccatctggttgtcactgccatgtccgtgacccaaaaccagtctagtgcttcggagaaagagttggcgcttctccaagacgtggaacgagagaaggacaacaataccgtcgacatggtcgacccaatagagattgcagacgaaaccacttggataaaagagccagtggataacggtagtctcccaatgacggatttcgtatcaggaatcgcatttagcattgagaatagccacatgtgcatgtctcccttagccgaatcgtcagtgatcccatgcgaatcaagtaacattcagatggatagtggttacaacacgcagaactgtgggagcaacattatggatacagtcggtgcagagagctattgcaaagagtcagatgcgcagacctgtgaggtagaatccaaatcccaagctttcaatatgaagcaggatcatactacacagcgctgttggatgaagaccgcatctccttttcagtgcagcagcccttag

SEQ ID NO: 105604 - DNA, 1470 bp, Artificial Sequence
  derived and/or modified sequence
atgaacaagctgagccctgtgctgctcttcctgaaccagcagaactaccagattgacaaggatgtggaggacaagaggcagaaggccatcgaggagttcttcaccaaggatgtgattgtgcccagcccctggacagaccacgagggcaagcagctgagccagtgccacagcagcaagtgcaccaacatcaacagcgacagccctgtgggcaagaagctgaccatccacagcgagaagagtgatgctgcctgccagaccctgctgagcctgcctgtggacttcaacctggagaacatcctgggggactacttccgggcagatgaatttgctgaccagagccctggcaacctgagcagcagcagcctgcggaggaagctgttcctggatggaaatggcagcatcagtgacagcctgcccagcgccagccctggcagcccccacagcggcgtgcagaccagcctggagatgttctacagcattgacctgagccctgtgaagtgccgcagccccctgcagacccccagcagcggccagttcagcagcagccccatccaggccagcgccaagaagtacagcctgggcagcatcaccagccccagccccatcagcagccccaccttcagccccatcgagttccagatcggggagacccccctgtctgagcagaggaagttcaccgtgcacagcccagatgccagcagcggcaccaacagcaatggcatcaccaacccctgcatccgcagcccctacattgatggctgcagccccatcaagaactggagccccatgaggctgcagatgtacagcggcggcacccagtaccgcaccagcgtcatccagatccccttcaccctggagacccagggagaagatgaggaggacaaggagaacatccccagcacagatgtgagcagccctgccatggatgctgctggcatccacctgcggcagttcagcaatgaggccagcacccacggcacccacctggtggtgacagccatgtctgtgacccagaaccagagcagcgccagcgagaaggagctggccctgctgcaggatgtggagcgggagaaggacaacaacacagtggacatggtggaccccattgaaattgctgatgagaccacctggatcaaggagcctgtggacaatggcagcctgcccatgacagactttgtgtctggcatcgccttcagcattgagaacagccacatgtgcatgagccccctggccgagagcagcgtcatcccctgtgagagcagcaacatccagatggattctggctacaacacccagaactgtggcagcaacatcatggacacagtgggcgctgagagctactgcaaggagagtgatgcccagacctgtgaggtggagagcaagagccaggccttcaacatgaagcaggaccacaccacccagcgctgctggatgaagacagccagccccttccagtgcagcagcccctag

SEQ ID NO: 105605 - DNA, 1470 bp, Artificial Sequence
  derived and/or modified sequence
atgaacaagctgagccccgtgctgctgttcctgaaccagcagaactaccaaatcgacaaggacgtagaggataaacggcaaaaagctatagaagagtttttcactaaagacgttatcgtaccatccccatggaccgaccatgagggcaagcagttgtcgcagtgtcactcttcaaagtgcacaaatatcaatagcgactctccagtcggcaaaaaactgaccattcacagcgagaaatcggacgctgcatgccagaccctgctttcgctccctgtagacttcaatttggaaaacatcctcggagattatttcagggcagacgagttcgcagatcagtcccctggcaacctcagtagctcttctctccgacggaaattgttcctagacggaaatggatctatcagcgattccctcccgagcgctagtccgggaagccctcactccggagtgcaaacctccctggagatgttctactcaatagacctctctcctgtgaaatgtcggtcccctctgcagaccccctcttccggacagttcagctcctcacctatacaggctagcgccaagaaatatagtttgggcagtatcacaagtcccagtcctatatcttccccgactttcagccccattgagttccagattggggaaacccccttgtccgaacagcgaaagtttacggtccactctccggatgcttcatccggtacaaatagtaacggaataacaaatccctgcattagatccccttacatcgacggctgctcacctatcaagaactggtcccccatgcgactgcagatgtattccggaggcactcaataccggacaagcgtgatccagatcccctttaccctggagactcagggggaggacgaggaagacaaagagaatatcccgagcactgacgtgagttcacctgctatggatgcagccgggattcacctgcgtcaatttagcaatgaagcgtcaacccatggtacccatctagtagtgacagccatgtcagtcacacaaaaccagtcttcggcatctgagaaagaactcgcccttctgcaagacgttgagcgggagaaagacaataacactgttgacatggtcgatcccatagagatcgccgatgaaaccacctggatcaaagagccggtcgataatggatcactccccatgaccgacttcgtctccgggattgcctttagtatagagaactcacatatgtgcatgtctcctttggcagaatcaagtgtgatcccctgcgaatcatctaatatccagatggatagcgggtacaatactcagaattgtggatccaacattatggacactgtcggggccgaatcttactgtaaggagagtgatgcgcagacctgcgaggtggaaagtaagtctcaggcatttaacatgaaacaggaccacaccacccagaggtgctggatgaaaacggccagcccctttcaatgcagttctccttag

SEQ ID NO: 105606 - DNA, 1470 bp, Artificial Sequence
  derived and/or modified sequence
atgaataaacttagccctgtgctcctgtttctaaaccagcagaattaccagatcgataaagatgtggaggacaaaaggcagaaggcaatagaagagttcttcacaaaagatgttatagttcccagcccttggaccgaccacgagggcaagcagttgagccaatgccacagcagcaagtgcacgaacataaactccgactccccagtaggaaagaagttaaccatccactccgaaaagtcagatgccgcatgtcaaaccctgttgagcctccccgttgattttaacctggaaaacattctaggggactacttccgcgctgatgaatttgccgaccagtctcctggcaacctgtctagctcttccctgaggcgtaaactgtttctcgatggaaatggaagcatatccgactctcttccctcagcttccccgggatcaccccatagcggagtgcaaaccagcctggagatgttctattcaattgatctttctcctgttaagtgtcggtcgcctcttcagacaccatcatcaggtcagttttccagtagcccgattcaggcatccgccaagaagtattccctcggttcaatcacgagtccatcaccaatctcttcaccgactttctctccaatcgagttccagattggcgagaccccgttgagcgaacagaggaagtttaccgtgcattcaccggatgcttctagcggtaccaattcgaacggcatcaccaacccttgcatcagatccccctacattgacgggtgtagtcccatcaagaattggagtcccatgcggttgcagatgtattctggtggaacacagtaccggacttcagtaatccagatccccttcacccttgagacccagggtgaggatgaggaagataaggaaaacataccttcaacggacgtgagttctcccgctatggacgccgcaggcatacacctcagacagttcagcaatgaagcttctacacacgggacgcaccttgttgtgaccgcgatgagtgttactcagaatcagagttctgctagcgagaaggaacttgctctactacaggatgtggagcgtgagaaggataacaacacagtggatatggtggatcctattgagatcgctgatgaaactacatggattaaagaaccagtcgacaatggatctctccctatgacagatttcgtgtctggtatagccttctcaatcgaaaactctcacatgtgtatgagcccgctcgccgagtcctccgtgattccatgcgagtccagcaatatccagatggattccggctacaatactcagaactgcggaagcaatatcatggacacagtcggcgctgagagttactgcaaggagtcagatgcacaaacatgcgaggttgaatcaaaatcgcaggccttcaacatgaagcaagaccacaccactcagagatgctggatgaaaactgcttctcccttccagtgcagctccccttag

SEQ ID NO: 105607 - DNA, 1785 bp, Artificial Sequence
  derived and/or modified sequence
aaagagtctatgcctgtcgtggaagctggcctggcccccggagctccctggagtcggtactgggggcttcgttttgtacgcaccgttttctctctgtgctatgggagatgtcaaggaatcaaagatgcaaataacaccagaaactccaggaaggatccctgttttaaatccttttgaaagtcctagtgattattctaatctccatgaacaaactctcgccagtccttctgtttttaaatcaacaaaattaccaaatagataaagatgtggaagacaaaagacaaaaagccattgaagagtttttcactaaagatgtcatcgtaccctctccttggactgatcatgaagggaaacagctttcacaatgtcattccagtaaatgcactaacataaatagtgactctccagttggaaaaaagctgaccattcattctgagaaaagcgatgctgcttgtcagacattgctgtctcttcctgtggattttaatttagaaaatatattaggtgactattttagagctgatgaatttgcagatcaatctcctggaaacctcagttcttcatccctcagaagaaagctgtttttagatgggaacggaagcatctccgactccttaccttcggcttctcccggaagtcctcacagtggtgttcaaacatcactagagatgttttattcaatagatttgtctcctgtaaagtgtaggagccccttgcagacaccaagttcggggcagttttcttctagccctattcaggctagtgcaaaaaaatacagcttgggaagcataactagtccttcgcctatttcttcacccactttctcaccaattgaatttcagataggagagactccactctcagaacaaaggaagtttactgttcattctcctgatgcttcatctggaacaaattctaatgggataactaatccgtgtatcagaagtccttatatagatggctgctcgccaattaaaaattggtctcctatgagacttcagatgtatagtggtggtactcagtatcggacctcagtgattcagataccttttactcttgagactcaaggtgaagatgaggaagataaagagaatattccttccacagatgtctcatcacccgccatggatgctgctggaatacacctacggcagtttagtaatgaggcttctacccatggtacacatttggttgtgactgccatgtctgttacacaaaatcagtccagtgcttctgagaaagaattagcactgttgcaggatgttgaaagggagaaagacaataacactgtggatatggttgatcctatagagatagcagatgagaccacttggattaaggagccggttgataatggcagtttacccatgactgattttgtaagtggcattgccttcagtattgaaaactctcatatgtgcatgtcacctcttgctgaaagcagtgtcattccttgtgaaagcagtaacattcagatggatagtggctataatacgcagaattgtggaagcaatattatggatacagttggggcagaaagttactgcaaagaaagtgatgcacaaacatgtgaagttgagagtaaatctcaagcatttaatatgaagcaagaccacacaacacagaggtgttggatgaaaacagcaagcccttttcaatgcagcagtccatagaatgcctctgtcagaatcaaagactaagcttaagagttcctcgcatatatcgttgtgcacaggatcaacatgatggtgactgggaaaaaattacttcaagtaacatgcttag

SEQ ID NO: 105608 - DNA, 1332 bp, Artificial Sequence
  derived and/or modified sequence
gcacaaattcgcagcaggcggctggggcggcggctggggcagcggctgcagcagcggcggacgctctgcattacccagtcttgcgtcctcggcaggcgcccgaagctgagtgcgcatcctctaccgcacccaagcttcgtctgtctcgtcaagctcttcatgctgcccaactaaaaggaaaacatgggcacaggggattttatctgcatttccatgactggaggggcgccctgggggttcagattgcaaggtggcaaggagcagaagcagcccttacaagttgcaaagattcgaaatcagagcaaagcctctgggtctgggctctgtgagggagatgaagtggtttccatcaatggcaacccttgtgcagatctcacctaccctgaagtcatcaagctcatggaaagcataacagactctctccaaatgctcatcaaaaggagagtgggcgctccctttctcttcctggaagatcagtcccaccccccatttctacatctccttgggtataccagcctacttatagttactctagtaaaccaaccgatggactagagaaagcaaacaagagaccaactccttgggaagcagcagcaaagtctcctctcggtctagtggatgatgctttccaacccagaaacatccaggaatccattgtggcaaatgtggtttcagcagctcggaggaaggtgcttccagggcctccagaggattggaatgaaagactgtcctatattcctcaaacccagaaggcctatatgggctcatgtggaaggcaagagtataatgtcacagccaataataatatgtccaccacctcccaatatggttcacagttgccatatgcatattataggcaggcttcaagaaatgattctgcaatcatgtccatggaaaccaggtctgattactgtcttccagtagctgattacaactacaacccacacccaaggggatggagacgccaaacatgaaagttagaagaacggatcatgtgccaactgtagttttttaaaaaaaacgctcctttgtagggttttaaacttttctaatagatttagattcacttttggtcttggcttgttctcataagtcatttatctaagtttgtgtttctgtgtgtgtgtgtgtgtgtgtatgtatgtgaatatacacacacacacacacacaggtgagtgtgaatacttccttgttggctgatccatagagcattacttggaagaaaatttcactatttgcattgatgtgctggcatttatatgtaattcataattttgattccattaataggtagtctatgcaacaaactctactcaattaaagtaaaactaa

SEQ ID NO: 105609 - protein, 123 aa, Artificial Sequence
  derived and/or modified sequence
MGTGDFICISMTGGAPWGFRLQGGKEQKQPLQVAKIRNQSKASGSGLCEGDEVVSINGNPCADLTYPEVIKLMESITDSLQMLIKRRVGAPFLFLEDQSHPPFLHLLGYTSLLIVTLVNQPMD

SEQ ID NO: 105610 - DNA, 372 bp, Artificial Sequence
  derived and/or modified sequence
atgggcaccggcgacttcatctgcatcagcatgaccggcggcgccccctggggcttcagactgcagggcggcaaggagcagaagcagcccctgcaggtggccaagatcagaaaccagagcaaggccagcggcagcggcctgtgcgagggcgacgaggtggtgagcatcaacggcaacccctgcgccgacctgacctaccccgaggtgatcaagctgatggagagcatcaccgacagcctgcagatgctgatcaagagaagagtgggcgcccccttcctgttcctggaggaccagagccacccccccttcctgcacctgctgggctacaccagcctgctgatcgtgaccctggtgaaccagcccatggactag

SEQ ID NO: 105611 - DNA, 372 bp, Artificial Sequence
  derived and/or modified sequence
atgggcaccggagatttcatctgcatttctatgaccgggggtgctccttggggattcagattacagggaggcaaagagcagaagcagcccctccaagtcgcaaaaatccgcaatcagagcaaggcttccggttctggcctgtgcgagggggacgaagtggtgagtatcaacggcaatccatgcgccgacctcacatacccggaggtgatcaaactgatggagtcaatcacagatagtctgcagatgttgattaaacgaagggtgggggctccattcttatttctcgaagatcagtctcatcctcccttccttcatctcctgggctacacctccctgctcatcgtaaccctggtcaatcagcctatggactag

SEQ ID NO: 105612 - DNA, 372 bp, Artificial Sequence
  derived and/or modified sequence
atgggcactggagacttcatctgcatctccatgactggaggagccccctggggcttccggctgcagggcggcaaggagcagaagcagcccctgcaggtggccaagatccggaaccagagcaaggccagcggcagcggcctgtgtgaaggagatgaggtggtgtccatcaatggaaacccctgtgccgacctgacctacccagaggtgatcaagctgatggagagcatcacagacagcctgcagatgctgatcaagagaagagtgggcgcccccttcctgttcctggaggaccagagccacccccccttcctgcacctgctgggctacaccagcctgctgattgtgaccctggtgaaccagcccatggactag

SEQ ID NO: 105613 - DNA, 372 bp, Artificial Sequence
  derived and/or modified sequence
atgggcaccggcgacttcatctgcatcagcatgaccggcggcgccccatggggcttcagattgcagggcggcaaggagcagaagcagcccctgcaggtcgcgaagatacgaaaccagagcaaagcctcaggtagcgggttatgcgagggcgacgaggtggtttcgataaatggcaacccgtgtgccgatttgacttatccagaggttattaaactaatggaatcgatcacggactctctacaaatgttgatcaagcgacgagtgggggcgccattcctgtttttggaagatcagagccatcctcctttcctgcacctgttgggctacacctccctactcatcgttaccctggttaatcaacctatggactag

SEQ ID NO: 105614 - DNA, 372 bp, Artificial Sequence
  derived and/or modified sequence
atgggcacaggtgatttcatctgtattagcatgactgggggagctccatgggggttccggctgcaagggggaaaggagcagaagcagccactgcaggtcgccaaaattaggaaccagtccaaagcaagcggcagcgggctttgcgagggcgacgaggtggtttccatcaatggcaatccttgtgccgatttgacatatcccgaagtgattaaactgatggagtccattaccgatagcctacagatgctgatcaaacgccgtgtgggcgctcccttcctttttctcgaagaccaatctcacccgcctttcctccaccttctgggctacacctcattgttgatcgtgactctcgttaaccagcctatggactag

SEQ ID NO: 105615 - protein, 162 aa, Artificial Sequence
  derived and/or modified sequence
MLRFPTCFPSFRVVGEKQLPQEIIFLVWSPKRDLIALANTAGEVLLHRLASFHRVWSFPPNENTGKEVTCLAWRPDGKLLAFALADTKKIVLCDVEKPESLHSFSVEAPVSCMHWMEVTVESSVLTSFYNAEDESNLLLPKLPTLPKNYSNTSKIFSEENSD

SEQ ID NO: 105616 - protein, 809 aa, Artificial Sequence
  derived and/or modified sequence
MLRFPTCFPSFRVVGEKQLPQEIIFLVWSPKRDLIALANTAGEVLLHRLASFHRVWSFPPNENTGKEVTCLAWRPDGKLLAFALADTKKIVLCDVEKPESLHSFSVEAPVSCMHWMEVTVESSVLTSFYNAEDESNLLLPKLPTLPKNYSNTSKIFSEENSDEIIKLLGDVRLNILVLGGSSGFIELYAYGMFKIARVTGIAGTCLALCLSSDLKSLSVVTEVSTNGASEVSYFQLETNLLYSFLPEVTRMARKFTHISALLQYINLSLTCMCEAWEEILMQMDSRLTKFVQEKNTTTSVQDEFMHLLLWGKASAELQTLLMNQLTVKGLKKLGQSIESSYSSIQKLVISHLQSGSESLLYHLSELKGMASWKQKYEPLGLDAAGIEEAITAVGSFILKANELLQVIDSSMKNFKAFFRWLYVAMLRMTEDHVLPELNKVMTQKDITFVAEFLTEHFNEAPDLYNRKGKYFNVERVGQYLKDEDDDLVSPPNTEGNQWYDFLQNSSHLKESPLLFPYYPRKSLHFVKRRMENIIDQCLQKPADVIGKSMNQAICIPLYRDTRSEDSTRRLFKFPFLWNNKTSNLHYLLFTILEDSLYKMCILRRHTDISQSVSNGLIAIKFGSFTYATTEKVRRSIYSCLDAQFYDDETVTVVLKDTVGREGRDRLLVQLPLSLVYNSEDSAEYQFTGTYSTRLDEQCSAIPTRTMHFEKHWRLLESMKAQYVAGNGFRKVSCVLSSNLRHVRVFEMDIDDEWELDESSDEEEEASNKPVKIKEEVLSESEAENQQAGAAALAPEIVIKVEKLDPELDS

SEQ ID NO: 105617 - DNA, 2430 bp, Artificial Sequence
  derived and/or modified sequence
atgcttcggttcccgacatgttttccctcgttccgcgttgtgggggagaaacagcttccgcaagaaatcatttttctcgtgtggtcacctaagagggacctgatcgcattggccaacacagctggcgaagttctgctccacagattggcttcctttcaccgcgtgtggtcctttccgcccaatgagaacactggtaaagaagtaacctgcctggcatggaggccagacgggaaactcctggctttcgccctggcagacacgaaaaaaatagtgttatgcgatgtggaaaagcccgaaagtttgcattccttcagcgtcgaagctccagtgagttgcatgcattggatggaagtgacagtggaatcatctgtgctcacctcattctacaacgcagaggatgaaagtaacctgcttctgccaaaactcccgaccctgcctaagaattatagtaacacttccaaaatcttcagcgaggagaattccgacgagatcataaagcttcttggcgacgttcggcttaacattctcgtgctaggcggaagctctggcttcatcgaattatacgcctacggcatgtttaaaattgccagagtgaccggtatagccggcacgtgtctggctctgtgcttatcatcagacctgaagtccctgtccgtggtcacagaggtgtcgacaaatggcgcctctgaggtatcttactttcagctggagacgaacctgctttattcattcctgcctgaggttacgcgcatggcaaggaagttcacccatatctctgcactcctacaatatataaacctgtccctcacatgcatgtgcgaggcctgggaagagatcctcatgcaaatggatagtaggcttaccaaatttgtgcaggaaaaaaatactaccacctcggtacaggatgaattcatgcatctactgctgtgggggaaggcttcggcagagctgcagactctgcttatgaaccaactgacagtgaaaggactgaagaaactcgggcaaagcatcgagagttcatatagttctatccagaagcttgtaatatctcacctccaaagtggaagtgaaagtcttttgtaccacctcagcgaactgaagggtatggcaagctggaaacaaaaatatgagccactcggtcttgacgcagctggcattgaggaagcgatcactgcagttggatcctttatattaaaagccaatgagctgctgcaggtgattgatagcagtatgaaaaattttaaggctttcttcagatggttgtacgtggctatgctgaggatgacagaggaccacgtactgcctgaactgaataaggtgatgactcagaaagatattactttcgtggctgaattccttacagagcatttcaatgaggccccagatctttacaatcgcaaagggaaatatttcaatgtggaaagggtgggtcagtacctgaaggacgaggacgatgacctcgtcagcccaccgaacacggaaggaaaccaatggtacgactttctacaaaacagcagtcacttaaaagaatccccactcctcttcccctattatcctcggaaaagcctgcattttgtgaagagacgaatggagaatatcattgaccagtgtctgcaaaaacccgccgacgtgatcgggaagtccatgaatcaggcaatttgtatccccctttatagagatacgaggtccgaggactcaacgaggcgactctttaaattccctttcctctggaataacaaaacgtccaatcttcactatttgttattcacgatcctagaagactcactatacaagatgtgcattttgagacgtcacacggatatttctcagtccgtcagcaatggactaattgcaattaaatttgggagtttcacgtacgctaccactgaaaaggtgcgtcgcagcatctattcatgtctggatgctcagttctatgacgatgaaactgtaactgtagtccttaaggacacagtcggaagagaggggcgagaccgtttactggtacagctccccctgtctctggtttacaatagcgaggactccgccgaatatcaattcacgggcacctactctaccaggttggacgagcaatgctccgccatcccgacccggactatgcacttcgagaaacactggcgcctcctggagtccatgaaggctcaatacgttgccggaaacggcttccgtaaagttagctgcgtgctatcttctaatctgagacatgtccgagtctttgaaatggacattgatgacgagtgggaacttgatgaatcaagcgacgaagaggaggaagccagcaataagcctgttaagatcaaggaagaagtgctgagtgaaagcgaagccgagaatcagcaagcaggtgccgctgcactcgcccccgagatcgtcataaaggtcgagaaactggaccctgaactggactcatag

SEQ ID NO: 105618 - DNA, 2430 bp, Artificial Sequence
  derived and/or modified sequence
atgctgcgcttccccacctgcttccccagcttccgggtggtgggggagaagcagctgccccaggagatcatcttcctggtgtggagccccaagagggacctgattgccctggccaacacagctggggaggtgctgctgcaccggctggccagcttccaccgggtgtggagcttccccccaaatgaaaatacaggcaaggaggtgacctgcctggcctggaggccagatggcaagctgctggcctttgccctggccgacaccaagaagatcgtgctgtgtgatgtggagaagccagagagcctgcacagcttctctgtggaggcccctgtgtcctgcatgcactggatggaggtgacagtggagagctctgtgctgaccagcttctacaatgcagaagatgagagcaacctgctgctgcccaagctgcccaccctgcccaagaactacagcaacaccagcaagatcttctctgaagaaaattctgatgagatcatcaagctgctgggagatgtgcggctgaacatcctggtgctgggcggcagcagcggcttcatcgagctgtatgcctacggcatgttcaagatcgcccgggtgactggaattgctggcacctgcctggccctgtgcctgagcagtgacctgaagagcctgtctgtggtgacagaggtgtccaccaacggggccagcgaggtgtcctacttccagctggagaccaacctgctgtacagcttcctgcctgaggtgaccaggatggccaggaagttcacccacatcagcgccctgctgcagtacatcaacctgagcctgacctgcatgtgtgaggcctgggaggagatcctgatgcagatggacagccggctgaccaagtttgtgcaggagaagaacaccaccacctctgtgcaggatgagttcatgcacctgctgctgtggggcaaggccagcgctgagctgcagaccctgctgatgaaccagctgactgtgaagggcctgaagaagctgggccagagcattgagagcagctacagcagcatccagaagctggtgatcagccacctgcagagcggcagcgagagcctgctgtaccacctgtctgagctgaagggcatggcctcctggaagcagaagtatgagcccctgggcctggatgctgctggcatcgaggaggccatcacagctgtgggcagcttcatcctgaaggccaatgagctgctgcaggtgattgacagctccatgaagaacttcaaggccttcttccgctggctgtatgtggccatgctgaggatgacagaggaccacgtgctgcctgagctgaacaaggtgatgacccagaaggacatcacctttgtggccgagttcctgacagagcacttcaatgaggccccagacctgtacaacaggaagggcaagtacttcaacgtggagcgggtgggccagtacctgaaggatgaagatgatgacctggtgagcccccccaacacagagggcaaccagtggtatgacttcctgcagaacagcagccacctgaaggagagccccctgctcttcccctactaccccaggaagagcctgcactttgtgaagaggaggatggagaacatcatcgaccagtgcctgcagaagccagcagatgtgattggcaagtccatgaaccaggccatctgcatccccctgtacagagacaccaggtctgaggacagcacccggcggctcttcaagttccccttcctgtggaacaacaagaccagcaacctgcactacctgctcttcaccatcctggaggacagcctgtacaagatgtgcatcctgcggcggcacacagacatcagccagagcgtgtccaatggcctgattgccatcaagtttggcagcttcacctacgccaccacagagaaggtgagaagaagcatctacagctgcctggatgcccagttctatgatgatgaaacagtgacagtggtgctgaaggacacagtgggccgggagggccgggaccggctgctggtgcagctgcccctgagcctggtgtacaacagtgaagattctgctgagtaccagttcaccggcacctacagcacccggctggatgagcagtgcagcgccatccccaccaggaccatgcactttgagaagcactggaggctgctggagagcatgaaggcccagtatgtggccggaaatggcttcaggaaggtgtcctgtgtgctgagcagcaacctgcggcacgtgcgggtgtttgagatggacattgatgatgagtgggagctggatgagagcagtgatgaggaggaggaggccagcaacaagcctgtgaagatcaaggaggaggtgctgtctgagagcgaggccgagaaccagcaggccggggccgccgccctggcccctgagatcgtcatcaaggtggagaagctggaccctgagctggacagctag

SEQ ID NO: 105619 - DNA, 2430 bp, Artificial Sequence
  derived and/or modified sequence
atgctgcggttccccacctgcttccccagcttccgggtggtgggcgaaaaacagttgccccaagaaatcatttttcttgtgtggagccctaagcgggacctgatcgccctggccaacactgctggcgaggtgctgctgcatagacttgcttcctttcacagagtgtggagcttccctcccaacgaaaatacggggaaagaggtcacttgtctggcctggagacctgacggtaagcttctggccttcgccctggcggatacaaaaaagatcgtactgtgtgatgtggagaagcccgagtcgctccactctttttctgttgaggctcctgtcagctgtatgcactggatggaggtgacagtcgaatcaagcgttttgaccagcttttataacgctgaggacgagtcgaacctcctgctgcccaagctccctactctgccgaaaaattattccaatacttcgaagatcttctctgaagagaactcagacgagattatcaagctgttaggggatgtccggttgaatattctggtcctcgggggctcgtcaggcttcatagaactgtatgcctatggcatgtttaagattgctcgcgtgactggtatcgctggaacctgcctggcgctatgtttgtcatccgatctgaagtcgctgtccgtggtgactgaagttagcaccaacggggcaagcgaagtgagttactttcagctagaaaccaatctcttgtattcatttttgcccgaggttactcgtatggctcggaagtttacacatatctccgccttgctgcagtacatcaaccttagtttaacttgtatgtgtgaggcctgggaagagattttgatgcagatggactctcgcctgaccaaatttgtccaggagaagaataccaccacatccgttcaagatgaatttatgcacctcctgctgtggggtaaggcctccgccgaacttcaaacactcctcatgaaccaactgaccgttaaggggttgaagaaactggggcagagtatcgaatcctcctactcctccatccagaagttggtaatttcgcacctccagagcggttcggagtctcttctgtatcacctctccgaattgaagggcatggcctcttggaagcagaagtacgaacctctggggcttgacgcagccggcatagaagaggcaatcacagctgtcggatcattcatcttgaaggccaatgagctcttgcaggtcattgattcatccatgaaaaattttaaggccttcttcagatggctgtacgtggccatgctgagaatgaccgaagatcatgtcttgcctgagttaaataaagtgatgacacagaaagatattacgttcgtggccgagttcttgaccgagcactttaatgaagccccagacctctacaacagaaagggcaagtatttcaatgttgaacgagtgggtcagtacctcaaagacgaggatgatgacctggtgagcccccccaatacggagggaaaccagtggtatgattttttgcagaactcatcccatctcaaagaaagccctttactgttcccgtattacccacgaaagtccctacactttgtcaaacgccgcatggagaatataatagatcagtgcctgcaaaaaccagcagacgtgatcgggaagtctatgaaccaggcaatctgcattcccctgtaccgggacacgagaagtgaggatagcacacgacgccttttcaaattccctttcttatggaataataaaacaagcaacctgcattacctcctgtttaccatcctcgaggattccctttataagatgtgtatcctacggcgtcacactgacatcagccagagcgttagtaacggactcatcgcaataaaattcggttccttcacttatgcaacgacggagaaagtgcggcggagtatttacagctgtttagatgctcagttttatgacgatgaaacagtcaccgtagtgttaaaagacaccgtgggccgagagggtcgggacagactgctcgttcagctgccacttagtcttgtttacaatagtgaagactctgccgagtatcagttcactggcacttatagcactagactcgacgagcagtgctccgcgatcccgacgcgtactatgcattttgaaaagcactggagacttctggagtcaatgaaggctcagtacgttgcgggcaacggtttccggaaggtctcttgcgtactgtcctcgaacttgagacacgtgcgggtgttcgagatggatatcgatgatgagtgggaattggatgaatccagcgatgaggaagaagaggccagcaataagcctgtaaagatcaaggaggaggtgctgtctgagtcagaggccgaaaatcagcaagccggggctgctgctctggctccggagattgtcatcaaggtggagaagctcgacccggagctcgacagctag

SEQ ID NO: 105620 - DNA, 2599 bp, Artificial Sequence
  derived and/or modified sequence
gaggggagaggccactggggccgtgttagtctgccggtggggactcttgcagggccgtccccatgttgcgttttccgacctgtttcccatccttccgggtggtgggagagaagcagctcccgcaggagattattttcctggtctggtcgcccaagcgggatctcattgctttggccaacacagctggcgaggttttacttcatcgactggcaagttttcatcgagtttggagttttccaccaaatgaaaatacaggaaaggaggtgacgtgtctggcatggagaccagatggcaaacttttggcctttgctcttgctgataccaagaaaattgttttgtgtgatgtagaaaaacctgagagcttacactctttttctgtggaggctccagtttcctgtatgcattggatggaagtgacagtagaaagcagtgttctcacatcattttataatgctgaggatgaatcaaatcttctcttacctaaactacctacactgccaaaaaactatagcaacacctcaaaaatatttagtgaagaaaattctgatgaaattattaagctcttgggagacgtcaggcttaatattctcgtccttggaggaagctctggatttattgagctttatgcttatggaatgtttaaaattgctcgagtcacagggattgctggtacttgtcttgcattatgtttatcaagtgatttgaaatcattatcagtggtcacagaagtctctaccaatggtgcttcagaagtttcatactttcagcttgaaactaatctgttgtactctttcttacctgaagtaactcggatggccagaaagtttactcatatttcagctctgttacagtatataaatttgtcactaacatgtatgtgtgaagcatgggaagaaatactaatgcagatggattctcgtctcaccaagtttgtgcaggaaaagaacacaaccacatcagtgcaagatgagttcatgcacttgctattatgggggaaagcaagtgctgaacttcagactctcttgatgaatcagttaacagtaaagggcttgaaaaagcttggccagtctatagagtcatcatactccagtatacaaaaattggtcataagtcatttacagagtggctcggagtctttattataccatttgagtgaattgaaaggaatggcttcatggaagcaaaaatatgaacctcttggactagatgctgcaggaatcgaagaagctataactgctgtgggttcttttatactcaaggcaaatgaacttcttcaagttatagatagtagtatgaaaaacttcaaagcattttttcggtggctttatgtggcaatgttgagaatgacagaagaccatgtgcttcccgagctgaataaggtaatgactcagaaagatatcacatttgttgctgaatttcttactgaacatttcaatgaggctccagacctttataatcgaaaaggaaaatactttaacgttgaaagagttggtcagtacttgaaagatgaagatgatgatcttgtgtcaccccctaacacagaaggaaaccagtggtatgactttcttcaaaatagcagccaccttaaagaaagtcctttgctgtttccttattatcctcgaaaatcattgcattttgtgaaaaggcggatggagaatattattgatcagtgtttgcaaaagccagcagatgtaattggaaaatcgatgaatcaagcaatctgtattccattgtatagagataccagaagtgaggattctacacgtagattgttcaaatttccttttctgtggaataataaaacttcaaatctacattatcttctttttactattctagaagattcactttataaaatgtgcatcttaaggagacatactgatatttctcaatctgtgagtaatggactaattgctattaaatttgggagctttacatatgccacaacagaaaaagtcagaagaagcatctacagttgtttagatgcacagttttatgatgatgaaactgtaacagtagttcttaaagacactgtaggacgtgaaggaagagatagactcttggtccagctgcctttgtctttagtatataacagtgaagattctgcagaatatcagttcactgggacttattctacaaggctagatgaacagtgtagtgctattcccacccgtaccatgcattttgagaagcactggagattactggaaagtatgaaagcacagtatgttgctgggaatggttttcgaaaagtgtcctgtgtgttaagctcaaatcttcgtcatgtgagagtatttgaaatggacatagatgatgaatgggagctcgatgagtcttcagatgaagaggaggaggccagtaataagcctgtaaaaataaaggaagaagtgttgtcggagtcagaggcagagaaccaacaagctggtgctgccgctttagctccagagatagtcattaaagtggaaaaacttgaccctgagctagactcctaatctagcttgccattattgtgtgtgtaattatggccaaaaggacataggagatggactaagatgtcttggaccacctttgtgtaacaaagaaataaacagtaaatttt

SEQ ID NO: 105621 - DNA, 2430 bp, Artificial Sequence
  derived and/or modified sequence
atgctgcgttttcctacatgtttccctagcttcagggtcgttggagagaaacagctgcctcaggaaattatttttctcgtgtggtccccaaagagggacctgatcgctctcgccaacacagcaggggaggttctgctgcatcgattagcgtcctttcaccgggtctggagttttcccccaaacgagaacactggcaaggaggtaacctgtttagcctggaggcccgacggcaaactgttagccttcgctttggcggacacgaaaaaaatcgtcttgtgtgacgtcgaaaaacccgagtctcttcattccttctcagtggaggccccagtgtcctgtatgcactggatggaagtcaccgtagaatcatccgtactgacatctttttataacgcggaggatgagagtaacctcctgctgccaaaattgcccaccttgccaaaaaattattccaacacttcaaagattttttctgaggaaaactccgatgaaatcattaagctgctgggggatgtgagactcaatattttggtgctgggcggatcgtctggttttattgaactgtacgcctacgggatgttcaagatcgcgagggtgaccgggatcgcagggacttgcctggcactttgccttagctccgacttgaagtcactgtctgtcgtcactgaggttagtacaaatggcgcaagcgaggtgtcatacttccagttagagactaatctcctgtatagtttcttacccgaggtgacgagaatggccagaaaatttacccatatttccgccctactccagtatattaatctctccctcacctgtatgtgcgaagcctgggaggagattctcatgcagatggactcccgcctcacaaaatttgtacaggaaaagaacacaacaactagcgtccaagatgaattcatgcacctgctcttatgggggaaggcctcagcggaactgcagactctgttaatgaatcaactgactgtcaagggcttgaaaaaactcggccagagtatagaatcaagttattcatctatccagaaactggtgatctctcacctccaaagcgggagtgagagcttgctgtaccatttgagcgagctcaaaggtatggcttcttggaagcagaagtatgagcctctaggcctggatgccgctggtatagaggaggccataacggctgtcggaagcttcatcctaaaggccaatgaactgctccaagtcatcgattctagcatgaaaaattttaaagcatttttccggtggttgtacgtcgcaatgctgagaatgactgaagatcacgttctccccgaactgaataaagtgatgacccaaaaggatattacctttgttgcagagtttctgaccgagcattttaacgaggcccctgatctatacaatcggaagggcaaatatttcaacgtagagcgtgtggggcagtatctgaaagacgaagatgatgatctagtttcccccccaaacacggagggtaatcagtggtacgacttcttgcagaattcctctcatctaaaagagtcccctttgctgtttccttattatccccgaaagagcctgcacttcgtgaaacgccgaatggaaaatattattgaccagtgcctccagaagccagccgacgtcattggcaaatccatgaatcaggcaatctgcatccctctttatcgtgatactcgctccgaagactctacccgaagattgtttaaattcccgttcctttggaataacaaaacctcaaacctgcattatctgctgtttacaatcttggaggactcactgtataagatgtgtattctgagacggcatacagacatctcgcagtcagtatctaacggcctgatagcaatcaagtttggctcatttacatacgccacaactgagaaggtgcggcgttccatatattcatgcttggatgctcagttttatgatgatgagaccgtcaccgttgtcctgaaggataccgtgggacgcgagggccgtgatcggctgctcgtgcaactgcccttgtcacttgtgtacaattccgaggacagtgcggagtatcagtttaccggcacctactccacacgactggacgagcaatgctcggccatcccgactcgcacgatgcacttcgaaaagcactggcggctgctggagtctatgaaagcccagtacgtggccggaaacggattccgtaaagtcagctgcgtgctctcgtccaacctgagacacgtgagggtgtttgaaatggacatcgacgacgagtgggaacttgacgagtcatccgatgaggaagaggaggctagtaacaaaccagtgaaaattaaggaggaggttttgtctgagtccgaggcggagaaccaacaggccggtgctgcagctcttgcccctgagatcgttataaaggtggaaaagctggatcctgagcttgactcctag

SEQ ID NO: 105622 - DNA, 2430 bp, Artificial Sequence
  derived and/or modified sequence
atgctgagattccccacctgcttccccagcttcagagtggtgggcgagaagcagctgccccaggagatcatcttcctggtgtggagccccaagagagacctgatcgccctggccaacaccgccggcgaggtgctgctgcacagactggccagcttccacagagtgtggagcttcccccccaacgagaacaccggcaaggaggtgacctgcctggcctggagacccgacggcaagctgctggccttcgccctggccgacaccaagaagatcgtgctgtgcgacgtggagaagcccgagagcctgcacagcttcagcgtggaggcccccgtgagctgcatgcactggatggaggtgaccgtggagagcagcgtgctgaccagcttctacaacgccgaggacgagagcaacctgctgctgcccaagctgcccaccctgcccaagaactacagcaacaccagcaagatcttcagcgaggagaacagcgacgagatcatcaagctgctgggcgacgtgagactgaacatcctggtgctgggcggcagcagcggcttcatcgagctgtacgcctacggcatgttcaagatcgccagagtgaccggcatcgccggcacctgcctggccctgtgcctgagcagcgacctgaagagcctgagcgtggtgaccgaggtgagcaccaacggcgccagcgaggtgagctacttccagctggagaccaacctgctgtacagcttcctgcccgaggtgaccagaatggccagaaagttcacccacatcagcgccctgctgcagtacatcaacctgagcctgacctgcatgtgcgaggcctgggaggagatcctgatgcagatggacagcagactgaccaagttcgtgcaggagaagaacaccaccaccagcgtgcaggacgagttcatgcacctgctgctgtggggcaaggccagcgccgagctgcagaccctgctgatgaaccagctgaccgtgaagggcctgaagaagctgggccagagcatcgagagcagctacagcagcatccagaagctggtgatcagccacctgcagagcggcagcgagagcctgctgtaccacctgagcgagctgaagggcatggccagctggaagcagaagtacgagcccctgggcctggacgccgccggcatcgaggaggccatcaccgccgtgggcagcttcatcctgaaggccaacgagctgctgcaggtgatcgacagcagcatgaagaacttcaaggccttcttcagatggctgtacgtggccatgctgagaatgaccgaggaccacgtgctgcccgagctgaacaaggtgatgacccagaaggacatcaccttcgtggccgagttcctgaccgagcacttcaacgaggcccccgacctgtacaacagaaagggcaagtacttcaacgtggagagagtgggccagtacctgaaggacgaggacgacgacctggtgagcccccccaacaccgagggcaaccagtggtacgacttcctgcagaacagcagccacctgaaggagagccccctgctgttcccctactaccccagaaagagcctgcacttcgtgaagagaagaatggagaacatcatcgaccagtgcctgcagaagcccgccgacgtgatcggcaagagcatgaaccaggccatctgcatccccctgtacagagacaccagaagcgaggacagcaccagaagactgttcaagttccccttcctgtggaacaacaagaccagcaacctgcactacctgctgttcaccatcctggaggacagcctgtacaagatgtgcatcctgagaagacacaccgacatcagccagagcgtgagcaacggcctgatcgccatcaagttcggcagcttcacctacgccaccaccgagaaggtgagaagaagcatctacagctgcctggacgcccagttctacgacgacgagaccgtgaccgtggtgctgaaggacaccgtgggcagagagggcagagacagactgctggtgcagctgcccctgagcctggtgtacaacagcgaggacagcgccgagtaccagttcaccggcacctacagcaccagactggacgagcagtgcagcgccatccccaccagaaccatgcacttcgagaagcactggagactgctggagagcatgaaggcccagtacgtggccggcaacggcttcagaaaggtgagctgcgtgctgagcagcaacctgagacacgtgagagtgttcgagatggacatcgacgacgagtgggagctggacgagagcagcgacgaggaggaggaggccagcaacaagcccgtgaagatcaaggaggaggtgctgagcgagagcgaggccgagaaccagcaggccggcgccgccgccctggcccccgagatcgtgatcaaggtggagaagctggaccccgagctggacagctag

SEQ ID NO: 105623 - protein, 635 aa, Artificial Sequence
  derived and/or modified sequence
MVSQSTVRQDSPVEPWEGISDHSGIIDGSPRLLNTDHPPCQLDIRLMRHKAVWINPQDVQQQPQDLQSQVPAAGNSGTHFVTDAASPSGPSPSCLGDSLAETTLSEDTTDSVGSASPHGSSEKSSSFSLSSTEVHMVRPGYSHRVSLPTSPGILATSPYPETDSAFFEPSHLTSAADEGAVQVSRRTISSNSFSPEVFVLPVDVEKENAHFYVADMIISAMEKMKCNILSQQQTESWSKEVSGLLGSDQPDSEMTFDTNIKQESGSSTSSYSGYEGCAVLQVSPVTETRTYHDVKEICKCDVDEFVILELGDFNDITETCSCSCSSSKSVTYEPDFNSAELLAKELYRVFQKCWILSVVNSQLAGSLSAAGSIVVNEECVRKDFESSMNVVQEIKFKSRIRGTEDWAPPRFQIIFNIHPPLKRDLVVAAQNFFCAGCGTPVEPKFVKRLRYCEYLGKYFCDCCHSYAESCIPARILMMWDFKKYYVSNFSKQLLDSIWHQPIFNLLSIGQSLYAKAKELDRVKEIQEQLFHIKKLLKTCRFANSCVKERALFVNFARIRLSSSHFRQQHVEDVQRAGLAFTNSASSPPSAPGVRGSQRGENFWKVWPLQQHDAPEYCEKDCSTCLMITPICVYYW

SEQ ID NO: 105624 - DNA, 966 bp, Artificial Sequence
  derived and/or modified sequence
atggtgagccagagcaccgtgagacaggacagccccgtggagccctgggagggcatcagcgaccacagcggcatcatcgacggcagccccagactgctgaacaccgaccaccccccctgccagctggacatcagactgatgagacacaaggccgtgtggatcaacccccaggacgtgcagcagcagccccaggacctgcagagccaggtgcccgccgccggcaacagcggcacccacttcgtgaccgacgccgccagccccagcggccccagccccagctgcctgggcgacagcctggccgagaccaccctgagcgaggacaccaccgacagcgtgggcagcgccagcccccacggcagcagcgagaagagcagcagcttcagcctgagcagcaccgaggtgcacatggtgagacccggctacagccacagagtgagcctgcccaccagccccggcatcctggccaccagcccctaccccgagaccgacagcgccttcttcgagcccagccacctgaccagcgccgccgacgagggcgccgtgcaggtgagcagaagaaccatcagcagcaacagcttcagccccgaggtgttcgtgctgcccgtggacgtggagaaggagaacgcccacttctacgtggccgacatgatcatcagcgccatggagaagatgaagtgcaacatcctgagccagcagcagaccgagagctggagcaaggaggtgagcggcctgctgggcagcgaccagcccgacagcgagatgaccttcgacaccaacatcaagcaggagagcggcagcagcaccagcagctacagcggctacgagggctgcgccgtgctgcaggtgagccccgtgaccgagaccagaacctaccacgacgtgaaggagatctgcaagtgcgacgtggacgagttcgtgatcctggtgagcctgatgagccagaccagcatcctgcagaactactag

SEQ ID NO: 105625 - DNA, 1908 bp, Artificial Sequence
  derived and/or modified sequence
atggtgagccagagcaccgtgagacaggacagccccgtggagccctgggagggcatcagcgaccacagcggcatcatcgacggcagccccagactgctgaacaccgaccaccccccctgccagctggacatcagactgatgagacacaaggccgtgtggatcaacccccaggacgtgcagcagcagccccaggacctgcagagccaggtgcccgccgccggcaacagcggcacccacttcgtgaccgacgccgccagccccagcggccccagccccagctgcctgggcgacagcctggccgagaccaccctgagcgaggacaccaccgacagcgtgggcagcgccagcccccacggcagcagcgagaagagcagcagcttcagcctgagcagcaccgaggtgcacatggtgagacccggctacagccacagagtgagcctgcccaccagccccggcatcctggccaccagcccctaccccgagaccgacagcgccttcttcgagcccagccacctgaccagcgccgccgacgagggcgccgtgcaggtgagcagaagaaccatcagcagcaacagcttcagccccgaggtgttcgtgctgcccgtggacgtggagaaggagaacgcccacttctacgtggccgacatgatcatcagcgccatggagaagatgaagtgcaacatcctgagccagcagcagaccgagagctggagcaaggaggtgagcggcctgctgggcagcgaccagcccgacagcgagatgaccttcgacaccaacatcaagcaggagagcggcagcagcaccagcagctacagcggctacgagggctgcgccgtgctgcaggtgagccccgtgaccgagaccagaacctaccacgacgtgaaggagatctgcaagtgcgacgtggacgagttcgtgatcctggagctgggcgacttcaacgacatcaccgagacctgcagctgcagctgcagcagcagcaagagcgtgacctacgagcccgacttcaacagcgccgagctgctggccaaggagctgtacagagtgttccagaagtgctggatcctgagcgtggtgaacagccagctggccggcagcctgagcgccgccggcagcatcgtggtgaacgaggagtgcgtgagaaaggacttcgagagcagcatgaacgtggtgcaggagatcaagttcaagagcagaatcagaggcaccgaggactgggccccccccagattccagatcatcttcaacatccacccccccctgaagagagacctggtggtggccgcccagaacttcttctgcgccggctgcggcacccccgtggagcccaagttcgtgaagagactgagatactgcgagtacctgggcaagtacttctgcgactgctgccacagctacgccgagagctgcatccccgccagaatcctgatgatgtgggacttcaagaagtactacgtgagcaacttcagcaagcagctgctggacagcatctggcaccagcccatcttcaacctgctgagcatcggccagagcctgtacgccaaggccaaggagctggacagagtgaaggagatccaggagcagctgttccacatcaagaagctgctgaagacctgcagattcgccaacagctgcgtgaaggagagagccctgttcgtgaacttcgccagaatcagactgagcagcagccacttcagacagcagcacgtggaggacgtgcagagagccggcctggccttcaccaacagcgccagcagcccccccagcgcccccggcgtgagaggcagccagagaggcgagaacttctggaaggtgtggcccctgcagcagcacgacgcccccgagtactgcgagaaggactgcagcacctgcctgatgatcacccccatctgcgtgtactactggtag

SEQ ID NO: 105626 - DNA, 537 bp, Artificial Sequence
  derived and/or modified sequence
atggtgagccagagcaccgtgagacaggacagccccgtggagccctgggagggcatcagcgaccacagcggcatcatcgacggcagccccagactgctgaacaccgaccaccccccctgccagctggacatcagactgatgagacacaaggccgtgtggatcaacccccaggacgtgcagcagcagccccaggacctgcagagccaggtgcccgccgccggcaacagcggcacccacttcgtgaccgacgccgccagccccagcggccccagccccagctgcctgggcgacagcctggccgagaccaccctgagcgaggacaccaccgacagcgtgggcagcgccagcccccacggcagcagcgagaagagcagcagcttcagcctgagcagcaccgaggtgcacatggtgagacccggctacagccacagagtgagcctgcccaccagccccggcatcctggccaccagcccctaccccgagaccgacagcgccttcttcgagcccagccacctgaccagcgccgccgacgagtag

SEQ ID NO: 105627 - DNA, 966 bp, Artificial Sequence
  derived and/or modified sequence
atggtgtcccagtcaactgtgaggcaggacagccccgtggagccgtgggaggggattagcgatcattctgggatcatcgatggctccccccggctcctaaacaccgatcacccgccttgccagctcgacatacgcctgatgaggcataaagccgtgtggatcaacccacaagacgtccagcagcagccacaggacctccagagccaggtgccggctgcaggaaattccggaacccacttcgtgaccgatgcagcctccccctctgggccaagtccaagctgtcttggcgacagcttggcagagacaaccctaagtgaggacacaacagatagcgtgggctctgcgtcaccccatggaagcagcgaaaagtccagcagcttctctctatcctcaaccgaggtccacatggtccgccctggctacagccacagggtcagcctccccacaagtccaggaatcctggcaacgtccccttaccccgagacagactccgcattcttcgagcctagtcacttaaccagtgcagccgacgagggggccgttcaggtctcccgtcggacaatcagttcaaactcattctctccagaggtcttcgtgctgcccgttgatgtggagaaggagaatgcacacttttacgttgctgacatgatcatttccgcaatggaaaagatgaagtgtaatattctctcccagcagcagaccgaatcatggtctaaggaggtcagtgggttgctgggtagtgatcagccagactcagagatgaccttcgacacaaatataaaacaggagtcagggagctcgacatcctcttattccgggtacgaaggatgcgccgtgctgcaagtttctcctgtgacagagactaggacctatcacgacgtgaaagagatatgcaaatgtgacgtcgatgagttcgttattcttgtgagcttgatgagccagaccagcattctgcagaattattag

SEQ ID NO: 105628 - DNA, 1908 bp, Artificial Sequence
  derived and/or modified sequence
atggtttctcagtccacggtgcgacaggactctcctgtcgagccctgggaaggcataagcgatcatagtggaatcattgatggttcccctcgactgctgaacactgaccatcccccgtgtcagttggacatccgacttatgcgtcataaggctgtgtggatcaatccccaggatgtgcaacagcaaccacaggatctgcagtctcaagtgcctgcagcaggaaacagtgggacccatttcgtgaccgatgccgcctccccatctggtcccagcccgtcgtgccttggggactcacttgccgagactaccctgtcagaagatactaccgactccgttggctccgcctccccccacggaagttcagagaaatcctcctctttctctctatcttcgaccgaggttcacatggttcgacccgggtatagccacagggtaagcctcccaactagccctgggattctggccactagcccttatcccgaaacagactcagcattttttgaaccatcccacctcaccagcgccgccgacgagggggctgtccaagtcagtaggcggacaattagttccaattcattcagtcccgaagtattcgtcctgccagtggatgtggagaaagagaatgctcacttctacgtcgctgacatgattatcagcgccatggagaaaatgaagtgcaacatcctgagtcagcagcagacggaatcttggtccaaagaggtgtcaggccttctgggtagtgatcagccggacagcgagatgacatttgacaccaacattaaacaggagtccggatccagcacaagtagctactcaggatacgaaggttgcgcggttctacaggtgtcacctgtcacggagaccagaacataccatgatgtgaaggaaatctgcaagtgcgatgttgacgagttcgtgatactcgagctgggggactttaatgacattactgaaacctgtagttgcagctgctcatccagtaaaagtgtcacgtatgaaccggattttaactctgcagagctgttagctaaggagttgtaccgcgtgtttcagaaatgctggatacttagtgtcgttaacagccagctcgctggctccttatccgccgcaggcagcattgtggtgaacgaagagtgtgtgcgtaaagacttcgaaagtagcatgaacgtcgtccaggagattaaatttaagagcagaattagggggactgaggactgggcaccaccccgcttccaaatcatttttaatatccatcctcctttaaagcgggacctggtcgtggccgcccagaacttcttctgtgccggatgcgggacacctgttgagccaaagtttgttaagcgtctccgttattgtgaatacctgggcaaatatttctgcgactgttgccatagctatgccgagtcctgtattcctgctcggatcctgatgatgtgggatttcaagaagtactatgtctcgaacttcagcaagcagttgttagactccatatggcatcagcccatttttaatcttttgagcataggacaaagcctgtacgcgaaggcaaaggagctggatcgggtcaaggagattcaggaacagctcttccacattaagaaactgcttaagacctgccgattcgccaacagttgcgtgaaggaacgcgccctgttcgtgaatttcgcccggattcggctgtctagctctcacttccgacagcaacacgtggaggacgtacagcgggcgggcctagcttttactaactctgcttcttctcccccatctgcccccggcgtgaggggatctcagagaggggaaaacttctggaaagtgtggccactccaacagcacgatgcgcctgaatattgcgaaaaagattgcagtacttgcctgatgatcactccaatctgcgtgtactattggtag

SEQ ID NO: 105629 - DNA, 1908 bp, Artificial Sequence
  derived and/or modified sequence
atggtcagccaatccactgtgcgccaggattccccagtcgagccttgggaagggatcagtgaccacagcggtatcatcgacggctcgcctcgcctgctaaacacagaccatcccccatgccagctggatatccggttaatgagacacaaggccgtatggatcaacccccaggacgtgcagcaacaaccacaggatttacagtcccaagtgcccgctgccggcaactccgggacgcatttcgttacggacgcagcctctccctcaggcccgtccccatcctgcctgggagatagcttggcagagacaacactgtcagaggataccacagactccgtgggctccgcatctccacacggcagttcggagaaatccagtagtttcagtctgtcatcgaccgaggttcacatggttcgacccggctatagtcatcgggtgtccctgccaacttcacccggaattctggctacctcgccttaccccgagacagattcagccttttttgagcctagccacctcacctcagccgctgatgagggcgccgtacaagtgtcccgccgaacaataagctccaactcattttctccggaagtttttgtcctgccggttgacgttgagaaggagaacgctcacttctacgtggctgacatgattattagcgctatggagaagatgaaatgtaacattttaagccagcaacaaactgagagttggtctaaggaggtatcgggacttctgggttcagatcagcccgatagcgaaatgacattcgacacgaacattaaacaggagtctggtagctccacctcatcttacagcggatatgaaggttgtgccgtgctgcaggtttcccctgtgaccgagactagaacataccacgacgtgaaagaaatctgcaaatgcgacgtagacgaatttgtgattcttgagctgggggattttaacgacatcactgaaacatgctcatgcagttgctctagcagcaaaagcgtgacttacgagcccgatttcaactctgctgaacttctcgctaaggagctgtacagagtctttcagaaatgttggatcctctcagtcgtgaatagccaactcgcaggatccctaagcgccgctgggtccatcgtggtgaacgaagaatgtgtcaggaaagacttcgaatcatcaatgaacgtcgtccaggagatcaagtttaagagtaggattcgaggtactgaagactgggcaccgccacgctttcagataattttcaatatccacccgcccctgaaacgagaccttgtcgtggccgcccagaactttttctgcgccggatgtggtacaccagtcgagcctaaattcgtaaaacggctgcgttactgtgagtaccttggcaaatacttctgtgactgttgtcactcctacgccgaaagctgcattcctgcacgtatcctaatgatgtgggactttaaaaagtactacgtaagcaattttagtaaacagctgctggacagcatttggcatcaaccaatcttcaatcttcttagcatcggtcagtccctgtatgccaaggcaaaggagttggacagagtcaaggagatccaggaacaactgtttcatattaaaaagctcctcaagacatgtcgctttgctaatagttgtgtgaaagagagggcactttttgtcaactttgcccggattcgcctatccagttcccatttccggcagcagcacgtggaggacgtgcagcgcgcaggattagcatttacaaactccgcatcatcccccccctctgcacccggggtgcgcggctctcagcggggcgaaaacttttggaaggtctggcccctgcagcaacacgatgctcctgagtattgtgaaaaggattgctcaacctgtctgatgatcacgcctatctgcgtgtactactggtag

SEQ ID NO: 105630 - DNA, 537 bp, Artificial Sequence
  derived and/or modified sequence
atggtgagtcagagtacagtcagacaggactcccccgtggagccctgggaagggatcagtgaccactctgggatcattgatggctccccccggttactgaataccgatcacccaccctgccagctggacatacggttgatgcggcataaagccgtctggatcaacccccaggatgtgcagcagcaacctcaagatctacaaagccaggtgcctgccgcaggcaactctggtacccacttcgtgacggacgctgcctctccgagcggacctagccccagttgcttaggtgacagtctggcggaaaccacattgtctgaagataccactgactccgtgggttctgcatctcctcacggaagtagcgagaagtcgtcttcattcagtctgtcgagcacagaggttcacatggtgcgcccaggttactctcaccgagttagtcttcctacatccccaggaattttagcaacatctccctacccagaaactgactcggccttcttcgaaccttcccacctcacttcggcggctgatgaatag

SEQ ID NO: 105631 - DNA, 966 bp, Artificial Sequence
  derived and/or modified sequence
atggtgtcccagagcacagtgcggcaggacagccctgtggagccctgggagggcatcagtgaccacagcggcatcattgatggcagcccccggctgctgaacacagaccaccccccctgccagctggacatccggctgatgaggcacaaggctgtgtggatcaacccccaggatgtgcagcagcagccccaggacctgcagagccaggtgcctgctgctggcaacagcggcacccactttgtgacagatgctgccagccccagcggccccagccccagctgcctgggggacagcctggccgagaccaccctgtctgaggacaccacagattctgtgggcagcgccagcccccacggcagcagcgagaagagcagcagcttcagcctgagcagcacagaggtgcacatggtgcggcccggctacagccaccgggtgtccctgcccaccagccctggcatcctggccaccagcccctacccagagacagacagcgccttctttgagcccagccacctgaccagcgctgctgatgaaggagctgtgcaggtgtccaggaggaccatcagcagcaacagcttcagccctgaggtgtttgtgctgcctgtggatgtggagaaggaaaatgcccacttctacgtggccgacatgatcatcagcgccatggagaagatgaagtgcaacatcctgagccagcagcagacagagagctggagcaaggaggtgtctggcctgctgggcagtgaccagcctgacagcgagatgacctttgacaccaacatcaagcaggagagcggcagcagcaccagcagctacagcggctatgagggctgtgctgtgctgcaggtgtcccctgtgacagagaccaggacctaccatgatgtgaaggagatctgcaagtgtgatgtggatgaatttgtgatcctggtgtccctgatgagccagaccagcatcctgcagaactactag

SEQ ID NO: 105632 - DNA, 1908 bp, Artificial Sequence
  derived and/or modified sequence
atggtgtcccagagcacagtgcggcaggacagccctgtggagccctgggagggcatcagtgaccacagcggcatcattgatggcagcccccggctgctgaacacagaccaccccccctgccagctggacatccggctgatgaggcacaaggctgtgtggatcaacccccaggatgtgcagcagcagccccaggacctgcagagccaggtgcctgctgctggcaacagcggcacccactttgtgacagatgctgccagccccagcggccccagccccagctgcctgggggacagcctggccgagaccaccctgtctgaggacaccacagattctgtgggcagcgccagcccccacggcagcagcgagaagagcagcagcttcagcctgagcagcacagaggtgcacatggtgcggcccggctacagccaccgggtgtccctgcccaccagccctggcatcctggccaccagcccctacccagagacagacagcgccttctttgagcccagccacctgaccagcgctgctgatgaaggagctgtgcaggtgtccaggaggaccatcagcagcaacagcttcagccctgaggtgtttgtgctgcctgtggatgtggagaaggaaaatgcccacttctacgtggccgacatgatcatcagcgccatggagaagatgaagtgcaacatcctgagccagcagcagacagagagctggagcaaggaggtgtctggcctgctgggcagtgaccagcctgacagcgagatgacctttgacaccaacatcaagcaggagagcggcagcagcaccagcagctacagcggctatgagggctgtgctgtgctgcaggtgtcccctgtgacagagaccaggacctaccatgatgtgaaggagatctgcaagtgtgatgtggatgaatttgtgatcctggagctgggggacttcaatgacatcacagagacctgcagctgcagctgcagcagcagcaagtctgtgacctatgagccagacttcaacagcgctgagctgctggccaaggagctgtacagagtcttccagaagtgctggatcctgtctgtggtgaacagccagctggccggcagcctgtctgctgctggcagcatcgtggtgaatgaggagtgtgtgaggaaggactttgagagctccatgaatgtggtgcaggagatcaagttcaagagccgcatccggggcacagaggactgggccccaccccgcttccagatcatcttcaacatccacccccccctgaagagggacctggtggtggccgcccagaacttcttctgtgccggctgcggcacccctgtggagcccaagtttgtgaagaggctgcgctactgtgagtacctgggcaagtacttctgtgactgctgccacagctatgcagagagctgcatcccagcccgcatcctgatgatgtgggacttcaagaagtactacgtgagcaacttcagcaagcagctgctggacagcatctggcaccagcccatcttcaacctgctgagcatcggccagagcctgtatgccaaggccaaggagctggacagagtgaaggagatccaggagcagctgttccacatcaagaagctgctgaagacctgccgctttgccaacagctgtgtgaaggagcgggccctgtttgtgaactttgcccgcatccggctgagcagcagccacttccggcagcagcacgtggaggatgtgcagagagctggcctggccttcaccaacagcgccagcagccccccatctgcccctggggtgcggggcagccagagaggagagaacttctggaaggtgtggcccctgcagcagcatgatgcccctgagtactgtgagaaggactgcagcacctgcctgatgatcacccccatctgtgtgtactactggtag

SEQ ID NO: 105633 - DNA, 537 bp, Artificial Sequence
  derived and/or modified sequence
atggtgtcccagagcacagtgcggcaggacagccctgtggagccctgggagggcatcagtgaccacagcggcatcattgatggcagcccccggctgctgaacacagaccaccccccctgccagctggacatccggctgatgaggcacaaggctgtgtggatcaacccccaggatgtgcagcagcagccccaggacctgcagagccaggtgcctgctgctggcaacagcggcacccactttgtgacagatgctgccagccccagcggccccagccccagctgcctgggggacagcctggccgagaccaccctgtctgaggacaccacagattctgtgggcagcgccagcccccacggcagcagcgagaagagcagcagcttcagcctgagcagcacagaggtgcacatggtgcggcccggctacagccaccgggtgtccctgcccaccagccctggcatcctggccaccagcccctacccagagacagacagcgccttctttgagcccagccacctgaccagcgctgctgatgaatag

SEQ ID NO: 105634 - DNA, 966 bp, Artificial Sequence
  derived and/or modified sequence
atggtgagccagagcaccgtgcggcaggacagccccgtggagccctgggaagggatttctgaccattctggaattatcgatggcagcccgcgcctccttaacacagaccatcccccatgccagctcgatataagactcatgagacacaaggcagtgtggatcaacccgcaggacgttcagcagcaaccccaggacctgcagagtcaggtgcccgcagccggcaatagtgggacgcacttcgtcaccgatgctgcgtcacccagcggaccttcaccctcatgcttgggtgacagcctcgctgagaccacactctccgaagatacaaccgacagcgtcggatccgcttcccctcatggttctagcgaaaaaagctcgtccttttccctatcaagcaccgaggttcacatggtgcgccctggctattcccatcgagtgagcctccccacttcacccgggattctcgcaacctccccgtatcctgagacagatagcgccttctttgaaccctcacatctgacctctgccgcagatgagggagcagtgcaggtatcccgaagaaccataagttcaaactcattcagcccggaagtcttcgtcctgcccgtcgacgtcgagaaggagaacgctcacttctacgtggcagatatgattatctccgcgatggagaaaatgaagtgtaatatcctgtctcaacagcaaaccgaaagctggtcgaaggaagtgtctggtctcctgggatccgatcagccagacagcgaaatgacgttcgatacaaatatcaaacaggaatctgggagcagtactagttcttacagcgggtatgaggggtgtgccgtgctgcaggtgtccccagtgacagaaactaggacctatcacgatgtgaaggagatttgtaagtgcgacgtagatgaattcgtgatcctcgtatcactcatgagccaaacctccattctgcaaaactactag

SEQ ID NO: 105635 - DNA, 1908 bp, Artificial Sequence
  derived and/or modified sequence
atggtgagccagagcaccgtgcggcaggacagccccgtggagccctgggaggggatctccgatcactctggaattattgatggcagccctcgactgctgaatacagatcaccctccatgccaactggacattcgcctgatgcgccacaaggctgtatggatcaacccacaggatgtccagcagcagccccaagacctgcagtctcaggtgcctgccgccgggaatagcggaacccacttcgtaaccgacgccgctagtcccagcggtccttcacccagctgcttgggggactctctggccgagacgaccctctcagaggacactacggattcagtggggtccgccagcccacacgggagctcagagaaaagctccagcttctcgctgtctagtaccgaggtgcatatggtgaggcccggttacagccaccgcgtcagccttcccacctctcccgggatactcgcaaccagcccttatcccgaaaccgacagcgcgttctttgagcccagccatcttacatctgctgccgacgaaggcgccgtgcaggtgagccgtcgaacaatatcatctaattccttttcccctgaggtgtttgtcctccctgtcgacgtggagaaggagaacgctcacttctatgtggcagacatgattatctcagccatggaaaagatgaagtgtaatatcctgtcacagcagcagaccgagagctggtcaaaggaggttagcggcctgctcgggagcgaccagcccgactccgagatgaccttcgacacaaacataaagcaggagtctggaagcagtacaagttcttacagcgggtatgagggatgtgcggtattgcaggtgtctcccgtaaccgagacccgaacttaccatgacgttaaggagatctgcaaatgcgacgtggacgagttcgttattttggaactgggggatttcaacgatatcacggagacttgctcatgttcatgttccagcagtaaaagtgtcacctacgagcctgatttcaacagtgcggaactgcttgcaaaagagctgtaccgggtttttcagaaatgctggatcctgagtgttgtcaatagtcagcttgccggttcactcagcgctgccggcagcatcgtggtcaacgaggagtgcgtgcgcaaggattttgaaagctcgatgaatgtggtgcaagagatcaagtttaagagcagaatccggggcacagaggactgggcccccccaagatttcagatcatatttaatatccatccaccattaaagcgggacctcgtggttgccgctcaaaacttcttttgcgccgggtgcggcacccctgtggagcccaaatttgtgaaaaggctgaggtactgtgagtatttagggaaatacttctgtgactgctgtcactcatacgctgaatcctgtatccctgcccggattctcatgatgtgggactttaagaaatattacgtatccaacttctcaaagcagctcctggactctatctggcatcaacctattttcaatctgctcagcatcggccaatccctgtacgccaaagccaaggaattagatagggtgaaggagatccaggaacaactctttcacattaagaagctgctcaaaacatgccgctttgccaatagttgcgttaaggaacgcgctctcttcgtaaatttcgcgaggatccgcctgagtagctcccatttccggcagcagcacgtagaggacgttcagagggcagggcttgccttcactaattccgccagctctccccccagtgccccgggagtcagggggagtcagaggggagaaaacttctggaaggtttggccacttcaacagcatgacgccccagaatattgcgaaaaggactgctcaacatgcctcatgattacccctatctgcgtgtactactggtag

SEQ ID NO: 105636 - DNA, 1908 bp, Artificial Sequence
  derived and/or modified sequence
atggtgagccagagcaccgtgcggcaggacagccccgtggagccctgggagggtatttctgatcattccggcatcattgacgggtctccccgcctgctgaataccgatcatcccccttgccagctagatatccggctcatgaggcacaaagctgtatggatcaatccacaggacgtacagcagcagccacaagaccttcagtctcaggtcccagctgccgggaacagcggaacccatttcgtaaccgatgcggcatcccctagtgggcctagcccctcctgcctcggcgatagcttggcggaaacaaccctctcagaagataccaccgactcagttggctccgcttccccacacggctctagcgagaagagttctagcttttccttgtcttctactgaagttcatatggtgagacccgggtatagtcatagagtgagcttaccgacttcccccgggattttggcaactagcccatatcccgagactgactctgcgttcttcgaaccctcccatctcacctccgcagccgacgaaggcgctgtacaggtaagcaggcggactattagcagcaatagcttcagccccgaggtcttcgtgctgcccgttgacgttgagaaggagaacgctcacttttacgtcgccgatatgatcatttcggccatggaaaagatgaagtgtaatattttatcccaacaacagacagaaagttggtccaaagaagtatcggggctattgggtagcgaccagcccgactctgagatgaccttcgacaccaatataaaacaggagtctggttcaagcacctcttcttacagcggctacgaagggtgcgctgtgctgcaggtttctcccgtgaccgaaacacggacctaccacgacgtgaaagagatctgcaagtgtgacgtcgacgagtttgtcattttagaactgggggacttcaacgatataaccgaaacttgcagttgcagttgctctagctccaagagcgttacttacgagcccgatttcaactctgctgaactcctcgccaaggagctttatcgggtcttccaaaagtgttggatactgagtgtggtcaactcccagcttgctggcagcctgtctgcagctgggtccatcgtggtgaacgaagagtgtgtccgtaaggacttcgagtcctccatgaatgtggtccaggagatcaagttcaaatctcgaatccggggtacggaggactgggcccctcctcgctttcagattatcttcaatatccacccaccactcaaacgtgacttagtagtggccgcgcagaatttcttctgtgctgggtgcgggacaccggtggagccaaaatttgttaagagacttagatactgcgaatatcttggaaagtatttctgtgactgctgccattcgtatgctgagagttgcattcctgccagaatcttgatgatgtgggacttcaagaaatactatgtatccaacttcagtaagcagttgctggactctatttggcatcagccaattttcaacttgttgtcaatcggtcagtctctgtacgcgaaggccaaggaactggatcgggtgaaggaaattcaggagcagctgttccatatcaagaagctgctgaaaacatgccgatttgctaattcttgtgttaaggaaagagccctgttcgtcaattttgctcggatccgactgagcagctctcactttaggcagcagcacgtcgaggacgtccagcgggctggcctggccttcactaattccgcttcatcacccccctcagcccccggcgtgcgcggatcccaaagaggggagaatttttggaaagtttggccattgcagcaacatgatgcccctgaatattgtgagaaggattgctcgacctgcctcatgatcacacccatctgtgtatattattggtag

SEQ ID NO: 105637 - DNA, 537 bp, Artificial Sequence
  derived and/or modified sequence
atggtgagccagagcaccgtgcggcaggacagccccgtggagccctgggagggcattagcgatcattctggtatcatagacggcagtccacgcctgctgaatacagaccatccaccttgccagcttgacatacgcctcatgcggcacaaggctgtctggattaatcctcaggacgtgcaacagcaaccccaggacctgcaaagccaggtcccagccgccggcaatagtggaacgcacttcgtgacggatgccgcctccccctccggcccatcaccatcctgtctgggcgacagtctggccgaaaccacattaagcgaggacacaaccgatagcgtggggtctgcttcccctcacggtagttccgagaaatcgagttcattctccttatctagcaccgaagttcatatggtccgccctgggtattcacatagagttagcttgcctacatcacccggaattctggctactagtccatatcccgagacagactccgcattttttgagcctagccacctcacttcagctgcagatgaatag

SEQ ID NO: 105638 - DNA, 966 bp, Artificial Sequence
  derived and/or modified sequence
atggtgagtcagtcaacagtcagacaagactccccagttgaaccctgggaaggaatttccgaccactctggcattatcgacgggtcaccaagattgctcaacactgaccatcctccctgtcaactggatataagactgatgcggcataaggccgtgtggatcaaccctcaggacgtccagcagcaaccgcaggacctccagtctcaagtacccgcagcaggaaacagcgggacccacttcgtcacggatgctgcttcaccttccggcccatcccccagctgcttgggagattcattagcggaaacaaccctctcagaagacacaaccgactccgtcggtagcgcctcaccgcatgggtcttcagaaaagtccagctccttctctctgtcctccaccgaagtgcacatggtgagaccagggtattcacatcgcgtaagtcttccaacttctccaggtatcctcgctacttctccctatccagaaaccgactccgcgttcttcgagccttcccaccttacatcagcggctgacgagggtgcagttcaggtgagtagaagaaccatcagtagtaactcgttttcaccagaagtctttgttctcccagtggacgtggagaaagagaacgcccacttttatgtggctgacatgatcataagtgccatggagaagatgaaatgtaatatcttgtcccagcagcaaactgaatcctggtctaaagaggtttcaggccttctaggctccgatcaacccgactcagaaatgacatttgacacgaacatcaagcaagagagcggttccagcacctcttcatactcaggatatgaagggtgtgccgtactccaagtttctcctgtgaccgagaccaggacataccacgacgtcaaagagatttgtaagtgcgacgtggatgaatttgtcattttggtctccctcatgtcccagaccagcatattgcagaactactag

SEQ ID NO: 105639 - DNA, 1908 bp, Artificial Sequence
  derived and/or modified sequence
atggtgagccagagcactgtccgacaggatagccctgtggaaccttgggagggtatatctgatcatagcggtattatcgatggctcgccgagactgcttaacacggaccacccaccctgtcagctggatatccggctgatgcggcacaaagccgtgtggatcaaccctcaggacgtccagcagcagcctcaggacctccagtcacaggttcccgcagccggtaatagtggcacacactttgtaactgatgcagctagcccgtcagggccatcacccagttgcctgggagacagtctggcggaaaccactttatcagaagataccaccgatagcgtcggttctgcttccccccacggcagttccgaaaagtctagttctttttccctctcttcgacggaggtacacatggtcagaccgggatactctcacagggtgagcctccccacgagcccaggtatcctggccacgtcaccctacccagagacagattctgccttctttgaaccgtcccaccttaccagcgccgctgacgagggtgctgtccaggtttccagaaggacaatatctagcaattctttctctccagaggtatttgtgcttccagttgacgtagaaaaggagaatgctcacttctacgtggcagatatgattattagtgcaatggagaaaatgaagtgcaacatactatcacagcagcagactgagagttggtccaaggaggtttcaggtctgctcggatctgatcaaccggattccgaaatgacttttgataccaatattaaacaggagagcggttcaagcactagtagttattcaggctacgaaggttgtgccgtgctgcaagtttctcccgttaccgagacccgcacataccatgatgtgaaagagatttgcaagtgtgacgttgacgagtttgtgattctagagctaggggatttcaatgacattacagagacctgtagctgcagctgcagctcttccaagagcgttacttacgagcccgattttaatagcgccgagctgctggccaaagagctgtaccgtgtgttccagaagtgctggatcctgtccgtggtcaattcacagcttgcaggctctttgtccgccgcagggagcatagttgtgaacgaagagtgtgtgcgcaaggattttgagtcatctatgaacgtggtgcaggaaattaaatttaagtctcgcattcgagggaccgaggattgggccccaccaaggttccagatcatcttcaatatccacccacctttgaagcgggatctcgtcgtagctgcacagaattttttttgcgccggatgtggcactcccgtcgaacccaaatttgtgaagcgtttgagatactgcgagtatctggggaaatatttttgtgactgctgccactcttacgccgaaagctgcattccagcccgaatcttgatgatgtgggactttaaaaagtactacgtctctaacttcagtaagcagctgctcgattcaatctggcaccagcccatatttaacctcctcagtatcggccagtccctgtacgccaaggcaaaagaactagaccgggtaaaagagatacaggaacagctcttccatattaaaaaattgttaaaaacatgccggtttgccaactcttgcgtgaaagagagagccctatttgtgaatttcgcacgtattagattgtcttcctctcatttcaggcagcaacacgtcgaagatgtgcagagggccggtttagcttttacaaattcagctagctcccctccatccgcccctggagtgagaggatcacagcggggagaaaatttttggaaggtctggcctctccagcaacatgacgcaccagagtattgcgaaaaagattgttctacgtgcctgatgatcacccccatttgcgtgtactattggtag

SEQ ID NO: 105640 - DNA, 1908 bp, Artificial Sequence
  derived and/or modified sequence
atggtgagccagtccactgttagacaagactcaccagtcgagccttgggagggtatttcagatcactccggtatcatcgacggcagccctcgtttactgaatactgatcatccgccatgtcaactcgatattagacttatgcggcataaagctgtgtggattaaccctcaagacgtacagcagcaaccacaggacctgcagtcccaggttcctgccgcaggcaattcaggaacacatttcgtaacagatgctgctagcccttctggtccttcaccatcctgtttaggtgactctctggcagagacaaccctgtctgaggacacgacagacagtgtggggagcgcaagcccccacgggagcagcgaaaaaagctctagcttcagcctctcatctactgaggtgcatatggtgcgcccaggatacagtcaccgcgtgtccctaccaacctccccaggaatcctggcaacatctccatacccagaaacagattctgctttcttcgagccaagccacctcacttcagcagccgatgaaggggctgtgcaggtgtcacgtaggacgattagcagtaattccttcagtcctgaagtctttgtgctgccagttgacgtcgaaaaagagaacgcccatttctatgtggctgatatgatcatatctgccatggagaaaatgaagtgcaatatactgtcccagcagcagacagaatcctggtcaaaggaggtgtctggactcttgggctcagatcagccagactctgaaatgaccttcgacactaatattaagcaggaatccgggtcgagtacgagctcctattcgggatatgaggggtgtgccgtactccaggtgagccccgtgaccgagactcgcacttatcacgacgtcaaggaaatctgtaaatgcgacgttgatgagtttgtgatactggaactgggtgatttcaacgacatcacagagacttgctcatgcagctgcagttcctccaaaagcgtcacctacgaacccgacttcaactccgcagaattactggccaaggagttgtatagagtgttccagaagtgctggattctctcagtggttaactcacagctggctggtagcctgtctgctgccggatcaattgtagtcaacgaggagtgtgtgcgtaaagatttcgagtcttccatgaatgttgtgcaggagattaaattcaagagtcgcataagggggactgaggattgggcgcctccgagattccagatcatcttcaatatccatcctccactgaaacgtgatctggtggtcgctgcgcaaaacttcttttgcgcaggatgcggcacacctgtggagcccaagtttgtcaagcgcttgcgctattgtgaatatctggggaaatacttttgcgattgttgtcactcatatgctgagtcatgtatccctgctcgtatcctgatgatgtgggattttaagaagtattacgtgtccaactttagcaagcagcttctagactccatctggcatcagcctatcttcaaccttctgagtattgggcagagcctgtacgctaaggccaaagagcttgatcgtgtgaaggagatccaggaacagcttttccacattaagaaactgctgaagacatgcaggttcgcgaattcttgtgtgaaggagcgggcactgtttgttaattttgccagaatccgcctttcttcaagtcacttccgtcagcaacatgtggaagacgtgcagcgggctggtctggccttcaccaatagtgcttccagcccccctagcgccccaggtgtacggggaagccagcgaggcgaaaatttctggaaagtttggccactccagcagcacgatgcccctgagtactgtgagaaggattgttccacttgcctcatgattacgccaatttgcgtgtattattggtag

SEQ ID NO: 105641 - DNA, 537 bp, Artificial Sequence
  derived and/or modified sequence
atggtctcccagtcaacagtcaggcaagattcccctgtcgaaccatgggaaggcatcagtgatcattccggaatcattgacggctcacctcgtttgctgaacacagaccatccaccatgtcagctggacattaggctgatgagacataaagccgtgtggataaacccacaggatgtacagcagcaaccgcaggacctacagtcgcaggtgcccgctgccggtaactccgggacccacttcgtgacagatgcggcaagcccctcaggtccctcaccgtcttgtctgggtgactctttagcagaaacaacactcagcgaggataccacagattccgtcggaagcgccagcccacatggttcgtcggaaaagagcagttcattctctttatccagcacggaagtccatatggttcggcctggatactcccaccgtgtgtcccttcccacatcacctgggatcctcgctacgtcaccttaccccgaaactgactcagctttctttgagccttctcatctgacttctgccgcagatgagtag

SEQ ID NO: 105642 - DNA, 2731 bp, Artificial Sequence
  derived and/or modified sequence
accggcagaggcgcgcataggtgcgtggtgctgggcccgggcgccgcggcaccggtgtaggagcgcgcatctccagagtttcttccatctgggcgacgtctcggtgcctgcggcgggaacggcgctttgcttccctgaggagcttctagagagctacggtggcccccgtgtgggaggcggggggcgtggcggcgtcggggcgtcgctgtcccctcctcggtagctctcctccctcccctttctgctgttaccgggagcgcggtggccacggaacgctgcccggagccgcgcgagggaggacccgacgcgcggcgtttacccagcgcagcgttccaccgctcgggtttggctggaatagctctccagacccccagctggccatgtggtgagttcagggcccaaatcaagtagtaccagcaatcagggaactcctatctgttttgaatggattcacaccagccacaagcctggaaagatggtgtcacaatctacagtcaggcaggattctcctgtggagccctgggaagggatcagcgatcactctggcattattgatggttcgcccagactcctgaacactgaccatcctccttgccaattagacatcaggctcatgaggcacaaagctgtctggattaacccccaggatgtgcagcaacagccgcaggacttgcaatctcaggtgccagcagcagggaacagtgggacccattttgtgacagatgctgcctctccctcaggcccttcaccttcgtgcctcggggactccctggcagagacaacgttgtctgaggataccacagactccgttggcagcgcttctccccatggctcgagtgaaaagagtagcagcttctctctgtcctcaacagaggtacacatggtccgcccaggatactctcatcgggtgtctctgcccacaagccctgggattttggccacctccccatatcctgagactgacagtgctttttttgagccttcccatctgacatctgctgctgatgaaggtgctgttcaagtcagtagaagaaccatttcttcgaattccttctcaccagaggtatttgtgctgcctgttgatgtagaaaaggaaaatgcccacttttatgttgcagatatgattatatcagcaatggagaaaatgaagtgtaacattctgagtcaacagcagacagagagctggagtaaagaagtcagtgggttacttgggagtgatcagcctgactctgaaatgacttttgataccaacataaagcaagagtctgggtcttctacttcttcatacagtggctatgaaggttgtgctgtgttacaggtcagcccagtgactgaaacacgtacttaccatgatgtgaaagagatttgcaaatgcgatgttgatgaatttgttattttagagcttggagattttaatgatatcacagaaacctgtagctgttcctgcagctcctctaagagtgtcacttatgagccagacttcaattctgcagaactattagccaaagagctgtaccgcgtgttccagaagtgctggatactgtcagtagttaattctcagctggcaggttccctgagtgcagctggctcgatagtcgtaaatgaagagtgtgtccgaaaagactttgaatccagtatgaatgtagtacaggaaattaaatttaagtctaggatcagagggactgaagactgggctcctcctagatttcaaatcatatttaatattcatccaccactcaagagggaccttgtggtggcagcccagaattttttctgtgccggctgtggaactccagtagagcctaagtttgtgaagcggctccggtactgcgaatacctagggaagtatttctgtgactgctgccactcatatgcagagtcgtgcatccctgcccgaatcctgatgatgtgggacttcaagaagtactacgtcagcaatttctccaaacagctgctcgacagcatatggcaccagcccattttcaatttgctgagcatcggccaaagcctgtatgcgaaagccaaggagctggacagagtgaaggaaattcaggagcagctcttccatatcaagaagctgttgaagacctgtaggtttgctaacagctgtgtcaaggaaagggctttatttgtgaattttgccagaatacgactgtcatcttcccatttcagacagcaacatgtagaagatgttcagcgtgcagggcttgctttcacaaacagtgcttccagtcctccgagtgcccccggtgtgcgaggatcacagcgaggagaaaacttctggaaagtgtggcctctgcagcaacatgatgcccctgagtactgtgaaaaagactgttcaacatgccttatgataacaccgatttgtgtctattattggtgacattgttttagatattgggtattgtatattaaggaaaaagatggtctatattctctttattgcatatacttaatgtttcaaaagaatgcagattctgtgtttaagcacagggctgatagttgtggttttgtttacaaatgttctgttttggctgctattggttttttaaagaggttttttatacttttgtatttgaatagttatgtttcactgatgctgagccagtttgtatgtgtgtgcatatatgtgaactgtaactgacaagatgaattactcagtttctctttctctaaagcttgtttgatgaaactggttggtcctttcagtgaacaaaaatatgaccccaaa

SEQ ID NO: 105643 - DNA, 3821 bp, Artificial Sequence
  derived and/or modified sequence
ggatttctaggaggaccggcagaggcgcgcataggtgcgtggtgctgggcccgggcgccgcggcaccggtgtaggagcgcgcatctccagagtttcttccatctgggcgacgtctcggtgcctgcggcgggaacggcgctttgcttccctgaggagcttctagagagctacggtggcccccgtgtgggaggcggggggcgtggcggcgtcggggcgtcgctgtcccctcctcggtagctctcctccctcccctttctgctgttaccgggagcgcggtggccacggaacgctgcccggagccgcgcgagggaggacccgacgcgcggcgtttacccagcgcagcgttccaccgctcgggtttggctggataaaataaaaaatggggatattgacctcctgtcactactgcatggactttgatggtttccaatcattactttctcctctgtgtcaatctgcctcttcgagaaattcatactcctgaatagctctccagacccccagctggccatgtggtgagttcagggcccaaatcaagtagtaccagcaatcagggaactcctatctgttttgaatggattcacaccagccacaagcctggaaagatggtgtcacaatctacagtcaggcaggattctcctgtggagccctgggaagggatcagcgatcactctggcattattgatggttcgcccagactcctgaacactgaccatcctccttgccaattagacatcaggctcatgaggcacaaagctgtctggattaacccccaggatgtgcagcaacagccgcaggacttgcaatctcaggtgccagcagcagggaacagtgggacccattttgtgacagatgctgcctctccctcaggcccttcaccttcgtgcctcggggactccctggcagagacaacgttgtctgaggataccacagactccgttggcagcgcttctccccatggctcgagtgaaaagagtagcagcttctctctgtcctcaacagaggtacacatggtccgcccaggatactctcatcgggtgtctctgcccacaagccctgggattttggccacctccccatatcctgagactgacagtgctttttttgagccttcccatctgacatctgctgctgatgaaggtgctgttcaagtcagtagaagaaccatttcttcgaattccttctcaccagaggtatttgtgctgcctgttgatgtagaaaaggaaaatgcccacttttatgttgcagatatgattatatcagcaatggagaaaatgaagtgtaacattctgagtcaacagcagacagagagctggagtaaagaagtcagtgggttacttgggagtgatcagcctgactctgaaatgacttttgataccaacataaagcaagagtctgggtcttctacttcttcatacagtggctatgaaggttgtgctgtgttacaggtcagcccagtgactgaaacacgtacttaccatgatgtgaaagagatttgcaaatgcgatgttgatgaatttgttattttagagcttggagattttaatgatatcacagaaacctgtagctgttcctgcagctcctctaagagtgtcacttatgagccagacttcaattctgcagaactattagccaaagagctgtaccgcgtgttccagaagtgctggatactgtcagtagttaattctcagctggcaggttccctgagtgcagctggctcgatagtcgtaaatgaagagtgtgtccgaaaagactttgaatccagtatgaatgtagtacaggaaattaaatttaagtctaggatcagagggactgaagactgggctcctcctagatttcaaatcatatttaatattcatccaccactcaagagggaccttgtggtggcagcccagaattttttctgtgccggctgtggaactccagtagagcctaagtttgtgaagcggctccggtactgcgaatacctagggaagtatttctgtgactgctgccactcatatgcagagtcgtgcatccctgcccgaatcctgatgatgtgggacttcaagaagtactacgtcagcaatttctccaaacagctgctcgacagcatatggcaccagcccattttcaatttgctgagcatcggccaaagcctgtatgcgaaagccaaggagctggacagagtgaaggaaattcaggagcagctcttccatatcaagaagctgttgaagacctgtaggtttgctaacagctgtgtcaaggaaagggctttatttgtgaattttgccagaatacgactgtcatcttcccatttcagacagcaacatgtagaagatgttcagcgtgcagggcttgctttcacaaacagtgcttccagtcctccgagtgcccccggtgtgcgaggatcacagcgaggagaaaacttctggaaagtgtggcctctgcagcaacatgatgcccctgagtactgtgaaaaagactgttcaacatgccttatgataacaccgatttgtgtctattattggtgacattgttttagatattgggtattgtatattaaggaaaaagatggtctatattctctttattgcatatacttaatgtttcaaaagaatgcagattctgtgtttaagcacagggctgatagttgtggttttgtttacaaatgttctgttttggctgctattggttttttaaagaggttttttatacttttgtatttgaatagttatgtttcactgatgctgagccagtttgtatgtgtgtgcatatatgtgaactgtaactgacaagatgaattactcagtttctctttctctaaagcttgtttgatgaaactggttggtcctttcagtgaacaaaaatatgaccccaaatctgtttgctctggcttttatttcttcaggaagcagacttccacttaaatgccattttgtgattgtgtcaatcatacacattttatttacttcagagtttgaatagagagtacacatttcttctgcagatttatttcatgatgagtttgagttgcttagcagggcgtgtgggtcccgttgaagtgcagtttgaagcaactgcttctagatggcactctttcaggtggcacaaattgaacctgtatttgtcatctctgttccacacactgcaatgtcaagggatgcagaagtgagtagaattccatccctgcccttgaggatcttgctttaacagatgtaaaactgaacataaggtatttgcagatttaaacgaactgggggaaataatgaacagtgtgattctagtaataacattaaaatcatagacattgactaataaggttaaatgaatcacaaaacctttatgaatttcttttttctaatagttcttatatgttttcctgaaacatgtgagcctattcttttttcttctactttctatatactttctcccacttgagaaaggggccttgaggctgggtcccttcatggtatacctttagactgaacggtttgcaacctagggcttgggcattacattccctgggattcacatgccctaactaaacctaccttgattttctcagacagcacaggcaggcaataaagcgtcacagattgtcccctaaccccatccagccatgtgtatgagtgtgttttattcaatgggatagtactgagcacatgaaagaaatgaatgacttctgtcaatctcttttcattcagtcttctcattctgtcaattgttttctcatccgcagtgcctctgccagaactgtgctcacatccattatttaagccagatcttttctaagtattatagaagtgtagaggcacatagaataaataaaaccagacttc

SEQ ID NO: 105644 - DNA, 972 bp, Artificial Sequence
  derived and/or modified sequence
ttaatactgtgtctctggtggctctagtgatgcaatcattctcgatggggccactgactctgatgtcacaatgacttggctggaggtgtcctgaagtctcttgtttgtccagggcctttgctgcagcttatatgttcactagtaatctggcctgtgcctaccttttaatcccagctggaaaatctcagtaagaatgatgataaaataaaaaatggggatattgacctcctgtcactactgcatggactttgatggtttccaatcattactttctcctctgtgtcaatctgcctcttcgagaaattcatactcctgaatagctctccagacccccagctggccatgtggtgagttcagggcccaaatcaagtagtaccagcaatcagggaactcctatctgttttgaatggattcacaccagccacaagcctggaaagatggtgtcacaatctacagtcaggcaggattctcctgtggagccctgggaagggatcagcgatcactctggcattattgatggttcgcccagactcctgaacactgaccatcctccttgccaattagacatcaggctcatgaggcacaaagctgtctggattaacccccaggatgtgcagcaacagccgcaggacttgcaatctcaggtgccagcagcagggaacagtgggacccattttgtgacagatgctgcctctccctcaggcccttcaccttcgtgcctcggggactccctggcagagacaacgttgtctgaggataccacagactccgttggcagcgcttctccccatggctcgagtgaaaagagtagcagcttctctctgtcctcaacagaggtacacatggtccgcccaggatactctcatcgggtgtctctgcccacaagccctgggattttggccacctccccatatcctgagactgacagtgctttttttgagccttcccatctgacatctgctgctgatgaag

SEQ ID NO: 105645 - protein, 595 aa, Artificial Sequence
  derived and/or modified sequence
MVSNHYFLLCVNLPLREIHTPGPSPSCLGDSLAETTLSEDTTDSVGSASPHGSSEKSSSFSLSSTEVHMVRPGYSHRVSLPTSPGILATSPYPETDSAFFEPSHLTSAADEGAVQVSRRTISSNSFSPEVFVLPVDVEKENAHFYVADMIISAMEKMKCNILSQQQTESWSKEVSGLLGSDQPDSEMTFDTNIKQESGSSTSSYSGYEGCAVLQVSPVTETRTYHDVKEICKCDVDEFVILELGDFNDITETCSCSCSSSKSVTYEPDFNSAELLAKELYRVFQKCWILSVVNSQLAGSLSAAGSIVVNEECVRKDFESSMNVVQEIKFKSRIRGTEDWAPPRFQIIFNIHPPLKRDLVVAAQNFFCAGCGTPVEPKFVKRLRYCEYLGKYFCDCCHSYAESCIPARILMMWDFKKYYVSNFSKQLLDSIWHQPIFNLLSIGQSLYAKAKELDRVKEIQEQLFHIKKLLKTCRFANSALKEFEQVPGHLTDELHLFSLEDLVRIKKGLLAPLLKDILKASLAHVAGCELCQGKGFICEFCQNTTVIFPFQTATCRRCSACRACFHKQCFQSSECPRCARITARRKLLESVASAAT

SEQ ID NO: 105646 - DNA, 1788 bp, Artificial Sequence
  derived and/or modified sequence
atggtgagcaaccactacttcctgctgtgcgtgaacctgcccctgagagagatccacacccccggccccagccccagctgcctgggcgacagcctggccgagaccaccctgagcgaggacaccaccgacagcgtgggcagcgccagcccccacggcagcagcgagaagagcagcagcttcagcctgagcagcaccgaggtgcacatggtgagacccggctacagccacagagtgagcctgcccaccagccccggcatcctggccaccagcccctaccccgagaccgacagcgccttcttcgagcccagccacctgaccagcgccgccgacgagggcgccgtgcaggtgagcagaagaaccatcagcagcaacagcttcagccccgaggtgttcgtgctgcccgtggacgtggagaaggagaacgcccacttctacgtggccgacatgatcatcagcgccatggagaagatgaagtgcaacatcctgagccagcagcagaccgagagctggagcaaggaggtgagcggcctgctgggcagcgaccagcccgacagcgagatgaccttcgacaccaacatcaagcaggagagcggcagcagcaccagcagctacagcggctacgagggctgcgccgtgctgcaggtgagccccgtgaccgagaccagaacctaccacgacgtgaaggagatctgcaagtgcgacgtggacgagttcgtgatcctggagctgggcgacttcaacgacatcaccgagacctgcagctgcagctgcagcagcagcaagagcgtgacctacgagcccgacttcaacagcgccgagctgctggccaaggagctgtacagagtgttccagaagtgctggatcctgagcgtggtgaacagccagctggccggcagcctgagcgccgccggcagcatcgtggtgaacgaggagtgcgtgagaaaggacttcgagagcagcatgaacgtggtgcaggagatcaagttcaagagcagaatcagaggcaccgaggactgggccccccccagattccagatcatcttcaacatccacccccccctgaagagagacctggtggtggccgcccagaacttcttctgcgccggctgcggcacccccgtggagcccaagttcgtgaagagactgagatactgcgagtacctgggcaagtacttctgcgactgctgccacagctacgccgagagctgcatccccgccagaatcctgatgatgtgggacttcaagaagtactacgtgagcaacttcagcaagcagctgctggacagcatctggcaccagcccatcttcaacctgctgagcatcggccagagcctgtacgccaaggccaaggagctggacagagtgaaggagatccaggagcagctgttccacatcaagaagctgctgaagacctgcagattcgccaacagcgccctgaaggagttcgagcaggtgcccggccacctgaccgacgagctgcacctgttcagcctggaggacctggtgagaatcaagaagggcctgctggcccccctgctgaaggacatcctgaaggccagcctggcccacgtggccggctgcgagctgtgccagggcaagggcttcatctgcgagttctgccagaacaccaccgtgatcttccccttccagaccgccacctgcagaagatgcagcgcctgcagagcctgcttccacaagcagtgcttccagagcagcgagtgccccagatgcgccagaatcaccgccagaagaaagctgctggagagcgtggccagcgccgccacctag

SEQ ID NO: 105647 - DNA, 1788 bp, Artificial Sequence
  derived and/or modified sequence
atggtctcaaaccactatttcctgttgtgcgttaatcttcccctgagggaaatccatactcccggcccatccccctcctgtttgggtgattctctcgccgagactaccctttctgaggacaccacagattccgtgggctctgctagcccgcatggctcctcagaaaagtctagctccttcagcttgtccagcacagaggttcacatggtcagaccaggttacagtcatcgagtctctctgcccacatcccctggaatcctcgccacatccccttatcccgagacagacagcgcttttttcgaaccctctcaccttacctctgccgcagatgagggggccgtgcaagtgtccaggcgcacaatcagttctaactcgttctccccagaggtcttcgtgctgccagtggatgttgaaaaggagaacgcacacttctatgttgctgatatgatcataagcgctatggagaagatgaagtgtaatattctgagccagcagcagactgaaagttggagtaaagaagtgagcggtctccttggaagcgatcagcctgactccgagatgacttttgacactaacataaagcaggagtcaggctcttcaaccagctcatactcgggttatgagggttgtgcagtgctgcaagtgtccccagtgacagaaactcgcacttatcacgatgttaaagagatttgtaaatgcgatgtcgatgaattcgtaattctggagcttggggactttaacgatatcaccgaaacctgttcttgttcctgtagcagctctaagtccgtcacctacgaacctgactttaactctgcagagcttctcgccaaggagttgtaccgggtctttcaaaaatgctggattcttagcgttgtgaatagtcagctcgccggatctctgtccgccgcaggatctatcgtggtgaacgaggagtgcgtgcgtaaggatttcgaaagcagcatgaatgtagtccaggagataaagttcaaaagcaggatacgggggactgaagactgggctccgccaaggtttcagattatattcaatatccacccacccttgaagcgagacctagtggtggccgctcagaacttcttttgtgcgggctgcgggacacccgtggaaccaaaatttgtcaagaggctaaggtattgtgagtacctgggaaaatacttttgcgattgctgccactcttatgccgagtcttgtattccggctcggattttaatgatgtgggacttcaagaagtattacgtcagcaatttctctaagcagttgctagattcaatttggcaccagcctatttttaaccttttgtccatcggccagtccttgtatgctaaagctaaggagcttgacagggtgaaggagatccaggagcagctttttcacataaagaaactcttgaagacttgtagattcgccaactctgccctcaaggagttcgagcaagtacccgggcacctgacagatgagctgcatctatttagcttagaagatctggttcggattaaaaagggccttctcgcaccccttctgaaagacatcctcaaagctagtttggcccatgtcgccggttgtgagctttgccaggggaaaggatttatctgtgagttctgtcaaaatacaactgtgatcttcccatttcagacggctacctgtcgccgctgctcagcttgtcgtgcatgctttcacaaacaatgctttcagtcatctgaatgccctagatgcgcccggatcacggctcgaagaaaactactcgaatcagtagctagtgccgcaacatag

SEQ ID NO: 105648 - DNA, 1788 bp, Artificial Sequence
  derived and/or modified sequence
atggtgagcaaccactacttcctgctgtgtgtgaacctgcccctgcgggagatccacaccccaggccccagccccagctgcctgggggacagcctggccgagaccaccctgtctgaggacaccacagacagcgtgggcagcgccagcccccacggcagcagcgagaagagcagcagcttcagcctgagcagcacagaggtgcacatggtgcggcccggctacagccaccgggtgtccctgcccaccagccctggcatcctggccaccagcccctacccagagacagattctgccttctttgagcccagccacctgaccagcgctgctgatgagggcgctgtgcaggtgtccaggaggaccatcagcagcaacagcttcagccctgaggtgtttgtgctgcctgtggatgtggagaaggaaaatgcccacttctacgtggccgacatgatcatcagcgccatggagaagatgaagtgcaacatcctgagccagcagcagacagagagctggagcaaggaggtgtctggcctgctgggcagtgaccagccagattctgagatgacctttgacaccaacatcaagcaggagagcggcagcagcaccagcagctacagcggctatgagggctgtgctgtgctgcaggtgtcccctgtgacagagaccaggacctaccatgatgtgaaggagatctgcaagtgtgatgtggatgaatttgtgatcctggagctgggggacttcaatgacatcacagagacctgcagctgcagctgcagcagcagcaagtctgtgacctatgagccagacttcaacagcgctgagctgctggccaaggagctgtacagagtcttccagaagtgctggatcctgtctgtggtgaacagccagctggccggcagcctgtctgctgctggcagcatcgtggtgaatgaagaatgtgtgaggaaggactttgagagctccatgaatgtggtgcaggagatcaagttcaagagccgcatccggggcacagaggactgggccccaccccgcttccagatcatcttcaacatccacccccccctgaagagggacctggtggtggccgcccagaacttcttctgtgccggctgcggcacccctgtggagcccaagtttgtgaagaggctgcgctactgtgagtacctgggcaagtacttctgtgactgctgccacagctatgcagagagctgcatcccagcccgcatcctgatgatgtgggacttcaagaagtactacgtgagcaacttcagcaagcagctgctggacagcatctggcaccagcccatcttcaacctgctgagcatcggccagagcctgtatgccaaggccaaggagctggacagagtgaaggagatccaggagcagctgttccacatcaagaagctgctgaagacctgccgctttgccaacagcgccctgaaggagtttgagcaggtgcccggccacctgacagatgagctgcacctgttcagcctggaggacctggtgcgcatcaagaagggcctgctggcccccctgctgaaggacatcctgaaggccagcctggcccacgtggccggctgtgagctgtgccagggcaagggcttcatctgtgagttctgccagaacaccaccgtcatcttccccttccagacagccacctgccgccgctgcagcgcctgccgggcctgcttccacaagcagtgcttccagagcagtgaatgtccccgctgtgcccgcatcacagcccggaggaagctgctggagagcgtggccagcgctgccacctag

SEQ ID NO: 105649 - DNA, 1788 bp, Artificial Sequence
  derived and/or modified sequence
atggtgagcaaccactacttcctgctgtgcgtgaacctgcccctgagggaaatccacaccccaggcccaagtccttcctgtttgggagattcactggctgagacaactctgtccgaagacactactgactctgtaggtagcgcctccccacacgggtcctcagaaaagtccagtagcttttcattgtcaagcacagaggtccatatggttcgtccaggatacagccatcgggttagccttccaacgagtccaggcatcctggctacaagtccgtatcccgagacagactcggcctttttcgaaccctcacacctgacaagcgccgccgatgagggtgccgttcaggttagccgtcgcacgatctctagcaatagttttagcccggaagtttttgtgctgccagtcgacgtggaaaaggagaatgcccacttttacgttgcggacatgatcatatccgcaatggagaagatgaagtgtaatattcttagccagcaacaaaccgagagctggtccaaggaggtgtctggcctgctcggaagcgaccagcccgacagcgaaatgactttcgacacgaatattaagcaggaatccggctcatcaacgagtagctactccggatacgagggatgtgctgttttgcaggtctcccccgtgactgagactcgaacctaccacgatgtgaaggagatttgcaaatgtgacgtagacgagtttgtcatcctggaactcggggactttaacgatataaccgagacctgtagttgctcctgttcgagctccaagagcgtgacttacgagccagactttaactctgctgaacttctggcgaaagaattgtaccgtgtcttccagaagtgttggatcctctccgtggtgaactcgcagctagctgggagtctatccgccgctggatcaatcgtcgtgaatgaggaatgcgtaagaaaagattttgagagcagcatgaacgtggtgcaagaaattaaattcaaatccagaattagaggcaccgaggactgggccccccctaggttccaaatcatctttaatattcacccaccgctgaagagggatctggtcgttgcggcccagaactttttttgcgccggatgcggcacgcccgtcgagcctaaatttgttaaacgcctaaggtactgcgaatacctgggaaaatatttctgcgactgctgtcactcctacgccgagtcttgcatcccagcacggattttgatgatgtgggacttcaaaaaatactacgtgagcaacttttccaagcagttgctggattcaatctggcaccaaccaatcttcaatctcctatccatcgggcaaagtctgtacgctaaggcgaaagagctcgacagagtgaaagagattcaggagcagctgtttcacattaaaaagctattgaaaacttgtcggttcgctaatagtgcactcaaagagtttgagcaagtgcccgggcacttgaccgacgaactgcatctattcagtctagaagacttagtccgcatcaaaaagggcctccttgcaccccttctgaaggacattctcaaagcttcactagcacacgttgcaggctgtgaactgtgtcaagggaagggttttatctgcgagttctgccagaatactacggtaatatttcccttccagacggcaacctgccgccgctgctctgcttgccgcgcatgtttccataaacagtgttttcaatccagcgaatgcccgagatgcgcccgcatcaccgcaagaagaaaactgttagaatcagttgccagtgctgccacttag

SEQ ID NO: 105650 - DNA, 1788 bp, Artificial Sequence
  derived and/or modified sequence
atggtgagtaaccattacttcctcttgtgcgttaatctgcctttgcgcgagatacacacacccggtccttcaccgagttgcctgggtgatagcctagctgagactacccttagtgaggataccacagacagtgtgggatctgcctcgccccacggcagttccgaaaaatcaagcagtttcagtctttcgtccactgaagtgcacatggtgcggccagggtactcacaccgggtatccctgcccacgagccctgggatcctggcaacatccccttacccagaaaccgactccgcattcttcgaaccgtcccaccttacttccgcagccgatgaaggtgccgttcaggtcagccgacgtacaatttccagcaattcgttttcaccagaagtctttgtgctgcccgtcgacgtggaaaaagaaaacgctcacttctatgtcgccgacatgatcatttcagccatggagaagatgaaatgtaacatcctgagccagcagcagactgaatcctggtccaaagaggtctccgggcttttgggatcagatcagccagactcagaaatgaccttcgacacaaacataaagcaggagtccggatcatcaacctccagctatagcgggtatgagggttgcgccgtactgcaggtgtcgccggtcaccgaaacacggacataccacgacgttaaggagatctgcaagtgtgatgtcgacgagttcgttattctggagctcggagactttaatgacatcacagagacctgttcttgtagttgcagctctagcaagtccgttacctatgagcctgactttaactcagcagagctgcttgcaaaagagctgtacagggtgtttcaaaaatgctggatactctccgtggtcaattcacaactcgctggctcattgtcggccgctggatcaattgtagtgaacgaagagtgtgtgagaaaggatttcgagtcgtccatgaatgtggtgcaggagatcaagttcaagagccgaattcgagggacagaggattgggcccctcctagatttcagattatttttaacatccatcccccactgaagcgtgacctggttgtcgccgctcaaaacttcttctgtgcgggatgtggcacgcctgttgagcccaaattcgtcaagcgccttagatattgcgagtacctgggcaaatacttttgcgactgctgccattcctacgcggagagctgcatcccagctagaatcctgatgatgtgggatttcaaaaagtattacgttagcaacttttctaagcagctgctcgattcgatttggcatcaaccaatctttaatttactctcgatcggccagagcctgtacgcgaaggccaaggaactggaccgcgttaaagaaatacaggagcagttatttcacatcaagaaattactgaagacatgcagatttgctaactccgctctcaaagaatttgaacaggtgcccggacacctaaccgacgagctgcatttgtttagtctggaggatctggtacggattaaaaagggtctgctcgctcccttgttgaaggacattctgaaagcctctttggcacatgtagccggatgcgagttgtgccagggaaaaggtttcatttgcgagttctgtcagaatacaactgtaattttcccctttcagacggccacttgtaggagatgctctgcatgtagagcctgtttccacaagcagtgttttcaatcaagcgaatgtcctcgatgcgccaggataacagccagacgtaaactcctggaaagcgtcgccagcgctgcgacttag

SEQ ID NO: 105651 - DNA, 2361 bp, Artificial Sequence
  derived and/or modified sequence
ggagcgcggtggccacggaacgctgcccggagccgcgcgagggaggacccgacgcgcggcgtttacccagcgcagcgttccaccgctcgggtttggctggataaaataaaaaatggggatattgacctcctgtcactactgcatggactttgatggtttccaatcattactttctcctctgtgtcaatctgcctcttcgagaaattcatactcctggcccttcaccttcgtgcctcggggactccctggcagagacaacgttgtctgaggataccacagactccgttggcagcgcttctccccatggctcgagtgaaaagagtagcagcttctctctgtcctcaacagaggtacacatggtccgcccaggatactctcatcgggtgtctctgcccacaagccctgggattttggccacctccccatatcctgagactgacagtgctttttttgagccttcccatctgacatctgctgctgatgaaggtgctgttcaagtcagtagaagaaccatttcttcgaattccttctcaccagaggtatttgtgctgcctgttgatgtagaaaaggaaaatgcccacttttatgttgcagatatgattatatcagcaatggagaaaatgaagtgtaacattctgagtcaacagcagacagagagctggagtaaagaagtcagtgggttacttgggagtgatcagcctgactctgaaatgacttttgataccaacataaagcaagagtctgggtcttctacttcttcatacagtggctatgaaggttgtgctgtgttacaggtcagcccagtgactgaaacacgtacttaccatgatgtgaaagagatttgcaaatgcgatgttgatgaatttgttattttagagcttggagattttaatgatatcacagaaacctgtagctgttcctgcagctcctctaagagtgtcacttatgagccagacttcaattctgcagaactattagccaaagagctgtaccgcgtgttccagaagtgctggatactgtcagtagttaattctcagctggcaggttccctgagtgcagctggctcgatagtcgtaaatgaagagtgtgtccgaaaagactttgaatccagtatgaatgtagtacaggaaattaaatttaagtctaggatcagagggactgaagactgggctcctcctagatttcaaatcatatttaatattcatccaccactcaagagggaccttgtggtggcagcccagaattttttctgtgccggctgtggaactccagtagagcctaagtttgtgaagcggctccggtactgcgaatacctagggaagtatttctgtgactgctgccactcatatgcagagtcgtgcatccctgcccgaatcctgatgatgtgggacttcaagaagtactacgtcagcaatttctccaaacagctgctcgacagcatatggcaccagcccattttcaatttgctgagcatcggccaaagcctgtatgcgaaagccaaggagctggacagagtgaaggaaattcaggagcagctcttccatatcaagaagctgttgaagacctgtaggtttgctaacagtgcattaaaggagttcgagcaggtgccgggacacttgactgatgagctccacctgttctcccttgaggacctggtcaggatcaagaaagggctgctggcacccttactcaaggacattctgaaagcttcccttgcacatgtggctggctgtgagctgtgtcaaggaaagggctttatttgtgaattttgccagaatacgactgtcatcttcccatttcagacagcaacatgtagaagatgttcagcgtgcagggcttgctttcacaaacagtgcttccagtcctccgagtgcccccggtgtgcgaggatcacagcgaggagaaaacttctggaaagtgtggcctctgcagcaacatgatgcccctgagtactgtgaaaaagactgttcaacatgccttatgataacaccgatttgtgtctattattggtgacattgttttagatattgggtattgtatattaaggaaaaagatggtctatattctctttattgcatatacttaatgtttcaaaagaatgcagattctgtgtttaagcacagggctgatagttgtggttttgtttacaaatgttctgttttggctgctattggttttttaaagaggttttttatacttttgtatttgaatagttatgtttcactgatgctgagccagtttgtatgtgtgtgcatatatgtgaactgtaactgacaagatgaattactcagtttctctttctctaaagcttgtttgatgaaactggttggtcctttcagtgaacaaaaatatgaccccaaa

SEQ ID NO: 105652 - DNA, 1584 bp, Artificial Sequence
  derived and/or modified sequence
atggtgagacccggctacagccacagagtgagcctgcccaccagccccggcatcctggccaccagcccctaccccgagaccgacagcgccttcttcgagcccagccacctgaccagcgccgccgacgagggcgccgtgcaggtgagcagaagaaccatcagcagcaacagcttcagccccgaggtgttcgtgctgcccgtggacgtggagaaggagaacgcccacttctacgtggccgacatgatcatcagcgccatggagaagatgaagtgcaacatcctgagccagcagcagaccgagagctggagcaaggaggtgagcggcctgctgggcagcgaccagcccgacagcgagatgaccttcgacaccaacatcaagcaggagagcggcagcagcaccagcagctacagcggctacgagggctgcgccgtgctgcaggtgagccccgtgaccgagaccagaacctaccacgacgtgaaggagatctgcaagtgcgacgtggacgagttcgtgatcctggagctgggcgacttcaacgacatcaccgagacctgcagctgcagctgcagcagcagcaagagcgtgacctacgagcccgacttcaacagcgccgagctgctggccaaggagctgtacagagtgttccagaagtgctggatcctgagcgtggtgaacagccagctggccggcagcctgagcgccgccggcagcatcgtggtgaacgaggagtgcgtgagaaaggacttcgagagcagcatgaacgtggtgcaggagatcaagttcaagagcagaatcagaggcaccgaggactgggccccccccagattccagatcatcttcaacatccacccccccctgaagagagacctggtggtggccgcccagaacttcttctgcgccggctgcggcacccccgtggagcccaagttcgtgaagagactgagatactgcgagtacctgggcaagtacttctgcgactgctgccacagctacgccgagagctgcatccccgccagaatcctgatgatgtgggacttcaagaagtactacgtgagcaacttcagcaagcagctgctggacagcatctggcaccagcccatcttcaacctgctgagcatcggccagagcctgtacgccaaggccaaggagctggacagagtgaaggagatccaggagcagctgttccacatcaagaagctgctgaagacctgcagattcgccaacagcgccctgaaggagttcgagcaggtgcccggccacctgaccgacgagctgcacctgttcagcctggaggacctggtgagaatcaagaagggcctgctggcccccctgctgaaggacatcctgaaggccagcctggcccacgtggccggctgcgagctgtgccagggcaagggcttcatctgcgagttctgccagaacaccaccgtgatcttccccttccagaccgccacctgcagaagatgcagcgcctgcagagcctgcttccacaagcagtgcttccagagcagcgagtgccccagatgcgccagaatcaccgccagaagaaagctgctggagagcgtggccagcgccgccacctag

SEQ ID NO: 105653 - DNA, 1584 bp, Artificial Sequence
  derived and/or modified sequence
atggtccgccccgggtacagccacagagtgtcactgcccacgagccctggaattttggctacgtccccctatcctgaaaccgacagcgcatttttcgaaccctctcacttgaccagtgcggcggatgaaggggccgtgcaggttagtcgacgaactatttcaagcaactctttctccccagaagtgttcgtgcttccagtggacgtggaaaaggagaatgcacacttttatgtcgccgatatgattatctctgctatggagaagatgaagtgcaacatcctctcccagcaacagacagaatcatggtctaaagaggtgagtgggctgttgggctctgatcagccggatagtgagatgacttttgatacgaatatcaagcaggagagcggatcttccactagctcctattccggttacgaaggatgtgcagtgctccaggtttcgccagtaacagagaccagaacttatcacgacgtcaaagaaatctgcaagtgcgacgttgacgaattcgtgatcctcgagctcggtgatttcaacgatataaccgaaacgtgcagttgtagctgttcttcaagtaagagcgtgacctatgaacctgattttaactctgcggagctgttggcgaaggaattataccgggtgtttcaaaaatgctggatcctgtctgtagtcaacagtcagctcgctggctccctttccgcagcggggagtatcgtcgtgaacgaggagtgtgtaagaaaggacttcgagagtagcatgaatgttgtgcaagagatcaaatttaaatcccgcatccgggggaccgaagactgggcacctcctcgctttcaaatcatcttcaacatccatccccccctcaaaagagacttggtcgtggctgcccagaattttttttgtgccggctgcggtacaccagtagagcccaagtttgtcaagaggctccgttattgcgagtatttaggcaaatatttttgtgactgttgccactcatatgccgaatcttgtattcccgccagaatcctcatgatgtgggactttaagaagtattatgtttcaaatttttccaaacagctcttggacagtatctggcatcagcctatctttaatctattgagtataggccagtccctgtacgccaaggctaaagaactcgatcgggtcaaggagattcaggaacagctcttccacataaaaaagttactgaaaacctgccgctttgcaaactcggctttgaaggagttcgagcaggtgccgggccaccttaccgacgaattgcatctgttctctctggaagacttagtgcggatcaagaaagggctgctggctccactgctgaaagatatcttgaaggcttccctggcacacgtggccggctgcgagctgtgtcaaggtaagggctttatctgtgaattttgccagaacaccacagtaatcttccccttccagactgcgacgtgcagaagatgctccgcctgcagagcttgctttcacaagcagtgcttccagtcttcagaatgcccccggtgcgcacgtatcactgccaggcgtaaacttttagaatcagtggcatcagccgctacctag

SEQ ID NO: 105654 - DNA, 1584 bp, Artificial Sequence
  derived and/or modified sequence
atggtgcggcccggctacagccaccgggtgtccctgcccaccagccctggcatcctggccaccagcccctacccagagacagattctgccttctttgagcccagccacctgaccagcgctgctgatgagggcgctgtgcaggtgtccaggaggaccatcagcagcaacagcttcagccctgaggtgtttgtgctgcctgtggatgtggagaaggaaaatgcccacttctacgtggccgacatgatcatcagcgccatggagaagatgaagtgcaacatcctgagccagcagcagacagagagctggagcaaggaggtgtctggcctgctgggcagtgaccagccagattctgagatgacctttgacaccaacatcaagcaggagagcggcagcagcaccagcagctacagcggctatgagggctgtgctgtgctgcaggtgtcccctgtgacagagaccaggacctaccatgatgtgaaggagatctgcaagtgtgatgtggatgaatttgtgatcctggagctgggggacttcaatgacatcacagagacctgcagctgcagctgcagcagcagcaagtctgtgacctatgagccagacttcaacagcgctgagctgctggccaaggagctgtacagagtcttccagaagtgctggatcctgtctgtggtgaacagccagctggccggcagcctgtctgctgctggcagcatcgtggtgaatgaagaatgtgtgaggaaggactttgagagctccatgaatgtggtgcaggagatcaagttcaagagccgcatccggggcacagaggactgggccccaccccgcttccagatcatcttcaacatccacccccccctgaagagggacctggtggtggccgcccagaacttcttctgtgccggctgcggcacccctgtggagcccaagtttgtgaagaggctgcgctactgtgagtacctgggcaagtacttctgtgactgctgccacagctatgcagagagctgcatcccagcccgcatcctgatgatgtgggacttcaagaagtactacgtgagcaacttcagcaagcagctgctggacagcatctggcaccagcccatcttcaacctgctgagcatcggccagagcctgtatgccaaggccaaggagctggacagagtgaaggagatccaggagcagctgttccacatcaagaagctgctgaagacctgccgctttgccaacagcgccctgaaggagtttgagcaggtgcccggccacctgacagatgagctgcacctgttcagcctggaggacctggtgcgcatcaagaagggcctgctggcccccctgctgaaggacatcctgaaggccagcctggcccacgtggccggctgtgagctgtgccagggcaagggcttcatctgtgagttctgccagaacaccaccgtcatcttccccttccagacagccacctgccgccgctgcagcgcctgccgggcctgcttccacaagcagtgcttccagagcagtgaatgtccccgctgtgcccgcatcacagcccggaggaagctgctggagagcgtggccagcgctgccacctag

SEQ ID NO: 105655 - DNA, 1584 bp, Artificial Sequence
  derived and/or modified sequence
atggtgcggcccggctacagccaccgggtgagcctgcccaccagcccaggcatactcgccacgtctccttatcctgaaaccgactccgccttcttcgaaccgtcccatcttacttcagctgctgacgagggggcagttcaagtgtcgcggcggacaattagtagtaatagcttttctcccgaggtgtttgtcctacccgttgacgtagaaaaggagaatgcacatttttatgtggctgatatgatcatctctgccatggagaagatgaagtgcaatattctgtctcagcagcagactgagtcatggagcaaggaagtgagcggactcttgggatccgaccagcctgacagcgaaatgaccttcgataccaacatcaagcaggagtcagggagtagtacttcgtcctacagcgggtatgagggctgcgccgtcctgcaggtatccccagtgaccgagacgaggacatatcacgatgtcaaggaaatttgcaaatgcgacgtggatgaatttgtcatccttgagctgggagatttcaatgatattactgagacttgtagttgctcatgtagctcctccaaaagtgtaacttacgagcctgacttcaactccgctgaattgttggccaaggagctgtaccgggtgtttcaaaagtgctggatacttagcgtggtgaacagccaattggctggctccctttccgctgctggctcaatcgtcgtgaacgaagagtgtgtccgaaaggattttgagagttctatgaacgtcgtgcaggaaatcaaattcaaaagtcgtatacgaggtactgaagactgggctccaccgagatttcaaatcattttcaacatccatcctcctctgaaacgagacttggtggttgctgcgcagaatttcttttgtgcgggatgtggcacaccggtcgagcctaaatttgtaaagcgtctccgctactgcgagtatctgggcaagtacttctgtgactgttgtcacagctacgcagagtcatgcatacctgcccgaatcctcatgatgtgggatttcaaaaaatattatgtttcaaacttttccaaacagctgctcgacagcatttggcaccagcctattttcaaccttctgtccattggacagtcactgtatgccaaagctaaggagcttgatcgcgtgaaggagatccaggagcagctgttccacattaagaagctcctcaaaacctgccgttttgccaacagtgccttgaaagaatttgaacaggttccaggacatctcacggacgagttgcacttattttccctcgaagacctggtgcgcataaagaaggggcttctggctcctctgctaaaagacattctaaaagctagcctcgcccatgtggccggctgtgaattatgtcagggcaaaggcttcatctgtgagttttgtcagaatacgacagtgatatttccttttcaaactgccacctgtcgtcgctgttctgcttgcagggcttgtttccacaagcagtgcttccaatcttcagaatgtcctcgttgtgcaaggattaccgctcgccgtaagctgctggagagtgtggcatctgccgctacatag

SEQ ID NO: 105656 - DNA, 1584 bp, Artificial Sequence
  derived and/or modified sequence
atggttaggccgggatactctcatcgcgtgagccttcccacaagcccaggaattttggctacctccccatatccagagactgacagcgcattttttgaaccctctcatctgacctcggctgctgatgagggtgccgtgcaggtgtcccgccgaacaatcagcagcaattccttctccccggaggtatttgtgctccccgttgacgtggaaaaggaaaacgcccatttctacgtcgccgatatgatcatcagcgcaatggaaaaaatgaaatgcaatatcctttcccagcagcagaccgaatcctggtccaaggaagttagcggcctccttgggagcgaccagccagattccgagatgacattcgatacaaatatcaaacaagagagcggcagctctacctccagttactctgggtatgagggctgcgctgtcttacaggtaagtcctgttactgaaactagaacctatcatgatgtgaaagaaatctgcaaatgcgatgtggacgaattcgttatcctcgagctcggggacttcaacgacattacagaaacctgttcatgctcatgtagctctagcaagtcggtgacctatgagccggactttaattcggcagagttgctggccaaggaactttatagggtgtttcagaaatgctggatactgtctgtcgtgaacagccagctggccggatcactcagcgcggctggctctattgttgtcaatgaggaatgtgtgcgtaaggactttgagtcctctatgaatgtggtgcaggagatcaaatttaaaagtcgtatccgcggaaccgaggattgggcaccgccacgttttcaaatcatctttaatatccacccccctctgaaacgggatctggttgtggccgctcaaaacttcttctgtgcagggtgtggaacccccgtcgagcccaagttcgtgaaacgcctgcgttactgcgaatatttgggaaagtacttctgtgattgctgccacagctatgctgaatcatgcatacctgcaagaattctgatgatgtgggactttaagaaatactacgtctccaacttcagtaaacaacttcttgatagcatttggcatcagcctatcttcaaccttctgtctataggacagtccctatacgctaaggcgaaagagctggatagggtaaaagaaatacaggagcaactattccacattaagaaactactgaaaacctgtcggttcgcgaacagcgctcttaaagagtttgaacaggttcctgggcacctcaccgacgaactgcatctattctccctggaggacctagtgagaataaagaagggtctgctggctccccttctcaaggacatccttaaggcctcgctggcacatgtggccggttgcgagctctgccaggggaagggcttcatctgcgagttctgtcagaacaccacagtgatttttccttttcaaactgctacctgtagaaggtgcagtgcgtgcagggcctgctttcacaagcagtgcttccagagcagcgaatgccctcgatgtgctagaattaccgccaggaggaaactgttggaatcagtcgctagtgccgcaacctag

SEQ ID NO: 105657 - protein, 505 aa, Artificial Sequence
  derived and/or modified sequence
MVSNHYFLLCVNLPLREIHTPGAVQVSRRTISSNSFSPEVFVLPVDVEKENAHFYVADMIISAMEKMKCNILSQQQTESWSKEVSGLLGSDQPDSEMTFDTNIKQESGSSTSSYSGYEGCAVLQVSPVTETRTYHDVKEICKCDVDEFVILELGDFNDITETCSCSCSSSKSVTYEPDFNSAELLAKELYRVFQKCWILSVVNSQLAGSLSAAGSIVVNEECVRKDFESSMNVVQEIKFKSRIRGTEDWAPPRFQIIFNIHPPLKRDLVVAAQNFFCAGCGTPVEPKFVKRLRYCEYLGKYFCDCCHSYAESCIPARILMMWDFKKYYVSNFSKQLLDSIWHQPIFNLLSIGQSLYAKAKELDRVKEIQEQLFHIKKLLKTCRFANSALKEFEQVPGHLTDELHLFSLEDLVRIKKGLLAPLLKDILKASLAHVAGCELCQGKGFICEFCQNTTVIFPFQTATCRRCSACRACFHKQCFQSSECPRCARITARRKLLESVASAAT

SEQ ID NO: 105658 - DNA, 1518 bp, Artificial Sequence
  derived and/or modified sequence
atggtgagcaaccactacttcctgctgtgcgtgaacctgcccctgagagagatccacacccccggcgccgtgcaggtgagcagaagaaccatcagcagcaacagcttcagccccgaggtgttcgtgctgcccgtggacgtggagaaggagaacgcccacttctacgtggccgacatgatcatcagcgccatggagaagatgaagtgcaacatcctgagccagcagcagaccgagagctggagcaaggaggtgagcggcctgctgggcagcgaccagcccgacagcgagatgaccttcgacaccaacatcaagcaggagagcggcagcagcaccagcagctacagcggctacgagggctgcgccgtgctgcaggtgagccccgtgaccgagaccagaacctaccacgacgtgaaggagatctgcaagtgcgacgtggacgagttcgtgatcctggagctgggcgacttcaacgacatcaccgagacctgcagctgcagctgcagcagcagcaagagcgtgacctacgagcccgacttcaacagcgccgagctgctggccaaggagctgtacagagtgttccagaagtgctggatcctgagcgtggtgaacagccagctggccggcagcctgagcgccgccggcagcatcgtggtgaacgaggagtgcgtgagaaaggacttcgagagcagcatgaacgtggtgcaggagatcaagttcaagagcagaatcagaggcaccgaggactgggccccccccagattccagatcatcttcaacatccacccccccctgaagagagacctggtggtggccgcccagaacttcttctgcgccggctgcggcacccccgtggagcccaagttcgtgaagagactgagatactgcgagtacctgggcaagtacttctgcgactgctgccacagctacgccgagagctgcatccccgccagaatcctgatgatgtgggacttcaagaagtactacgtgagcaacttcagcaagcagctgctggacagcatctggcaccagcccatcttcaacctgctgagcatcggccagagcctgtacgccaaggccaaggagctggacagagtgaaggagatccaggagcagctgttccacatcaagaagctgctgaagacctgcagattcgccaacagcgccctgaaggagttcgagcaggtgcccggccacctgaccgacgagctgcacctgttcagcctggaggacctggtgagaatcaagaagggcctgctggcccccctgctgaaggacatcctgaaggccagcctggcccacgtggccggctgcgagctgtgccagggcaagggcttcatctgcgagttctgccagaacaccaccgtgatcttccccttccagaccgccacctgcagaagatgcagcgcctgcagagcctgcttccacaagcagtgcttccagagcagcgagtgccccagatgcgccagaatcaccgccagaagaaagctgctggagagcgtggccagcgccgccacctag

SEQ ID NO: 105659 - DNA, 1518 bp, Artificial Sequence
  derived and/or modified sequence
atggttagtaaccactactttttgttatgcgtcaacttgccattgcgggaaatacatactcccggagccgtgcaagtgtcccgtaggactataagtagtaacagttttagtcctgaagtgttcgtgctgcccgttgacgtggaaaaagaaaatgcacatttctacgtggccgatatgatcatcagcgctatggagaagatgaaatgcaatatactgtcgcagcagcagaccgaatcctggtccaaggaggtaagcgggctgctgggctcagaccaaccagatagcgaaatgaccttcgatactaatatcaagcaagagtcgggttctagcacttcctcctatagtggttacgagggctgtgctgttctccaggtaagtcccgtcacagagactcgcacctatcatgacgtcaaagagatctgtaagtgcgatgtggacgaattcgtgatccttgagttgggcgattttaatgacatcacagaaacatgcagttgctcatgctcttcttccaagtctgtgacatatgagcccgattttaatagtgccgagctgctcgcgaaggagctatacagagttttccaaaagtgttggatcttgagcgttgtgaatagccagctggccggctccttgtcggctgccggcagtatagtcgtcaacgaggagtgcgtgcggaaggactttgagtcatccatgaatgtggtccaggaaataaagtttaagagccgcatacggggaaccgaagactgggctccgccacgcttccagattatttttaacattcatccacccctgaagcgagatttagttgtcgccgcacagaactttttttgtgccggctgtggcacgcccgtggaacccaagttcgttaagcggttgagatactgcgaatatctcggaaaatatttctgcgattgctgtcactcatacgcggagagttgcatccccgcacgcattctcatgatgtgggattttaagaagtattatgtgagcaacttttcaaaacagttactggactcaatctggcaccagccgatctttaacctgctgtccataggacagtcactgtacgccaaggccaaggaattggatcgcgtgaaggagattcaagagcagctattccatatcaagaagctccttaagacatgcaggttcgccaacagcgcactgaaagagtttgaacaggtaccaggtcatctcacagacgaactgcacttgtttagtttggaagacctcgtccggattaagaagggattgcttgccccccttctgaaggacatccttaaggcctccctggctcacgtggccggatgtgaactatgccaaggtaagggattcatctgcgagttttgccagaatacaactgtgatctttccattccagacagccacatgcagaaggtgttcagcttgtcgagcatgcttccacaagcagtgtttccagagcagcgagtgcccacgttgtgcacgcatcaccgcgagacgtaagctgcttgagagcgtggccagcgccgcgacatag

SEQ ID NO: 105660 - DNA, 1518 bp, Artificial Sequence
  derived and/or modified sequence
atggtgagcaaccactacttcctgctgtgtgtgaacctgcccctgcgggagatccacaccccaggagctgtgcaggtgtccaggaggaccatcagcagcaacagcttcagccctgaggtgtttgtgctgcctgtggatgtggagaaggaaaatgcccacttctacgtggccgacatgatcatcagcgccatggagaagatgaagtgcaacatcctgagccagcagcagacagagagctggagcaaggaggtgtctggcctgctgggcagtgaccagccagattctgagatgacctttgacaccaacatcaagcaggagagcggcagcagcaccagcagctacagcggctatgagggctgtgctgtgctgcaggtgtcccctgtgacagagaccaggacctaccatgatgtgaaggagatctgcaagtgtgatgtggatgaatttgtgatcctggagctgggggacttcaatgacatcacagagacctgcagctgcagctgcagcagcagcaagtctgtgacctatgagccagacttcaacagcgctgagctgctggccaaggagctgtacagagtcttccagaagtgctggatcctgtctgtggtgaacagccagctggccggcagcctgtctgctgctggcagcatcgtggtgaatgaagaatgtgtgaggaaggactttgagagctccatgaatgtggtgcaggagatcaagttcaagagccgcatccggggcacagaggactgggccccaccccgcttccagatcatcttcaacatccacccccccctgaagagggacctggtggtggccgcccagaacttcttctgtgccggctgcggcacccctgtggagcccaagtttgtgaagaggctgcgctactgtgagtacctgggcaagtacttctgtgactgctgccacagctatgcagagagctgcatcccagcccgcatcctgatgatgtgggacttcaagaagtactacgtgagcaacttcagcaagcagctgctggacagcatctggcaccagcccatcttcaacctgctgagcatcggccagagcctgtatgccaaggccaaggagctggacagagtgaaggagatccaggagcagctgttccacatcaagaagctgctgaagacctgccgctttgccaacagcgccctgaaggagtttgagcaggtgcccggccacctgacagatgagctgcacctgttcagcctggaggacctggtgcgcatcaagaagggcctgctggcccccctgctgaaggacatcctgaaggccagcctggcccacgtggccggctgtgagctgtgccagggcaagggcttcatctgtgagttctgccagaacaccaccgtcatcttccccttccagacagccacctgccgccgctgcagcgcctgccgggcctgcttccacaagcagtgcttccagagcagtgaatgtccccgctgtgcccgcatcacagcccggaggaagctgctggagagcgtggccagcgctgccacctag

SEQ ID NO: 105661 - DNA, 1518 bp, Artificial Sequence
  derived and/or modified sequence
atggtgagcaaccactacttcctgctgtgcgtgaacctgcccctgcgggaaattcacactcccggcgccgttcaggtctccaggcgcaccattagctccaatagcttttccccagaggtatttgttctgcctgtggatgttgaaaaggagaacgcgcacttctatgttgccgacatgattatctctgctatggagaaaatgaaatgcaacatactgtcacagcaacagacagagtcctggagcaaggaggtttccgggctcctgggcagcgaccagccagacagcgaaatgacttttgacacaaacataaagcaggagtccggcagctccacgagcagttactccgggtacgaaggttgcgccgtgctgcaagtatctcccgtcaccgaaacacggacctaccatgatgtgaaggaaatttgcaagtgtgacgtggacgaattcgttatactggaattgggagactttaacgatattactgagacatgcagttgctcatgctctagctctaaatctgttacgtacgaacctgactttaactcagcagagctgctggcaaaagagttataccgcgtttttcagaagtgctggatcctatctgtggtgaacagtcagctggctggctccctgtccgccgctggatctatcgtcgtcaacgaagagtgcgtgcggaaggatttcgagagtagcatgaacgttgtccaggaaatcaaattcaagtctaggatcaggggtacagaggactgggcgccaccccgttttcagatcatatttaatattcatccccccctgaaaagagacctcgttgtggctgctcagaactttttctgcgccgggtgcgggaccccggttgagcctaaattcgtcaaacgcctgcggtattgcgagtatctggggaagtatttttgcgattgctgtcacagctacgccgaatcctgtatccccgcccggatccttatgatgtgggatttcaagaagtactacgtgagcaacttcagcaaacagcttcttgacagtatttggcaccagccaatttttaacctgctctccatcggccagagcttatacgcgaaggctaaggagctcgaccgagttaaagagattcaagagcagctgtttcatatcaagaagctgctgaagacctgccgcttcgcaaactccgccttgaaggaattcgagcaggttccaggccatctcaccgacgagttgcatctgttcagtttggaggacctggttaggatcaagaaagggctccttgctcctttgttgaaggacattcttaaggctagccttgcgcacgttgccggctgcgagctgtgtcagggtaaggggtttatctgtgaattttgtcaaaacacgactgtcatctttcccttccaaactgccacttgcaggagatgctctgcctgccgcgcctgtttccataagcagtgtttccagagctctgaatgtccgcgctgtgcgcgcatcacagcgcgacgcaaattgttggaaagtgtggctagcgccgcaacttag

SEQ ID NO: 105662 - DNA, 1518 bp, Artificial Sequence
  derived and/or modified sequence
atggtttcgaaccactattttctgttatgtgtgaacctgccactgagggaaattcacacgcccggagctgttcaggtgtcccggcgaactataagttctaattcatttagtcctgaggttttcgtgttgccagttgacgtggagaaggagaatgcccatttctacgtggccgatatgattatctcagccatggagaaaatgaaatgtaacatactgtctcagcagcaaaccgaatcgtggagtaaagaggtttccggcttgcttgggtccgaccagcccgactccgagatgacattcgataccaacattaaacaggagtccggctcgtccacatcctcttacagcggatatgaaggatgcgcagtgctgcaggttagtcctgttacggaaactcgaacatatcatgacgttaaggagatttgtaaatgcgacgtagacgaatttgtcatacttgagctcggggattttaatgacatcactgagacctgttcctgttcttgctcctcttcaaaatccgtgacatacgagcctgacttcaatagtgctgagctgctggctaaggaactgtaccgagtgtttcagaagtgctggatcctgtctgtggttaactcacagttagccggatctctgtccgcggctggctcgatcgtggtgaatgaggagtgcgtgaggaaagacttcgagtcttcgatgaacgtcgttcaggagatcaaattcaagagccggatcagggggacagaagactgggctccccctcgattccagattatcttcaatattcaccctccattgaaacgcgacctcgttgtggcggctcagaactttttctgtgcaggctgcggaactccagtggagccaaagtttgtgaaacggctcagatattgcgagtacttgggcaaatacttttgcgattgctgccacagctatgccgaatcatgcatcccagccagaatcctgatgatgtgggacttcaaaaaatattacgtctccaatttttccaagcagctattggacagcatttggcaccagccgatttttaatctgctttcaatcggccaatctctatatgccaaagcaaaggaactggaccgggtaaaagaaattcaagagcagctgtttcatattaaaaaactgctgaagacctgccggtttgccaacagcgctctgaaggagtttgagcaggttccaggtcatctgactgacgaactccatctgttttcgttggaggacctggtcagaattaaaaagggccttctggctcctctgcttaaagatattctcaaagcatccttagctcacgtcgctggttgcgagctgtgtcagggcaagggctttatctgcgaattctgccaaaacacaaccgtgatcttccctttccagacagctacctgccgaagatgcagcgcctgcagggcctgctttcataaacagtgctttcagtcttctgaatgtccacggtgtgcaagaatcaccgctcggagaaagctgctcgagagcgtcgctagcgctgcgacatag

SEQ ID NO: 105663 - DNA, 1937 bp, Artificial Sequence
  derived and/or modified sequence
acgcgcggcgtttacccagcgcagcgttccaccgctcgggtttggctggataaaataaaaaatggggatattgacctcctgtcactactgcatggactttgatggtttccaatcattactttctcctctgtgtcaatctgcctcttcgagaaattcatactcctggtgctgttcaagtcagtagaagaaccatttcttcgaattccttctcaccagaggtatttgtgctgcctgttgatgtagaaaaggaaaatgcccacttttatgttgcagatatgattatatcagcaatggagaaaatgaagtgtaacattctgagtcaacagcagacagagagctggagtaaagaagtcagtgggttacttgggagtgatcagcctgactctgaaatgacttttgataccaacataaagcaagagtctgggtcttctacttcttcatacagtggctatgaaggttgtgctgtgttacaggtcagcccagtgactgaaacacgtacttaccatgatgtgaaagagatttgcaaatgcgatgttgatgaatttgttattttagagcttggagattttaatgatatcacagaaacctgtagctgttcctgcagctcctctaagagtgtcacttatgagccagacttcaattctgcagaactattagccaaagagctgtaccgcgtgttccagaagtgctggatactgtcagtagttaattctcagctggcaggttccctgagtgcagctggctcgatagtcgtaaatgaagagtgtgtccgaaaagactttgaatccagtatgaatgtagtacaggaaattaaatttaagtctaggatcagagggactgaagactgggctcctcctagatttcaaatcatatttaatattcatccaccactcaagagggaccttgtggtggcagcccagaattttttctgtgccggctgtggaactccagtagagcctaagtttgtgaagcggctccggtactgcgaatacctagggaagtatttctgtgactgctgccactcatatgcagagtcgtgcatccctgcccgaatcctgatgatgtgggacttcaagaagtactacgtcagcaatttctccaaacagctgctcgacagcatatggcaccagcccattttcaatttgctgagcatcggccaaagcctgtatgcgaaagccaaggagctggacagagtgaaggaaattcaggagcagctcttccatatcaagaagctgttgaagacctgtaggtttgctaacagtgcattaaaggagttcgagcaggtgccgggacacttgactgatgagctccacctgttctcccttgaggacctggtcaggatcaagaaagggctgctggcacccttactcaaggacattctgaaagcttcccttgcacatgtggctggctgtgagctgtgtcaaggaaagggctttatttgtgaattttgccagaatacgactgtcatcttcccatttcagacagcaacatgtagaagatgttcagcgtgcagggcttgctttcacaaacagtgcttccagtcctccgagtgcccccggtgtgcgaggatcacagcgaggagaaaacttctggaaagtgtggcctctgcagcaacatgatgcccctgagtactgtgaaaaagactgttcaacatgccttatgataacaccgatttgtgtctattattggtgacattgttttagatattgggtattgtatattaaggaaaaagatggtctatattctctttattgcatatacttaatgtttcaaaagaatgcagattctgtgtttaagcacagggctgatagttgtggttttgtttacaaatgttctgttttggctgctattggttttttaaagaggttttttatacttttgtatttgaatagttatgtttcactgatgctgagccagtttgtatgtgtgtgcatata

SEQ ID NO: 105664 - protein, 99 aa, Artificial Sequence
  derived and/or modified sequence
MASASARGNQDKDAHFPPPSKQSLLFCPKSKLHIHRAEISKIMRECQEESFWKRALPFSLVSMLVTQGLVYQGYLAANSRFGSLPKVARTASLPVRNAK

SEQ ID NO: 105665 - protein, 88 aa, Artificial Sequence
  derived and/or modified sequence
MASASARGNQDKDAHFPPPSKQSLLFCPKSKLHIHRAEISKIMRECQEESFWKRALPFSLVSMLVTQGLVYQGYLAANSRFGSLPKVA

SEQ ID NO: 105666 - DNA, 267 bp, Artificial Sequence
  derived and/or modified sequence
atggccagcgccagcgccagaggcaaccaggacaaggacgcccacttccccccccccagcaagcagagcctgctgttctgccccaagagcaagctgcacatccacagagccgagatcagcaagatcatgagagagtgccaggaggagagcttctggaagagagccctgcccttcagcctggtgagcatgctggtgacccagggcctggtgtaccagggctacctggccgccaacagcagattcggcagcctgcccaaggtggcctag

SEQ ID NO: 105667 - DNA, 300 bp, Artificial Sequence
  derived and/or modified sequence
atggcgagcgcatccgctagaggaaatcaggataaggacgcacacttccctccgccctctaaacagagcctgctcttttgccccaagagcaagttacatattcatcgcgccgagattagcaagattatgcgggaatgtcaggaggaaagcttctggaagagagctctccctttttcacttgtgagcatgctcgtgactcaggggctcgtgtaccaaggctatctggcggccaacagtagatttggcagcctcccaaaggtggccagaactgcttcactccctgtaagaaatgcaaagtag

SEQ ID NO: 105668 - DNA, 267 bp, Artificial Sequence
  derived and/or modified sequence
atggcgagtgcctctgcgcgaggtaaccaggataaggatgcacacttccccccccccagcaaacagtcactgcttttctgccctaagtcaaaactgcatatccaccgagctgagatctcaaagatcatgagggagtgccaggaagaatctttttggaagagggccctgcccttctccctggtaagtatgcttgttacgcaagggctggtgtatcagggctacttagccgccaattcccggttcggctcactccctaaagtggcctag

SEQ ID NO: 105669 - DNA, 300 bp, Artificial Sequence
  derived and/or modified sequence
atggccagcgccagcgcccggggcaaccaggacaaggatgcccacttccccccacccagcaagcagagcctgctcttctgccccaagagcaagctgcacatccacagagctgagatcagcaagatcatgagggagtgccaggaggagagcttctggaagagggccctgcccttcagcctggtgtccatgctggtgacccagggcctggtgtaccagggctacctggccgccaacagcagatttggcagcctgcccaaggtggccaggacagccagcctgcctgtgagaaatgccaagtag

SEQ ID NO: 105670 - DNA, 267 bp, Artificial Sequence
  derived and/or modified sequence
atggccagcgccagcgcccggggcaaccaggacaaggatgcccacttccccccacccagcaagcagagcctgctcttctgccccaagagcaagctgcacatccacagagctgagatcagcaagatcatgagggagtgccaggaggagagcttctggaagagggccctgcccttcagcctggtgtccatgctggtgacccagggcctggtgtaccagggctacctggccgccaacagcagatttggcagcctgcccaaggtggcctag

SEQ ID NO: 105671 - DNA, 611 bp, Artificial Sequence
  derived and/or modified sequence
cgggaagctggagcgggccggcggtgcagtcacgggggagcgaggcctgctgggcttggcaacgagggactcggcctcggaggcgacccagaccacacagtgattctcttctaccttccttagacactgggtcaaggagtaagcagaggataaacaactggaaggagagcaagcacaaagtcatcatggcttcagcgtctgctcgtggaaaccaagataaagatgcccattttccaccaccaagcaagcagagcctgttgttttgtccaaaatcaaaactgcacatccacagagcagagatctcaaagattatgcgagaatgtcaggaagaaagtttctggaagagagctctgcctttttctcttgtaagcatgcttgtcacccagggactagtctaccaaggttatttggcagctaattctagatttggatcattgcccaaagttgcacgcactgcctccttacctgtgaggaatgcaaaataaagcatggattaagtgagaagggagactctcagccttcagcttcctaaattctgtgtctgtgactttcgaagttttttaaacctctgaatttgtacacatttaaaatttcaagtgtactttaaaata

SEQ ID NO: 105672 - DNA, 300 bp, Artificial Sequence
  derived and/or modified sequence
atggccagcgccagcgcccggggcaaccaggacaaggacgcccactttcctcccccaagtaagcagtcactcttattctgccctaaatcgaagttgcacattcaccgcgccgagatctccaagatcatgcgagaatgtcaagaagagtccttttggaagcgtgctttaccatttagcctggtttccatgctggttacccagggcttagtctatcaagggtatctggctgcaaattcgaggttcggctcattgccaaaagttgctcggacagcgtccctgccagtaaggaacgcaaagtag

SEQ ID NO: 105673 - DNA, 267 bp, Artificial Sequence
  derived and/or modified sequence
atggccagcgccagcgcccggggcaaccaggacaaggacgcccactttccccccccttcaaagcaatcactcctgttctgtccaaagagtaagctccatattcatcgcgcggagatctccaagataatgcgggagtgccaggaggagagcttctggaaaagggctctgcccttttccttggtgtcaatgctcgtgactcagggtttggtataccaggggtacctggcagccaattctagatttgggagtctgccaaaagtggcatag

SEQ ID NO: 105674 - DNA, 300 bp, Artificial Sequence
  derived and/or modified sequence
atggcaagcgcctcagcacggggtaatcaggataaggatgcccacttccctccaccatctaaacaaagtttattattttgccctaaatctaaattgcacattcaccgggcagagattagtaagatcatgagagagtgtcaggaagagtcattttggaagcgcgctctgcccttctccctcgtttctatgctagtgacccagggcctggtctatcagggatatctggccgcaaattcaagattcgggagccttccaaaggtagctcgcactgcttctctgccagttcggaacgctaaatag

SEQ ID NO: 105675 - DNA, 267 bp, Artificial Sequence
  derived and/or modified sequence
atggcaagcgcctccgcacgaggcaatcaggacaaggatgcgcattttccccctccgagcaagcagtctctccttttttgtcccaagtccaagctgcacatccaccgcgcagagatttctaagattatgagagaatgccaagaggaatctttttggaaacgtgccctacccttctccttggtgtcgatgttggtgactcaggggttggtttatcagggctatttggcggctaacagccggtttggcagtttgccaaaggtcgcctag

SEQ ID NO: 105676 - DNA, 636 bp, Artificial Sequence
  derived and/or modified sequence
ggaaggaagccggggagacaggtggggtactcgggaagctggagcgggccggcggtgcagtcacgggggagcgaggcctgctgggcttggcaacgagggactcggcctcggaggcgacccagaccacacagacactgggtcaaggagtaagcagaggataaacaactggaaggagagcaagcacaaagtcatcatggcttcagcgtctgctcgtggaaaccaagataaagatgcccattttccaccaccaagcaagcagagcctgttgttttgtccaaaatcaaaactgcacatccacagagcagagatctcaaagattatgcgagaatgtcaggaagaaagtttctggaagagagctctgcctttttctcttgtaagcatgcttgtcacccagggactagtctaccaaggttatttggcagctaattctagatttggatcattgcccaaagttgcacgcactgcctccttacctgtgaggaatgcaaaataaagcatggattaagtgagaagggagactctcagccttcagcttcctaaattctgtgtctgtgactttcgaagttttttaaacctctgaatttgtacacatttaaaatttcaagtgtactttaaaataaaatacttctaatggaa

SEQ ID NO: 105677 - DNA, 300 bp, Artificial Sequence
  derived and/or modified sequence
atggccagcgccagcgccagaggcaaccaggacaaggacgcccacttccccccccccagcaagcagagcctgctgttctgccccaagagcaagctgcacatccacagagccgagatcagcaagatcatgagagagtgccaggaggagagcttctggaagagagccctgcccttcagcctggtgagcatgctggtgacccagggcctggtgtaccagggctacctggccgccaacagcagattcggcagcctgcccaaggtggccagaaccgccagcctgcccgtgagaaacgccaagtag

SEQ ID NO: 105678 - DNA, 561 bp, Artificial Sequence
  derived and/or modified sequence
atgaacctgccccacctgatgagcctggccagccacctggccagccacggcttcttctgcctgagattcacctgcaagggcctgaacatcgtgcacagaatcaaggcctacaagagcgtgctgaactacctgaagaccagcggcgagtacaagctggccggcgtgttcctgggcggcagaagcatgggcagcagagccgccgccagcgtgatgtgccacatcgagcccgacgacggcgacgacttcgtgagaggcctgatctgcatcagctaccccctgcaccaccccaagcagcagcacaagctgagagacgaggacctgttcagactgaaggagcccgtgctgttcgtgagcggcagcgccgacgagatgtgcgagaagaacctgctggagaaggtggcccagaagatgcaggccccccacaagatccactggatcgagaaggccaaccacagcatggccgtgaagggcagaagcaccaacgacgtgttcaaggagatcaacacccagatcctgttctggatccaggagatcaccgagatggacaagaagtgccactag

SEQ ID NO: 105679 - DNA, 561 bp, Artificial Sequence
  derived and/or modified sequence
atgaatctaccacatctgatgagcctggcaagccaccttgcctcccatggatttttctgccttcggttcacctgtaagggcctgaacatcgtccatcggataaaggcatataaaagtgttctgaactacctcaagaccagcggtgaatataagttagcgggcgtgtttctgggcgggaggtcgatgggatcaagagctgccgcttcagtgatgtgtcatatcgagccagacgacggagacgatttcgttcggggcttgatttgtattagctacccactacatcaccctaaacagcagcataagctgagggacgaagatctcttcaggctgaaagagcccgttctctttgtgtctggaagcgctgatgagatgtgtgagaaaaacctgttggaaaaagtggcccagaaaatgcaggcgcctcacaagatccattggattgaaaaggccaaccacagcatggccgtgaaaggtaggtctactaatgacgtgtttaaggaaataaacacacaaatactgttttggattcaggaaattacagagatggataagaaatgtcactag

SEQ ID NO: 105680 - DNA, 561 bp, Artificial Sequence
  derived and/or modified sequence
atgaatttgcctcacttaatgagtctggcctcccacctggcttcccacggctttttctgtttgaggttcacctgcaaagggttgaatatagtgcaccggatcaaagcctacaaaagcgtccttaattatctgaaaacaagcggcgagtacaagctagccggcgtgtttctaggagggaggtctatgggctcaagggccgccgctagcgtgatgtgtcatatcgaaccagatgatggagatgatttcgtacgcggcctgatttgtatttcgtaccctctgcaccaccctaagcagcagcataaattacgggacgaggatctcttcagacttaaggagccagtcctgttcgtgtccggatctgctgacgaaatgtgtgagaaaaatctgttagaaaaggtcgctcagaagatgcaggcaccacacaaaatacattggatcgagaaggccaaccacagcatggcagtcaaaggccggtcaaccaacgacgtttttaaggaaattaatactcagattctgttctggattcaggaaattactgaaatggataagaagtgtcactag

SEQ ID NO: 105681 - DNA, 561 bp, Artificial Sequence
  derived and/or modified sequence
atgaacctgccccacctgatgagcctggccagccacctggccagccacggcttcttctgcctgcgcttcacctgcaagggcctgaacatcgtgcaccgcatcaaggcctacaagtctgtgctgaactacctgaagaccagcggggagtacaagctggccggggtcttcctgggcggccgctccatgggcagcagagctgctgcctctgtgatgtgccacatcgagccagatgatggagatgactttgtgcggggcctcatctgcatctcctaccccctgcaccaccccaagcagcagcacaagctgagagatgaagatctcttccggctgaaggagcctgtgctgtttgtgtctggcagcgcagatgagatgtgtgagaagaacctgctggagaaggtggcccagaagatgcaggccccccacaagatccactggattgagaaggccaaccacagcatggctgtgaagggccgcagcaccaatgatgtgttcaaggagatcaacacccagatcctcttctggatccaggagatcacagagatggacaagaagtgccactag

SEQ ID NO: 105682 - DNA, 561 bp, Artificial Sequence
  derived and/or modified sequence
atgaacctgccccacctgatgagcctggccagccacctggccagccacggattcttctgcttacggtttacatgtaagggcctgaacatcgtccatcgcattaaagcatacaagtcagtcctcaactaccttaagacctctggcgagtacaagcttgccggtgtgtttctcggcggaagatcaatgggatctcgggctgcagccagtgtgatgtgccatatcgagcccgacgacggcgacgacttcgtccgcggccttatatgtatttcataccctctgcaccatccaaaacaacaacataaactgcgtgacgaggacttgttccgcctgaaggaaccagttctcttcgtctcgggatctgctgatgagatgtgcgagaagaatctcctcgaaaaagttgcacaaaaaatgcaggctccccacaagatccactggatcgagaaagctaatcattcaatggccgtcaagggaaggtcaactaacgacgtgttcaaggagattaatacgcagatcctattctggattcaggaaatcactgagatggataagaaatgccactag

SEQ ID NO: 105683 - DNA, 561 bp, Artificial Sequence
  derived and/or modified sequence
atgaacctgccccacctgatgagcctggccagccacctggccagccacggtttcttttgcctgcgctttacttgtaaaggtttaaacatcgtgcaccgaatcaaggcttataaatctgtactgaactacctcaagacctccggagaatacaaacttgccggagtgttcctgggaggtcggagcatgggctctcgcgcagctgcctccgtgatgtgccacattgagccggacgacggcgatgactttgtgcgaggcctcatctgcattagttatcctctccaccaccctaagcagcagcataaacttagggacgaggacctctttagactcaaagagccagttctatttgtctccgggagcgccgacgagatgtgtgaaaagaacctccttgagaaggttgcccagaagatgcaggccccccacaagatccattggattgagaaggccaaccactcgatggcggtaaagggtcgctccaccaatgacgtgtttaaggagatcaacactcagatcctattctggatacaggagatcactgagatggataagaagtgtcactag

SEQ ID NO: 105684 - DNA, 561 bp, Artificial Sequence
  derived and/or modified sequence
atgaacttaccccacctgatgtctctggcttctcacttagccagccatggatttttttgtctgagatttacgtgcaaaggccttaacatagtacatcgcataaaagcctacaagtccgttctgaactatctgaaaacaagcggcgagtacaaacttgctggagtgttcctcggcggacgaagcatgggtagtagggcagccgcatccgtaatgtgtcatattgagccagatgacggtgacgacttcgtcagaggactgatttgcatatcctatccactccaccatccaaagcaacaacacaaactgagggacgaagatctgtttcgactgaaagagccagtgttgttcgttagcggatccgctgatgagatgtgcgaaaaaaatctattggagaaggttgcacagaagatgcaggctcctcataaaatccattggatagagaaggctaatcattcaatggccgtgaagggcaggtctaccaacgacgtttttaaagagattaacacccagatcctgttctggatccaggaaataacagaaatggacaaaaaatgtcactag

SEQ ID NO: 105685 - DNA, 561 bp, Artificial Sequence
  derived and/or modified sequence
atgaacttaccccacctgatgtccttggcaagccacctcgcttcacacggtttcttctgtttgcggttcacttgcaaggggttgaacatcgtacatcgaataaaggcctataagagtgtccttaactacctcaaaacttccggggaatacaagctggctggagtcttccttggtgggcgaagcatgggtagccgcgctgccgcttcggtgatgtgtcacatcgaacccgacgatggagacgactttgtgcgtggtttgatttgcatctcctatccattgcatcacccaaaacagcagcataagctgcgtgacgaggatctcttccgacttaaagaaccagtcctatttgtcagcgggagcgccgacgaaatgtgcgaaaaaaatctgctcgaaaaggttgcccagaaaatgcaggccccacacaagatccactggatcgagaaggcaaaccatagtatggccgtgaagggaaggagtacaaacgatgtcttcaaggaaatcaacacacagattctattttggattcaggaaataacagagatggataagaagtgccactag

SEQ ID NO: 105686 - DNA, 939 bp, Artificial Sequence
  derived and/or modified sequence
atgaacatttggggacagatttggcccaaagccgtgtatctggtgtgtaactacagtccaaagggcaactggtgggggcacgccccttacaaacacgggcgaccttgctccgcctgtcctccatcattcggagggggatgccgggagaacctctgttacaaggagggctccgaccgttactaccctccccgtgaagaggaaaccaacgagattgaacggcagcagtcgcaggtacatgatactcatgtgcgtactcgctccgacgatagtagcagaaatgaagtcatctcagctcaacagatgtcacagatcgtgtcatgtgaggtgcgcctgagggaccaatgtaaaggtaccacatgcaatagatacgaatgcccagcagggtgtctggattcgaaggccaaggtcattggcagcgtgcattacgagatgcagtcctctatctgccgggcagccatacattacggcatcatcgataatgacggcggatgggtcgacattacgagacagggacgaaagcattactttatcaaatctaaccggaatggaatacagaccattggtaagtaccaaagtgcgaattcatttacggtgtccaaggtgacggtccaagccgttacgtgtgaaaccacagtggaacagttgtgtccatttcacaaaccagccagccactgccccagagtgtactgcccgagaaattgcatgcaggccaacccacactatgctagagtgataggaaccagggtgtactctgacctgagttcaatatgtcgggctgctgtgcacgcaggagtggtgcgaaaccacggaggttacgtcgacgttatgccggtggacaagagaaagacatatatcgctagcttccagaacggcatcttttccgagagcctgcagaaccctcccggtggcaaggcattccgcgtgttcgctgtggtttag

SEQ ID NO: 105687 - DNA, 939 bp, Artificial Sequence
  derived and/or modified sequence
atgaatatttggggtcagatttggccaaaagcagtgtacctagtctgcaattactctcccaagggaaactggtggggccacgccccttacaaacatggacgaccatgtagcgcttgccctccctcatttggcggcggttgtcgtgagaacctgtgttacaaggaggggtccgacaggtactaccctcctcgcgaggaggaaaccaacgaaattgagaggcaacaaagccaagtgcatgatacccatgtaaggactcggtccgatgacagctctagaaacgaggtgatttctgcgcaacagatgagtcagatcgtgagttgtgaggtacgcctgcgcgaccagtgtaaggggacgacgtgtaatagatacgagtgcccagccggctgcttagacagcaaagcaaaggtcatcgggtctgtgcattacgaaatgcagtcttccatttgccgtgctgccattcactacggaatcattgataacgacgggggatgggtcgatatcactaggcaaggtaggaaacactacttcatcaaatccaacaggaatggcatccagaccattggaaagtatcagtctgccaacagctttacagtctccaaagtcaccgtgcaggccgtaacttgtgaaaccaccgtcgaacaactgtgtccctttcataagcccgcttcgcattgtcccagagtgtactgcccgcgtaattgcatgcaagcgaatccacactacgcacgggtcatcgggactcgtgtttatagcgacctgagttcaatatgcagggccgccgtccatgccggagtagtgagaaatcatggcggatatgttgacgtcatgccagtggataaacgtaagacttatatcgcgagctttcagaatggcatattcagcgagtcactgcagaacccccctggcggcaaggcctttagagtgtttgcagtcgtgtag

SEQ ID NO: 105688 - DNA, 939 bp, Artificial Sequence
  derived and/or modified sequence
atgaatatttggggacaaatttggcccaaggctgtgtatctggtgtgcaactactctccaaaagggaactggtggggtcatgctccgtacaaacacggacgtccctgttctgcctgcccaccatctttcggcgggggatgtcgggaaaacctatgttacaaagagggctcggataggtactatccacctagagaggaagagactaacgagatagagaggcagcaatcccaggttcacgatacacacgttaggacacggtctgatgactcctcccgtaatgaggttattagtgctcagcagatgagtcagattgtgagctgcgaggtaagattaagagaccagtgtaaaggaactacctgcaatcgatacgaatgccctgccggatgcctggattcaaaagcaaaagtgattggcagcgtgcattacgaaatgcaatccagcatttgccgtgccgcgatccattatgggattattgacaatgacggtggctgggtcgacatcacacgtcagggccgtaagcactatttcatcaagtctaacagaaacggtattcagactattggcaaatatcagtccgctaacagcttcactgtgtctaaagttaccgtgcaggccgtgacatgtgagactactgtggaacagctttgcccatttcataagcctgccagccactgccccagggtctactgcccaagaaattgcatgcaagcaaacccccactatgcaagagtgatcggcaccagagtttactcagacctgagctcaatttgtcgagccgccgtccatgccggagtcgttcggaaccatggaggctacgttgatgtaatgcccgttgacaagcgcaagacttacattgctagcttccaaaatggtattttctcggagtctttacagaaccctcctgggggtaaagcttttcgtgtgttcgctgtcgtgtag

SEQ ID NO: 105689 - DNA, 939 bp, Artificial Sequence
  derived and/or modified sequence
atgaacatctggggccagatctggcccaaggccgtgtacctggtgtgcaactacagccccaagggcaactggtggggccacgccccctacaagcacggcagaccctgcagcgcctgcccccccagcttcggcggcggctgcagagagaacctgtgctacaaggagggcagcgacagatactacccccccagagaggaggagaccaacgagatcgagagacagcagagccaggtgcacgacacccacgtgagaaccagaagcgacgacagcagcagaaacgaggtgatcagcgcccagcagatgagccagatcgtgagctgcgaggtgagactgagagaccagtgcaagggcaccacctgcaacagatacgagtgccccgccggctgcctggacagcaaggccaaggtgatcggcagcgtgcactacgagatgcagagcagcatctgcagagccgccatccactacggcatcatcgacaacgacggcggctgggtggacatcaccagacagggcagaaagcactacttcatcaagagcaacagaaacggcatccagaccatcggcaagtaccagagcgccaacagcttcaccgtgagcaaggtgaccgtgcaggccgtgacctgcgagaccaccgtggagcagctgtgccccttccacaagcccgccagccactgccccagagtgtactgccccagaaactgcatgcaggccaacccccactacgccagagtgatcggcaccagagtgtacagcgacctgagcagcatctgcagagccgccgtgcacgccggcgtggtgagaaaccacggcggctacgtggacgtgatgcccgtggacaagagaaagacctacatcgccagcttccagaacggcatcttcagcgagagcctgcagaacccccccggcggcaaggccttcagagtgttcgccgtggtgtag

SEQ ID NO: 105690 - DNA, 939 bp, Artificial Sequence
  derived and/or modified sequence
atgaatatctggggtcaaatctggccaaaggcagtgtacctggtttgtaattattcacccaaggggaattggtggggccatgctccatacaagcacgggagaccttgcagcgcttgtcccccatcctttggaggcggttgtcgcgaaaatctatgttacaaggaaggttcggacaggtattatcctccgagagaggaggagactaacgaaatcgagaggcagcagtcccaagttcacgatactcacgtgaggacccgaagcgacgatagcagcagaaacgaagtgatatccgcgcaacagatgagtcagattgtttcctgcgaagtgcggctacgggaccagtgtaaaggtactacatgtaatagatacgagtgccccgccggatgtttggactctaaggctaaagttattgggagtgtacattatgaaatgcagagctctatatgcagagccgcgatccactatggaattatcgacaatgatggcggatgggtcgacatcactcgacaagggcggaagcactacttcatcaagtcaaaccgtaacggaatccagactattgggaagtatcaatctgctaacagtttcaccgtctcaaaagtgaccgtccaggctgtaacatgtgagaccactgtcgagcagctgtgccctttccataaacctgctagccactgtccgcgcgtgtactgcccccggaactgtatgcaggccaatccccattatgctcgagttattggtacgcgcgtctactcggacctctcatccatctgtagggcggccgtgcacgcaggagtagtaaggaatcacgggggctacgtggatgtgatgcctgtggacaagcggaaaacgtacatcgcctccttccagaacggcatcttctccgaatctcttcagaacccccctggcggcaaagcgtttagagtctttgccgtggtatag

SEQ ID NO: 105691 - DNA, 939 bp, Artificial Sequence
  derived and/or modified sequence
atgaacatctggggccagatctggcccaaggctgtgtacctggtgtgcaactacagccccaagggcaactggtggggccacgccccctacaagcacggccggccctgcagcgcctgcccccccagctttggaggcggctgccgggagaacctgtgctacaaggagggcagtgaccgctactacccaccccgggaggaggagaccaatgaaattgagcggcagcagagccaggtgcatgacacccacgtgaggaccaggagtgatgacagcagcagaaatgaagtcatcagcgcccagcagatgagccagatcgtgtcctgtgaggtgcggctgcgggaccagtgcaagggcaccacctgcaacagatatgagtgcccagctggctgcctggacagcaaggccaaggtgattggctctgtgcactatgagatgcagagcagcatctgcagagctgccatccactacggcatcatcgacaatgatggcggctgggtggacatcacccggcagggcaggaagcactacttcatcaagagcaacagaaatggcatccagaccatcggcaagtaccagagcgccaacagcttcaccgtgtccaaggtgacagtgcaggccgtgacctgtgagaccaccgtggagcagctgtgccccttccacaagccagccagccactgcccccgggtgtactgccccaggaactgcatgcaggccaacccccactacgcccgggtgattggcaccagggtgtacagcgacctgagcagcatctgcagagctgctgtgcatgctggggtggtgagaaatcatggaggctacgtggatgtgatgcctgtggacaagaggaagacctacatcgccagcttccagaatggcatcttcagcgagagcctgcagaaccccccaggcggcaaggccttccgggtgtttgctgtggtgtag

SEQ ID NO: 105692 - DNA, 939 bp, Artificial Sequence
  derived and/or modified sequence
atgaacatctggggccagatctggcccaaggccgtgtacctggtgtgtaactattccccgaagggcaattggtgggggcacgcgccctacaaacatggtcgaccttgcagcgcctgtccccctagtttcggaggtggatgcagggaaaatctgtgctataaagaagggagtgacaggtactatccgccaagagaggaggagacaaatgagatcgaaaggcagcagtcccaggtgcacgacacccacgtaagaacaagatctgacgatagtagtagaaatgaggtcatctcggcccagcagatgtctcagatagttagttgcgaagtgcggctccgagaccagtgcaaaggtacaacttgtaaccggtacgaatgtccagccggatgcctggactcaaaagccaaggtgatcgggagtgttcattacgagatgcagtccagcatttgtcgagccgctattcactacgggattatagacaatgatggggggtgggtggacattactcgccagggacgcaagcattacttcattaagtccaatagaaatggaatccagacaattggcaaataccagtcggccaacagttttactgtgtcaaaagttacagttcaggctgtcacctgtgagaccactgtagagcagctttgcccgtttcacaaaccagctagtcattgcccccgggtttattgcccgcggaactgtatgcaggccaatccccactatgccagagtgatcggtaccagggtgtattccgatctgtcttctatttgtagagcagcagtccacgcaggagtggtacggaatcatgggggttacgtggatgttatgccagtggacaaacgaaagacatacattgcctcatttcagaacggaatctttagcgaatccctgcagaatcctccaggggggaaggccttcagggtgtttgccgtggtgtag

SEQ ID NO: 105693 - RNA, 939 nt, Artificial Sequence
  derived and/or modified sequence
augaauauuuggggucagauuuggccaaaagcaguguaccuagucugcaauuacucucccaagggaaacugguggggccacgccccuuacaaacauggacgaccauguagcgcuugcccucccucauuuggcggcgguugucgugagaaccuguguuacaaggagggguccgacagguacuacccuccucgcgaggaggaaaccaacgaaauugagaggcaacaaagccaagugcaugauacccauguaaggacucgguccgaugacagcucuagaaacgaggugauuucugcgcaacagaugagucagaucgugaguugugagguacgccugcgcgaccaguguaaggggacgacguguaauagauacgagugcccagccggcugcuuagacagcaaagcaaaggucaucgggucugugcauuacgaaaugcagucuuccauuugccgugcugccauucacuacggaaucauugauaacgacgggggaugggucgauaucacuaggcaagguaggaaacacuacuucaucaaauccaacaggaauggcauccagaccauuggaaaguaucagucugccaacagcuuuacagucuccaaagucaccgugcaggccguaacuugugaaaccaccgucgaacaacugugucccuuucauaagcccgcuucgcauugucccagaguguacugcccgcguaauugcaugcaagcgaauccacacuacgcacgggucaucgggacucguguuuauagcgaccugaguucaauaugcagggccgccguccaugccggaguagugagaaaucauggcggauauguugacgucaugccaguggauaaacguaagacuuauaucgcgagcuuucagaauggcauauucagcgagucacugcagaaccccccuggcggcaaggccuuuagaguguuugcagucguguag

SEQ ID NO: 105694 - RNA, 939 nt, Artificial Sequence
  derived and/or modified sequence
augaauauuuggggacaaauuuggcccaaggcuguguaucuggugugcaacuacucuccaaaagggaacugguggggucaugcuccguacaaacacggacgucccuguucugccugcccaccaucuuucggcgggggaugucgggaaaaccuauguuacaaagagggcucggauagguacuauccaccuagagaggaagagacuaacgagauagagaggcagcaaucccagguucacgauacacacguuaggacacggucugaugacuccucccguaaugagguuauuagugcucagcagaugagucagauugugagcugcgagguaagauuaagagaccaguguaaaggaacuaccugcaaucgauacgaaugcccugccggaugccuggauucaaaagcaaaagugauuggcagcgugcauuacgaaaugcaauccagcauuugccgugccgcgauccauuaugggauuauugacaaugacgguggcugggucgacaucacacgucagggccguaagcacuauuucaucaagucuaacagaaacgguauucagacuauuggcaaauaucaguccgcuaacagcuucacugugucuaaaguuaccgugcaggccgugacaugugagacuacuguggaacagcuuugcccauuucauaagccugccagccacugccccagggucuacugcccaagaaauugcaugcaagcaaacccccacuaugcaagagugaucggcaccagaguuuacucagaccugagcucaauuugucgagccgccguccaugccggagucguucggaaccauggaggcuacguugauguaaugcccguugacaagcgcaagacuuacauugcuagcuuccaaaaugguauuuucucggagucuuuacagaacccuccuggggguaaagcuuuucguguguucgcugucguguag

SEQ ID NO: 105695 - protein, 991 aa, Artificial Sequence
  derived and/or modified sequence
MKSSVSEDLGCRRGDFSRKHYGSVELLISSDADGAIQRAGRFRVENGSSDENATALPGTWRRTDVHLENPEYHTRWYFKYFLGQVHQNYIGNDAEKSPFFLSVTLSDQNNQRVPQYRAILWRKTGTQKICLPYSPTKTLSVKSILSAMNLDKFEKGPREIFHPEIQKDLLVLEEQEGSVNFKFGVLFAKDGQLTDDEMFSNEIGSEPFQKFLNLLGDTITLKGWTGYRGGLDTKNDTTGIHSVYTVYQGHEIMFHVSTMLPYSKENKQQVERKRHIGNDIVTIVFQEGEESSPAFKPSMIRSHFTHIFALVRYNQQNDNYRLKIFSEESVPLFGPPLPTPPVFTDHQEFRDFLLVKLINGEKATLETPTFAQKRRRTLDMLIRSLHQDLMPDLHKNMLNRRSFSDVLPESPKSARKKEEARQAEFVRIGQALKLKSIVRGDAPSSLAASGICKKEPWEPQCFCSNFPHEAVCADPWGQALLVSTDAGVLLVDDDLPSVPVFDRTLPVKQMHVLETLDLLVLRADKGKDARLFVFRLSALQKGLEGKQAGKSRSDCRENKLEKTKGCHLYAINTHHSRELRIVVAIRNKLLLITRKHNKPSGVTSTSLLSPLSESPVEEFQYIREICLSDSPMVMTLVDGPAEESDNLICVAYRHQFDVVNESTGEAFRLHHVEANRVNFVAAIDVYEDGEAGLLLCYNYSCIYKKVCPFNGGSFLVQPSASDFQFCWNQAPYAIVCAFPYLLAFTTDSMEIRLVVNGNLVHTAVVPQLQLVASRSDIYFTATAAVNEVSSGGSSKGASARNSPQTPPGRDTPVFPSSLGEGEIQSKNLYKIPLRNLVGRSIERPLKSPLVSKVITPPTPISVGLAAIPVTHSLSLSRMEIKEIASRTRRELLGLSDEGGPKSEGAPKAKSKPRKRLEESQGGPKPGAVRSSSSDRIPSGSLESASTSEANPEGHSASSDQDPVADREGSPVSGSSPFQLTAFSDEDIIDLK

SEQ ID NO: 105696 - DNA, 2976 bp, Artificial Sequence
  derived and/or modified sequence
atgaagagcagcgtgagcgaggacctgggctgcagaagaggcgacttcagcagaaagcactacggcagcgtggagctgctgatcagcagcgacgccgacggcgccatccagagagccggcagattcagagtggagaacggcagcagcgacgagaacgccaccgccctgcccggcacctggagaagaaccgacgtgcacctggagaaccccgagtaccacaccagatggtacttcaagtacttcctgggccaggtgcaccagaactacatcggcaacgacgccgagaagagccccttcttcctgagcgtgaccctgagcgaccagaacaaccagagagtgccccagtacagagccatcctgtggagaaagaccggcacccagaagatctgcctgccctacagccccaccaagaccctgagcgtgaagagcatcctgagcgccatgaacctggacaagttcgagaagggccccagagagatcttccaccccgagatccagaaggacctgctggtgctggaggagcaggagggcagcgtgaacttcaagttcggcgtgctgttcgccaaggacggccagctgaccgacgacgagatgttcagcaacgagatcggcagcgagcccttccagaagttcctgaacctgctgggcgacaccatcaccctgaagggctggaccggctacagaggcggcctggacaccaagaacgacaccaccggcatccacagcgtgtacaccgtgtaccagggccacgagatcatgttccacgtgagcaccatgctgccctacagcaaggagaacaagcagcaggtggagagaaagagacacatcggcaacgacatcgtgaccatcgtgttccaggagggcgaggagagcagccccgccttcaagcccagcatgatcagaagccacttcacccacatcttcgccctggtgagatacaaccagcagaacgacaactacagactgaagatcttcagcgaggagagcgtgcccctgttcggcccccccctgcccaccccccccgtgttcaccgaccaccaggagttcagagacttcctgctggtgaagctgatcaacggcgagaaggccaccctggagacccccaccttcgcccagaagagaagaagaaccctggacatgctgatcagaagcctgcaccaggacctgatgcccgacctgcacaagaacatgctgaacagaagaagcttcagcgacgtgctgcccgagagccccaagagcgccagaaagaaggaggaggccagacaggccgagttcgtgagaatcggccaggccctgaagctgaagagcatcgtgagaggcgacgcccccagcagcctggccgccagcggcatctgcaagaaggagccctgggagccccagtgcttctgcagcaacttcccccacgaggccgtgtgcgccgacccctggggccaggccctgctggtgagcaccgacgccggcgtgctgctggtggacgacgacctgcccagcgtgcccgtgttcgacagaaccctgcccgtgaagcagatgcacgtgctggagaccctggacctgctggtgctgagagccgacaagggcaaggacgccagactgttcgtgttcagactgagcgccctgcagaagggcctggagggcaagcaggccggcaagagcagaagcgactgcagagagaacaagctggagaagaccaagggctgccacctgtacgccatcaacacccaccacagcagagagctgagaatcgtggtggccatcagaaacaagctgctgctgatcaccagaaagcacaacaagcccagcggcgtgaccagcaccagcctgctgagccccctgagcgagagccccgtggaggagttccagtacatcagagagatctgcctgagcgacagccccatggtgatgaccctggtggacggccccgccgaggagagcgacaacctgatctgcgtggcctacagacaccagttcgacgtggtgaacgagagcaccggcgaggccttcagactgcaccacgtggaggccaacagagtgaacttcgtggccgccatcgacgtgtacgaggacggcgaggccggcctgctgctgtgctacaactacagctgcatctacaagaaggtgtgccccttcaacggcggcagcttcctggtgcagcccagcgccagcgacttccagttctgctggaaccaggccccctacgccatcgtgtgcgccttcccctacctgctggccttcaccaccgacagcatggagatcagactggtggtgaacggcaacctggtgcacaccgccgtggtgccccagctgcagctggtggccagcagaagcgacatctacttcaccgccaccgccgccgtgaacgaggtgagcagcggcggcagcagcaagggcgccagcgccagaaacagcccccagaccccccccggcagagacacccccgtgttccccagcagcctgggcgagggcgagatccagagcaagaacctgtacaagatccccctgagaaacctggtgggcagaagcatcgagagacccctgaagagccccctggtgagcaaggtgatcaccccccccacccccatcagcgtgggcctggccgccatccccgtgacccacagcctgagcctgagcagaatggagatcaaggagatcgccagcagaaccagaagagagctgctgggcctgagcgacgagggcggccccaagagcgagggcgcccccaaggccaagagcaagcccagaaagagactggaggagagccagggcggccccaagcccggcgccgtgagaagcagcagcagcgacagaatccccagcggcagcctggagagcgccagcaccagcgaggccaaccccgagggccacagcgccagcagcgaccaggaccccgtggccgacagagagggcagccccgtgagcggcagcagccccttccagctgaccgccttcagcgacgaggacatcatcgacctgaagtag

SEQ ID NO: 105697 - DNA, 2976 bp, Artificial Sequence
  derived and/or modified sequence
atgaagtctagcgtcagcgaggatctcggatgccgccggggcgacttttcaagaaagcactacggatccgtggaattgctgatctctagcgacgcagacggggcaatccagcgcgctggtcgatttagggtggaaaacgggagcagcgatgagaacgccaccgcactcccaggcacctggcgtcgcactgatgtgcacctggagaatccagaataccatacccggtggtacttcaaatacttcctgggccaagttcatcagaactatataggaaatgacgccgagaaatctccgttctttctatcagtgacactatccgatcagaataaccagcgcgtaccccagtatagggctattctgtggcgcaaaaccgggactcagaagatatgtctcccttattcccctaccaagaccctgagtgtgaaaagcattctttccgccatgaacctcgataaatttgaaaaaggaccccgtgagatctttcacccggagatacagaaggacctgctggtactggaggagcaagaaggtagtgtcaacttcaagtttggagtactttttgcgaaggacggccaactgaccgatgacgaaatgttctccaatgagatcggcagcgaacctttccagaagtttttgaacctcctgggcgatacgatcactcttaaggggtggacaggatacaggggtggattagatacaaaaaacgacactaccggtatacattcagtgtacaccgtatatcaaggtcacgaaatcatgttccatgtctcaaccatgttgccgtattccaaagagaataaacagcaggtagaacgcaagaggcatataggtaacgacatcgtgaccattgttttccaggagggggaagaaagcagcccggcttttaaaccaagtatgatcaggtctcattttacccatatctttgccctggtgcgctacaaccagcagaatgataattaccgtctgaagatattttcggaagagtctgtgccactgttcggaccgccgctccccacacctcctgtctttactgatcaccaggagttcagagacttcttgttagtaaagctgattaatggtgagaaggcaactctggagactcccactttcgctcagaagaggcgccgcactctcgatatgctcattcggagtttgcaccaggacttgatgcctgatctccataaaaacatgctgaaccggcggtcattcagcgacgttctgcctgagtcccctaagagcgctaggaaaaaagaggaggcccgccaggctgaatttgtacgcattggacaggcacttaaactgaaatccattgtgaggggggacgctccctcatctctcgccgccagcggcatatgcaaaaaagaaccgtgggagccccaatgcttttgttcgaactttccacacgaagctgtctgcgccgatccctggggacaggctttgcttgtgtccacagatgcaggggttctgctggtggacgatgatctgccttccgtgcccgtgtttgaccgcacgctacccgttaaacaaatgcatgttctggaaactctggacctactcgttctgagggcggataaaggaaaagacgcacggctgttcgtgttccgtctttctgcgttacaaaaaggtctggagggcaagcaggccgggaaatcaagatcggactgtcgggaaaataagctggagaaaacaaagggttgtcacctgtatgcaataaatacacatcactctcgggagctacggatagtggtggcaatacggaacaaactgcttctcattaccagaaaacataacaagccatctggggtgaccagtacttctctgctcagtccactctcggaaagccccgtggaagaattccagtacatcagggagatctgtctgtctgatagcccgatggtcatgaccttagtggacgggccagcagaagagtctgataatctgatttgcgtagcatatcgccaccagttcgatgtggttaatgagtccaccggggaagcattccgccttcaccacgtggaggctaatcgcgtgaactttgttgctgccatcgacgtgtatgaagacggtgaagcggggcttcttctttgttataactactcttgcatttacaagaaagtttgcccatttaatggaggctctttccttgtgcagccctccgccagtgactttcagttttgctggaatcaggctccctacgcaattgtttgtgcttttccatatttgctggctttcaccacagactcaatggaaatacgcctggtggtcaatggtaacctggtgcacacagctgtggtaccacagttgcaactggtggcctcacgctctgacatttacttcactgccactgccgcagtcaacgaggtgtcatctggcggctcctctaaaggcgcaagtgctcgtaatagcccccaaaccccgcccgggcgcgacactcctgtgttcccgagcagcctcggagaaggcgagatccagagtaagaacctgtataagattcctctaagaaatttggtggggcggtccatagagagacctttgaagagccccctagtttccaaggtcattacaccccctaccccaatctcggtcggtttagctgctatccctgtgacccattctctttcactgtcgcgtatggaaatcaaggaaatcgcttccaggacaaggcgagagctcctgggtcttagcgacgaagggggacccaagtcagagggagcacctaaagccaaatctaagccacgcaagcggctggaggagtctcaaggaggacctaagcccggggccgtccggtccagttcgtctgatcggattcctagcggcagtctcgagtccgcatccacgtctgaagctaatccagagggccacagcgcgtccagcgatcaggacccagtggccgatcgtgaagggagcccagtatctggctcctctccatttcagctgactgccttctctgatgaggacattattgatctcaagtag

SEQ ID NO: 105698 - DNA, 2976 bp, Artificial Sequence
  derived and/or modified sequence
atgaagagctctgtgtctgaggacctgggctgccggcggggggacttcagcaggaagcactacggctctgtggagctgctgatcagcagtgatgctgatggagccatccagagagctggccgcttccgggtggagaatggcagcagtgatgaaaatgccacagccctgcccggcacctggaggagaacagatgtgcacctggagaaccctgagtaccacacccgctggtacttcaagtacttcctgggccaggtgcaccagaactacatcggaaatgatgctgagaagagccccttcttcctgtctgtgaccctgagtgaccagaacaaccagagggtgccccagtaccgggccatcctgtggaggaagacaggcacccagaagatctgcctgccctacagccccaccaagaccctgtctgtgaagagcatcctgagcgccatgaacctggacaagtttgagaagggcccccgggagatcttccaccctgagatccagaaggacctgctggtgctggaggagcaggagggctctgtgaacttcaagtttggagtgctgtttgccaaggatggccagctgacagatgatgagatgttcagcaatgaaattggcagcgagcccttccagaagttcctgaacctgctgggggacaccatcaccctgaagggctggacaggctacagaggaggcctggacaccaagaatgacaccaccggcatccacagcgtgtacacagtgtaccagggccacgagatcatgtttcatgtgtccaccatgctgccctacagcaaagaaaacaagcagcaggtggagaggaagaggcacatcggaaatgacatcgtgaccatcgtgttccaggagggggaggagagcagccctgccttcaagcccagcatgatccgcagccacttcacccacatctttgccctggtgcgctacaaccagcagaatgacaactaccgcctgaagatcttcagcgaggagagcgtgcccctgtttggaccacccctgcccaccccacctgtgttcacagaccaccaggagttccgggacttcctgctggtgaagctgatcaatggagagaaggccaccctggagacccccacctttgcccagaagagaagaaggaccctggacatgctgatccgcagcctgcaccaggacctgatgccagacctgcacaagaacatgctgaacagaagaagcttcagtgatgtgctgcctgagagccccaagagcgccaggaagaaggaggaggcccggcaggccgagtttgtgcgcatcggccaggccctgaagctgaagagcatcgtgagaggagatgcccccagcagcctggccgccagcggcatctgcaagaaggagccctgggagccccagtgcttctgcagcaacttcccccatgaggccgtgtgtgccgacccctggggccaggccctgctggtgtccacagatgctggggtgctgctggtggatgatgacctgcccagcgtgcctgtgtttgacaggaccctgcctgtgaagcagatgcacgtgctggagaccctggacctgctggtgctgcgggctgacaagggcaaggatgcccggctgtttgtgttccggctgagcgccctgcagaagggcctggagggcaagcaggccggcaagagcagaagtgactgccgggagaacaagctggagaagaccaagggctgccacctgtatgccatcaacacccaccacagccgggagctgagaattgtggtggccatccggaacaagctgctgctgatcaccaggaagcacaacaagcccagcggcgtgaccagcaccagcctgctgagccccctgtctgagagccctgtggaggagttccagtacatccgggagatctgcctgagtgacagccccatggtgatgaccctggtggatggccctgctgaggagagtgacaacctgatctgtgtggcctaccgccaccagtttgatgtggtgaatgaaagcactggagaggccttccggctgcaccacgtggaggccaacagagtgaactttgtggccgccattgatgtgtatgaagatggagaggccggcctgctgctgtgctacaactacagctgcatctacaagaaggtgtgccccttcaacggcggcagcttcctggtgcagcccagcgccagtgacttccagttctgctggaaccaggccccctatgccatcgtgtgtgccttcccctacctgctggccttcaccacagacagcatggagatccggctggtggtgaatggaaacctggtgcacacagctgtggtgccccagctgcagctggtggccagcagaagtgacatctacttcaccgccacagctgctgtgaatgaggtgagcagcggcggcagcagcaaaggagccagcgccaggaacagcccccagaccccacctggccgggacacccctgtgttccccagcagcctgggggagggggagatccagagcaagaacctgtacaagatccccctgaggaacctggtgggccgcagcattgagcggcccctgaagagccccctggtgtccaaggtgatcaccccacccacccccatctctgtgggcctggccgccatccctgtgacccacagcctgagcctgagcaggatggagatcaaggagatcgccagcaggacccggcgggagctgctgggcctgagtgatgagggcggccccaagtctgagggcgcccccaaggccaagagcaagcccaggaagaggctggaggagagccagggcggccccaagccaggagctgtgcgcagcagcagcagtgaccgcatccccagcggcagcctggagagcgccagcaccagcgaggccaaccctgagggccacagcgccagcagtgaccaggaccctgtggccgaccgggagggcagccctgtgtctggcagcagccccttccagctgacagccttcagtgatgaggacatcatcgacctgaagtag

SEQ ID NO: 105699 - DNA, 3458 bp, Artificial Sequence
  derived and/or modified sequence
actagaagcaagaatgtagcctgggtaatatctggaacactttcaaactgcatgcattgatgtgttgcccattttcagctaagagagggaggactacaaaaggttaaatttctcatataagattaattcagccatctctgtgaaatggtggaagcagaatgccattagactctctaatctcatttctctcatgctgtctttcttggagcctgtcaaacagtgtcctggcagagagtcagttctctggttgctaaacatcagagtcagtctctttctgcatgtgccaagagggctgtaatttagaaaatgcaacctaccttttaaggaaggatgaaaagctctgtctcggaagacctaggctgtagacgtggggatttcagtaggaaacattatggatctgtggagctgcttatttccagtgatgctgatggagccatccaaagggctggaagattcagagtggaaaatggctcttcagatgagaatgcaactgccctgcctggtacttggcgaagaacagacgtgcacttagagaacccagaataccacaccagatggtatttcaaatattttttaggacaagtccatcagaactacattggaaacgatgccgagaagagccctttcttcttgtccgtgaccctttctgaccaaaacaatcaacgtgtccctcaataccgtgcaattctttggagaaaaacaggtacccagaaaatatgccttccctacagtcccacaaaaactctttctgtgaagtccatcttaagtgccatgaatctggacaaatttgagaaaggccccagggaaatttttcatcctgaaatacaaaaggacttgctggttcttgaagaacaagagggctctgtgaatttcaagtttggggttctttttgccaaagatgggcagctcactgatgatgagatgttcagcaatgaaattggaagcgagccttttcaaaaatttttaaatcttctgggtgacacaatcactctaaagggctggacgggctaccgtggcggtctggataccaaaaatgataccacagggatacattcagtttatactgtgtaccaagggcatgagatcatgtttcatgtttccaccatgttgccatattccaaagagaacaaacagcaggtggaaaggaaacgccacattggaaacgatatcgtcaccattgtgttccaagaaggagaggaatcttctcctgcctttaagccttccatgatccgctcccactttacacatatttttgccttagtgagatacaatcaacaaaatgacaattacaggctgaaaatattttcagaagagagcgtaccactctttggccctcccttgccaactccaccagtgtttacagaccaccaggaattcagggactttttgctagtgaaattaattaatggtgaaaaagccactttggaaaccccaacatttgcccagaaacgtcggcgtaccctggatatgttgattagatctttacaccaggatttgatgccagatttgcataagaacatgcttaatagacgatcttttagtgatgtcttaccagagtcacccaagtcagcgcggaagaaagaggaggcccgccaggcggagtttgttagaatagggcaggcactaaaactgaaatccattgtgagaggggatgctccatcaagcttggcagcttcagggatctgtaaaaaagagccgtgggagccccagtgtttctgcagtaatttccctcatgaagccgtgtgtgcagatccctggggccaggccttgctggtttccactgatgctggcgtcttgctagtggatgatgaccttccatcagtgcccgtgtttgacagaactctgccagtgaagcaaatgcatgtgcttgagaccctggaccttctggttctcagagcagacaaaggaaaagatgctcgcctctttgtcttcaggctaagtgctctgcaaaagggccttgaggggaagcaggctgggaagagcaggtctgactgcagagaaaacaagttggagaaaacaaaaggctgccacctgtatgctattaacactcaccacagcagagagctgaggattgtggttgcaattcggaataaactgcttctgatcacaagaaaacacaacaagccaagcggggtcaccagcacctcattgttatctcccctgtctgagtcacctgttgaagaattccagtacatcagggagatctgtctgtctgactctcccatggtgatgaccttagtggatgggccagctgaagagagtgacaatctcatctgtgtggcttatcgacaccaatttgatgtggtgaatgagagcacaggagaagccttcaggctgcaccacgtggaggccaacagggttaattttgttgcagctattgatgtgtacgaagatggagaagctggtttgctgttgtgttacaactacagttgcatctataaaaaggtttgcccctttaatggtggctcttttttggttcaaccttctgcgtcagatttccagttctgttggaaccaggctccctatgcaattgtctgtgctttcccgtatctcctggccttcaccaccgactccatggagatccgcctggtggtgaacgggaacctggtccacactgcagtcgtgccgcagctgcagctggtggcctccaggtcggatatatacttcacagcaactgcagctgtgaatgaggtctcatctggaggcagctccaagggggccagtgcccgaaattctcctcagacacccccgggccgagatactccagtatttccttcttccctgggggaaggtgaaattcaatcaaaaaatctgtacaagattccacttagaaacctcgtgggcagaagcatcgaacgacctctgaagtcacccttagtctccaaggtcatcaccccacccactcccatcagtgtgggccttgctgccattccagtcacgcactccttgtccctgtctcgcatggagatcaaagaaatagcaagcaggacccgcagggaactactgggcctctcggatgaaggtggacccaagtcagaaggagcgccaaaggccaaatcaaaaccccggaagcggttagaagaaagccaaggaggccccaagccaggggcagtgaggtcatctagcagtgacaggatcccatcaggctccttggaaagtgcttctacttccgaagccaaccctgaggggcactcagccagctctgaccaggaccctgtggcagacagagagggcagcccggtctccggcagcagccccttccagctcacggctttctccgatgaagacattatagacttgaagtaacagagttgaatctcatttgccatctttagttttcttatggaggtttatactctttaaacagttctgatgtaatttctcaacaaaatgtggcttttagcctgtcagtgatctattggaccaaaccttctgcacactcggccagttccctctcc

SEQ ID NO: 105700 - DNA, 2976 bp, Artificial Sequence
  derived and/or modified sequence
atgaagagcagcgtgagcgaggacctgggctgccggcggggcgacttctccagaaagcactacggcagcgttgaattgctaatttcaagcgatgcggatggagctattcaacgagctggtcgattccgagtggagaatgggtcgtctgatgaaaatgcaactgccctgcccggcacatggcggcgaaccgacgtgcatttagaaaatcccgagtatcatactcgctggtacttcaagtactttcttggtcaggtacatcagaactacatcgggaacgatgccgagaagtctcctttcttcctgagcgtcaccttatccgaccagaacaaccaacgggtaccccagtatcgagctatactatggagaaagacgggaacccagaaaatttgtttaccctactcccccactaaaactctgagcgttaaatcaattctttccgcaatgaatctcgacaagtttgagaagggcccccgagaaatctttcatcccgagatccagaaagatttgttagtgttggaggaacaggagggatctgtgaactttaaatttggtgtcctgttcgcaaaagatggccaactcacggacgatgaaatgttctctaacgaaattgggtccgaacctttccagaagttcctcaatctcctgggagacaccatcactctcaaaggctggaccgggtatcgagggggcttagatactaaaaatgacactaccggaattcatagtgtttacacagtctaccagggtcatgagataatgtttcatgtgtccacgatgctaccctactccaaagaaaacaaacaacaggtggaacgcaaacggcatatcggcaacgatatcgtaacaatcgtgtttcaggaaggcgaagaaagcagcccggcttttaaaccgagtatgatcagatcccattttactcacatattcgcactggtgcgttataatcagcagaacgacaactacagactgaagatcttctctgaggagtcagttccactgttcgggcctcctctacccactccaccagtctttactgaccatcaggagttcagggattttttgctagttaaactaattaatggtgagaaagcgaccctcgaaacccccaccttcgcacagaagcgccgcagaactttggacatgctgatcaggtccctccatcaggaccttatgccggacctgcacaagaatatgttaaaccggaggtccttttcagacgtcctcccagagagcccaaagtcagcaaggaaaaaggaagaagctcggcaggccgaatttgtgaggatcggtcaggcactgaaacttaaaagcatcgtgcgaggtgacgccccatcatctttagcagcatccggcatatgcaaaaaagagccctgggagccccagtgtttctgctctaatttcccccatgaagcagtttgtgctgacccatgggggcaggctttgctagtgagcactgacgccggagtactcttagtggatgacgatctcccttccgtgccagtgttcgacagaaccctgcctgtgaagcagatgcacgtccttgagacccttgatttgctagtcttacgggcagacaagggaaaagacgccaggctgttcgtgttccgactcagtgcattgcagaagggtttggagggaaaacaggctggaaaaagtcggtccgactgccgcgaaaataaactggaaaaaacaaagggatgccacttatacgcgatcaatacacatcacagtcgggagctccgcattgtggtcgccatcagaaataagctgctgctgataacgcgcaaacacaataaaccttccggcgtcacttctactagcctgctatctcctcttagcgagtctccggtcgaggaattccagtacatcagagaaatttgcttgtccgacagcccaatggtcatgacgttagtggacgggcctgcagaggaaagcgataacctgatttgcgtggcctacagacaccagtttgatgtggtgaatgaaagtacaggagaggcttttagactgcaccatgtggaggcaaacagggtcaattttgtagcggctatcgacgtgtacgaggatggcgaggcagggctcttactgtgctataattatagctgcatttataagaaggtttgtcccttcaatggtggctcctttctggtgcaaccttccgccagcgactttcagttctgctggaaccaggcaccctatgctatcgtgtgcgcatttccatacttgctagcttttaccactgattcaatggagatacggctcgttgtgaatggaaacctggtgcataccgccgtggttcctcaactgcagctggttgcgtccaggtctgatatctactttaccgcaaccgccgctgtcaatgaggtcagcagcggtggctccagcaagggggcaagtgcacgcaatagccctcaaacacctcctgggagggacacaccagtgtttccatcgtctctcggcgaaggcgagatccagagcaagaacctctacaagattcccttgagaaacctggtgggcagaagcatcgaaagacctctaaaatcccctttggtgtcaaaagtgattacaccccctactcccatttcagtgggactcgccgctattccagtgacgcattcattaagcctgagtcggatggagattaaagaaatcgcctcccggacgaggcgcgaattactcggtttatccgatgagggaggccccaagtcagagggggccccaaaggctaagagtaaaccccggaagagactcgaggagtcccagggtggcccaaagcccggggcagtacgtagctcatctagcgaccgcattccatccggtagcctcgaatcagctagcacatccgaagctaatcccgaggggcacagcgcctccagtgatcaggatcctgtcgccgaccgggaaggttcacccgtgagcggtagcagcccctttcagctgactgcttttagtgatgaagacataatcgacctcaaatag

SEQ ID NO: 105701 - DNA, 2976 bp, Artificial Sequence
  derived and/or modified sequence
atgaagagcagcgtctccgaagacctcggctgcaggcggggagatttttcccgtaagcactacggctccgttgaactgctgatttcatccgatgctgacggcgctatccagcgagccggtcggtttagggtggaaaatgggagcagcgatgaaaacgcaaccgccctgcctggcacttggaggcgaaccgatgtgcacctcgagaatccggagtatcacacccgatggtattttaagtactttttgggccaggtgcaccagaactatataggaaacgacgccgagaagtcaccttttttcctttcagtgaccctgagtgatcagaataatcagagagtccctcagtatcgggctattctttggaggaaaacaggcacccagaagatatgtctcccttactctccaacgaagactttgagtgttaagtctattttaagcgccatgaatttggacaagttcgaaaaagggcctagggaaatcttccacccagaaatccaaaaagaccttctggtgctggaagaacaggaaggctccgtcaatttcaagttcggcgtgctctttgccaaagacggccagttgaccgacgacgaaatgttcagcaacgaaatagggtccgaaccctttcaaaagtttctcaacctcctgggggacacaattacattgaagggctggactggatatcgaggaggactggacactaaaaacgacactaccggtattcatagcgtttatacagtgtatcagggacatgagattatgttccatgttagtaccatgctgccctactctaaagaaaacaaacaacaagttgagaggaaaaggcatatcggcaacgatattgtgacgatcgtattccaggagggcgaggagtccagccctgcatttaagccctcgatgattagatcgcactttacgcatatcttcgcgctggtgcgctataaccagcagaacgataattaccggctgaagattttctcagaggagtctgtccccctattcggtcctccactccccacacctcctgtttttaccgaccatcaggagtttcgtgactttctgctggtcaagctcattaacggggagaaggcgaccctggagacgccaacttttgctcagaagagacgccgtactctcgacatgttaatcagaagcctccatcaggacctcatgcccgacctccataagaacatgcttaaccgaagaagctttagtgacgtgctgcctgagtcccctaagagcgctcgaaaaaaggaagaagcgcgacaggccgaattcgttaggattggtcaggcactgaagttgaagtccatcgttcggggagatgcaccctcctcattggctgctagtggcatctgtaagaaggagccttgggagccccagtgtttctgcagcaactttccacatgaagcagtatgcgcggatccctggggacaggcgctgctggtgtccactgatgcaggcgtcttgcttgtggacgacgatctgccctccgtgccagtattcgaccgcacattgcctgtgaaacaaatgcacgtattggagactctggacttgctggttcttagagctgacaaaggaaaggatgctagactttttgtgttccggctctcagcccttcagaaagggcttgaaggcaaacaggctggcaaatcgcgctcggactgtcgagagaataagctggagaagactaagggatgccatctgtacgctattaatacccaccactctcgggaactgaggatagtggttgcgattcggaataaattgctactgattacccgcaagcataacaagccctccggagtgacaagtacaagcctcctgagcccgctgtcagaatcaccagtcgaagagttccagtatatcagagaaatatgcctgtcagactcccccatggtaatgacactggttgatggccctgctgaagaaagcgacaacctcatctgtgtcgcctacaggcatcagttcgacgtggttaatgagtctactggtgaggcctttagactgcaccatgtcgaggccaacagagtcaactttgtggccgctattgacgtctatgaagacggcgaagccggtctcctgctgtgttacaactactcatgcatttacaagaaagtctgtcccttcaacggaggatcctttttggttcagccatcagcctccgacttccagttctgctggaaccaggctccctacgctattgtgtgtgccttcccttacctgctagccttcactactgactcaatggaaatacggctggtcgtgaatggcaatctcgttcacaccgctgttgtgccccagctgcagctggtggcctctagaagcgacatctacttcactgccacagcagccgtgaacgaagtttcttctggaggctcaagcaagggggctagtgctcggaattctccacagaccccccctggaagagacacaccagtgtttccaagctctttgggggaaggagagatccagtctaagaatttgtacaagattcctctgcggaacttggtaggtagatctattgaacggccactgaaaagccccctggtgagtaaggtgattactcctcccacacctatatctgtgggtctggccgctattccagttacacactccctgagcctgtccagaatggagattaaggaaatagctagtcgcacgaggcgggaactgctgggactttctgatgaaggtgggcctaaaagtgaaggcgctcctaaagcaaaaagcaagccacgcaagaggcttgaggagagtcaaggtggtcccaagccaggagctgttcggagcagcagcagcgaccgaatcccatcaggctcacttgaaagtgctagcacctctgaggctaatcccgaaggccactctgctagctcggaccaggatccagtcgcggatcgggagggatccccagtgtccgggtctagtcctttccagttgactgcattttctgacgaggatataattgacctcaagtag

SEQ ID NO: 105702 - protein, 281 aa, Artificial Sequence
  derived and/or modified sequence
MPGPRRLRSPGGSGCSSRGSGPRLSTRRWRPCCYCGGSGVWLLRTPPSPSAWPARRCPRHRFEFCEPAFVVGNCLQIASDSHQYDRIYCGAGVQKDHENYMKILLKVGGILVMPIEDQLTQIMRTGQNTWESKNILAVSFAPLVQPSKNDNGKPDSVGLPPCAVRNLQDLARIYIRRTLRNFINDEMQAKGIPQRAPPKRKRKRVKQRINTYVFVGNQLIPQPLDSEEDEKMEEDNKEEEEKDHNEAMKPEEPPQNLLREKIMKLPLPESLKAYLTYFRDK

SEQ ID NO: 105703 - DNA, 846 bp, Artificial Sequence
  derived and/or modified sequence
atgcccggccccagaagactgagaagccccggcggcagcggctgcagcagcagaggcagcggccccagactgagcaccagaagatggagaccctgctgctactgcggcggcagcggcgtgtggctgctgagaaccccccccagccccagcgcctggcccgccagaagatgccccagacacagattcgagttctgcgagcccgccttcgtggtgggcaactgcctgcagatcgccagcgacagccaccagtacgacagaatctactgcggcgccggcgtgcagaaggaccacgagaactacatgaagatcctgctgaaggtgggcggcatcctggtgatgcccatcgaggaccagctgacccagatcatgagaaccggccagaacacctgggagagcaagaacatcctggccgtgagcttcgcccccctggtgcagcccagcaagaacgacaacggcaagcccgacagcgtgggcctgcccccctgcgccgtgagaaacctgcaggacctggccagaatctacatcagaagaaccctgagaaacttcatcaacgacgagatgcaggccaagggcatcccccagagagccccccccaagagaaagagaaagagagtgaagcagagaatcaacacctacgtgttcgtgggcaaccagctgatcccccagcccctggacagcgaggaggacgagaagatggaggaggacaacaaggaggaggaggagaaggaccacaacgaggccatgaagcccgaggagcccccccagaacctgctgagagagaagatcatgaagctgcccctgcccgagagcctgaaggcctacctgacctacttcagagacaagtag

SEQ ID NO: 105704 - DNA, 846 bp, Artificial Sequence
  derived and/or modified sequence
atgcccggaccaaggaggctgaggtcacccggggggagcggatgcagtagccgtgggtccggccctcgcctgagcacacgacggtggcggccatgctgctactgtggcgggagtggagtctggcttcttcgcactccacccagccctagcgcctggccagccaggcggtgcccaagacatcgcttcgagttttgcgaacctgcattcgtggtgggcaactgcttacaaatagcttccgacagtcaccagtatgatcgtatttactgcggggccggcgtgcagaaagaccacgaaaattacatgaagatacttttaaaggtgggcggcatcctagtgatgcctattgaggaccagcttacacaaatcatgcgcaccggtcagaacacgtgggaatccaagaacatcttggccgtatccttcgctcctctggtgcagccgtctaagaatgataatggtaaaccagactccgtggggctgcctccctgtgcagtccgtaacctccaagacctcgcgcggatatacatccgacggaccctcagaaatttcattaacgatgagatgcaagctaaggggattcctcaaagggctccgccaaagcgcaagaggaagcgagtcaagcagaggataaatacctacgtgtttgtgggtaaccaactgatccctcagccgctcgatagcgaggaggatgagaaaatggaggaggacaacaaagaggaggaggaaaaagatcacaacgaggctatgaagcctgaggaacccccgcagaatttactgagggagaaaataatgaaattacccctgccagagtccctgaaagcctatctgacttactttcgagataaatag

SEQ ID NO: 105705 - DNA, 846 bp, Artificial Sequence
  derived and/or modified sequence
atgcctggcccccggcggctgcggagccctgggggcagcggctgcagcagccggggcagcggcccccggctgagcacccggcgctggaggccctgctgctactgcggcggcagcggcgtgtggctgctgcggaccccacccagccccagcgcctggccagcccggcgctgccccaggcacagatttgagttctgtgagcccgcctttgtggtgggcaactgcctgcagatcgccagtgacagccaccagtatgaccgcatctactgtggggccggcgtgcagaaggaccacgagaactacatgaagatcctgctgaaggtgggcggcatcctggtgatgcccatcgaggaccagctgacccagatcatgaggacaggccagaacacctgggagagcaagaacatcctggccgtgtcctttgcccccctggtgcagcccagcaagaatgacaatggcaagccagacagcgtgggcctgcccccctgtgctgtgaggaacctgcaggacctggcccgcatctacatccggaggaccctgaggaacttcatcaatgatgagatgcaggccaagggcatcccccagagggccccacccaagaggaagaggaagagggtgaagcagaggatcaacacctacgtgtttgtgggcaaccagctgatcccccagcccctggacagcgaggaggatgagaagatggaggaggacaacaaggaggaggaggagaaggaccacaatgaggccatgaagccagaggagcccccccagaacctgctgcgggagaagatcatgaagctgcccctgcctgagagcctgaaggcctacctgacctacttccgggacaagtag

SEQ ID NO: 105706 - DNA, 846 bp, Artificial Sequence
  derived and/or modified sequence
atgcccggcccccggcggctgcggagccccggcggcagcggctgcagtagccggggctccgggcctcggctttctacaaggcgttggcggccatgctgctattgcggaggctcaggggtttggttgctccgcacccctccctctccttcagcatggcccgcccgcagatgccctcgccatcggttcgaattctgtgaaccagccttcgtggttggcaattgcctgcagatcgcatctgacagccatcagtatgatagaatttactgtggggccggcgtgcagaaggaccacgaaaattatatgaagatcctcttgaaggtcggaggcatcctcgtgatgccaattgaggatcaattaacacaaatcatgcggaccggccagaatacgtgggaaagcaaaaatatcctggctgtttctttcgcccctcttgtacaaccgagcaaaaacgacaacggcaagcctgactcagttggactcccgccctgtgccgtccggaaccttcaggacctggcgcgcatctacatccggcgcaccctcaggaatttcattaacgacgagatgcaagctaaaggaatcccacaacgagcacccccaaagcggaagcggaaaagggtcaagcagcgcatcaacacctacgtgttcgtgggcaatcagcttattccccagcctttggactcagaggaagacgaaaagatggaggaggataacaaggaagaggaggagaaagaccacaatgaagccatgaagcccgaagaaccacctcagaatctattgcgcgagaagattatgaagctgcctctcccggagagtttgaaagcctacctaacatatttcagagacaaatag

SEQ ID NO: 105707 - DNA, 846 bp, Artificial Sequence
  derived and/or modified sequence
atgcccggaccccgacggctcaggtcacccggtgggagcggatgttcttcccggggatcaggacctcgattaagtactcgcaggtggcgcccatgctgctactgtggcggatctggcgtttggcttctgcggaccccaccatcccccagcgcctggcctgcgaggcggtgccccaggcacagattcgaattctgcgagccagcatttgtagtgggcaactgtcttcagattgccagcgacagtcaccagtacgacagaatatactgtggtgctggcgtgcagaaagaccacgaaaattacatgaagattctcctgaaagtcgggggtatcttggttatgcccatcgaagaccagttaacgcagattatgcgcactggtcagaacacctgggagtctaaaaacatcctggccgtttcgttcgctcccctcgttcagcccagtaaaaatgataacggaaaacctgacagcgtcggacttcccccttgtgcagtaaggaacctgcaagatttggctcggatctatattcgacggacactgaggaactttatcaacgatgagatgcaagctaaaggaataccacagagagccccaccaaaacgaaaaagaaaaagggtcaaacagcgaatcaacacgtatgtgttcgttgggaatcagttaatcccacagcctctggattctgaggaagacgagaagatggaggaggacaacaaagaggaggaggagaaggaccacaatgaagcgatgaagcccgaggagcctccgcagaatctcctcagggagaaaatcatgaaactgcccttacccgaaagtcttaaggcctaccttacatatttcagggacaagtag

SEQ ID NO: 105708 - DNA, 3681 bp, Artificial Sequence
  derived and/or modified sequence
tctcccggccttgttgactttggcgtccgcggggagctgcccctgtgcccgtggttctctgcgcatgcccggaccccggcggctccggagtccgggaggctctggctgctccagtcgcgggtccgggccccgcctctccactcggcggtggcgtccgtgttgttattgtggtggtagcggcgtctggctgctgcggaccccgccgagtcctagcgcctggcctgcgcgccgctgcccgcgccacagatttgagttctgtgaacctgcatttgttgttggtaattgcctccagatagcttctgacagtcatcagtatgatcgaatttattgtggagctggagtgcagaaagaccatgaaaactacatgaaaatattactaaaagttggaggcatattagtcatgcctatagaggatcagttaacacagattatgcgaactggacagaacacttgggaaagtaaaaatatccttgctgtttcatttgctccacttgtgcaaccaagtaagaatgataatggcaaaccagattctgtgggactccctccctgtgctgtcaggaatctacaggacttggctcgtatttacattcgacgcacacttagaaatttcataaatgatgagatgcaggccaaggggattcctcaaagggctccacccaaaaggaaaagaaagagagttaaacagagaattaacacttacgtatttgtgggtaatcagcttattcctcagcctctagacagtgaagaggatgaaaaaatggaagaggataacaaagaagaggaggaaaaagatcacaatgaagcaatgaagccagaggagccacctcaaaatttactgagagaaaaaatcatgaagctgcccctccctgaatctttaaaagcttacttgacatattttagagacaaataacttagatcaagaagaaaaatgcctactgataattcctttagtcttgaaaatgtagcatttgttaggagttaaaagagagaattatttctttcatcagagcaaattatagtggaaaaaaaatcacttgtttctgtcagtaacacaaatgatgtattcagtgaataaaagaatcccttttataaaatctatttttctttaaatcttggaaaaatgttgttttagctcagagtgatttcaaagtggaatgcaacagtagtcaagacttgtgtactataaatccttttctgattccttacagatttgtagtgatgaggtttagatttaattttatatatggtttaaataattgttaagcttatataacctgatctgaattgcagttgtttgcatttcctctatgaaaacttcatttatctaataaggaagtcaaatgctttgtagactatttaccttacttttgttgcaatcactgttgttgggttgctgtatatatattccgggcaatatatgagtgcaataacaatacaagatattgaataatttagctttaaaaaatcccacaaattttatgaaattttacagccctgctacttttgcttttgaatctcttgccaaaagacatgggtaaaatatctgcctctctcatagagattttaagagcacagcaagtgaattattaaaacaaagtctatacttaatacaactctttatatggaccctttacattttcagtatttaaaaaaatgaggttatcttaactctatagaattttaaaagtatatttagaattgttttttctgtagttcactgtataaagtatttggttttttaaaaaaagcaaaaccattgttatgtgtgactcttgataggacacagaacgagtgaatgagcatgagtgaggccactttcttggatggctgtaagtagcagggccagggtagacctggtcagcggatgcactttagcagatggaacttctagtttatctgaatatttatctttgacaaggtagggctgagcctacatttgcttttgatctatctagtataagaaatattcacagaaattgtatgtagataccctttgttttgaaaatgctgttcagaatcatagtgtaatctttgggacctatgccatgttcatttcactccttcccatattttttgtgtttcttttggtaaaactataatggttttcattttttacttaatatcacacagttaaactgtccatatttgagctttattttagcttatcagtgataaaaaacaggtagtaactgccattgtttgtttgttttcctaataaggcctgaaaacagccattccttgttaagaaagtgtacaatgtaacatatttgctagagttacatggattatatatttcttaaagggaaaaatttgagagtatcatggactaccaccagcattattattacagtagttactcagatttggttaaggaagcccaagcaatgtatagtgaaaggattattatctctctgctaagattcagatattgtttcagaaatctcagctccagtaattccacaacatctaaaaacaaatgtttgtgatcatgtgtaagcatgaaattgttccaagtaagtgaggatattttagttatgtgaaagacagtttcatggaaggtatttgttttataccagtggctgggatggtggaattggggttatttctacaattattcttagacgattactaaactgttaagaaatgccccatatcatttttgtatctaggaaagaaaaaaatcagtttcatactgttgtcatctgtcagaaatgctcattttattttgaattaaatgtggcttttgaagtacctagttaccttgaattcctggtgaccacatgtttttatctggaaaacctggagaaagttatctgtcccatctcccctgcttgtttttttttttttttttggttggagctgctgtttagatgatgcttttactatgcaggagagagtttttgttaaggatatatttgaagattggcttttccatattgtccttcattctttgaccatggcaaagtgtacagtagattttcatgatcattgcatatttcttgtcattgaaatgtatcttttatgtttttaaatgcattcattttacacttgtgagtttatcattgactttaagaggtagaaatgaaaaatgaaaattaaagctaaagcctttttatctattaatgcagatatattagaataagaatattttgggtttgtgtttattttttaatgaatttatgtttacttgatatggaaaattacgctttataggtggaaaagtagcaaataaagattaagtaaaagtaagtgaaaatgatggggaatatagtattggaattttatagctagttaaaacagtaagtatcatctaatttgggtgtttattttgcagatgagaaaacagacctagaaccgtggcatgttttgcctgaaacatacagtgagttagagacagggcctaagatagcttctagcatcagatcaatcccaagaatccatcagcaacctcagaccaacccaagaagataatttaaatctatactgcttattggtcaatatatttggttctagtattaataaagaaaaatgttattaaaatagcatacatagtagtaaaataaaatacaaaaagtgtgttgatttatagctgtttgagatgataaaagtgaagcaaagcctgttaaatcattggaagacttggaaaattattttaaataaacaattacatgtaattaagca

SEQ ID NO: 105709 - protein, 1315 aa, Artificial Sequence
  derived and/or modified sequence
  misc_feature (1)..(1): Xaa can be any naturally occurring amino acid
XPVATQEPDVQGRCECQDGIPGDEGLELRSADSAVPVAMTQAAVRPWAPCLENMTTAPNGLGPGPAAPCAGSDLKDAKMVTSLACGNGVCGCSPGGDTDTQEAKLSPAKLVRLFSTSRKRTGAHPERPHSMVLVGNSSTWNTLASFRKMGSFKKLKSSVLKGIQSREGSNACSKGEASEHGLGKSIPNGAVPGAQASRGSPLAPGPACGALRPAEWGTLDGSDLEDTDDAFQRSTHRSRSLRRAYGLGRICLLDAPQNHATPTIATGQVPAVCEILVRDPENNSMGYRRSKSTDNLAFLKKSSFKRKSTSNLADLRTAHDARVPQRTLSSSSTDSQKLGSGRTKRWRSPIRAKDFDRVFKLVSNVTEAAWRRESPRSGAPSPGEASLRLQAHSRLHDDYSRRVSRSTEQDSRRGGAVMHGTTATCTVAPGFGSATSKGPHLDADTAVFPLETKSSWAVESDSSCTCSSLPSPIVQDVLSKDSCDPNAGSQLTFDPEQPPTPLRPTTPKPQSPQSPQSPGAGSASCHSNHSALSANSEESEGRAEEPAQREPGPVSLQDPLEATHGDEGSKDLLVNIGVAAGPEEKEKEEVVPDGPWRRSSSQDEERTEAQRTPKRRWGSGRRPRPRPFSDYGQLASRSLSIPEDSVAADPQKEDRVDEDPQASMTSASPEDQNAPVGCPKGARRRRPISVIGGVSLYGTNQTEELDNLLTQPASRPPMPAHQVPPYKAVSARFRPFTFSQSTPIGLDRVGRRRQMRASNVSSDGGTEPSALVDDNGSEEDFSYEDLCQASPRYLQPGGEQLAINELISDGNVVCAEALWDHVTMDDQELGFKAGDVIQVLEASNKDWWWGRSEDKEAWFPASFVRLRVNQEELSENSSSTPSEEQDEEASQSRHRHCENKQQMRTNVIREIMDTERVYIKHLRDICEGYIRQCRKHTGMFTVAQLATIFGNIEDIYKFQRKFLKDLEKQYNKEEPHLSEIGSCFLQNQEGFAIYSEYCNNHPGACLELANLMKQGKYRHFFEACRLLQQMIDIAIDGFLLTPVQKICKYPLQLAELLKYTTQEHGDYSNIKAAYEAMKNVACLINERKRKLESIDKIARWQVSIVGWEGLDILDRSSELIHSGELTKITKQGKSQQRTFFLFDHQLVSCKKDLLRRDMLYYKGRLDMDEMELVDLGDGRDKDCNLSVKNAFKLVSRTTDEVYLFCAKKQEDKARWLQACADERRRVQEDKEMGMEISENQKKLAMLNAQKAGHGKSKGYNRCPVAPPHQGLHPIHQRHITMPTSVPQQQVFGLAEPKRKSSLFWHTFNRLTPFRK

SEQ ID NO: 105710 - protein, 616 aa, Artificial Sequence
  derived and/or modified sequence
MPAHQVPPYKAVSARFRPFTFSQSTPIGLDRVGRRRQMRASNVSSDGGTEPSALVDDNGSEEDFSYEDLCQASPRYLQPGGEQLAINELISDGNVVCAEALWDHVTMDDQELGFKAGDVIQVLEASNKDWWWGRSEDKEAWFPASFVRLRVNQEELSENSSSTPSEEQDEEASQSRHRHCENKQQMRTNVIREIMDTERVYIKHLRDICEGYIRQCRKHTGMFTVAQLATIFGNIEDIYKFQRKFLKDLEKQYNKEEPHLSEIGSCFLQNQEGFAIYSEYCNNHPGACLELANLMKQGKYRHFFEACRLLQQMIDIAIDGFLLTPVQKICKYPLQLAELLKYTTQEHGDYSNIKAAYEAMKNVACLINERKRKLESIDKIARWQVSIVGWEGLDILDRSSELIHSGELTKITKQGKSQQRTFFLFDHQLVSCKKDLLRRDMLYYKGRLDMDEMELVDLGDGRDKDCNLSVKNAFKLVSRTTDEVYLFCAKKQEDKARWLQACADERRRVQEDKEMGMEISENQKKLAMLNAQKAGHGKSKVRLQQVPCGPTAPGPAPHPPAPHHYAHKRPPAAGLWPGGTQEEVLALLAHLQQAHPLPEMKTGGCASMELGVKRRN

SEQ ID NO: 105711 - DNA, 3834 bp, Artificial Sequence
  derived and/or modified sequence
atgacccaggccgccgtgagaccctgggccccctgcctggagaacatgaccaccgcccccaacggcctgggccccggccccgccgccccctgcgccggcagcgacctgaaggacgccaagatggtgaccagcctggcctgcggcaacggcgtgtgcggctgcagccccggcggcgacaccgacacccaggaggccaagctgagccccgccaagctggtgagactgttcagcaccagcagaaagagaaccggcgcccaccccgagagaccccacagcatggtgctggtgggcaacagcagcacctggaacaccctggccagcttcagaaagatgggcagcttcaagaagctgaagagcagcgtgctgaagggcatccagagcagagagggcagcaacgcctgcagcaagggcgaggccagcgagcacggcctgggcaagagcatccccaacggcgccgtgcccggcgcccaggccagcagaggcagccccctggcccccggccccgcctgcggcgccctgagacccgccgagtggggcaccctggacggcagcgacctggaggacaccgacgacgccttccagagaagcacccacagaagcagaagcctgagaagagcctacggcctgggcagaatctgcctgctggacgccccccagaaccacgccacccccaccatcgccaccggccaggtgcccgccgtgtgcgagatcctggtgagagaccccgagaacaacagcatgggctacagaagaagcaagagcaccgacaacctggccttcctgaagaagagcagcttcaagagaaagagcaccagcaacctggccgacctgagaaccgcccacgacgccagagtgccccagagaaccctgagcagcagcagcaccgacagccagaagctgggcagcggcagaaccaagagatggagaagccccatcagagccaaggacttcgacagagtgttcaagctggtgagcaacgtgaccgaggccgcctggagaagagagagccccagaagcggcgcccccagccccggcgaggccagcctgagactgcaggcccacagcagactgcacgacgactacagcagaagagtgagcagaagcaccgagcaggacagcagaagaggcggcgccgtgatgcacggcaccaccgccacctgcaccgtggcccccggcttcggcagcgccaccagcaagggcccccacctggacgccgacaccgccgtgttccccctggagaccaagagcagctgggccgtggagagcgacagcagctgcacctgcagcagcctgcccagccccatcgtgcaggacgtgctgagcaaggacagctgcgaccccaacgccggcagccagctgaccttcgaccccgagcagccccccacccccctgagacccaccacccccaagccccagagcccccagagcccccagagccccggcgccggcagcgccagctgccacagcaaccacagcgccctgagcgccaacagcgaggagagcgagggcagagccgaggagcccgcccagagagagcccggccccgtgagcctgcaggaccccctggaggccacccacggcgacgagggcagcaaggacctgctggtgaacatcggcgtggccgccggccccgaggagaaggagaaggaggaggtggtgcccgacggcccctggagaagaagcagcagccaggacgaggagagaaccgaggcccagagaacccccaagagaagatggggcagcggcagaagacccagacccagacccttcagcgactacggccagctggccagcagaagcctgagcatccccgaggacagcgtggccgccgacccccagaaggaggacagagtggacgaggacccccaggccagcatgaccagcgccagccccgaggaccagaacgcccccgtgggctgccccaagggcgccagaagaagaagacccatcagcgtgatcggcggcgtgagcctgtacggcaccaaccagaccgaggagctggacaacctgctgacccagcccgccagcagaccccccatgcccgcccaccaggtgcccccctacaaggccgtgagcgccagattcagacccttcaccttcagccagagcacccccatcggcctggacagagtgggcagaagaagacagatgagagccagcaacgtgagcagcgacggcggcaccgagcccagcgccctggtggacgacaacggcagcgaggaggacttcagctacgaggacctgtgccaggccagccccagatacctgcagcccggcggcgagcagctggccatcaacgagctgatcagcgacggcaacgtggtgtgcgccgaggccctgtgggaccacgtgaccatggacgaccaggagctgggcttcaaggccggcgacgtgatccaggtgctggaggccagcaacaaggactggtggtggggcagaagcgaggacaaggaggcctggttccccgccagcttcgtgagactgagagtgaaccaggaggagctgagcgagaacagcagcagcacccccagcgaggagcaggacgaggaggccagccagagcagacacagacactgcgagaacaagcagcagatgagaaccaacgtgatcagagagatcatggacaccgagagagtgtacatcaagcacctgagagacatctgcgagggctacatcagacagtgcagaaagcacaccggcatgttcaccgtggcccagctggccaccatcttcggcaacatcgaggacatctacaagttccagagaaagttcctgaaggacctggagaagcagtacaacaaggaggagccccacctgagcgagatcggcagctgcttcctgcagaaccaggagggcttcgccatctacagcgagtactgcaacaaccaccccggcgcctgcctggagctggccaacctgatgaagcagggcaagtacagacacttcttcgaggcctgcagactgctgcagcagatgatcgacatcgccatcgacggcttcctgctgacccccgtgcagaagatctgcaagtaccccctgcagctggccgagctgctgaagtacaccacccaggagcacggcgactacagcaacatcaaggccgcctacgaggccatgaagaacgtggcctgcctgatcaacgagagaaagagaaagctggagagcatcgacaagatcgccagatggcaggtgagcatcgtgggctgggagggcctggacatcctggacagaagcagcgagctgatccacagcggcgagctgaccaagatcaccaagcagggcaagagccagcagagaaccttcttcctgttcgaccaccagctggtgagctgcaagaaggacctgctgagaagagacatgctgtactacaagggcagactggacatggacgagatggagctggtggacctgggcgacggcagagacaaggactgcaacctgagcgtgaagaacgccttcaagctggtgagcagaaccaccgacgaggtgtacctgttctgcgccaagaagcaggaggacaaggccagatggctgcaggcctgcgccgacgagagaagaagagtgcaggaggacaaggagatgggcatggagatcagcgagaaccagaagaagctggccatgctgaacgcccagaaggccggccacggcaagagcaagggctacaacagatgccccgtggcccccccccaccagggcctgcaccccatccaccagagacacatcaccatgcccaccagcgtgccccagcagcaggtgttcggcctggccgagcccaagagaaagagcagcctgttctggcacaccttcaacagactgacccccttcagaaagtag

SEQ ID NO: 105712 - DNA, 3948 bp, Artificial Sequence
  derived and/or modified sequence
tgacccgtggccacccaggagcccgacgtgcagggcagatgcgagtgccaggacggcatccccggcgacgagggcctggagctgagaagcgccgacagcgccgtgcccgtggccatgacccaggccgccgtgagaccctgggccccctgcctggagaacatgaccaccgcccccaacggcctgggccccggccccgccgccccctgcgccggcagcgacctgaaggacgccaagatggtgaccagcctggcctgcggcaacggcgtgtgcggctgcagccccggcggcgacaccgacacccaggaggccaagctgagccccgccaagctggtgagactgttcagcaccagcagaaagagaaccggcgcccaccccgagagaccccacagcatggtgctggtgggcaacagcagcacctggaacaccctggccagcttcagaaagatgggcagcttcaagaagctgaagagcagcgtgctgaagggcatccagagcagagagggcagcaacgcctgcagcaagggcgaggccagcgagcacggcctgggcaagagcatccccaacggcgccgtgcccggcgcccaggccagcagaggcagccccctggcccccggccccgcctgcggcgccctgagacccgccgagtggggcaccctggacggcagcgacctggaggacaccgacgacgccttccagagaagcacccacagaagcagaagcctgagaagagcctacggcctgggcagaatctgcctgctggacgccccccagaaccacgccacccccaccatcgccaccggccaggtgcccgccgtgtgcgagatcctggtgagagaccccgagaacaacagcatgggctacagaagaagcaagagcaccgacaacctggccttcctgaagaagagcagcttcaagagaaagagcaccagcaacctggccgacctgagaaccgcccacgacgccagagtgccccagagaaccctgagcagcagcagcaccgacagccagaagctgggcagcggcagaaccaagagatggagaagccccatcagagccaaggacttcgacagagtgttcaagctggtgagcaacgtgaccgaggccgcctggagaagagagagccccagaagcggcgcccccagccccggcgaggccagcctgagactgcaggcccacagcagactgcacgacgactacagcagaagagtgagcagaagcaccgagcaggacagcagaagaggcggcgccgtgatgcacggcaccaccgccacctgcaccgtggcccccggcttcggcagcgccaccagcaagggcccccacctggacgccgacaccgccgtgttccccctggagaccaagagcagctgggccgtggagagcgacagcagctgcacctgcagcagcctgcccagccccatcgtgcaggacgtgctgagcaaggacagctgcgaccccaacgccggcagccagctgaccttcgaccccgagcagccccccacccccctgagacccaccacccccaagccccagagcccccagagcccccagagccccggcgccggcagcgccagctgccacagcaaccacagcgccctgagcgccaacagcgaggagagcgagggcagagccgaggagcccgcccagagagagcccggccccgtgagcctgcaggaccccctggaggccacccacggcgacgagggcagcaaggacctgctggtgaacatcggcgtggccgccggccccgaggagaaggagaaggaggaggtggtgcccgacggcccctggagaagaagcagcagccaggacgaggagagaaccgaggcccagagaacccccaagagaagatggggcagcggcagaagacccagacccagacccttcagcgactacggccagctggccagcagaagcctgagcatccccgaggacagcgtggccgccgacccccagaaggaggacagagtggacgaggacccccaggccagcatgaccagcgccagccccgaggaccagaacgcccccgtgggctgccccaagggcgccagaagaagaagacccatcagcgtgatcggcggcgtgagcctgtacggcaccaaccagaccgaggagctggacaacctgctgacccagcccgccagcagaccccccatgcccgcccaccaggtgcccccctacaaggccgtgagcgccagattcagacccttcaccttcagccagagcacccccatcggcctggacagagtgggcagaagaagacagatgagagccagcaacgtgagcagcgacggcggcaccgagcccagcgccctggtggacgacaacggcagcgaggaggacttcagctacgaggacctgtgccaggccagccccagatacctgcagcccggcggcgagcagctggccatcaacgagctgatcagcgacggcaacgtggtgtgcgccgaggccctgtgggaccacgtgaccatggacgaccaggagctgggcttcaaggccggcgacgtgatccaggtgctggaggccagcaacaaggactggtggtggggcagaagcgaggacaaggaggcctggttccccgccagcttcgtgagactgagagtgaaccaggaggagctgagcgagaacagcagcagcacccccagcgaggagcaggacgaggaggccagccagagcagacacagacactgcgagaacaagcagcagatgagaaccaacgtgatcagagagatcatggacaccgagagagtgtacatcaagcacctgagagacatctgcgagggctacatcagacagtgcagaaagcacaccggcatgttcaccgtggcccagctggccaccatcttcggcaacatcgaggacatctacaagttccagagaaagttcctgaaggacctggagaagcagtacaacaaggaggagccccacctgagcgagatcggcagctgcttcctgcagaaccaggagggcttcgccatctacagcgagtactgcaacaaccaccccggcgcctgcctggagctggccaacctgatgaagcagggcaagtacagacacttcttcgaggcctgcagactgctgcagcagatgatcgacatcgccatcgacggcttcctgctgacccccgtgcagaagatctgcaagtaccccctgcagctggccgagctgctgaagtacaccacccaggagcacggcgactacagcaacatcaaggccgcctacgaggccatgaagaacgtggcctgcctgatcaacgagagaaagagaaagctggagagcatcgacaagatcgccagatggcaggtgagcatcgtgggctgggagggcctggacatcctggacagaagcagcgagctgatccacagcggcgagctgaccaagatcaccaagcagggcaagagccagcagagaaccttcttcctgttcgaccaccagctggtgagctgcaagaaggacctgctgagaagagacatgctgtactacaagggcagactggacatggacgagatggagctggtggacctgggcgacggcagagacaaggactgcaacctgagcgtgaagaacgccttcaagctggtgagcagaaccaccgacgaggtgtacctgttctgcgccaagaagcaggaggacaaggccagatggctgcaggcctgcgccgacgagagaagaagagtgcaggaggacaaggagatgggcatggagatcagcgagaaccagaagaagctggccatgctgaacgcccagaaggccggccacggcaagagcaagggctacaacagatgccccgtggcccccccccaccagggcctgcaccccatccaccagagacacatcaccatgcccaccagcgtgccccagcagcaggtgttcggcctggccgagcccaagagaaagagcagcctgttctggcacaccttcaacagactgacccccttcagaaagtag

SEQ ID NO: 105713 - DNA, 3834 bp, Artificial Sequence
  derived and/or modified sequence
atgacgcaagcagcggttcggccctgggcgccgtgtttggaaaacatgactacagcaccaaacggtcttggacccggaccagctgcaccatgtgccggctctgacctcaaggatgccaagatggtcaccagcctcgcatgcggcaacggcgtctgtggctgttcacccggaggagatactgacacccaggaagcaaaactctcaccggccaagctcgtgaggcttttttctaccagccggaaaagaactggagcccacccagagcggcctcatagtatggtgttggtcggcaactcgtctacatggaatacccttgcatcatttcgcaagatgggatcatttaagaagcttaagtctagtgtgctgaagggcatccagagtcgcgaaggttctaacgcctgctccaagggcgaggcatctgagcatgggctgggaaaaagcattccaaatggggctgtcccaggcgctcaggcctcacggggaagtcccctcgctccaggcccggcgtgtggcgcactgcgcccggcagagtggggaacacttgatggctccgatctggaggacacagatgatgcgttccagaggtcgacacaccgctcgagatctttgagacgggcttacggtctgggccgtatttgcctgcttgacgcgccacagaatcacgccacccccactatcgctactggccaagtccccgctgtctgtgaaattctggtgcgggacccagagaacaatagcatgggatataggaggagcaagagtacggataacttagcgttcctaaagaaatcttcttttaaaagaaaatctacgtccaacctcgcagatttgcgcactgctcatgacgcacgcgtgccacagagaaccctctcaagtagctcaactgacagtcagaaacttggcagtggccggaccaagcggtggcggtcacctatcagggcaaaggattttgaccgggtgttcaagctggtgagcaacgtgacggaggctgcttggcggagagagagcccaaggtctggtgcaccatcgccaggcgaggcatcactgaggctgcaggctcactctcggttgcacgacgactattccaggcgtgtgagccggagtaccgaacaagattctagacgtggcggtgccgtgatgcatggcaccacggctacctgcaccgtagcgcccggcttcgggtctgcaacaagcaaaggtccgcatctggacgccgatacggctgtgttccctttagagacaaagagttcatgggcagtggaaagcgattccagttgtacctgctcctcactgccaagtcccatcgtacaggatgtgctgtctaaagactcctgtgatccgaatgctggttctcagctgacctttgaccctgagcagccccccaccccgctacggccgaccactcccaaaccccagagccctcaatctcctcagagtcccggcgcgggctctgcatcatgtcattccaaccacagcgccctgtccgccaactcggaggagtccgaagggcgggccgaggagcccgcccaaagggagcccggacctgtgtctttacaagacccactagaggccacccacggagacgagggctctaaagaccttctcgtcaatatcggggttgctgccgggccagaggagaaggagaaggaggaagtcgttccggacggcccctggagacgcagctcttctcaggacgaagaacggaccgaagcacagcgcaccccgaagcgacgctggggctcaggaaggcgaccccgcccacgcccattttcagactatggacaacttgcgtctcggtccctctcaatacccgaggacagtgttgctgcagatcctcagaaggaggacagagttgatgaagacccccaggctagcatgaccagcgctagccctgaggaccagaacgccccagtgggctgtcctaagggggcaaggaggaggcggccaatcagtgtcatcggaggagtgagtctttacggtaccaatcagacagaggaactggacaatctgctgacgcagcccgcctcaagaccacctatgcccgctcaccaggttcctccttacaaggcagtttccgcccggttccgcccatttacattttctcagagtacgcccatagggcttgatagagtcgggaggcggcggcagatgcgtgccagcaatgtgtcctctgacggcggtacagaaccatcggccttagtggacgacaatggatctgaggaggacttctcatacgaggacctgtgccaagcaagcccaaggtatctgcagccaggaggtgaacagctcgccatcaatgagctgatatccgacggcaatgtcgtttgtgccgaggcgctgtgggatcacgtgaccatggacgatcaggaactcgggttcaaggctggggacgtgatccaagtactcgaagcctcgaacaaggattggtggtggggcagatccgaagataaagaagcttggtttcctgcttcttttgtcagactccgcgttaaccaagaggagctgagcgaaaactctagtagcactccctcagaagaacaagacgaagaggcgagccagagccggcaccggcactgtgagaacaagcagcagatgaggactaacgttatccgggagattatggatactgagcgggtgtatataaaacatctgagagacatctgcgagggatatatccgccagtgccggaagcataccggaatgtttacagtcgcgcaattggcgaccatcttcggcaacatagaggatatatataaattccaaagaaagttcctcaaagacctggaaaaacagtacaataaggaggaaccccatctgtccgagattggcagctgctttctgcagaatcaagaaggattcgctatctacagcgagtattgtaataatcaccccggcgcttgtttggaactcgccaatttgatgaagcagggaaagtatcgccacttcttcgaggcctgtcgtctactacagcaaatgattgatatcgctattgatggcttcctgcttacccccgtgcagaaaatttgcaaataccccttacaactggccgaattactgaagtatacaacacaggaacacggagactactctaacatcaaggccgcctatgaagcaatgaaaaatgtggcctgcctgatcaatgaaaggaagcgcaaactggagtccatcgataaaatcgcccgttggcaggtgagcatagttggttgggagggtctagatatcctggacagaagttccgaacttattcacagcggcgagcttaccaagatcacgaaacagggcaaaagtcaacagcggacgtttttcctatttgatcatcagctggtttcatgtaaaaaggacttgctccgtagggacatgctgtactataagggcagattagacatggatgaaatggaacttgtggatttaggtgatgggagggacaaggattgtaatctcagcgtcaaaaatgccttcaaactcgtcagcagaaccacagatgaggtttatctgttttgcgcaaaaaaacaggaagataaggcccgctggctgcaagcgtgcgctgatgaaagaaggcgcgtgcaagaggataaagaaatgggaatggaaattagtgagaaccagaagaaattggccatgcttaacgcgcagaaagccggacatgggaaatccaagggctacaaccggtgccctgtcgcgcctcctcaccagggactccatcctatacaccagcggcatattactatgcccacctccgtcccccagcagcaggtcttcggcttggccgaaccaaagcgaaagtcttcccttttctggcacacctttaaccggctcactccatttagaaagtag

SEQ ID NO: 105714 - DNA, 3948 bp, Artificial Sequence
  derived and/or modified sequence
tgacccgtggcaactcaggaacccgatgtacaggggaggtgtgagtgtcaagacgggatcccaggcgatgaaggcctggagctcaggagcgcagattccgcagtcccggtagccatgacacaagcagccgttaggccttgggccccatgtctggagaacatgacaactgctcccaatggactgggccccgggcctgcagctccatgcgctgggtctgatctgaaggatgctaaaatggtgacctccttagcgtgtggcaacggggtatgcggctgttcccccggcggagacaccgacacacaggaagctaaattgtcgcctgctaaattagtgcggttgttctcaacctcgagaaagcgaacgggagcccaccccgaaaggcctcacagcatggtgttagttgggaacagtagcacatggaatactttggctagttttagaaaaatgggatcctttaaaaagctgaagagctccgttctgaaaggcattcaatccagggagggaagtaacgcttgttccaagggggaggcgagcgaacacggactcggcaagtccattcctaacggcgccgtccccggggcacaggcttcaagaggaagcccgctcgctcccggtccagcctgcggtgccctgcggcccgctgagtggggtacactggatggctctgacctcgaggatacggatgacgcttttcagcggtccacccaccgcagccgatcacttaggcgggcatacggcctgggaaggatctgtttattagatgctccccagaaccacgccacgccaaccatcgccactgggcaagtgcccgctgtgtgtgaaatactcgtacgagacccagagaacaattctatgggctataggaggtccaaaagcacggacaatctggcattcttaaaaaagtcatcgtttaagagaaagtctacttccaatctggctgatcttcgcacagcccacgacgcgagggtgccccaaagaactctgagctcctcaagtactgatagccaaaagctgggatccggtcggaccaagaggtggaggtctccaatccgcgctaaggactttgacagggttttcaagcttgtatccaatgtgacggaagcggcctggagacgagagtccccaagatccggtgccccttcaccaggcgaagcaagcctgagattgcaagcacattcccggctccacgatgactactctcgccgcgtaagcagatcaacagaacaggacagccggagggggggtgcggtaatgcacggtaccacagccacctgtactgtcgccccggggttcggatcagccactagcaaggggccccacctcgacgccgatactgcagtctttcctctggaaaccaagagtagttgggctgttgagtccgatagtagctgcacttgctcttcattgccctcccctattgttcaggacgttctgtccaaagattcatgcgacccaaacgccggcagtcagctgacctttgaccctgagcaacccccaacgcccctgcggccaacgacgccaaaaccgcaaagcccccagtcccctcagtcacctggagcaggaagtgcctcatgtcactccaaccacagcgccctgtccgccaatagcgaagagagcgagggtcgggctgaggaacccgcgcaacgtgaaccgggccccgtgagcctccaagacccgttggaggccacacacggagatgagggatccaaggacctactcgtgaatatcggcgtggcggcagggcctgaggagaaagagaaggaggaggtggtcccagacgggccatggcgacgctcttcaagccaggatgaggagcgaactgaagcgcagaggacccctaaacgccggtgggggagtgggcgtagacccaggcctcggcccttttcagattacggtcaactggccagccgttcgttatccattccggaagacagcgttgccgccgaccctcagaaggaggatagagtggatgaggacccacaggcgtccatgaccagtgcctcccccgaagatcaaaatgctcctgtcggctgtccaaagggagcgcggcgaagacggcccatttctgtgatcggaggagtgtcattgtacgggaccaaccagactgaagagctggataatctgttgacgcagcccgcaagtagaccacccatgcccgctcatcaggtgcccccttacaaagcggttagcgcacgatttcgtccttttactttcagtcaatcaacacccatcgggctggaccgagtcggccggagaagacagatgagagcgtcaaacgtgtcctctgatggtggtacagagcctagcgcactcgtcgatgataatggatccgaggaagactttagctacgaggatctttgccaggctagccccaggtacctccagcctggtggggaacagttggcaatcaatgagctcatcagcgacgggaatgtcgtctgtgcggaggccttatgggatcatgtcaccatggatgatcaggagctaggcttcaaagccggagacgtgatacaggtgctggaggcatctaataaagattggtggtggggcaggagtgaggacaaagaagcctggtttcctgcatcctttgttcgattacgggtaaaccaggaggaactgtccgagaactcttccagcaccccatccgaggagcaggatgaggaagcctcgcaatctcgccaccgccattgcgagaacaagcagcagatgcgcaccaacgtcatccgggaaattatggacaccgagagagtttacataaaacacctaagggatatctgcgaaggatatattaggcagtgccggaaacatacagggatgtttaccgtcgcacagctagccactatcttcgggaatattgaagacatctataagtttcaacgcaaatttcttaaagacttagaaaaacagtataacaaggaggagccgcatctaagcgaaatcggaagctgcttcctgcaaaaccaggaaggatttgcgatctacagcgagtattgcaacaaccaccctggggcatgcctggagttggcgaacctgatgaaacagggcaaatacaggcatttctttgaggcttgccgtctgctacagcagatgatcgatattgcaatcgatggtttcctgcttactcctgtgcaaaaaatctgcaagtaccccctccagctcgcagagctgcttaaatatacgacacaggagcacggtgactattctaacattaaagcggcatatgaggccatgaagaatgtggcctgtttgataaacgagcggaaacggaagctggagtcaatcgataagatcgctcggtggcaggtttctattgtggggtgggaagggctggacattctggatcgttctagtgagttgatccatagcggtgaattaaccaagattactaagcagggtaagtcgcagcaaaggacttttttcctgttcgatcatcagctggtgtcgtgcaagaaggatttgctgcggagggatatgctgtactataaagggagactagacatggatgagatggagctggttgacctcggagatgggcgagacaaagactgtaacttatccgttaagaacgcctttaaactggtaagtaggacaactgacgaagtgtatttattttgtgccaagaaacaggaggataaggctaggtggctgcaggcctgtgcagatgagagacgccgcgtacaggaggacaaagagatgggcatggagatcagcgagaatcagaagaagctcgctatgctgaatgcgcagaaggcgggtcatggcaagagtaaaggatacaaccgatgtccggtggcccccccacatcaaggtctgcacccaatacaccaaaggcatattacaatgcctacttctgtgccacagcagcaggtttttggtcttgcagaaccaaaacgcaaatctagccttttctggcatactttcaacagactcaccccttttcgcaaatag

SEQ ID NO: 105715 - DNA, 3834 bp, Artificial Sequence
  derived and/or modified sequence
atgacccaggccgctgtgcggccctgggccccctgcctggagaacatgaccacagccccaaatggcctgggccctggccctgctgccccctgtgccggcagtgacctgaaggatgccaagatggtgaccagcctggcctgtggaaatggagtgtgtggctgcagccctggaggagacacagacacccaggaggccaagctgagccctgccaagctggtgcggctcttcagcaccagcaggaagaggactggagcccaccctgagcggccccacagcatggtgctggtgggcaacagcagcacctggaacaccctggccagcttcaggaagatgggcagcttcaagaagctgaagagctctgtgctgaagggcatccagagccgggagggcagcaatgcctgcagcaagggggaggccagcgagcacggcctgggcaagagcatccccaacggggctgtgcctggggcccaggccagccggggcagccccctggcccctggccctgcctgtggggccctgcggcctgctgagtggggcaccctggatggcagtgacctggaggacacagatgatgccttccagaggagcacccacaggagccgcagcctgcggcgggcctacggcctgggccgcatctgcctgctggatgccccccagaaccacgccacccccaccatcgccaccggccaggtgcctgctgtgtgtgagatcctggtgcgggaccctgagaacaacagcatgggctaccgccgcagcaagagcacagacaacctggccttcctgaagaagagcagcttcaagaggaagagcaccagcaacctggccgacctgaggacagcccatgatgcccgggtgccccagaggaccctgagcagcagcagcacagacagccagaagctgggcagcggccgcaccaagcgctggaggagccccatccgggccaaggactttgacagagtcttcaagctggtgtccaatgtgacagaggccgcctggaggcgggagagccccaggtctggggcccccagccctggagaggccagcctgcggctgcaggcccacagccggctgcatgatgactacagcagaagagtgagccgcagcacagagcaggacagccggcggggcggcgctgtgatgcacggcaccacagccacctgcaccgtggcccctggctttggaagtgccaccagcaagggcccccacctggatgctgacacagctgtgttccccctggagaccaagagctcctgggccgtggagagtgacagcagctgcacctgcagcagcctgcccagccccatcgtgcaggatgtgctgagcaaggacagctgtgaccccaatgccggcagccagctgacctttgatcctgagcagccccccacccccctgcggcccaccacccccaagccccagagcccccagagcccccagagccctggggccggcagcgccagctgccacagcaaccacagcgccctgagcgccaacagcgaggagagcgagggccgggcagaggagcccgcccagcgggagcccggccctgtgtccctgcaggaccccctggaggccacccatggagatgagggcagcaaggacctgctggtgaacatcggcgtggccgccggccctgaggagaaggagaaggaggaggtggtgcctgatggcccctggaggaggagcagcagccaggatgaggagaggacagaggcccagaggacccccaagaggcgctggggcagcggcagaagaccccggccccggcccttcagtgactatggccagctggccagccgcagcctgagcatcccagaagattctgtggccgctgacccccagaaggaggacagagtggatgaggacccccaggcctccatgaccagcgccagccctgaggaccagaatgcccctgtgggctgccccaagggggccaggagaagaagacccatctctgtgattggaggagtgtccctgtatggcaccaaccagacagaggagctggacaacctgctgacccagcctgccagccggccccccatgcctgcccaccaggtgcccccctacaaggctgtgtctgcccgcttccggcccttcaccttcagccagagcacccccatcggcctggacagagtgggcagaagacggcagatgagggccagcaatgtgtccagtgatggcggcacagagcccagcgccctggtggatgacaatggaagtgaggaggacttctcctatgaggacctgtgccaggccagcccccgctacctgcagcccggcggggagcagctggccatcaatgagctgatcagtgatggaaatgtggtgtgtgccgaggccctgtgggaccacgtgaccatggatgaccaggagctgggcttcaaggctggagatgtgatccaggtgctggaggccagcaacaaggactggtggtggggccgctctgaggacaaggaggcctggttccctgccagctttgtgcggctgcgggtgaaccaggaggagctgtctgagaacagcagcagcacccccagcgaggagcaggatgaggaggccagccagagccgccaccgccactgtgagaacaagcagcagatgaggaccaacgtcatccgggagatcatggacacagagcgggtgtacatcaagcacctgcgggacatctgtgagggctacatccggcagtgcaggaagcacacaggcatgttcaccgtggcccagctggccaccatctttggaaatattgaggacatctacaagttccagaggaagttcctgaaggacctggagaagcagtacaacaaggaggagccccacctgtctgagatcggcagctgcttcctgcagaaccaggagggctttgccatctacagcgagtactgcaacaaccaccctggggcctgcctggagctggccaacctgatgaagcagggcaagtaccgccacttctttgaggcctgccgcctgctgcagcagatgattgatattgccattgatggcttcctgctgacccctgtgcagaagatctgcaagtaccccctgcagctggccgagctgctgaagtacaccacccaggagcacggggactacagcaacatcaaggccgcctatgaggccatgaagaatgtggcctgcctgatcaatgaaaggaagaggaagctggagagcattgacaagatcgcccgctggcaggtgtccatcgtgggctgggagggcctggacatcctggacaggagcagcgagctgatccacagcggggagctgaccaagatcaccaagcagggcaagagccagcagaggaccttcttcctgtttgaccaccagctggtgtcctgcaagaaggacctgctgcggcgggacatgctgtactacaagggccgcctggacatggatgagatggagctggtggacctgggagatggccgggacaaggactgcaacctgtctgtgaagaatgccttcaagctggtgtccaggaccacagatgaggtgtacctgttctgtgccaagaagcaggaggacaaggcccgctggctgcaggcctgtgctgatgaaagaagaagagtgcaggaggacaaggagatgggcatggagatcagcgagaaccagaagaagctggccatgctgaatgcccagaaggccggccacggcaagagcaagggctacaaccgctgccctgtggccccaccccaccagggcctgcaccccatccaccagaggcacatcaccatgcccacctctgtgccccagcagcaggtgtttggcctggccgagcccaagaggaagagcagcctcttctggcacaccttcaaccggctgacccccttcaggaagtag

SEQ ID NO: 105716 - DNA, 3948 bp, Artificial Sequence
  derived and/or modified sequence
tgacctgtggccacccaggagccagatgtgcagggccgctgtgagtgccaggacggcatccctggagatgagggcctggagctgcggtctgctgacagcgctgtgcctgtggccatgacccaggccgctgtgcggccctgggccccctgcctggagaacatgaccacagccccaaatggcctgggccctggccctgctgccccctgtgccggcagtgacctgaaggatgccaagatggtgaccagcctggcctgtggaaatggagtgtgtggctgcagccctggaggagacacagacacccaggaggccaagctgagccctgccaagctggtgcggctcttcagcaccagcaggaagaggactggagcccaccctgagcggccccacagcatggtgctggtgggcaacagcagcacctggaacaccctggccagcttcaggaagatgggcagcttcaagaagctgaagagctctgtgctgaagggcatccagagccgggagggcagcaatgcctgcagcaagggggaggccagcgagcacggcctgggcaagagcatccccaacggggctgtgcctggggcccaggccagccggggcagccccctggcccctggccctgcctgtggggccctgcggcctgctgagtggggcaccctggatggcagtgacctggaggacacagatgatgccttccagaggagcacccacaggagccgcagcctgcggcgggcctacggcctgggccgcatctgcctgctggatgccccccagaaccacgccacccccaccatcgccaccggccaggtgcctgctgtgtgtgagatcctggtgcgggaccctgagaacaacagcatgggctaccgccgcagcaagagcacagacaacctggccttcctgaagaagagcagcttcaagaggaagagcaccagcaacctggccgacctgaggacagcccatgatgcccgggtgccccagaggaccctgagcagcagcagcacagacagccagaagctgggcagcggccgcaccaagcgctggaggagccccatccgggccaaggactttgacagagtcttcaagctggtgtccaatgtgacagaggccgcctggaggcgggagagccccaggtctggggcccccagccctggagaggccagcctgcggctgcaggcccacagccggctgcatgatgactacagcagaagagtgagccgcagcacagagcaggacagccggcggggcggcgctgtgatgcacggcaccacagccacctgcaccgtggcccctggctttggaagtgccaccagcaagggcccccacctggatgctgacacagctgtgttccccctggagaccaagagctcctgggccgtggagagtgacagcagctgcacctgcagcagcctgcccagccccatcgtgcaggatgtgctgagcaaggacagctgtgaccccaatgccggcagccagctgacctttgatcctgagcagccccccacccccctgcggcccaccacccccaagccccagagcccccagagcccccagagccctggggccggcagcgccagctgccacagcaaccacagcgccctgagcgccaacagcgaggagagcgagggccgggcagaggagcccgcccagcgggagcccggccctgtgtccctgcaggaccccctggaggccacccatggagatgagggcagcaaggacctgctggtgaacatcggcgtggccgccggccctgaggagaaggagaaggaggaggtggtgcctgatggcccctggaggaggagcagcagccaggatgaggagaggacagaggcccagaggacccccaagaggcgctggggcagcggcagaagaccccggccccggcccttcagtgactatggccagctggccagccgcagcctgagcatcccagaagattctgtggccgctgacccccagaaggaggacagagtggatgaggacccccaggcctccatgaccagcgccagccctgaggaccagaatgcccctgtgggctgccccaagggggccaggagaagaagacccatctctgtgattggaggagtgtccctgtatggcaccaaccagacagaggagctggacaacctgctgacccagcctgccagccggccccccatgcctgcccaccaggtgcccccctacaaggctgtgtctgcccgcttccggcccttcaccttcagccagagcacccccatcggcctggacagagtgggcagaagacggcagatgagggccagcaatgtgtccagtgatggcggcacagagcccagcgccctggtggatgacaatggaagtgaggaggacttctcctatgaggacctgtgccaggccagcccccgctacctgcagcccggcggggagcagctggccatcaatgagctgatcagtgatggaaatgtggtgtgtgccgaggccctgtgggaccacgtgaccatggatgaccaggagctgggcttcaaggctggagatgtgatccaggtgctggaggccagcaacaaggactggtggtggggccgctctgaggacaaggaggcctggttccctgccagctttgtgcggctgcgggtgaaccaggaggagctgtctgagaacagcagcagcacccccagcgaggagcaggatgaggaggccagccagagccgccaccgccactgtgagaacaagcagcagatgaggaccaacgtcatccgggagatcatggacacagagcgggtgtacatcaagcacctgcgggacatctgtgagggctacatccggcagtgcaggaagcacacaggcatgttcaccgtggcccagctggccaccatctttggaaatattgaggacatctacaagttccagaggaagttcctgaaggacctggagaagcagtacaacaaggaggagccccacctgtctgagatcggcagctgcttcctgcagaaccaggagggctttgccatctacagcgagtactgcaacaaccaccctggggcctgcctggagctggccaacctgatgaagcagggcaagtaccgccacttctttgaggcctgccgcctgctgcagcagatgattgatattgccattgatggcttcctgctgacccctgtgcagaagatctgcaagtaccccctgcagctggccgagctgctgaagtacaccacccaggagcacggggactacagcaacatcaaggccgcctatgaggccatgaagaatgtggcctgcctgatcaatgaaaggaagaggaagctggagagcattgacaagatcgcccgctggcaggtgtccatcgtgggctgggagggcctggacatcctggacaggagcagcgagctgatccacagcggggagctgaccaagatcaccaagcagggcaagagccagcagaggaccttcttcctgtttgaccaccagctggtgtcctgcaagaaggacctgctgcggcgggacatgctgtactacaagggccgcctggacatggatgagatggagctggtggacctgggagatggccgggacaaggactgcaacctgtctgtgaagaatgccttcaagctggtgtccaggaccacagatgaggtgtacctgttctgtgccaagaagcaggaggacaaggcccgctggctgcaggcctgtgctgatgaaagaagaagagtgcaggaggacaaggagatgggcatggagatcagcgagaaccagaagaagctggccatgctgaatgcccagaaggccggccacggcaagagcaagggctacaaccgctgccctgtggccccaccccaccagggcctgcaccccatccaccagaggcacatcaccatgcccacctctgtgccccagcagcaggtgtttggcctggccgagcccaagaggaagagcagcctcttctggcacaccttcaaccggctgacccccttcaggaagtag

SEQ ID NO: 105717 - DNA, 3834 bp, Artificial Sequence
  derived and/or modified sequence
atgacccaggccgccgtgcggccctgggccccctgcctggagaacatgaccactgccccgaatggtttgggtccggggcctgccgccccatgcgctgggtccgacctgaaggacgcaaagatggttacatcgctggcatgtggcaacggagtctgtggatgctcccctggcggcgacaccgatacccaggaggcaaaactctcacccgccaaactcgtgaggttgttttccaccagcagaaaacggactggggcccaccccgagagacctcattccatggttctcgtgggcaattcaagcacatggaacaccttagcatctttccgcaagatgggctcgttcaagaagcttaagagctctgtactaaaggggatccaatcccgggagggttcaaacgcatgttcaaaaggagaagcatccgagcatggcctggggaaatcaattcctaatggcgcagtgcctggggcccaggccagtcgcggctcccccctcgctcctgggcccgcttgcggggcactgcggcctgccgagtggggcaccctagatggatcagacttggaggataccgatgacgcgtttcagaggtctacccatcgttcccggagcctcaggcgcgcctacggcctgggaagaatctgcctactcgacgcaccacagaaccatgccactccaactatagccactgggcaggtgccagccgtctgcgagattttggtgcgagatcccgaaaacaactctatgggttatcggcgaagcaagtccaccgataacctcgcattcctgaagaagagttcctttaaaagaaagtccaccagtaacctcgcggatctgcgcaccgcccatgacgccagagtccctcaaaggaccctgagttccagttccaccgacagtcagaagctgggctccggcagaacaaagcgctggcgatcacctatcagggccaaagactttgaccgggtcttcaagttagttagcaacgtcaccgaggccgcttggagaagagaatctccaagaagcggcgcaccctctccgggagaagcctctctcaggctgcaggctcactctaggttacatgacgactactcaagaagggtctcaagaagcactgagcaagactcaagacgcgggggcgccgtcatgcatggaacaaccgccacatgtacagtggccccggggttcggatctgctaccagtaagggtccacatctagacgccgacacggcggtgttcccgctggagactaaatccagttgggcggtcgaaagcgacagttcgtgtacctgcagctcacttccctctcccattgtgcaagatgtcctgtctaaagactcttgcgatccaaatgctggctctcagctgacatttgatccggagcaacccccaacgccactgaggcccacaacacctaagcctcaatcaccacagagtccccagagccccggtgccgggagcgcctcatgccatagcaatcacagcgcactgtctgcaaactcagaagagagcgaggggcgggccgaagagcccgcccagagggagcccggaccagtgagcctacaggatccactggaggccacacatggcgacgaaggatcaaaggacctcctggttaatattggggttgcggcaggtcccgaagaaaaggagaaggaagaggtcgtccccgacggaccctggcgcagaagctcctcccaggatgaggaacgtacggaagcacagcgaacacccaagcgccggtggggctcagggcgccgacctagaccaagaccgtttagtgactacggtcagctggcaagccggagtctgagtatccccgaggacagcgtggctgctgatccacagaaagaagacagggtggatgaggatcctcaagcttcaatgacctctgcatcccctgaagatcaaaacgctcctgtcggctgccctaaaggtgccaggaggaggcggcctatctctgtaattggtggggtaagtctgtacggaacaaatcaaacagaggagcttgataacctgctgactcaaccagcctcccgaccccccatgcccgcccaccaggtcccaccatacaaggcggtgagcgcccgattccgccctttcacattctcgcagtcaactccaatagggctcgatcgagtgggacgtagaaggcagatgcgcgcctcaaatgtgtctagcgacggaggcacggaaccaagtgcgctggtcgatgacaatgggtctgaagaggattttagttatgaggatctctgtcaggctagccctcgctacttgcagcccggaggggagcaacttgcaatcaacgaactgatatccgatgggaatgttgtctgtgcagaagctttgtgggaccatgtaactatggatgaccaggagttaggattcaaggctggcgatgtcatacaggtgctggaggcgtctaacaaagattggtggtggggtaggtctgaagataaagaggcctggtttccggcctcctttgtaaggctccgagtgaaccaggaagagctgtcggagaatagctcaagcactccctcagaagaacaggatgaagaggccagccagtctcggcacagacactgtgagaacaagcaacagatgaggacaaatgttatcagggagattatggacaccgagcgggtttatattaaacacttgagggacatttgcgagggatatatccgccaatgccgcaagcacactgggatgtttactgtggcccagcttgctaccatctttggaaatatcgaagacatctataagtttcagaggaagttccttaaagatctggaaaaacagtataacaaagaggaaccccacctctctgagattggatcctgctttctacagaatcaagagggatttgccatctattccgagtattgcaataaccatcccggcgcctgtttggagctagctaatttaatgaagcaggggaaataccggcacttttttgaagcatgtagacttcttcaacagatgattgacatcgcgatcgatggctttctgctgaccccggttcagaaaatctgcaaatatcccctacagttggcagagctgctgaagtatacaactcaggagcatggtgattatagcaacattaaagccgcttatgaggccatgaaaaacgttgcatgcctgatcaatgagaggaaacgcaagctcgagtctatcgacaagattgcccgttggcaagttagtatcgtaggctgggagggactcgacattctagaccgctcctctgaactgatccatagcggggaactcacgaaaatcacaaagcaagggaagagtcaacaaaggacatttttcctttttgatcatcaattggtgagctgcaagaaagacctcctgagacgtgacatgctgtactataagggacggctggatatggacgagatggagctagtcgatctcggcgatggtcgtgacaaagactgcaatcttagcgtgaaaaacgctttcaagctggtaagccgcactaccgatgaggtttatttattttgtgctaaaaagcaggaggacaaggctcggtggttacaagcttgcgccgatgagagaagaagggtccaagaagataaagaaatgggaatggagatcagcgagaaccaaaagaaactggccatgttaaacgcacagaaggctggacacgggaagagtaaaggctacaatcgctgtcctgtcgccccacctcaccaaggtttgcacccaattcatcagagacatattacgatgcccacttctgtcccacagcaacaggtgtttgggctagccgaacctaaacgtaaaagttccttgttttggcacacctttaaccggctgacgcctttccggaaatag

SEQ ID NO: 105718 - DNA, 3948 bp, Artificial Sequence
  derived and/or modified sequence
tgacccgtggccacccaggagcccgacgtgcagggccggtgcgagtgccaggacggcatccctggagatgagggccttgagctcaggtccgctgacagtgccgtgcctgttgccatgacccaagccgccgtgcgtccatgggctccctgcctggagaacatgactacagcccccaatggtctgggccccgggccggccgcaccatgcgctggttccgacctgaaggatgccaaaatggttacgtccctcgcatgcggcaatggggtatgcggctgcagtcctggcggcgataccgacacccaggaagcaaaactctctcccgccaaattggtgcgccttttctccaccagccgcaaacgcacaggcgcccacccagagagaccacacagtatggtcttggtgggtaattctagcacttggaacacattagctagtttccggaaaatggggtctttcaaaaaactgaaatccagtgtactgaagggcattcagtctcgagagggctccaacgcatgtagtaaaggcgaggccagtgaacacgggctggggaagtccataccgaacggcgcagtacccggagcccaggcatccagaggctctcccctggccccgggtcctgcatgtggggcactgaggcccgccgaatggggaaccctcgacgggtccgacctagaggacactgacgacgcttttcagagaagcacccatagatcgcgtagcctccgcagagcatacggcctaggtaggatctgtctcttggatgccccacagaatcacgccacacctaccatcgcaaccggacaggtgcccgccgtctgtgaaatcctggtgagagacccagagaataactccatggggtataggcgcagcaagtctactgacaacctggctttcctgaagaagtctagctttaaacgtaagtccactagcaatcttgccgatttacgcacagcgcacgacgcccgggtacctcagcgcaccctgtccagctcaagtacggactcccaaaaactgggcagtgggagaactaagcgttggaggtcaccgatacgagcaaaagactttgaccgggtattcaaactggtgtccaacgtcactgaggcagcatggcggcgagagagccctagatccggagcaccgtcaccaggtgaggccagcttgcggctgcaggcacattcaagattacatgacgattactcaagaagagtttcaaggtcgaccgagcaggactccagacggggtggcgcagtgatgcatggtaccaccgctacctgtaccgtggcaccgggcttcggctccgcgacgtcgaaagggccgcacctcgatgccgacactgcagtctttccactggagaccaagtcttcctgggcagtggagtcagattcttcgtgtacctgtagttccttgcccagcccgatcgttcaggacgtgttaagtaaggacagctgtgacccaaatgctggctcacagctgacattcgaccctgagcagccaccgacacccctccgacccaccactcctaagccccagagcccacagtccccacagtctcccggtgccggatcagcctcttgtcattctaatcattctgctctctccgctaacagtgaggagtcagaagggagggctgaggagccggcgcagcgggagccagggccagtgtccttacaagatcctttggaagccacccacggggacgagggtagtaaagacctgctggtgaatattggtgtcgctgcaggacctgaggagaaggaaaaagaagaggtagtgcctgatgggccctggcgacgatcctcgtctcaggacgaggaacgcactgaggcacagagaacacctaagcgccgatggggctccggaaggagacccaggcctcggcctttcagcgactatggtcagctcgcctcccgatccttgtcaatccccgaggattctgtcgccgctgacccccagaaagaagatagagtggatgaggatccacaggcctcaatgactagcgcgtctccagaggatcagaatgcccctgtggggtgcccaaaaggcgcccggcgcagacggcctatttcagtcataggaggggtgtcgttgtacgggaccaatcagacagaggagctcgacaatctgctgacccagccggcctctcgtccacctatgccagcacatcaagtgccaccatacaaggctgtgtccgccaggttcaggccttttacgttttctcagagcactcccatcggtctggatcgggtggggcgacggcgccagatgagagcttccaatgtctcttccgatggcggcacagagccctctgctctagtggatgataacggttcggaggaagacttcagctacgaggatctctgccaagcctcccctcggtatctgcaacccggtggcgaacagctggccataaacgaactgatctccgacgggaatgtggtgtgtgccgaggcactgtgggaccacgtgacgatggacgaccaagaacttggcttcaaggctggagatgttattcaggtgttagaagcatctaacaaggactggtggtgggggcgcagcgaggacaaggaggcctggttccccgctagcttcgtgcgtttacgggtgaaccaagaagagcttagtgaaaatagcagttccacaccttcagaggagcaggacgaggaagccagccagtccagacatcgacactgtgagaataagcagcagatgcggacaaacgtgatccgcgagatcatggataccgagagagtgtacatcaaacatctgcgggatatctgtgaggggtacataaggcagtgcaggaagcacactggaatgttcaccgtcgctcagttagctacgatcttcggaaacattgaggacatctataaatttcagaggaaattcttgaaggacctggagaaacagtataataaggaagaaccgcatctgtcggagatcggatcatgctttcttcaaaaccaggagggcttcgccatatatagtgaatactgtaataatcatccaggggcgtgtcttgagctcgcaaatcttatgaaacagggaaaataccggcatttctttgaggcatgccgcctgctgcaacagatgattgacatcgccattgacggattcctgctgacaccggtccaaaaaatctgcaaatatccattacagctcgcggagttgctgaagtataccacccaagagcacggcgactactcaaacattaaggcagcatacgaagcaatgaagaacgtggcctgccttatcaacgaaagaaagcgcaaactggaatcgattgataaaatcgcccggtggcaggtgtctatcgtaggctgggagggcctggacattttggatagatcatctgagctgatccatagtggggagctaacaaagataactaagcaaggcaagtctcagcagaggaccttctttttatttgatcaccagcttgtgtcctgtaagaaagatctactgagacgagacatgttatactacaaaggcaggctcgatatggatgaaatggaacttgtggacctcggagacggccgggacaaggactgtaatctctcagtaaaaaacgcatttaaattggtttcccggactacagacgaggtttacctgttttgtgcaaaaaagcaggaggacaaggccaggtggttgcaggcttgtgccgatgagagaagaagggtacaagaagacaaggagatgggcatggaaattagcgagaatcagaaaaaattggcaatgctgaacgcccaaaaagctggacatggcaagagcaagggctacaatcggtgtccagtggccccaccccaccaagggttgcatcctattcaccagcgccacattacaatgccaacttcagttccacagcagcaggtctttggcctagccgagccgaagcgaaagtcatccctgttttggcatacatttaacagattgacacccttccgcaagtag

SEQ ID NO: 105719 - DNA, 3834 bp, Artificial Sequence
  derived and/or modified sequence
atgacacaggccgcagtgagaccctgggctccctgtttggagaacatgacgacagccccaaacggactcggccctggccctgctgctccatgcgccggtagcgacctaaaggacgccaagatggtgactagcctcgcttgtggtaatggagtgtgcggttgctcgcctggcggagatactgacactcaggaagccaagctttcaccggctaaactggtacgtctgttctcgacatcgcggaagaggactggcgctcacccggaacggcctcacagtatggtgctcgtgggcaacagctcaacctggaacaccctagcctctttccgcaaaatgggatcttttaaaaagctcaaaagcagcgtgctaaaggggatccaatctagggaaggatcgaatgcgtgttccaaaggtgaagcctccgaacacgggctcggcaaatcaattccaaatggagccgtgccgggagcgcaagctagtaggggctctccactcgccccagggcctgcctgtggcgctctgcggcctgccgaatggggtacattggacggatccgacttagaagatactgacgacgcttttcaacggagcacacatcgatctaggtctctcagacgggcttacgggcttggcaggatctgcttactggacgctccccaaaatcatgccacccccacaatcgccaccggtcaggtacctgccgtgtgcgaaatcctggtccgggatccagagaacaacagcatgggataccgacggtcaaagtccactgacaacctggccttcctgaaaaaaagcagctttaaacgcaaaagtacttcaaatctggctgacctgagaaccgcccatgatgcccgtgtgcctcaacgaaccctgagtagctcttccaccgactcccagaagctcggaagcggtcgaaccaaacgatggcggagcccaattagagcaaaagacttcgatagagtttttaagctagtatcaaatgttacagaggctgcctggcgaagggaatccccgagatcaggagcacccagtcctggggaagctagtctcagactacaggcccactccagattgcatgatgattattcccggagagtgtcccggtcaacagaacaagattcaaggaggggtggggcagtcatgcatggcaccaccgcaacgtgcactgttgcccctggttttggttccgctactagcaaaggtccccacctagacgccgacactgctgtgttccctctcgagactaagtctagctgggctgtggaatccgacagctcatgcacgtgtagctccctgccgtctccgatagtccaggatgtgctgtccaaggattcctgtgaccctaacgcagggtcacagcttaccttcgacccagagcagccacctacccccctgcgccctaccacccccaaaccacaatcaccacagtctccacagagccctggcgcaggaagcgcaagttgtcactccaaccactctgctctgtccgccaacagtgaggaatccgagggacgagctgaggagcccgctcagagggagcccggacccgtgagtctgcaggatccactcgaagcaacgcacggagacgaaggtagcaaggacctgctcgtgaatataggcgtggctgccggaccggaggagaaagaaaaagaagaggtcgtgccagacggcccatggcgccgatcatcttcacaggacgaagagcgcactgaagcacagagaacccccaagagacgatggggaagcggaagacgacctcggcctaggccgtttagcgactatgggcagctagcctcacggagtctctccattcctgaagacagtgtggctgcagatccacagaaggaggaccgcgtagacgaagacccgcaagcatcgatgactagcgcctcgccagaagaccaaaatgctccagtggggtgtcccaaaggagcacgcaggaggcggcctatatctgtgatcggaggcgtgagcctgtacggaacaaatcagacagaagaattggataaccttctaactcagcctgcgtcgcggcctccaatgcccgcacatcaggtaccaccctacaaggcggtatctgccagattccgcccatttaccttcagccagagtacccccatcgggctggatcgcgttggccgaaggcgacagatgcgtgcctccaatgtcagtagcgacggcggtactgagccgtctgccctggtggacgacaatggaagtgaggaagatttcagctacgaggacctgtgtcaagctagccccaggtacctccagccaggaggggaacaactggctatcaatgagctgatctcagatggcaacgtggtttgtgcagaggctctctgggatcacgtgaccatggacgaccaggaactcggctttaaggccggtgacgtaatacaggtgctagaagcctctaataaggactggtggtggggccgaagcgaggacaaggaggcctggtttccggcttcctttgtgagactgagagtgaaccaggaggagctgtccgagaactcgtcttcgacaccatcagaagagcaggatgaggaggcctctcagagtagacacagacattgcgagaataaacagcagatgagaacaaacgtgattcgggaaatcatggatacagagcgggtgtatatcaagcatctgcgcgacatctgcgagggctacattagacaatgccggaaacacacaggcatgttcacagtcgctcagctcgctaccattttcggcaatattgaggacatctacaagttccagcgaaagtttttaaaagacctcgaaaagcaatacaacaaagaggagccgcacctctcagagattggctcctgctttctgcagaatcaagagggtttcgccatatactccgagtactgtaacaatcaccctggggcttgtctggagctggctaacctgatgaagcaggggaagtaccggcatttcttcgaagcatgtagactgctacaacagatgattgatatcgccatagacggatttctgctcacccctgtccagaaaatctgcaaatatcccctgcagctggcagaactcctgaagtacacaactcaagaacacggggattactctaatatcaaagccgcttacgaggctatgaagaacgtggcatgcttaatcaacgaacgcaagaggaaacttgaatcaatcgacaaaatagctcggtggcaggtcagcatcgtcggatgggagggactggacatcctcgaccgctcaagcgaactgatacattccggagaactcaccaagataaccaagcaggggaaatcacagcaacgaacctttttcctttttgaccatcagctcgtctcgtgcaagaaagacctgctccgcagggatatgctttattataagggtcggctggacatggacgagatggaactggtcgatctaggagatggtcgggataaggactgtaatctgtccgtgaagaatgcatttaagctggtctcgcgcaccaccgatgaagtttatcttttctgtgctaaaaagcaggaggataaggcccgttggctgcaggcttgtgcagacgaacggcgacgggtccaggaagacaaagaaatgggaatggagatctctgaaaaccaaaaaaaattggccatgctaaatgcccagaaggccggtcacggcaagtccaagggctacaacaggtgtcccgttgcacctccacatcagggcctgcatccgatacaccagcggcacatcacaatgcccactagtgtccctcagcagcaggtgtttggattagccgaaccaaagcgtaagtcctctctgttctggcacactttcaatagactcactccctttcgtaaatag

SEQ ID NO: 105720 - DNA, 3948 bp, Artificial Sequence
  derived and/or modified sequence
tgacccgtcgctactcaagaacccgatgtccagggacgctgcgaatgtcaggatgggattccaggcgacgaaggacttgagttgcgctctgcggactctgccgtaccagtcgctatgacacaggcagctgtccgaccctgggcaccttgtcttgaaaatatgaccaccgcccctaatggtctgggcccaggccctgctgctccctgcgccggatccgacctgaaagatgccaagatggtcacatcgttagcttgtggcaatggagtgtgcggctgctctccaggaggggatacagacacccaggaggccaagctctctccggctaagcttgtgaggctcttctcaaccagcaggaaaagaactggcgcacaccccgaaaggccccatagtatggtgttggttggtaactcatccacttggaacacgctggcgagctttcgaaagatgggcagcttcaagaaactgaagtccagcgttctcaagggcatccagtctagagaagggagtaacgcctgtagtaaaggcgaggcttccgagcacggcctgggaaaatctattccaaacggggcagtgcccggtgctcaagcttccaggggttccccactggctccaggccctgcgtgcggtgccttacggcctgccgaatggggtaccctggatggcagcgatctcgaggacacggatgacgcctttcaaaggtctacccaccgctcgcggtcgctccgtcgcgcttacggcctgggcaggatctgtctgctcgatgccccacagaaccatgcaacccccaccatagctacagggcaagtgccagccgtctgtgaaattctggtaagagacccagaaaataatagcatgggttacagacgttccaaaagtacggataatctagcatttctaaaaaagtcctctttcaagcggaagtccaccagtaatctggccgatctccggaccgcacacgacgcacgtgtcccgcagagaacgctttcgtcaagtagtactgattcgcagaaactgggttcggggagaactaaaaggtggaggtcccctataagggcaaaggactttgacagggtatttaagctggttagtaatgtcacagaagccgcatggaggcgggaaagtccacgaagcggggcacctagcccaggagaagcttctcttcgcttgcaggcccacagccgtttgcatgatgattactcaaggagagtcagccgatccaccgagcaggatagccgtagggggggtgccgtaatgcacgggaccaccgcaacatgcacagtggcccctggattcggctcagccaccagtaaggggcctcacctcgacgccgataccgcagtgttcccacttgagacgaaaagttcgtgggccgtcgagagtgatagtagttgcacatgtagttcactgccatcccctattgttcaggacgtgctttccaaagattcttgtgaccccaacgccggttcgcagttgaccttcgaccccgagcagccaccgactcctctgaggccaaccacaccaaaacctcagtctccccaaagccctcagtcacccggtgccggaagcgcgtcttgtcatagcaatcacagtgcactatcagctaacagcgaagagagcgagggaagggccgaagagcctgcacagcgtgagccaggcccagtctctctacaagaccccctggaagctacgcatggggacgaaggcagcaaggacttgctggtgaatattggtgttgccgctggacccgaagagaaggaaaaggaggaagtggtgcccgacgggccttggcgacggagctcttctcaagatgaggagcgcactgaagcccagcggacgcctaagcgcaggtggggctccggaagaagaccacgcccacgccctttcagtgattacggccagctcgcgtctagatcgcttagcatacctgaagatagcgtggcagcagatcctcagaaagaagacagagtggatgaagatcctcaggcgtcgatgacctccgcctctcccgaggatcaaaacgctccagtcggctgtcccaagggcgctaggaggcgccgacctatatctgtcattggaggggtttctctctatggaacaaatcagaccgaggagctggacaatctgcttacacagcctgcgtctcggcctcctatgcctgcccaccaggtgcccccatataaggccgtaagcgcacgattcaggcccttcacattcagtcagtccacccccattgggcttgaccgagtggggagacgccgacagatgagagcatccaatgtcagctctgacgggggaactgagccctctgccctggtggacgataatgggtctgaagaagatttctcttatgaagacctgtgtcaggctagtccacggtatctccagccgggaggggagcagctggccataaatgaattgatctcagatgggaatgtcgtctgcgctgaagccctgtgggaccatgttacgatggatgaccaagagttagggttcaaggcaggagatgtaatccaggtcttagaagccagcaacaaggattggtggtgggggcgttcagaggacaaggaggcgtggttccccgcttccttcgtcaggctgcgggtgaaccaggaggagctttcagagaatagcagctctactccctcggaagaacaagatgaggaagcatcccagagtcgacacagacactgcgagaacaaacaacaaatgcgtacaaatgttattcgcgaaatcatggacactgagcgagtgtatattaaacatttgcgagatatctgtgagggatatatcagacagtgtagaaagcataccggaatgttcacggtggcccaactggcgacaattttcggcaacattgaggatatatataaatttcagcggaaatttttgaaagatctagagaaacagtataacaaggaagagccccacttgtctgaaatcggcagctgcttcctgcagaatcaggaagggttcgccatttacagcgaatattgcaataaccatcccggtgcatgtctagaactggcgaacctgatgaaacagggcaagtacaggcactttttcgaggcctgccgcctgctccagcagatgatcgatatcgccatagatggatttctgctcaccccggtgcagaaaatctgtaaatatcctctgcagctcgccgagctgctgaagtatacaacacaagaacacggggattacagcaatattaaggccgcttatgaggctatgaagaatgtggcatgcctgatcaatgagcggaagcgtaagctggagagcatcgataaaatcgctcggtggcaggtctcaattgttggatgggaggggctggacatcctggatagatcctccgagcttattcactctggagagctaactaaaattacaaagcaagggaagagtcagcagcgaacattctttctgtttgaccaccagctcgtctcgtgcaaaaaggatctattaaggagagatatgctttattacaaggggcgactggacatggacgagatggagctggtggatctgggggatggcagggataaggattgcaacttaagcgtcaagaacgctttcaagctcgttagccgcactaccgatgaggtgtacctattttgcgctaagaaacaggaagataaggccaggtggttgcaggcctgcgcagacgagcgacgcagagttcaggaggataaggagatgggcatggagatctccgaaaaccaaaaaaaactggctatgctcaatgctcagaaggccggacatggcaagtctaagggttacaacaggtgcccagtggcccctccccaccagggactgcacccgatccaccaaagacacattactatgcccacttcagtccctcaacagcaagtctttggtctggcagagcctaaaagaaagtctagtcttttctggcacacctttaatcggctgaccccgttccgtaagtag

SEQ ID NO: 105721 - DNA, 6665 bp, Artificial Sequence
  derived and/or modified sequence
gtgtgcgttgcgctttctcccgcgatcgccctgccggtcgctagctccgagggcgcgcactggatcccaggctcctccgagagtgcggcgacctcggggctccgccggcaccggaggtggctctgagggcagggacgtgttggacacgctgactttgtaggctccgccaagaggcgccgcaggaggtcgtccctgatggcccctggaggcgaagctcatcacaggatgaggaaaggacagaggcacagagaacccccaagaggagatggggctctgggagacggccaaggcctcggccattctctgactacggccagctggccagccgcagtttgtctattcctgaagactcggttgctgcagacccccagaaggaagaccgtgtggacgaggacccccaggcaagcatgacttctgccagccctgaagaccagaatgctccagtgggctgccccaaaggagcccggagaaggcgccccatttccgtgataggtggggtcagcttgtatgggaccaaccagacggaggaactggacaatcttctgacccaaccggcttccaggccgcccatgcctgctcaccaggtgccaccctacaaggctgtgtcggcccggttccggcccttcacattctcccagagcacccccattgggttggaccgtgtgggacgccggcggcagatgagagcatccaacgtttcttcagatggaggtactgagccctctgccttagtggatgacaacggtagtgaggaggacttcagctatgaagacctctgccaggccagccctcggtacctgcagcccggcggggagcagctggccatcaatgagctgatcagtgatggcaacgtggtctgcgcagaagccctgtgggaccatgtgaccatggatgaccaggaactgggcttcaaagccggggatgtcatccaggttctggaagcctccaacaaggactggtggtggggccgcagtgaagataaggaagcctggttccccgcgagcttcgtcagattgcgagtgaatcaggaagagctgtcggaaaactccagcagcacccccagtgaggagcaggacgaggaggccagccagagccgccacagacactgtgagaacaagcagcagatgcggaccaacgtcatccgggagatcatggacaccgagcgggtgtacatcaaacacctcagggacatctgtgagggctatatccgacagtgccgcaagcacacaggaatgttcaccgttgcgcagctagccactatttttggaaacattgaagatatttacaaattccaaagaaagtttctgaaagaccttgagaaacagtacaacaaagaggaacctcacttaagtgaaataggatcttgctttcttcaaaatcaagagggctttgccatctattccgagtactgcaacaaccacccgggcgcctgcctggagctcgccaacctcatgaagcagggcaagtacagacatttctttgaagcctgccgcctgctgcagcagatgattgacatcgccatcgacgggttcctgctcacaccagtgcagaagatctgcaaatacccgctgcagctggccgagctgctcaagtataccacacaggaacacggtgattacagcaacataaaggcagcatatgaggccatgaagaatgtggcctgtctgatcaacgagcgcaagcgcaagctggagagcatcgacaagatagctcgctggcaggtgtctatcgtgggctgggagggactggatatcttagaccgaagctcagaattgattcattctggggagctgaccaaaatcactaagcaaggcaaaagccagcagcggacgttcttcctgtttgaccaccagctggtgtcctgcaagaaggacctgctgcgcagggacatgctgtactacaagggccggctggacatggatgagatggagcttgtggacctgggggatgggcgcgacaaggactgcaacctcagcgtgaaaaatgccttcaagctcgtcagtaggaccacagacgaggtttatttgttttgtgccaaaaaacaagaagacaaggcgaggtggctgcaggcctgtgcagatgaaaggaggcgggtgcaagaggacaaggagatgggaatggaaatttcagaaaaccagaagaaacttgccatgttaaatgctcaaaaggcaggacatggaaagtcaaaaggctacaacaggtgccctgtggccccaccgcaccagggcctgcaccccatccaccagcgccacatcactatgcccacaagcgtcccccagcagcaggtctttggcctggcggaacccaagaggaagtcctcgctcttctggcacaccttcaacaggctcacccccttccggaaatgaaaacaggaggctgtgcttccatggagctgggtgtcaagagaagaactgtctttgtttcttgtgtgcttcaatccagggaaagtttcttggacccagtgataaaaacttccttttagggatcaatgaaggagagaaggtcttggaatcaccttcagtctttggagacccagctgcctttgtggaagggaggagacggtcatgacacaaagctttatcctacacagaaacacccgtgacccactatgagatggcccagatgtgggacccggtaccatgctctaaagcgagtgattaggcagcagctgaagccacccctgctgatgatgagcaagtgcctgctgcaggtccaaacacagcatccagggctttgcagttcctaaggagtgatgaggttagaggatcacttctgcatttgattttcaaggatgccgtcaagacggggttgacacaatgctgcacgtgtctggtcacacttagaaattgagctcttactctcttctgtaatactgggggacctacagctgccgtggggctgaccacggtgttccctggcatcgtctgtgtccacacagatgctaactggtagtgcaaatgtcatcctgcaaggttcctcttcctgcaagcaaagtggagagaaagaagatgcatctgtcaccttcatcagggtcctcagtgcagagcaacttacgcatcctcaagaatccactgcttttcaggcaaggagggagaaatcctgctgcacactggctttgtcccggagtcggattccctcctgcctgcacgccttcagtaactccgagcagaaatcacatcttgcccacatgctgtaacctaagaaactgctatgcaaggctgggtgctgtggctcatgcctgtaatcccagcactttgggaggccaaggcaggtggatcacctgaggtcaggagttcgagacaagcgtggccaatatggcaaagcccagtctctactaataatacaaaaattagctgggcatggtggcgcatgcctgtaatcccagctactgggaaggctgaggtaggagaatcttttgaatctgggaagcggaggttgcagtgagctgagatcgcaccactgcactccagcctgggagatacagcgagactgtctccaaaaacaaaaacaaaaacaaaaaacattcaaacaactgtttgcaatataaaaagctcatttactgtaatatttatgatacagtgaatatgaaaatgcactggtcagaaggcactctcaaagagccgcactgctcctgacatcgtccttagcaatgaagtcacaaagacagccaaagcagtcctgcttcttggaaatcagaagctgcctttatcacatataaagccaaacagggcataaccatgtcacgtgagcatgtcatcaggcttctgaggacttgttctttataaaaaaagaccttcacaaaatatcttggcttagagatagcagtctttattaacaaaggccacctaggctgacacctgcagataatcatctccttttctttgtctatgttgtacattttcatgatataacttttaactatgtctagagaaggcaggctctgcaagagaggtgccctttcaacccgctcagtgccctggacaggagatgctgtgttaaactgttaatggatatctatatgagaagctcatttttgtatgctatccctgcagtttttttttttctaacaggcccatgtttgagaataaacaagtctgtgatgtcagagacaaaggtgtattcttcagtctgcaggtgtgtggcacctcccttctcccctgcagccccccacatccagagccgttcctgagagtgacatcatgcatcaagaaaacataaccttggtcctcaggtgaacccttggaacattctgtgaccgcctgatgtccattctgagccaccttggcacacatgcttacaggcagcactgctaagggttcaggtgccccatggctgacagcccgagttgcttctgtggaccatcatgccgctcggcacgtcctgagacagaagttgctgcaggaaggagcttctggagaggtcctgtggcatgtgtgggggtgtgtgtgtgtatgtttccttcttgaacagacattccaactttagatgtgtttatagaactgacctttttactaacaaaatacaatgatatatgttggaaactacttaatatgcttttcctgcacaccttagcaataactgtaggggtctctgctagagttgtttgtatgtacagcaattttgaacaaattgttttaaatgtaatataagagaattagtttaaggaagtaaagagaatcatttgcttgtgttacattttcagtgaggattcagtttaagagtcattcttaggacttccatttcctaatatttattcatgggtaatgaagaaatggtttgcattttgtggccagtcctaatttattttccagctgagccctaacttccggctcccacctacctccacggacttcctaacagagacttatgaataccaggatgtgtttttgttaagtcaggttcaattcgttgcccctgtcagttttatagagtgtgagggtcactccattaaagatctctcctgggtggatcctacttggatgttcaggtgattttgaaaactgctaacatttttaaaaggctagaacatcctttgacttcttgaaaatctgcatgtctggcttgggttttattaccacatgcctgagttcttcaagaatggaaggctcaagtattctcatcttccatttgccaaacttccttcctgatttgagtcacgtgttccacttggaaagaaagggaacagagagcctcctccatggacagtgtatgaatttcattgggaatcttgctctctcccgcctctatgcctttctctctttttaaccttactttacataatattatagatgggccaagaaaagaaaagatgacataacattttgatgaatttcacctattccattcttcacgtttcagaattggtcgactttgttagaagataattgaagtagccttgggtcaaaagcaaccttttcaattgtgatcatacctaaaacatataaaaaccctgccgtagattaaaagcaattataaaatcataaaattgaatgtttgcagaatcctggagcagtagatttctttgtctttggcctgcggactagaaagagggcagcagtagtatgctggagcttccctgggataccagccacatggtttcttttcattagatctgatttttgtttcccactgtagatctgattttgtagttgaaaacatttcaccaccatcaaacactatttctgaatattgtgcctttttatacctagcctagatgaaaaccgatgccattcttattcagaaaatccccccatcctacatgactgttatctagacataaagcaaagtgcatttaattcaaaatttggttcacaatataagtattttgtaaaagccagctgaaccagcattttatcaggtggaaatctctgcaagccaaattgctgatactccttcatgcagatcaacttggtgtcccagtcagaatagaacagcataattacctggagttagggggagtatttctgcactattacttgtcagggagagaagaaacttagaattgtccctcaaaggagtgtcaagaagtatgaataaatgtcctttcaccagctcacaggccagaaatggaggacccaagtcaactaggtgaaactactagcagacccagctttcccataataacctaatctgcaaattgttctattaaagtctcattgttttcaggatgcaatgaaagtggatttcaaaaggctttggaaaaataagtggaacatgactgatcttgaaaaaaaaagcaaaagcttaaatatttgatacaagtttacttagctacaacatactttacattgttgcctttagttatctcacaggcactgacattttatatttagaaaatacttttaatctttctaatctttttttgtaaatattagtgtccattctgtatgactcgctaacctactttgcaaggctttgggcaacattttagctcattaacttcaagatgatgtgtcatctgtataggtcaaagaatgggacttctgaactgaggaatttgctgttgacagccaaagtatagtgtacaagattgatgtaacttgatatgtatttttgttgaagttttttgtaaaaaaaaattatttacaatgttatttgaatgatttttttaaatgctgtgaatctatatttgttgttttgtatattaaaattcatttgccaaactc

SEQ ID NO: 105722 - DNA, 8457 bp, Artificial Sequence
  derived and/or modified sequence
gtgtgctgccgcggcgcgggaggagagtgtgcgttgcgctttctcccgcgatcgccctgccggtcgctagctccgagggcgcgcactggatcccaggctcctccgagagtgcggcgacctcggggctccgccggcaccggaggtggctctgagggcagggacgtgttggacacgctgactttgtaggctccgccaagaggcgccgcaggagcccgtggccacccaggagcccgatgtgcaaggcaggtgtgagtgccaggacggcattcctggagatgaaggcctggagctgcggtctgcggactcggcagtgcccgtggccatgacccaggctgccgtgcggccctgggcaccctgcctggagaacatgaccactgccccaaacggcctcgggccaggccccgcagccccctgtgcaggctcggacctgaaagacgccaagatggtgacctcccttgcgtgtggaaatggagtctgtggctgcagccctggtggcgacacggacacccaggaagccaaactcagcccagccaagcttgtgcgcctcttttccaccagtcggaagaggacgggtgcccaccccgagcggccccactccatggtcctggtggggaactcctccacatggaacaccctcgcctccttccggaaaatgggatcctttaagaaactgaagtcctcagtcctgaaaggaattcagagccgagaggggtcaaatgcctgttcaaagggagaggcttcggagcatggcctgggaaagtccatcccaaatggcgctgtcccaggagcccaggcaagcaggggctcccccttagcaccgggaccagcatgtggtgccctcaggccagcagagtggggcacattggatggctccgacctcgaggacacggacgatgccttccagcggagcacacaccgctcccgcagcctccgcagagcctacggcctgggccgcatctgcctgctggatgcgccccagaaccatgcgacacccacgatagccactggccaggtgcccgccgtgtgtgagattctcgtgagggaccctgaaaacaacagcatgggctacaggaggagcaagagcacggacaatcttgcctttctgaagaagagctcctttaagcggaagtccacctccaatcttgcagacctcaggacggcccatgacgcacgggtaccacagaggaccctgagcagttcctccactgactcccaaaagcttgggtcaggaaggaccaaacgctggaggagcccgataagggccaaggactttgacagagtcttcaaacttgtgagcaatgtgactgaggctgcctggaggagggagagtcctaggagtggggccccatcccctggagaggccagcctgagacttcaggcacacagccggctgcatgacgactactcccgccgcgtctccaggagcactgagcaggacagcaggcggggcggggcggtcatgcatgggaccactgcaacctgcaccgtggcccccggtttcggctcagccacctctaaggggccccacctagacgctgacactgccgtatttcctcttgaaaccaaaagttcctgggcggtggaaagcgacagttcctgcacttgcagctctttgccaagcccgattgtccaggatgtgttgagcaaagactcctgtgacccaaacgctggcagccagttgacatttgaccctgagcagcctcccacccctctaaggcccaccacacccaagccccagagccctcagagcccccagagccccggggcaggaagtgccagctgtcacagcaatcacagtgccctgtccgcgaattcagaggaaagtgaaggaagggcagaagagcctgctcagagagagccagggcctgtgtccttgcaggatcccctggaagccacacatggtgatgagggcagcaaggaccttctggtgaacattggtgtggcagccggcccagaagaaaaggagaaggaggaggtcgtccctgatggcccctggaggcgaagctcatcacaggatgaggaaaggacagaggcacagagaacccccaagaggagatggggctctgggagacggccaaggcctcggccattctctgactacggccagctggccagccgcagtttgtctattcctgaagactcggttgctgcagacccccagaaggaagaccgtgtggacgaggacccccaggcaagcatgacttctgccagccctgaagaccagaatgctccagtgggctgccccaaaggagcccggagaaggcgccccatttccgtgataggtggggtcagcttgtatgggaccaaccagacggaggaactggacaatcttctgacccaaccggcttccaggccgcccatgcctgctcaccaggtgccaccctacaaggctgtgtcggcccggttccggcccttcacattctcccagagcacccccattgggttggaccgtgtgggacgccggcggcagatgagagcatccaacgtttcttcagatggaggtactgagccctctgccttagtggatgacaacggtagtgaggaggacttcagctatgaagacctctgccaggccagccctcggtacctgcagcccggcggggagcagctggccatcaatgagctgatcagtgatggcaacgtggtctgcgcagaagccctgtgggaccatgtgaccatggatgaccaggaactgggcttcaaagccggggatgtcatccaggttctggaagcctccaacaaggactggtggtggggccgcagtgaagataaggaagcctggttccccgcgagcttcgtcagattgcgagtgaatcaggaagagctgtcggaaaactccagcagcacccccagtgaggagcaggacgaggaggccagccagagccgccacagacactgtgagaacaagcagcagatgcggaccaacgtcatccgggagatcatggacaccgagcgggtgtacatcaaacacctcagggacatctgtgagggctatatccgacagtgccgcaagcacacaggaatgttcaccgttgcgcagctagccactatttttggaaacattgaagatatttacaaattccaaagaaagtttctgaaagaccttgagaaacagtacaacaaagaggaacctcacttaagtgaaataggatcttgctttcttcaaaatcaagagggctttgccatctattccgagtactgcaacaaccacccgggcgcctgcctggagctcgccaacctcatgaagcagggcaagtacagacatttctttgaagcctgccgcctgctgcagcagatgattgacatcgccatcgacgggttcctgctcacaccagtgcagaagatctgcaaatacccgctgcagctggccgagctgctcaagtataccacacaggaacacggtgattacagcaacataaaggcagcatatgaggccatgaagaatgtggcctgtctgatcaacgagcgcaagcgcaagctggagagcatcgacaagatagctcgctggcaggtgtctatcgtgggctgggagggactggatatcttagaccgaagctcagaattgattcattctggggagctgaccaaaatcactaagcaaggcaaaagccagcagcggacgttcttcctgtttgaccaccagctggtgtcctgcaagaaggacctgctgcgcagggacatgctgtactacaagggccggctggacatggatgagatggagcttgtggacctgggggatgggcgcgacaaggactgcaacctcagcgtgaaaaatgccttcaagctcgtcagtaggaccacagacgaggtttatttgttttgtgccaaaaaacaagaagacaaggcgaggtggctgcaggcctgtgcagatgaaaggaggcgggtgcaagaggacaaggagatgggaatggaaatttcagaaaaccagaagaaacttgccatgttaaatgctcaaaaggcaggacatggaaagtcaaaaggctacaacaggtgccctgtggccccaccgcaccagggcctgcaccccatccaccagcgccacatcactatgcccacaagcgtcccccagcagcaggtctttggcctggcggaacccaagaggaagtcctcgctcttctggcacaccttcaacaggctcacccccttccggaaatgaaaacaggaggctgtgcttccatggagctgggtgtcaagagaagaactgtctttgtttcttgtgtgcttcaatccagggaaagtttcttggacccagtgataaaaacttccttttagggatcaatgaaggagagaaggtcttggaatcaccttcagtctttggagacccagctgcctttgtggaagggaggagacggtcatgacacaaagctttatcctacacagaaacacccgtgacccactatgagatggcccagatgtgggacccggtaccatgctctaaagcgagtgattaggcagcagctgaagccacccctgctgatgatgagcaagtgcctgctgcaggtccaaacacagcatccagggctttgcagttcctaaggagtgatgaggttagaggatcacttctgcatttgattttcaaggatgccgtcaagacggggttgacacaatgctgcacgtgtctggtcacacttagaaattgagctcttactctcttctgtaatactgggggacctacagctgccgtggggctgaccacggtgttccctggcatcgtctgtgtccacacagatgctaactggtagtgcaaatgtcatcctgcaaggttcctcttcctgcaagcaaagtggagagaaagaagatgcatctgtcaccttcatcagggtcctcagtgcagagcaacttacgcatcctcaagaatccactgcttttcaggcaaggagggagaaatcctgctgcacactggctttgtcccggagtcggattccctcctgcctgcacgccttcagtaactccgagcagaaatcacatcttgcccacatgctgtaacctaagaaactgctatgcaaggctgggtgctgtggctcatgcctgtaatcccagcactttgggaggccaaggcaggtggatcacctgaggtcaggagttcgagacaagcgtggccaatatggcaaagcccagtctctactaataatacaaaaattagctgggcatggtggcgcatgcctgtaatcccagctactgggaaggctgaggtaggagaatcttttgaatctgggaagcggaggttgcagtgagctgagatcgcaccactgcactccagcctgggagatacagcgagactgtctccaaaaacaaaaacaaaaacaaaaaacattcaaacaactgtttgcaatataaaaagctcatttactgtaatatttatgatacagtgaatatgaaaatgcactggtcagaaggcactctcaaagagccgcactgctcctgacatcgtccttagcaatgaagtcacaaagacagccaaagcagtcctgcttcttggaaatcagaagctgcctttatcacatataaagccaaacagggcataaccatgtcacgtgagcatgtcatcaggcttctgaggacttgttctttataaaaaaagaccttcacaaaatatcttggcttagagatagcagtctttattaacaaaggccacctaggctgacacctgcagataatcatctccttttctttgtctatgttgtacattttcatgatataacttttaactatgtctagagaaggcaggctctgcaagagaggtgccctttcaacccgctcagtgccctggacaggagatgctgtgttaaactgttaatggatatctatatgagaagctcatttttgtatgctatccctgcagtttttttttttctaacaggcccatgtttgagaataaacaagtctgtgatgtcagagacaaaggtgtattcttcagtctgcaggtgtgtggcacctcccttctcccctgcagccccccacatccagagccgttcctgagagtgacatcatgcatcaagaaaacataaccttggtcctcaggtgaacccttggaacattctgtgaccgcctgatgtccattctgagccaccttggcacacatgcttacaggcagcactgctaagggttcaggtgccccatggctgacagcccgagttgcttctgtggaccatcatgccgctcggcacgtcctgagacagaagttgctgcaggaaggagcttctggagaggtcctgtggcatgtgtgggggtgtgtgtgtgtatgtttccttcttgaacagacattccaactttagatgtgtttatagaactgacctttttactaacaaaatacaatgatatatgttggaaactacttaatatgcttttcctgcacaccttagcaataactgtaggggtctctgctagagttgtttgtatgtacagcaattttgaacaaattgttttaaatgtaatataagagaattagtttaaggaagtaaagagaatcatttgcttgtgttacattttcagtgaggattcagtttaagagtcattcttaggacttccatttcctaatatttattcatgggtaatgaagaaatggtttgcattttgtggccagtcctaatttattttccagctgagccctaacttccggctcccacctacctccacggacttcctaacagagacttatgaataccaggatgtgtttttgttaagtcaggttcaattcgttgcccctgtcagttttatagagtgtgagggtcactccattaaagatctctcctgggtggatcctacttggatgttcaggtgattttgaaaactgctaacatttttaaaaggctagaacatcctttgacttcttgaaaatctgcatgtctggcttgggttttattaccacatgcctgagttcttcaagaatggaaggctcaagtattctcatcttccatttgccaaacttccttcctgatttgagtcacgtgttccacttggaaagaaagggaacagagagcctcctccatggacagtgtatgaatttcattgggaatcttgctctctcccgcctctatgcctttctctctttttaaccttactttacataatattatagatgggccaagaaaagaaaagatgacataacattttgatgaatttcacctattccattcttcacgtttcagaattggtcgactttgttagaagataattgaagtagccttgggtcaaaagcaaccttttcaattgtgatcatacctaaaacatataaaaaccctgccgtagattaaaagcaattataaaatcataaaattgaatgtttgcagaatcctggagcagtagatttctttgtctttggcctgcggactagaaagagggcagcagtagtatgctggagcttccctgggataccagccacatggtttcttttcattagatctgatttttgtttcccactgtagatctgattttgtagttgaaaacatttcaccaccatcaaacactatttctgaatattgtgcctttttatacctagcctagatgaaaaccgatgccattcttattcagaaaatccccccatcctacatgactgttatctagacataaagcaaagtgcatttaattcaaaatttggttcacaatataagtattttgtaaaagccagctgaaccagcattttatcaggtggaaatctctgcaagccaaattgctgatactccttcatgcagatcaacttggtgtcccagtcagaatagaacagcataattacctggagttagggggagtatttctgcactattacttgtcagggagagaagaaacttagaattgtccctcaaaggagtgtcaagaagtatgaataaatgtcctttcaccagctcacaggccagaaatggaggacccaagtcaactaggtgaaactactagcagacccagctttcccataataacctaatctgcaaattgttctattaaagtctcattgttttcaggatgcaatgaaagtggatttcaaaaggctttggaaaaataagtggaacatgactgatcttgaaaaaaaaagcaaaagcttaaatatttgatacaagtttacttagctacaacatactttacattgttgcctttagttatctcacaggcactgacattttatatttagaaaatacttttaatctttctaatctttttttgtaaatattagtgtccattctgtatgactcgctaacctactttgcaaggctttgggcaacattttagctcattaacttcaagatgatgtgtcatctgtataggtcaaagaatgggacttctgaactgaggaatttgctgttgacagccaaagtatagtgtacaagattgatgtaacttgatatgtatttttgttgaagttttttgtaaaaaaaaattatttacaatgttatttgaatgatttttttaaatgctgtgaatctatatttgttgttttgtatattaaaattcatttgccaaactcgt

SEQ ID NO: 105723 - DNA, 8242 bp, Artificial Sequence
  derived and/or modified sequence
gcccgtggccacccaggagcccgatgtgcaaggcaggtgtgagtgccaggacggcattcctggagatgaaggcctggagctgcggtctgcggactcggcagtgcccgtggccatgacccaggctgccgtgcggccctgggcaccctgcctggagaacatgaccactgccccaaacggcctcgggccaggccccgcagccccctgtgcaggctcggacctgaaagacgccaagatggtgacctcccttgcgtgtggaaatggagtctgtggctgcagccctggtggcgacacggacacccaggaagccaaactcagcccagccaagcttgtgcgcctcttttccaccagtcggaagaggacgggtgcccaccccgagcggccccactccatggtcctggtggggaactcctccacatggaacaccctcgcctccttccggaaaatgggatcctttaagaaactgaagtcctcagtcctgaaaggaattcagagccgagaggggtcaaatgcctgttcaaagggagaggcttcggagcatggcctgggaaagtccatcccaaatggcgctgtcccaggagcccaggcaagcaggggctcccccttagcaccgggaccagcatgtggtgccctcaggccagcagagtggggcacattggatggctccgacctcgaggacacggacgatgccttccagcggagcacacaccgctcccgcagcctccgcagagcctacggcctgggccgcatctgcctgctggatgcgccccagaaccatgcgacacccacgatagccactggccaggtgcccgccgtgtgtgagattctcgtgagggaccctgaaaacaacagcatgggctacaggaggagcaagagcacggacaatcttgcctttctgaagaagagctcctttaagcggaagtccacctccaatcttgcagacctcaggacggcccatgacgcacgggtaccacagaggaccctgagcagttcctccactgactcccaaaagcttgggtcaggaaggaccaaacgctggaggagcccgataagggccaaggactttgacagagtcttcaaacttgtgagcaatgtgactgaggctgcctggaggagggagagtcctaggagtggggccccatcccctggagaggccagcctgagacttcaggcacacagccggctgcatgacgactactcccgccgcgtctccaggagcactgagcaggacagcaggcggggcggggcggtcatgcatgggaccactgcaacctgcaccgtggcccccggtttcggctcagccacctctaaggggccccacctagacgctgacactgccgtatttcctcttgaaaccaaaagttcctgggcggtggaaagcgacagttcctgcacttgcagctctttgccaagcccgattgtccaggatgtgttgagcaaagactcctgtgacccaaacgctggcagccagttgacatttgaccctgagcagcctcccacccctctaaggcccaccacacccaagccccagagccctcagagcccccagagccccggggcaggaagtgccagctgtcacagcaatcacagtgccctgtccgcgaattcagaggaaagtgaaggaagggcagaagagcctgctcagagagagccagggcctgtgtccttgcaggatcccctggaagccacacatggtgatgagggcagcaaggaccttctggtgaacattggtgtggcagccggcccagaagaaaaggagaaggaggaggtcgtccctgatggcccctggaggcgaagctcatcacaggatgaggaaaggacagaggcacagagaacccccaagaggagatggggctctgggagacggccaaggcctcggccattctctgactacggccagctggccagccgcagtttgtctattcctgaagactcggttgctgcagacccccagaaggaagaccgtgtggacgaggacccccaggcaagcatgacttctgccagccctgaagaccagaatgctccagtgggctgccccaaaggagcccggagaaggcgccccatttccgtgataggtggggtcagcttgtatgggaccaaccagacggaggaactggacaatcttctgacccaaccggcttccaggccgcccatgcctgctcaccaggtgccaccctacaaggctgtgtcggcccggttccggcccttcacattctcccagagcacccccattgggttggaccgtgtgggacgccggcggcagatgagagcatccaacgtttcttcagatggaggtactgagccctctgccttagtggatgacaacggtagtgaggaggacttcagctatgaagacctctgccaggccagccctcggtacctgcagcccggcggggagcagctggccatcaatgagctgatcagtgatggcaacgtggtctgcgcagaagccctgtgggaccatgtgaccatggatgaccaggaactgggcttcaaagccggggatgtcatccaggttctggaagcctccaacaaggactggtggtggggccgcagtgaagataaggaagcctggttccccgcgagcttcgtcagattgcgagtgaatcaggaagagctgtcggaaaactccagcagcacccccagtgaggagcaggacgaggaggccagccagagccgccacagacactgtgagaacaagcagcagatgcggaccaacgtcatccgggagatcatggacaccgagcgggtgtacatcaaacacctcagggacatctgtgagggctatatccgacagtgccgcaagcacacaggaatgttcaccgttgcgcagctagccactatttttggaaacattgaagatatttacaaattccaaagaaagtttctgaaagaccttgagaaacagtacaacaaagaggaacctcacttaagtgaaataggatcttgctttcttcaaaatcaagagggctttgccatctattccgagtactgcaacaaccacccgggcgcctgcctggagctcgccaacctcatgaagcagggcaagtacagacatttctttgaagcctgccgcctgctgcagcagatgattgacatcgccatcgacgggttcctgctcacaccagtgcagaagatctgcaaatacccgctgcagctggccgagctgctcaagtataccacacaggaacacggtgattacagcaacataaaggcagcatatgaggccatgaagaatgtggcctgtctgatcaacgagcgcaagcgcaagctggagagcatcgacaagatagctcgctggcaggtgtctatcgtgggctgggagggactggatatcttagaccgaagctcagaattgattcattctggggagctgaccaaaatcactaagcaaggcaaaagccagcagcggacgttcttcctgtttgaccaccagctggtgtcctgcaagaaggacctgctgcgcagggacatgctgtactacaagggccggctggacatggatgagatggagcttgtggacctgggggatgggcgcgacaaggactgcaacctcagcgtgaaaaatgccttcaagctcgtcagtaggaccacagacgaggtttatttgttttgtgccaaaaaacaagaagacaaggcgaggtggctgcaggcctgtgcagatgaaaggaggcgggtgcaagaggacaaggagatgggaatggaaatttcagaaaaccagaagaaacttgccatgttaaatgctcaaaaggcaggacatggaaagtcaaaaggctacaacaggtgccctgtggccccaccgcaccagggcctgcaccccatccaccagcgccacatcactatgcccacaagcgtcccccagcagcaggtctttggcctggcggaacccaagaggaagtcctcgctcttctggcacaccttcaacaggctcacccccttccggaaatgaaaacaggaggctgtgcttccatggagctgggtgtcaagagaagaactgtctttgtttcttgtgtgcttcaatccagggaaagtttcttggacccagtgataaaaacttccttttagggatcaatgaaggagagaaggtcttggaatcaccttcagtctttggagacccagctgcctttgtggaagggaggagacggtcatgacacaaagctttatcctacacagaaacacccgtgacccactatgagatggcccagatgtgggacccggtaccatgctctaaagcgagtgattaggcagcagctgaagccacccctgctgatgatgagcaagtgcctgctgcaggtccaaacacagcatccagggctttgcagttcctaaggagtgatgaggttagaggatcacttctgcatttgattttcaaggatgccgtcaagacggggttgacacaatgctgcacgtgtctggtcacacttagaaattgagctcttactctcttctgtaatactgggggacctacagctgccgtggggctgaccacggtgttccctggcatcgtctgtgtccacacagatgctaactggtagtgcaaatgtcatcctgcaaggttcctcttcctgcaagcaaagtggagagaaagaagatgcatctgtcaccttcatcagggtcctcagtgcagagcaacttacgcatcctcaagaatccactgcttttcaggcaaggagggagaaatcctgctgcacactggctttgtcccggagtcggattccctcctgcctgcacgccttcagtaactccgagcagaaatcacatcttgcccacatgctgtaacctaagaaactgctatgcaaggctgggtgctgtggctcatgcctgtaatcccagcactttgggaggccaaggcaggtggatcacctgaggtcaggagttcgagacaagcgtggccaatatggcaaagcccagtctctactaataatacaaaaattagctgggcatggtggcgcatgcctgtaatcccagctactgggaaggctgaggtaggagaatcttttgaatctgggaagcggaggttgcagtgagctgagatcgcaccactgcactccagcctgggagatacagcgagactgtctccaaaaacaaaaacaaaaacaaaaaacattcaaacaactgtttgcaatataaaaagctcatttactgtaatatttatgatacagtgaatatgaaaatgcactggtcagaaggcactctcaaagagccgcactgctcctgacatcgtccttagcaatgaagtcacaaagacagccaaagcagtcctgcttcttggaaatcagaagctgcctttatcacatataaagccaaacagggcataaccatgtcacgtgagcatgtcatcaggcttctgaggacttgttctttataaaaaaagaccttcacaaaatatcttggcttagagatagcagtctttattaacaaaggccacctaggctgacacctgcagataatcatctccttttctttgtctatgttgtacattttcatgatataacttttaactatgtctagagaaggcaggctctgcaagagaggtgccctttcaacccgctcagtgccctggacaggagatgctgtgttaaactgttaatggatatctatatgagaagctcatttttgtatgctatccctgcagtttttttttttctaacaggcccatgtttgagaataaacaagtctgtgatgtcagagacaaaggtgtattcttcagtctgcaggtgtgtggcacctcccttctcccctgcagccccccacatccagagccgttcctgagagtgacatcatgcatcaagaaaacataaccttggtcctcaggtgaacccttggaacattctgtgaccgcctgatgtccattctgagccaccttggcacacatgcttacaggcagcactgctaagggttcaggtgccccatggctgacagcccgagttgcttctgtggaccatcatgccgctcggcacgtcctgagacagaagttgctgcaggaaggagcttctggagaggtcctgtggcatgtgtgggggtgtgtgtgtgtatgtttccttcttgaacagacattccaactttagatgtgtttatagaactgacctttttactaacaaaatacaatgatatatgttggaaactacttaatatgcttttcctgcacaccttagcaataactgtaggggtctctgctagagttgtttgtatgtacagcaattttgaacaaattgttttaaatgtaatataagagaattagtttaaggaagtaaagagaatcatttgcttgtgttacattttcagtgaggattcagtttaagagtcattcttaggacttccatttcctaatatttattcatgggtaatgaagaaatggtttgcattttgtggccagtcctaatttattttccagctgagccctaacttccggctcccacctacctccacggacttcctaacagagacttatgaataccaggatgtgtttttgttaagtcaggttcaattcgttgcccctgtcagttttatagagtgtgagggtcactccattaaagatctctcctgggtggatcctacttggatgttcaggtgattttgaaaactgctaacatttttaaaaggctagaacatcctttgacttcttgaaaatctgcatgtctggcttgggttttattaccacatgcctgagttcttcaagaatggaaggctcaagtattctcatcttccatttgccaaacttccttcctgatttgagtcacgtgttccacttggaaagaaagggaacagagagcctcctccatggacagtgtatgaatttcattgggaatcttgctctctcccgcctctatgcctttctctctttttaaccttactttacataatattatagatgggccaagaaaagaaaagatgacataacattttgatgaatttcacctattccattcttcacgtttcagaattggtcgactttgttagaagataattgaagtagccttgggtcaaaagcaaccttttcaattgtgatcatacctaaaacatataaaaaccctgccgtagattaaaagcaattataaaatcataaaattgaatgtttgcagaatcctggagcagtagatttctttgtctttggcctgcggactagaaagagggcagcagtagtatgctggagcttccctgggataccagccacatggtttcttttcattagatctgatttttgtttcccactgtagatctgattttgtagttgaaaacatttcaccaccatcaaacactatttctgaatattgtgcctttttatacctagcctagatgaaaaccgatgccattcttattcagaaaatccccccatcctacatgactgttatctagacataaagcaaagtgcatttaattcaaaatttggttcacaatataagtattttgtaaaagccagctgaaccagcattttatcaggtggaaatctctgcaagccaaattgctgatactccttcatgcagatcaacttggtgtcccagtcagaatagaacagcataattacctggagttagggggagtatttctgcactattacttgtcagggagagaagaaacttagaattgtccctcaaaggagtgtcaagaagtatgaataaatgtcctttcaccagctcacaggccagaaatggaggacccaagtcaactaggtgaaactactagcagacccagctttcccataataacctaatctgcaaattgttctattaaagtctcattgttttcaggatgcaatgaaagtggatttcaaaaggctttggaaaaataagtggaacatgactgatcttgaaaaaaaaagcaaaagcttaaatatttgatacaagtttacttagctacaacatactttacattgttgcctttagttatctcacaggcactgacattttatatttagaaaatacttttaatctttctaatctttttttgtaaatattagtgtccattctgtatgactcgctaacctactttgcaaggctttgggcaacattttagctcattaacttcaagatgatgtgtcatctgtataggtcaaagaatgggacttctgaactgaggaatttgctgttgacagccaaagtatagtgtacaagattgatgtaacttgatatgtatttttgttgaagttttttgtaaaaaaaaattatttacaatgttatttgaatgatttttttaaatgctgtgaatctatatttgttgttttgtatattaaaattcatttgccaaa

SEQ ID NO: 105724 - protein, 596 aa, Artificial Sequence
  derived and/or modified sequence
MGFIIHIQQVKKQRKKLDQGLILKKEKYRKEKKCASLSFEVSSDGGTEPSALVDDNGSEEDFSYEDLCQASPRYLQPGGEQLAINELISDGNVVCAEALWDHVTMDDQELGFKAGDVIQVLEASNKDWWWGRSEDKEAWFPASFVRLRVNQEELSENSSSTPSEEQDEEASQSRHRHCENKQQMRTNVIREIMDTERVYIKHLRDICEGYIRQCRKHTGMFTVAQLATIFGNIEDIYKFQRKFLKDLEKQYNKEEPHLSEIGSCFLQNQEGFAIYSEYCNNHPGACLELANLMKQGKYRHFFEACRLLQQMIDIAIDGFLLTPVQKICKYPLQLAELLKYTTQEHGDYSNIKAAYEAMKNVACLINERKRKLESIDKIARWQVSIVGWEGLDILDRSSELIHSGELTKITKQGKSQQRTFFLFDHQLVSCKKDLLRRDMLYYKGRLDMDEMELVDLGDGRDKDCNLSVKNAFKLVSRTTDEVYLFCAKKQEDKARWLQACADERRRVQEDKEMGMEISENQKKLAMLNAQKAGHGKSKGYNRCPVAPPHQGLHPIHQRHITMPTSVPQQQVFGLAEPKRKSSLFWHTFNRLTPFRK

SEQ ID NO: 105725 - DNA, 1791 bp, Artificial Sequence
  derived and/or modified sequence
atgggcttcatcatccacatccagcaggtgaagaagcagagaaagaagctggaccagggcctgatcctgaagaaggagaagtacagaaaggagaagaagtgcgccagcctgagcttcgaggtgagcagcgacggcggcaccgagcccagcgccctggtggacgacaacggcagcgaggaggacttcagctacgaggacctgtgccaggccagccccagatacctgcagcccggcggcgagcagctggccatcaacgagctgatcagcgacggcaacgtggtgtgcgccgaggccctgtgggaccacgtgaccatggacgaccaggagctgggcttcaaggccggcgacgtgatccaggtgctggaggccagcaacaaggactggtggtggggcagaagcgaggacaaggaggcctggttccccgccagcttcgtgagactgagagtgaaccaggaggagctgagcgagaacagcagcagcacccccagcgaggagcaggacgaggaggccagccagagcagacacagacactgcgagaacaagcagcagatgagaaccaacgtgatcagagagatcatggacaccgagagagtgtacatcaagcacctgagagacatctgcgagggctacatcagacagtgcagaaagcacaccggcatgttcaccgtggcccagctggccaccatcttcggcaacatcgaggacatctacaagttccagagaaagttcctgaaggacctggagaagcagtacaacaaggaggagccccacctgagcgagatcggcagctgcttcctgcagaaccaggagggcttcgccatctacagcgagtactgcaacaaccaccccggcgcctgcctggagctggccaacctgatgaagcagggcaagtacagacacttcttcgaggcctgcagactgctgcagcagatgatcgacatcgccatcgacggcttcctgctgacccccgtgcagaagatctgcaagtaccccctgcagctggccgagctgctgaagtacaccacccaggagcacggcgactacagcaacatcaaggccgcctacgaggccatgaagaacgtggcctgcctgatcaacgagagaaagagaaagctggagagcatcgacaagatcgccagatggcaggtgagcatcgtgggctgggagggcctggacatcctggacagaagcagcgagctgatccacagcggcgagctgaccaagatcaccaagcagggcaagagccagcagagaaccttcttcctgttcgaccaccagctggtgagctgcaagaaggacctgctgagaagagacatgctgtactacaagggcagactggacatggacgagatggagctggtggacctgggcgacggcagagacaaggactgcaacctgagcgtgaagaacgccttcaagctggtgagcagaaccaccgacgaggtgtacctgttctgcgccaagaagcaggaggacaaggccagatggctgcaggcctgcgccgacgagagaagaagagtgcaggaggacaaggagatgggcatggagatcagcgagaaccagaagaagctggccatgctgaacgcccagaaggccggccacggcaagagcaagggctacaacagatgccccgtggcccccccccaccagggcctgcaccccatccaccagagacacatcaccatgcccaccagcgtgccccagcagcaggtgttcggcctggccgagcccaagagaaagagcagcctgttctggcacaccttcaacagactgacccccttcagaaagtag

SEQ ID NO: 105726 - DNA, 1791 bp, Artificial Sequence
  derived and/or modified sequence
atgggattcataattcatattcagcaggtgaagaaacagcgcaaaaagctggaccagggactgatcctcaagaaggagaagtatagaaaggagaagaaatgtgcctctctgtcctttgaagtatccagcgacgggggaactgaaccatcggccttagtggacgataatgggtcggaggaggacttttcctacgaagacctgtgtcaggcctctcctcgctatctgcagccgggaggcgagcaactggcaataaacgaacttataagcgacggcaacgtcgtgtgcgccgaggccctttgggatcatgtcactatggacgaccaggaactggggttcaaagctggggatgtgatccaagtgctggaggcttctaacaaggattggtggtggggccgatccgaagacaaggaggcatggttccccgcatctttcgttagactcagggtcaatcaggaagagctgtccgagaattcctcgagcacgccatccgaagaacaagacgaggaagcttcccaaagtagacaccgacattgcgaaaataagcaacagatgcggactaacgttattcgtgaaattatggatacggaaagggtatacataaaacacctgagggatatctgtgagggatacatccgtcagtgcaggaagcacactggaatgtttactgttgcccagcttgcaacaatctttggcaatattgaggatatttataaatttcagcggaaattcctgaaggacctcgagaagcagtacaacaaagaagaaccgcacctatcagaaatcggctcctgttttcttcaaaaccaggaaggctttgcaatatacagcgaatactgcaacaaccacccaggagcctgcctggagctcgctaaccttatgaagcagggcaaataccgacattttttcgaggcttgcagacttttgcagcagatgatcgatatcgccatcgacggcttccttctgacccccgtccagaaaatctgcaaatatcctctccagctagcagaactgctgaaatacactacccaggagcacggcgattactccaacatcaaagcagcctatgaagcaatgaagaatgtagcatgtctgattaacgagcggaaacgcaaactggaatctatcgacaaaattgccaggtggcaggttagcattgtgggttgggaggggttggatattttggaccggtcgtccgagctgattcacagcggcgagctgaccaagattaccaaacagggaaagtcacagcagcgcacttttttcctgtttgatcatcagctggtgagctgcaaaaaggaccttttgagaagagatatgctctattataaaggacggctggatatggatgagatggaactggtggatttaggagacggaagagacaaagattgcaacctgtctgtgaagaacgcattcaagcttgtgtcccggaccaccgatgaggtgtatctgttctgtgccaagaaacaggaggacaaagcgagatggttgcaggcttgtgccgatgagagacggcgggtacaggaggacaaggagatggggatggagatctcggagaatcaaaaaaagttggctatgctgaatgcgcagaaagctgggcatggaaaatccaagggctacaatcgctgccccgtcgctccgcctcaccaggggcttcaccccatccatcaacgccatataaccatgcctacttctgttccccagcagcaggtgttcggcctggctgaacccaagcgcaagagtagcctgttttggcatacattcaaccgactgacaccctttagaaagtag

SEQ ID NO: 105727 - DNA, 1791 bp, Artificial Sequence
  derived and/or modified sequence
atgggcttcatcatccacatccagcaggtgaagaagcagaggaagaagctggaccagggcctcatcctgaagaaggagaagtacaggaaggagaagaagtgtgccagcctgagctttgaggtgtccagtgatggcggcacagagcccagcgccctggtggatgacaatggcagcgaggaggacttctcctatgaggacctgtgccaggccagcccccgctacctgcagcctggaggagagcagctggccatcaatgaactcatcagtgatggaaatgtggtgtgtgccgaggccctgtgggaccacgtgaccatggatgaccaggagctgggcttcaaggctggagatgtgatccaggtgctggaggccagcaacaaggactggtggtggggccgctctgaggacaaggaggcctggttccctgccagctttgtgcggctgcgggtgaaccaggaggagctgtctgagaacagcagcagcaccccatctgaggagcaggatgaggaggccagccagagccgccaccgccactgtgagaacaagcagcagatgaggaccaacgtcatccgggagatcatggacacagagcgggtgtacatcaagcacctgcgggacatctgtgagggctacatccggcagtgcaggaagcacacaggcatgttcaccgtggcccagctggccaccatcttcggcaacatcgaggacatctacaagttccagaggaagttcctgaaggacctggagaagcagtacaacaaggaggagccccacctgtctgaaattggcagctgcttcctgcagaaccaggagggctttgccatctacagcgagtactgcaacaaccaccctggggcctgcctggagctggccaacctgatgaagcagggcaagtaccgccacttctttgaggcctgccgcctgctgcagcagatgattgacatcgccattgatggcttcctgctgacccctgtgcagaagatctgcaagtaccccctgcagctggccgagctgctgaagtacaccacccaggagcacggggactacagcaacatcaaggccgcctatgaggccatgaagaatgtggcctgcctgatcaatgaaaggaagaggaagctggagagcattgacaagatcgcccgctggcaggtgtccatcgtgggctgggagggcctggacatcctggacaggagcagcgagctgatccacagcggggagctgaccaagatcaccaagcagggcaagagccagcagaggaccttcttcctgtttgaccaccagctggtgtcctgcaagaaggacctgctgcggcgggacatgctgtactacaagggccgcctggacatggatgagatggagctggtggacctgggagatggccgggacaaggactgcaacctgtctgtgaagaatgccttcaagctggtgtccaggaccacagatgaggtgtacctgttctgtgccaagaagcaggaggacaaggcccgctggctgcaggcctgtgctgatgagaggagaagagtgcaggaggacaaggagatgggcatggagatcagcgagaaccagaagaagctggccatgctgaatgcccagaaggccggccacggcaagagcaagggctacaaccgctgccctgtggccccaccccaccagggcctgcaccccatccaccagaggcacatcaccatgcccacctctgtgccccagcagcaggtgtttggcctggccgagcccaagaggaagagcagcctcttctggcacaccttcaaccggctgacccccttcaggaagtag

SEQ ID NO: 105728 - DNA, 1791 bp, Artificial Sequence
  derived and/or modified sequence
atgggcttcatcatccacatccagcaggtgaagaagcagcggaagaagctagaccaggggcttatcctgaagaaagaaaagtaccgcaaggaaaaaaaatgcgccagtctgagcttcgaagtgtccagtgatgggggcacggagccatcagccctggtcgacgacaacggatccgaggaagacttttcgtatgaggacctctgtcaggctagcccccgctacctgcagccaggtggtgaacaactcgccattaacgagctcatatcagatggaaacgtggtgtgtgcagaggccctttgggatcacgtgaccatggatgatcaggaactgggattcaaggccggcgatgtgatacaggtgcttgaggcctctaacaaggattggtggtgggggaggagcgaggataaggaggcttggtttcccgcaagcttcgtcaggctccgagtgaaccaggaggagctatccgagaacagctccagtacaccaagtgaagagcaggatgaggaggcttcacagagtagacatcggcactgcgagaataagcagcagatgcgaaccaacgtgattcgagaaatcatggacacagaaagggtgtacataaagcaccttagggacatttgcgaagggtacatccgtcagtgccgcaaacacaccggtatgttcacagtcgcccagctggccacaatatttggtaacatagaggacatctataaattccagcgcaagttcctgaaagatctcgaaaaacagtacaacaaggaagagccccacctcagtgaaatcggatcatgctttttgcaaaaccaggagggcttcgctatctattccgaatactgtaataaccatcctggagcatgcctcgagcttgctaatttgatgaagcagggaaaatatcgccattttttcgaagcctgtcgtctgctgcagcagatgattgatatcgccattgacggcttcttgctgacccccgtgcagaagatatgcaaataccctttgcaactggcggaactgctcaaatataccactcaagaacatggagattacagcaatattaaggccgcctatgaggccatgaagaacgtagcgtgtctgataaatgaaagaaaacggaaactagagtctatcgacaagatcgcgagatggcaggtgtcaatcgtgggatgggaaggattggacatcctcgatcggagctctgagcttatccacagcggggaactcaccaagatcaccaaacaaggaaagtcacagcaaaggactttttttctcttcgaccatcagcttgtgagttgtaagaaagatctcttgaggcgagacatgctctattataaaggtcgcctcgacatggacgaaatggaactggtggacctgggcgacgggcgtgataaggactgtaacctgtcggtgaagaacgcgttcaagctggtgagccgcacaacagacgaggtttatctcttctgtgcgaagaagcaagaagacaaggcacgctggcttcaagcctgtgccgatgagcgccggcgggtgcaggaagataaagagatgggcatggaaatttccgaaaaccaaaagaagctcgcaatgctcaatgcccagaaggctggccacgggaaatcaaaaggctataaccgatgccctgtggccccaccacaccagggcctgcacccaattcatcaacggcatattacaatgccaacttctgtgccccagcagcaggttttcggcttggccgaacccaagcgaaagtcttccctcttctggcatacctttaatcgactgacacctttccggaagtag

SEQ ID NO: 105729 - DNA, 1791 bp, Artificial Sequence
  derived and/or modified sequence
atgggctttattatccacattcaacaggtcaagaaacagcgcaagaagctcgatcaaggactgatcttgaagaaggagaagtaccggaaagagaagaagtgcgcatcactgagctttgaggtgtcaagcgacggtggcacggaaccctctgccctggtggacgataatggaagcgaggaggatttctcatatgaagacctgtgccaggcgtcaccgagatatctgcagcccggaggagaacagttagcaatcaacgagctgatttccgatggtaacgtggtctgcgccgaagctctctgggatcacgtgacaatggacgaccaggaactaggctttaaagccggagacgtaatccaggtgctagaagcgagcaataaggattggtggtgggggcgttccgaggacaaggaagcctggtttcccgctagttttgtgcgtctgcgggttaatcaggaagaactctccgaaaatagctcttccacccctagtgaagagcaggatgaagaggcaagtcaaagccgccatcggcattgcgaaaataaacagcaaatgagaaccaacgtgattagggaaataatggacactgagagggtgtacatcaagcatctcagggatatatgcgagggttatatcagacagtgtcggaagcataccggcatgtttaccgtggcccaacttgctactatatttggaaacatcgaagacatctacaaatttcaaagaaagttcctgaaagatttggaaaagcagtacaataaagaagaacctcacttgtcggagatcggctcatgttttctacagaaccaggaagggttcgctatctattcagagtactgtaacaaccaccctggcgcttgcctcgagctggccaatctcatgaagcaaggaaagtatcgccacttctttgaagcgtgccgcctcttacaacagatgatcgatattgctattgacggatttttgctgactcctgtgcagaaaatttgtaaatatcccctgcagttggcagaattgcttaagtatactactcaagagcatggcgactattctaatatcaaggcggcatacgaagctatgaaaaatgtggcttgcctcatcaacgaaaggaagcgcaagcttgagtctatcgacaagattgcacgctggcaggtaagtatagtgggctgggaggggctggatattctggatagatcaagtgaattgattcattccggcgagctaaccaagattacaaaacaggggaagtctcagcagaggaccttcttcctgttcgatcaccaactggtgagctgcaagaaagacctcctgcgaagggacatgttatactataagggaaggctcgacatggatgagatggagctcgtggatctgggggacggacgggacaaagactgtaacctgagcgtgaagaacgcatttaagcttgttagcagaactacagacgaggtgtatctgttctgcgcgaaaaagcaggaggacaaggcgagatggctacaggcctgcgctgacgagcggagacgtgtccaagaagacaaggagatggggatggaaatttctgagaaccaaaagaaactggcgatgctgaacgcccagaaagcaggccatggtaagagcaagggttataacaggtgcccagtggcccctccacaccagggtttacacccgatccatcagcgtcatatcaccatgcccacttcggtgcctcagcagcaggtgtttggcctggccgaacccaagcggaagtcctccttgttttggcatactttcaaccgactgacccctttccgcaaatag

SEQ ID NO: 105730 - DNA, 2080 bp, Artificial Sequence
  derived and/or modified sequence
gtgatgcttggggaccggctcctcggtcacaccccagtcctgctctgaaggttgccgttttccaaacagaaggatggtagctagaggggagatagcaagattctggagtctggaaagccttcacttggggtgctttcatgtatcatcattccacttgaggctcaaagcacaccaataacaagtacttgttcagaatgtataaacaaccctgagagatgggttttatcatccacattcaacaggtgaaaaaacaaagaaagaaacttgaccaaggactcatactcaaaaaagaaaaatatagaaaagaaaaaaaatgtgcatcgctatcatttgaagtttcttcagatggaggtactgagccctctgccttagtggatgacaacggtagtgaggaggacttcagctatgaagacctctgccaggccagccctcggtacctgcagcccggcggggagcagctggccatcaatgagctgatcagtgatggcaacgtggtctgcgcagaagccctgtgggaccatgtgaccatggatgaccaggaactgggcttcaaagccggggatgtcatccaggttctggaagcctccaacaaggactggtggtggggccgcagtgaagataaggaagcctggttccccgcgagcttcgtcagattgcgagtgaatcaggaagagctgtcggaaaactccagcagcacccccagtgaggagcaggacgaggaggccagccagagccgccacagacactgtgagaacaagcagcagatgcggaccaacgtcatccgggagatcatggacaccgagcgggtgtacatcaaacacctcagggacatctgtgagggctatatccgacagtgccgcaagcacacaggaatgttcaccgttgcgcagctagccactatttttggaaacattgaagatatttacaaattccaaagaaagtttctgaaagaccttgagaaacagtacaacaaagaggaacctcacttaagtgaaataggatcttgctttcttcaaaatcaagagggctttgccatctattccgagtactgcaacaaccacccgggcgcctgcctggagctcgccaacctcatgaagcagggcaagtacagacatttctttgaagcctgccgcctgctgcagcagatgattgacatcgccatcgacgggttcctgctcacaccagtgcagaagatctgcaaatacccgctgcagctggccgagctgctcaagtataccacacaggaacacggtgattacagcaacataaaggcagcatatgaggccatgaagaatgtggcctgtctgatcaacgagcgcaagcgcaagctggagagcatcgacaagatagctcgctggcaggtgtctatcgtgggctgggagggactggatatcttagaccgaagctcagaattgattcattctggggagctgaccaaaatcactaagcaaggcaaaagccagcagcggacgttcttcctgtttgaccaccagctggtgtcctgcaagaaggacctgctgcgcagggacatgctgtactacaagggccggctggacatggatgagatggagcttgtggacctgggggatgggcgcgacaaggactgcaacctcagcgtgaaaaatgccttcaagctcgtcagtaggaccacagacgaggtttatttgttttgtgccaaaaaacaagaagacaaggcgaggtggctgcaggcctgtgcagatgaaaggaggcgggtgcaagaggacaaggagatgggaatggaaatttcagaaaaccagaagaaacttgccatgttaaatgctcaaaaggcaggacatggaaagtcaaaaggctacaacaggtgccctgtggccccaccgcaccagggcctgcaccccatccaccagcgccacatcactatgcccacaagcgtcccccagcagcaggtctttggcctggcggaacccaagaggaagtcctcgctcttctggcacaccttcaacaggctcacccccttccggaaatgaaaacaggaggctgtgcttccatggagctgggtgtcaagagaagaactgtctttgtttcttgtgtgcttcaatcc

SEQ ID NO: 105731 - protein, 462 aa, Artificial Sequence
  derived and/or modified sequence
MMEESGIETTPPGTPPPNPAGLAATAMSSTPVPLAATSSFSSPNVSSMESFPPLAYSTPQPPLPPVRPSAPLPFVPPPAVPSVPPLVTSMPPPVSPSTAAAFGNPPVSHFPPSTSAPNTLLPAPPSGPPISGFSVGSTYDITRGHAGRAPQTPLMPSFSAPSGTGLLPTPITQQASLTSLAQGTGTTSAITFPEEQEDPRITRGQDEASAGGIWGFIKGVAGNPMVKSVLDKTKHSVESMITTLDPGMAPYIKSGGELDIVVTSNKEVKVAAVRDAFQEVFGLAVVVGEAGQSNIAPQPVGYAAGLKGAQERIDSLRRTGVIHEKQTAVSVENFIAELLPDKWFDIGCLVVEDPVHGIHLETFTQATPVPLEFVQQAQSLTPQDYNLRWSGLLVTVGEVLEKSLLNVSRTDWHMAFTGMSRRQMIYSAARAIADDYFPRIPKEQWQSMAWLKLEIFLPLVTW

SEQ ID NO: 105732 - DNA, 1338 bp, Artificial Sequence
  derived and/or modified sequence
atgatggaggagagcggcatcgagaccaccccccccggcacccccccccccaaccccgccggcctggccgccaccgccatgagcagcacccccgtgcccctggccgccaccagcagcttcagcagccccaacgtgagcagcatggagagcttcccccccctggcctacagcaccccccagccccccctgccccccgtgagacccagcgcccccctgcccttcgtgcccccccccgccgtgcccagcgtgccccccctggtgaccagcatgcccccccccgtgagccccagcaccgccgccgccttcggcaacccccccgtgagccacttcccccccagcaccagcgcccccaacaccctgctgcccgccccccccagcggcccccccatcagcggcttcagcgtgggcagcacctacgacatcaccagaggccacgccggcagagccccccagacccccctgatgcccagcttcagcgcccccagcggcaccggcctgctgcccacccccatcacccagcaggccagcctgaccagcctggcccagggcaccggcaccaccagcgccatcaccttccccgaggagcaggaggaccccagaatcaccagaggccaggacgaggccagcgccggcggcatctggggcttcatcaagggcgtggccggcaaccccatggtgaagagcgtgctggacaagaccaagcacagcgtggagagcatgatcaccaccctggaccccggcatggccccctacatcaagagcggcggcgagctggacatcgtggtgaccagcaacaaggaggtgaaggtggccgccgtgagagacgccttccaggaggtgttcggcctggccgtggtggtgggcgaggccggccagagcaacatcgccccccagcccgtgggctacgccgccggcctgaagggcgcccaggagagaatcgacagcctgagaagaaccggcgtgatccacgagaagcagaccgccgtgagcgtggagaacttcatcgccgagctgctgcccgacaagtggttcgacatcggctgcctggtggtggaggaccccgtgcacggcatccacctggagaccttcacccaggccacccccgtgcccctggagttcgtgcagcaggcccagagcctgaccccccaggactacaacctgagatggagcggcctgctggtgaccgtgggcgaggtgctggagaagagcctgctgaacgtgagcagaaccgactggcacatggccttcaccggcatgagcagaagacagatgatctacagcgccgccagagccatcgccgagagccccaagagcagcggcagcccctggctgggctag

SEQ ID NO: 105733 - DNA, 1389 bp, Artificial Sequence
  derived and/or modified sequence
atgatggaggagagcggcatcgagaccaccccccccggcacccccccccccaaccccgccggcctggccgccaccgccatgagcagcacccccgtgcccctggccgccaccagcagcttcagcagccccaacgtgagcagcatggagagcttcccccccctggcctacagcaccccccagccccccctgccccccgtgagacccagcgcccccctgcccttcgtgcccccccccgccgtgcccagcgtgccccccctggtgaccagcatgcccccccccgtgagccccagcaccgccgccgccttcggcaacccccccgtgagccacttcccccccagcaccagcgcccccaacaccctgctgcccgccccccccagcggcccccccatcagcggcttcagcgtgggcagcacctacgacatcaccagaggccacgccggcagagccccccagacccccctgatgcccagcttcagcgcccccagcggcaccggcctgctgcccacccccatcacccagcaggccagcctgaccagcctggcccagggcaccggcaccaccagcgccatcaccttccccgaggagcaggaggaccccagaatcaccagaggccaggacgaggccagcgccggcggcatctggggcttcatcaagggcgtggccggcaaccccatggtgaagagcgtgctggacaagaccaagcacagcgtggagagcatgatcaccaccctggaccccggcatggccccctacatcaagagcggcggcgagctggacatcgtggtgaccagcaacaaggaggtgaaggtggccgccgtgagagacgccttccaggaggtgttcggcctggccgtggtggtgggcgaggccggccagagcaacatcgccccccagcccgtgggctacgccgccggcctgaagggcgcccaggagagaatcgacagcctgagaagaaccggcgtgatccacgagaagcagaccgccgtgagcgtggagaacttcatcgccgagctgctgcccgacaagtggttcgacatcggctgcctggtggtggaggaccccgtgcacggcatccacctggagaccttcacccaggccacccccgtgcccctggagttcgtgcagcaggcccagagcctgaccccccaggactacaacctgagatggagcggcctgctggtgaccgtgggcgaggtgctggagaagagcctgctgaacgtgagcagaaccgactggcacatggccttcaccggcatgagcagaagacagatgatctacagcgccgccagagccatcgccgacgactacttccccagaatccccaaggagcagtggcagagcatggcctggctgaagctggagatcttcctgcccctggtgacctggtag

SEQ ID NO: 105734 - DNA, 1338 bp, Artificial Sequence
  derived and/or modified sequence
atgatggaggagagcggaatagagacaaccccacccggcacccctccacctaaccctgcggggttagccgccacggccatgtcatctaccccagtgcctcttgccgcaacaagcagtttttcatcaccaaacgtctcttcaatggaatcctttcctccactggcctactccacaccccagccaccattgcccccagtgaggccttcagcccccctgccatttgtaccacctcccgcagtgcctagcgtgcccccgctggtgacaagcatgcccccgccagtgagcccaagtaccgccgctgcctttggcaatccccccgtcagccatttcccccctagtacatctgcccccaatactcttctcccagcccccccgagcgggccgccaataagtgggttttccgtagggtctacatacgacatcaccagagggcatgccggacgggccccacagacccctctaatgcctagtttctccgcgccctctggcaccgggctgctgcccactccaataacccagcaggcaagtctgacaagtctggcccagggaaccgggaccacttccgctatcacctttccggaagagcaagaggaccctcgaattacacggggacaggacgaggcctcagcgggggggatatgggggtttattaaaggggtcgcaggcaacccaatggtcaagtccgtgctggataaaactaagcacagcgtcgagtccatgatcaccactttagaccccggcatggcaccatatattaagtcaggtggggaacttgatatagtggtcacatcaaacaaagaggtcaaggtggccgccgttcgcgacgcattccaagaggtgttcggcctagctgtagtagtgggagaggcgggccagtctaatattgcccctcagcccgtcggctatgctgcaggcctaaaaggtgcccaggagcggatcgattccctgcgccgcaccggtgtgatccacgagaagcagacagccgtgtctgttgagaattttatcgccgaactactgcccgataagtggttcgatattggctgtcttgttgtggaggacccagtgcacggcatacatctagagacatttacccaggcaacccccgtgcctttggagttcgtgcagcaggctcaaagtcttacccctcaagactataacctgcgatggagcgggcttcttgtcacagtcggggaggtgttagagaagtctttgctgaatgtgagtcgcactgattggcatatggcatttaccgggatgtcccgtaggcagatgatttacagcgcagcccgcgcaatagctgagtctccaaagtcttcaggtagtccttggcttggctag

SEQ ID NO: 105735 - DNA, 1389 bp, Artificial Sequence
  derived and/or modified sequence
atgatggaggaatctggaattgagaccacaccccctgggacacccccaccaaaccctgcaggcttggcagctacagccatgtcttctactccagtgcccctagccgccacatcaagctttagtagccctaatgtgtcctcaatggaaagcttcccaccactggcgtatagcaccccccagccaccgcttcctcctgtgcggcctagcgcgccactgccctttgtcccaccgcccgccgtcccgagcgtgccaccactggtaactagcatgcccccacccgtgtctccaagcacagccgccgctttcggcaacccaccagttagtcatttccccccttctacatcagctcctaataccctgctgcccgcgcctccatctggaccgcccatttccggattctccgtaggctcaacttatgatatcacccgcggacacgcaggaagagccccacagactcctcttatgcctagcttcagtgccccatcaggcaccgggctgctcccgaccccaattactcagcaggcctcacttacctctttggcccaagggactgggacaactagtgccattacattccctgaggaacaggaggatccacgtatcacaagagggcaagatgaggcctccgctgggggcatctggggcttcataaagggtgtggctggaaaccccatggtgaaaagtgtgctggataagacgaaacactcggtggaaagcatgatcacaacactggatccaggcatggcgccatatattaagtcaggcggagaactggacattgtggttacctccaataaagaagtcaaagtggcagcggttcgcgatgctttccaggaagtgttcggattggccgttgtggtgggcgaggctgggcaaagtaacatagcaccacagcctgtaggctacgcagccggactaaagggagctcaagagcgcattgatagcctgcggcgcacaggcgtcatccacgagaaacagacagccgtgtctgttgaaaactttattgccgaattgctgcccgataagtggtttgatatcggatgtttggtggtcgaggatcctgttcacggtatacatctggaaaccttcacgcaggccacacctgttccccttgagtttgtgcagcaggcacagtctctcactccacaggactataacctcaggtggtcaggcctgctggtgaccgtgggcgaggtacttgagaaatcactgttgaatgtttctaggaccgactggcacatggctttcactggtatgagcagaaggcagatgatctactcagctgccagggccattgccgacgactacttcccaaggattccaaaggagcagtggcagtcaatggcatggctgaagctcgagatttttttacctctggtgacatggtag

SEQ ID NO: 105736 - DNA, 1338 bp, Artificial Sequence
  derived and/or modified sequence
atgatggaggagagcggcatcgagaccaccccacctggcaccccaccacccaacccagctggcctggccgccacagccatgagcagcacccctgtgcccctggccgccaccagcagcttcagcagccccaacgtgtcctccatggagagcttcccccccctggcctacagcaccccccagccccccctgccccctgtgcggcccagcgcccccctgccctttgtgcccccacctgctgtgcccagcgtgccccccctggtgacctccatgcctcctcctgtgagccccagcacagctgctgccttcggcaacccccctgtgagccacttcccccccagcaccagcgcccccaacaccctgctgcctgccccacccagcggcccccccatcagcggcttctctgtgggcagcacctatgacatcacccggggccacgccggccgggccccccagacccccctgatgcccagcttcagcgcccccagcggcaccggcctgctgcccacccccatcacccagcaggccagcctgaccagcctggcccagggcaccggcaccaccagcgccatcaccttccctgaggagcaggaggacccccgcatcacccggggccaggatgaggccagcgctgggggcatctggggcttcatcaagggcgtggccggcaaccccatggtgaagtctgtgctggacaagaccaagcacagcgtggagagcatgatcaccaccctggaccccggcatggccccctacatcaagagcggcggggagctggacatcgtggtgaccagcaacaaggaggtgaaggtggccgctgtgagagatgccttccaggaggtgtttggcctggccgtggtggtgggggaggccggccagagcaacatcgccccccagcctgtgggctatgctgctggcctgaagggggcccaggagagaattgacagcctgcggaggactggagtcatccacgagaagcagacagctgtgtctgtggagaacttcatcgccgagctgctgcctgacaagtggtttgacatcggctgcctggtggtggaggaccctgtgcacggcatccacctggagaccttcacccaggccacccctgtgcccctggagtttgtgcagcaggcccagagcctgaccccccaggactacaacctgcgctggagcggcctgctggtgacagtgggggaggtgctggagaagagcctgctgaatgtgtccaggacagactggcacatggccttcaccggcatgagccggcggcagatgatctacagcgctgcccgggccatcgccgagagccccaagagcagcggcagcccctggctgggctag

SEQ ID NO: 105737 - DNA, 1389 bp, Artificial Sequence
  derived and/or modified sequence
atgatggaggagagcggcatcgagaccaccccacctggcaccccaccacccaacccagctggcctggccgccacagccatgagcagcacccctgtgcccctggccgccaccagcagcttcagcagccccaacgtgtcctccatggagagcttcccccccctggcctacagcaccccccagccccccctgccccctgtgcggcccagcgcccccctgccctttgtgcccccacctgctgtgcccagcgtgccccccctggtgacctccatgcctcctcctgtgagccccagcacagctgctgccttcggcaacccccctgtgagccacttcccccccagcaccagcgcccccaacaccctgctgcctgccccacccagcggcccccccatcagcggcttctctgtgggcagcacctatgacatcacccggggccacgccggccgggccccccagacccccctgatgcccagcttcagcgcccccagcggcaccggcctgctgcccacccccatcacccagcaggccagcctgaccagcctggcccagggcaccggcaccaccagcgccatcaccttccctgaggagcaggaggacccccgcatcacccggggccaggatgaggccagcgctgggggcatctggggcttcatcaagggcgtggccggcaaccccatggtgaagtctgtgctggacaagaccaagcacagcgtggagagcatgatcaccaccctggaccccggcatggccccctacatcaagagcggcggggagctggacatcgtggtgaccagcaacaaggaggtgaaggtggccgctgtgagagatgccttccaggaggtgtttggcctggccgtggtggtgggggaggccggccagagcaacatcgccccccagcctgtgggctatgctgctggcctgaagggggcccaggagagaattgacagcctgcggaggactggagtcatccacgagaagcagacagctgtgtctgtggagaacttcatcgccgagctgctgcctgacaagtggtttgacatcggctgcctggtggtggaggaccctgtgcacggcatccacctggagaccttcacccaggccacccctgtgcccctggagtttgtgcagcaggcccagagcctgaccccccaggactacaacctgcgctggagcggcctgctggtgacagtgggggaggtgctggagaagagcctgctgaatgtgtccaggacagactggcacatggccttcaccggcatgagccggcggcagatgatctacagcgctgcccgggccatcgcagatgactacttcccccgcatccccaaggagcagtggcagagcatggcctggctgaagctggagatcttcctgcccctggtgacctggtag

SEQ ID NO: 105738 - DNA, 1338 bp, Artificial Sequence
  derived and/or modified sequence
atgatggaggagagcggcatcgagaccaccccccccggcaccccccccccgaatcccgccggactggcagccaccgctatgtccagcaccccagtgcccctggccgccacttcatcttttagtagccccaatgtcagtagcatggagtccttcccaccactggcctattcaacccctcagcctcctctgccaccagtgcgcccgtctgcccctctccccttcgtgcccccccccgcggttccctccgtgccacccctggtcactagcatgcctccccccgtctcaccatcaacagccgcagctttcggcaatcccccggtatctcattttccaccctcgacctccgcccctaacacgcttctcccagctcccccctctgggccacccatctcaggctttagcgtgggttccacttacgacataacacggggtcacgccggacgcgcaccacagaccccactcatgcccagcttctccgcccccagcggaacaggactgctgccaacacctatcactcaacaggcgtctctcacgagtcttgctcagggcaccggaaccacaagcgccataaccttccccgaagagcaggaggatccaagaattacacgggggcaggatgaagcttctgccgggggtatctggggattcatcaaaggcgtggcggggaacccaatggtgaaatcagtgcttgacaagaccaagcattctgtggagagcatgattactaccctcgatccaggaatggctccctatatcaaaagtggaggggagctggacatcgtcgtcactagtaacaaggaggtgaaggttgctgcggttagagacgctttccaggaggtgtttggactcgccgtggtggtgggtgaggcaggtcagtcaaacatcgcccctcagccagttggctatgctgcaggcctcaaaggcgcacaagagagaattgacagcttgcgccgcactggtgtgattcacgagaaacagactgccgtttcagttgagaattttatcgctgaattactgcctgataaatggttcgatatcgggtgcctggttgtcgaagatccggttcacggcattcaccttgaaacctttacacaggccacaccagttcccttggagtttgtgcaacaggctcagtccctgacccctcaggactataacttgcggtggtccgggctgctggtgactgtgggcgaagtgctggaaaagtccttactgaacgtatccaggactgactggcatatggcgttcactggcatgagccggagacagatgatttactctgccgctagagctatagcggagtcacccaagtcatcaggtagcccttggctaggctag

SEQ ID NO: 105739 - DNA, 1389 bp, Artificial Sequence
  derived and/or modified sequence
atgatggaggagagcggcatcgagaccaccccccccggcacccccccgcccaacccggctggattggctgctacagcaatgagcagcacccccgtgccactagccgcaacctctagctttagttctcccaacgtgagctcaatggaatctttcccccctctggcatattctactccccagccccctctcccacccgttcgcccatctgctccgctgccgtttgttccgcctcccgcggtgccaagtgtgcctccattagtgacctccatgcccccaccggtctctccaagtaccgctgccgcatttgggaacccaccagtaagccacttccctccctccacaagcgctcctaataccctgctgccggccccaccctccggtccacccatatccggattcagcgtgggctcaacctacgatatcacgcggggacacgcaggccgagccccgcagacccccctgatgcctagcttctcagcaccctcaggtaccggactcctcccaactccgatcacccagcaggcctcactgacttctctcgcccagggaactggtaccacctctgctatcacctttcccgaggaacaggaggatcctcggataacacgagggcaggatgaggccagtgccggggggatctgggggttcatcaaaggcgttgctggaaatccaatggtaaaaagtgtgctcgataagacaaagcattctgtagaatctatgattacgactctggacccaggcatggctccctatatcaagagcggcggagagctcgatatagtcgtgaccagcaataaagaagtgaaagtggctgcagtgcgagatgcttttcaagaggtcttcggccttgctgtggttgtaggggaggccgggcagtcaaacattgcccctcagcctgttggctatgcagcaggtctgaaaggcgctcaagagaggatcgactcactaaggcggaccggagttatccatgagaaacagacggcagtttctgtagagaattttattgccgagctgcttcccgataaatggtttgacattggctgtctcgtggttgaggacccagtccatggcatccacttggaaacgttcacccaggcaaccccggtgccactcgagtttgtgcaacaagcacagtcgctcaccccccaggactataatctgcggtggtctggcctgctggtcactgttggcgaagttctggaaaagtcactgctgaacgtttctcggacagattggcatatggcatttacgggtatgtcaaggcgacagatgatttactctgccgctcgggcaatcgcagacgactatttcccccgaattcctaaagaacagtggcagtctatggcatggcttaagctggagatattcttgcccctggtgacatggtag

SEQ ID NO: 105740 - DNA, 2719 bp, Artificial Sequence
  derived and/or modified sequence
cacgccgaggtaacttccagggtgcgccttcgttgtcttctccaagctgtagttctacgtcccgacctccctatcataccacactcttcagcgaccacgcaggcactttcccggtccccagtataccataattgaagaaaaatgatggaagagagtggaatagagacaacaccacctgggactcctccaccaaatcctgcagggctggctgctactgctatgtcttctacccctgttccattagcggcaaccagttctttttcttctccaaatgtatcctccatggagtccttcccaccactcgcatactctactcctcagccgccccttcctcctgtgaggccttcagcaccattaccttttgtgcctcctcctgcagttccttctgtcccaccacttgttacttctatgccacctcctgtttctccatcaactgctgctgccttcggtaatcctcctgtatctcacttcccaccttcaacttctgccccaaacactcttttacctgcacccccttcgggtcctcctatatcaggattttctgttggttcaacttatgacattacaaggggacatgctgggagagctccccagacacccctgatgccatcattttctgcaccttcaggaacaggtcttttgccaactcctattactcagcaagccagtttgacatctctggcacagggaactggaaccacatcagccattactttcccagaggagcaagaagaccctagaattactagaggtcaggatgaagcatctgctggtggaatctggggttttattaagggtgtggctgggaatcctatggtgaagtctgtgcttgataagacaaaacattcagtagaaagcatgattacaacgctggaccctggcatggctccctatatcaaatctggaggtgaactggatattgtagtgacctcaaataaagaagtaaaagttgctgctgtccgagatgccttccaggaggtctttggcttagctgtggttgtaggggaagctggacagtccaatattgccccacaaccagtgggctatgcagctggattaaaaggtgctcaggaacggatagatagcttgcgtcgaactggggtgatccatgaaaaacagacagctgtgtcagtagaaaacttcattgcagaattgctgcctgacaaatggtttgacattggttgtttggtggttgaagatcctgtccatggcattcatctagaaacatttacacaagccacaccagtgcctttggaatttgtacagcaggctcaaagtctaactccccaggactataatctgaggtggtcaggccttttggtgacagtgggtgaagtcctggaaaagagtttactgaatgtcagccggactgattggcacatggcatttactgggatgtcccgtcggcagatgatctacagtgcagccagagcgatagcggaatccccaaagagcagtggcagtccatggcttggttgaagctagaaattttcctgcccctggtgacctggtaagcctcctgctcggaaccgtgtgagtgggtgaggaagatgagagatggtcagatggaagagagaaatacatgaactgctctggcctctctggttctgttcttggcccagagtttttgaaaagcagcggagcatgactgacttcacatgctcagctttctcagccttttgtttattttgttgtccttagatttccctgttgtaaaaggggcaagaaaagtaactcatcatctctaacacaccatggcagcttagccaggtagtcttagtggtggtgtttaggcataagatatgctgatcatcagtctcaggccacagtttccttcactaatcgtccagcttgagtgttctgttctcttcctgcccatttccttgaacctcctgctctagccttggcggagggagagtgctatttgcttttgttctccctctgtcttaggaaaagccatctttaatatagttcttcaccactgttggggttgttttgtgattttttttttcttccgaagaactcctggttgttattggattttgtattttaatacaaattattgaattttataagcttgtacacaatatttaattagtgtgaaaggaaacaaagaatgcaggaaaaataatttaatatcaacctcagttgacaaggtgctcagattattcaattcgggatcctccttttgttaggtttttgagacaaccctagacctaaactgtgtcacagacttctgaatgtttaggcagtgctagtaatttcctcgtaatgattctgttattactttcctattctttattcctctttcttctgaagattaatgaagttgaaaattgaggtggataaatacaaaaaggtagtgtgatagtataagtatctaagtgcagatgaaagtgtgttatatacatccattcaaaattatgcaagttagtaattactcagggttaactaaattactttaatatgctgttgaatctactctgttccttggctagaaaaaattataaacaggactttgtagtttgggaagccaaattgataatattctatgttctaaaagttgggctatacataaattattaagaaatatggatttttattcccaggatatggtgttcattttatgatattacgcaggatgatgtattgagtaaaatcagttttgtaaatatgtaaatatgtcataaataaacaatgctttgacttatttccaaag

SEQ ID NO: 105741 - DNA, 2726 bp, Artificial Sequence
  derived and/or modified sequence
cacgccgaggtaacttccagggtgcgccttcgttgtcttctccaagctgtagttctacgtcccgacctccctatcataccacactcttcagcgaccacgcaggcactttcccggtccccagtataccataattgaagaaaaatgatggaagagagtggaatagagacaacaccacctgggactcctccaccaaatcctgcagggctggctgctactgctatgtcttctacccctgttccattagcggcaaccagttctttttcttctccaaatgtatcctccatggagtccttcccaccactcgcatactctactcctcagccgccccttcctcctgtgaggccttcagcaccattaccttttgtgcctcctcctgcagttccttctgtcccaccacttgttacttctatgccacctcctgtttctccatcaactgctgctgccttcggtaatcctcctgtatctcacttcccaccttcaacttctgccccaaacactcttttacctgcacccccttcgggtcctcctatatcaggattttctgttggttcaacttatgacattacaaggggacatgctgggagagctccccagacacccctgatgccatcattttctgcaccttcaggaacaggtcttttgccaactcctattactcagcaagccagtttgacatctctggcacagggaactggaaccacatcagccattactttcccagaggagcaagaagaccctagaattactagaggtcaggatgaagcatctgctggtggaatctggggttttattaagggtgtggctgggaatcctatggtgaagtctgtgcttgataagacaaaacattcagtagaaagcatgattacaacgctggaccctggcatggctccctatatcaaatctggaggtgaactggatattgtagtgacctcaaataaagaagtaaaagttgctgctgtccgagatgccttccaggaggtctttggcttagctgtggttgtaggggaagctggacagtccaatattgccccacaaccagtgggctatgcagctggattaaaaggtgctcaggaacggatagatagcttgcgtcgaactggggtgatccatgaaaaacagacagctgtgtcagtagaaaacttcattgcagaattgctgcctgacaaatggtttgacattggttgtttggtggttgaagatcctgtccatggcattcatctagaaacatttacacaagccacaccagtgcctttggaatttgtacagcaggctcaaagtctaactccccaggactataatctgaggtggtcaggccttttggtgacagtgggtgaagtcctggaaaagagtttactgaatgtcagccggactgattggcacatggcatttactgggatgtcccgtcggcagatgatctacagtgcagccagagcgatagcggatgattattttcctagaatccccaaagagcagtggcagtccatggcttggttgaagctagaaattttcctgcccctggtgacctggtaagcctcctgctcggaaccgtgtgagtgggtgaggaagatgagagatggtcagatggaagagagaaatacatgaactgctctggcctctctggttctgttcttggcccagagtttttgaaaagcagcggagcatgactgacttcacatgctcagctttctcagccttttgtttattttgttgtccttagatttccctgttgtaaaaggggcaagaaaagtaactcatcatctctaacacaccatggcagcttagccaggtagtcttagtggtggtgtttaggcataagatatgctgatcatcagtctcaggccacagtttccttcactaatcgtccagcttgagtgttctgttctcttcctgcccatttccttgaacctcctgctctagccttggcggagggagagtgctatttgcttttgttctccctctgtcttaggaaaagccatctttaatatagttcttcaccactgttggggttgttttgtgattttttttttcttccgaagaactcctggttgttattggattttgtattttaatacaaattattgaattttataagcttgtacacaatatttaattagtgtgaaaggaaacaaagaatgcaggaaaaataatttaatatcaacctcagttgacaaggtgctcagattattcaattcgggatcctccttttgttaggtttttgagacaaccctagacctaaactgtgtcacagacttctgaatgtttaggcagtgctagtaatttcctcgtaatgattctgttattactttcctattctttattcctctttcttctgaagattaatgaagttgaaaattgaggtggataaatacaaaaaggtagtgtgatagtataagtatctaagtgcagatgaaagtgtgttatatacatccattcaaaattatgcaagttagtaattactcagggttaactaaattactttaatatgctgttgaatctactctgttccttggctagaaaaaattataaacaggactttgtagtttgggaagccaaattgataatattctatgttctaaaagttgggctatacataaattattaagaaatatggatttttattcccaggatatggtgttcattttatgatattacgcaggatgatgtattgagtaaaatcagttttgtaaatatgtaaatatgtcataaataaacaatgctttgactta

SEQ ID NO: 105742 - DNA, 1338 bp, Artificial Sequence
  derived and/or modified sequence
atgatggaggagtcgggaatcgaaactaccccgccagggacccccccacctaaccccgctggactagccgcaaccgcaatgtcctccacaccagtgcccctggcagcaactagcagtttctcaagtcctaacgtgtcttctatggaatctttcccccctctggcatattccactccccagccacccctaccccctgtgcgaccgtctgcacccctaccatttgttccacctcctgctgtaccctcagttccgccactggtgacctccatgccccctcccgtgtcaccgagtaccgccgctgcgttcggcaaccctccagtttcgcacttccctccgtctaccagcgctccaaatactcttttgccggcaccccctagcgggcctccaatctccggattttctgttggatccacatacgacatcactcggggtcacgccggtcgcgctccccagacccccctgatgcctagcttttctgcgccatccggcactggactgctgcctacaccaatcacacagcaagcaagtttaacatctctcgcacaggggaccggtaccacatccgctattacctttcctgaggaacaagaggaccctagaatcacccgtggccaggatgaagcttctgctggcggtatctgggggtttatcaagggcgttgccggaaacccaatggtgaagagcgttctcgacaaaacgaagcattctgtggaatctatgatcaccacgctggatccgggaatggccccatacattaagagtggaggggaattggatatcgtagtgacaagtaataaggaggtcaaagtggcagctgtcagggacgcatttcaagaggtcttcgggttggccgttgtggtcggcgaagccggtcagtccaacatagccccacaaccagtcggatacgcggcaggacttaagggcgctcaagagcgcattgatagtttgcgccgaacaggtgtcattcatgaaaaacaaaccgccgtcagcgtggagaatttcatcgcagagctgttgcccgacaagtggtttgatattggatgcctcgttgtcgaggatcccgtacacggcatccacctagagacattcacacaggctacccccgtacctcttgaattcgtgcagcaggcacagtccctcaccccacaggactacaacctgaggtggtccggactgcttgtaaccgtgggtgaggtactcgaaaagtccctcctgaacgtatcccggaccgactggcatatggcttttacaggaatgtctcgccgacagatgatttactcagcagccagagccattgccgaatccccaaaatcgtcaggatctccgtggttggggtag

SEQ ID NO: 105743 - DNA, 1389 bp, Artificial Sequence
  derived and/or modified sequence
atgatggaggagtctggcatcgaaactaccccccctggcacaccccctccaaaccctgctggcttggccgctaccgccatgagcagcacaccagttccactggctgccaccagctccttctcatccccaaatgtgagttctatggaatctttcccccctttagcctatagcacaccccaaccacctcttcctcccgtgcgccctagtgcccctctgccattcgtgccaccacctgcagtgccgtctgtgccccctctcgtcactagcatgccacctcctgtgtcccctagtacagcagcagccttcggaaatccccctgtgagccacttcccaccttctacctccgcgccaaacaccttgttgccggctcctccctccgggccacctatttccggattctctgttggaagtacctatgacatcacccggggacatgccggacgcgctccacagacaccattgatgccatcattttccgcacctagtgggacaggactgcttcccaccccaatcacacagcaagcatcgctcacgtccttggcacaaggcactggtacaacaagtgcaattaccttcccagaagaacaagaagacccacggatcacccgcggtcaggatgaggcctccgccggtggtatatggggatttatcaaaggagtcgctggcaaccccatggtgaaatcagttttggacaaaacaaaacacagcgtagaatccatgatcaccactcttgatcccggtatggcaccgtatataaagtccggtggcgaactggacattgttgttacttccaacaaagaggtcaaagtggcggctgttcgggacgcatttcaggaagtatttggcctggctgttgtagtcggggaagccggacagtcaaacattgctccccagcccgtggggtacgccgctggtttgaagggcgctcaagaaagaatcgacagcttaaggaggactggtgtcatccacgagaagcaaaccgccgtttccgtagaaaactttatcgccgagctccttcccgacaagtggttcgatatcgggtgcctggtcgtggaagacccggtccatggaattcacttggagactttcacacaggccacccctgtcccattggaattcgtacagcaggcgcagtctcttacaccccaggactataacctgcgctggagtggtctactcgtgacagtgggcgaagtccttgaaaagagtttattgaatgtcagcagaaccgactggcatatggcttttactggaatgtccaggagacagatgatttattccgcggctcgggctatcgccgatgactacttcccccgaattcccaaagaacagtggcagtcgatggcctggctgaagctcgagatcttcctccccctggtcacttggtag

SEQ ID NO: 105744 - protein, 198 aa, Artificial Sequence
  derived and/or modified sequence
MHSEAEESKEVATDVFNSKNLAVQAQKKILGKMVSKSIATTLIDDTSSEVLDELYRVTREYTQNKKEAEKIIKNLIKTVIKLAILYRNNQFNQDELALMEKFKKKVHQLAMTVVSFHQVDYTFDRNVLSRLLNECREMLHQIIQRHLTAKSHGRVNNVFDHFSDCEFLAALYNPFGNFKPHLQKLCDGINKMLDEENI

SEQ ID NO: 105745 - DNA, 597 bp, Artificial Sequence
  derived and/or modified sequence
atgcacagcgaggccgaggagagcaaggaggtggccaccgacgtgttcaacagcaagaacctggccgtgcaggcccagaagaagatcctgggcaagatggtgagcaagagcatcgccaccaccctgatcgacgacaccagcagcgaggtgctggacgagctgtacagagtgaccagagagtacacccagaacaagaaggaggccgagaagatcatcaagaacctgatcaagaccgtgatcaagctggccatcctgtacagaaacaaccagttcaaccaggacgagctggccctgatggagaagttcaagaagaaggtgcaccagctggccatgaccgtggtgagcttccaccaggtggactacaccttcgacagaaacgtgctgagcagactgctgaacgagtgcagagagatgctgcaccagatcatccagagacacctgaccgccaagagccacggcagagtgaacaacgtgttcgaccacttcagcgactgcgagttcctggccgccctgtacaaccccttcggcaacttcaagccccacctgcagaagctgtgcgacggcatcaacaagatgctggacgaggagaacatctag

SEQ ID NO: 105746 - DNA, 597 bp, Artificial Sequence
  derived and/or modified sequence
atgcactcagaagccgaggagagcaaggaagttgccaccgacgtgtttaattctaagaatctagccgtgcaagcccagaaaaaaatcctgggcaagatggtgagtaagagcatcgcaactacactgattgacgatacaagttccgaggtacttgacgaactgtacagggtgactcgggagtatacccaaaataaaaaagaggcagagaaaatcataaaaaatcttattaagaccgtgatcaagctggccatcctctacagaaataaccagtttaatcaggacgagctggctctgatggagaagttcaagaagaaggtgcatcagctcgccatgactgtcgtgagttttcaccaggtggattacacatttgataggaacgtgctgtccaggctactcaacgagtgcagggaaatgctacaccagataatccagaggcatctcaccgcaaaaagtcacggaagggttaataacgtgtttgaccattttagcgattgtgagtttttagcagcactgtacaatccctttggaaacttcaagcctcacctacagaagctgtgcgacggtataaacaagatgctagatgaagagaatatttag

SEQ ID NO: 105747 - DNA, 597 bp, Artificial Sequence
  derived and/or modified sequence
atgcactccgaagccgaggagtctaaggaagtggctaccgacgtgtttaactccaagaatctggccgtgcaggcacagaagaaaattttgggaaaaatggtgagcaagagtattgccaccaccctcattgacgacacttcttccgaggttctggatgaattgtacagagtcacacgtgagtacacacagaataaaaaagaagcggagaaaatcattaagaacctcatcaaaaccgtgatcaaactcgcaatcctataccgaaataatcagttcaatcaagatgagcttgctctgatggagaaattcaaaaagaaggtgcaccagctggctatgacagtggtgagctttcaccaggtcgattataccttcgacaggaacgtactgagccgcctgttaaatgaatgtcgggaaatgctccaccagataattcagcgccacctgactgcaaagtcccacggcagggtcaataacgtatttgaccacttttcggattgtgaatttcttgccgccttgtacaacccgttcggcaactttaaacctcatctgcagaaactgtgtgacgggattaacaagatgttggatgaggaaaacatctag

SEQ ID NO: 105748 - DNA, 597 bp, Artificial Sequence
  derived and/or modified sequence
atgcacagcgaggccgaggagagcaaggaggtggccacagatgtgttcaacagcaagaacctggccgtgcaggcccagaagaagatcctgggcaagatggtgtccaagagcatcgccaccaccctgattgatgacaccagcagcgaggtgctggatgagctgtacagagtgacccgggagtacacccagaacaagaaggaggccgagaagatcatcaagaacctgatcaagacagtcatcaagctggccatcctgtacagaaacaaccagttcaaccaggatgagctggccctgatggagaagttcaagaagaaggtgcaccagctggccatgacagtggtgtccttccaccaggtggactacacctttgacagaaatgtgctgagccggctgctgaatgaatgtcgggagatgctgcaccagatcatccagaggcacctgacagccaagagccacggccgggtgaacaacgtgtttgaccacttcagtgactgtgagttcctggccgccctgtacaacccctttggaaacttcaagccccacctgcagaagctgtgtgatggcatcaacaagatgctggatgaggagaacatctag

SEQ ID NO: 105749 - DNA, 597 bp, Artificial Sequence
  derived and/or modified sequence
atgcacagcgaggccgaggagagcaaggaggtggccaccgacgtgttcaactccaagaatctggccgtgcaggcccagaaaaaaattttgggtaagatggtaagcaaatcgatcgcaaccacactcatagacgatacttcaagtgaggtcctggacgagctgtaccgcgtcacgagagagtatacgcagaacaaaaaggaggccgagaagattattaagaacctgatcaagacagtgatcaagctcgccattctatatcgcaataaccagtttaaccaagacgagctggcccttatggagaaattcaagaagaaggttcaccagctggctatgacagtagtgtcatttcatcaggtggactatacctttgacagaaacgtgctgtcccgtctcctgaacgagtgccgagaaatgcttcaccagatcatacaaagacacctcacagcaaagtcacatggccgcgtcaataacgtattcgaccacttctctgattgtgagttcctggctgctctgtataatccctttggtaacttcaagccgcacttacagaagctgtgcgacggcatcaacaagatgctggatgaagagaacatctag

SEQ ID NO: 105750 - DNA, 597 bp, Artificial Sequence
  derived and/or modified sequence
atgcacagcgaggccgaggagagcaaggaggtggccaccgacgtgtttaactccaaaaacctggcagtacaggcccaaaaaaagattctgggaaagatggtgtcaaagagtatcgccactacactgatcgatgatacctcttccgaggtcctggacgagctttatcgcgtgacaagagaatacactcagaacaagaaagaagcggagaagattattaagaacctgattaagacggttataaaattggctattctgtaccgtaataaccagttcaaccaagatgagctcgctttaatggagaaatttaaaaagaaagtccaccagctagccatgaccgttgtctccttccaccaggtcgactataccttcgatcgcaatgttttgagtcggctgctaaatgaatgccgtgaaatgctgcaccaaatcattcagaggcatttgaccgctaaatcacatgggcgcgtcaataatgtgttcgatcatttctcagattgtgagtttctggccgcgctgtacaaccctttcggaaatttcaagcctcacctgcagaagctctgcgacggcattaacaagatgctggatgaagagaatatatag

SEQ ID NO: 105751 - DNA, 597 bp, Artificial Sequence
  derived and/or modified sequence
atgcattctgaggctgaagaatcgaaggaggtagctaccgatgtcttcaactccaaaaatctggcagtgcaggcccagaaaaaaattctggggaagatggtgtctaaatccatcgctactactctcattgacgacacctcatctgaggtccttgacgaactgtacagagtgacccgggaatatacccagaataagaaagaggctgagaaaatcatcaaaaatcttatcaagaccgtgataaaattggcgatcctgtatcgaaataaccaatttaatcaggacgagcttgcattgatggagaagttcaaaaagaaggtccatcagctggccatgacagtggtgagcttccaccaggtcgactatactttcgacagaaacgttttaagtagattgctgaacgagtgtagggagatgctccatcaaataatccagcgacacctgacagccaagagccatgggagagtaaataacgtgtttgatcattttagcgattgcgagtttctggccgcactttacaatcctttcggtaacttcaaacctcacctgcagaaactctgtgacgggatcaataagatgctggacgaggagaacatttag

SEQ ID NO: 105752 - DNA, 597 bp, Artificial Sequence
  derived and/or modified sequence
atgcactccgaggccgaggaatccaaggaggttgctacagacgtattcaattcaaagaacctggcagtccaagctcagaaaaagattctgggaaagatggtaagcaaatccattgctactacgctgatcgacgatacatcctctgaggtgcttgatgagctctacagagtgacccgggaatacacacagaataaaaaggaagccgaaaagataatcaagaacctcattaagaccgttatcaagttggccattctataccgcaataaccagttcaatcaggatgagctggcactgatggagaaattcaaaaaaaaggtgcatcagctggcaatgaccgtcgtttcattccaccaggtggactacacatttgaccgcaatgtgctcagtcggctgctgaatgaatgtagggagatgctacaccagatcatccagaggcatttgactgccaaaagtcatggaagagtgaacaacgtattcgaccacttctccgactgcgagttcttggccgcactctacaacccctttggcaattttaaaccccacctgcaaaaattatgtgacgggatcaataaaatgcttgatgaagagaacatttag

SEQ ID NO: 105753 - DNA, 2502 bp, Artificial Sequence
  derived and/or modified sequence
agactccttaaatccatgtcttttgtacgttcttttcactaaatttgccatagtgtttctattggtttttgcctatataaaatcggaaacgaagaaaaagaaacgaactggaaaataaatttgtcaaaagagtatatttttttctcataatttccaagcggatctttcagatatgttatttgaggactttttgcctcagactggcgataaaacaagtgttctacaaaatacctccgtaagacaggcctatcagtggcagctcttgtccccgctttgcagaagggaaaaccaaggctccacagagctaaggggacttcctctcagccaatttgtaggggcctgtgggccagacccgggggcagaattgagatctgttgtgaaggctgtccggcttctttattctatcagcatttcaaatcctgaaaacctcccctttggcattttgaaggaattcatccccagtttttgctggtagccgggagggaaccgtgctctccccctgaggaaggccctttggagtaactgcagcaatgagtgcccgggctgtgcttggagtaccagtgctcgcccggggctatactgaatgagtaagcagccccgtctgcttttgctgtgcaaagagcgaacttgcggctcgtccgagtacatgtgagcggtaatcgcccctgcagctggttatcctgacattatgcactccgaagcagaagaatccaaggaagtggccacagatgtctttaattccaaaaacctggccgttcaggcacaaaagaagatcttgggtaaaatggtgtccaaatccatcgccaccaccttaatagacgacacaagtagtgaggtgctggatgagctctacagagtgaccagggagtacacccaaaacaagaaggaggcagagaagatcatcaagaacctcatcaagacagtcatcaagctggccattctttataggaataatcagtttaatcaagatgagctagcattgatggagaaatttaagaagaaagttcatcagcttgctatgaccgtggtcagtttccatcaggtggattatacctttgaccggaatgtgttatccaggctgttaaatgaatgcagagagatgctgcaccaaatcattcagcgccacctcactgccaagtcacatggacgggttaataatgtgtttgatcatttttcagattgtgaatttttggctgccttgtataatccttttgggaattttaaaccccacttacaaaaactatgtgatggtatcaacaaaatgttggatgaagagaacatatgagcacatgagttaagattgtgactgatcatgatttatttgaagatggagcactgctgatttatgaaggaaaaaagaagaattttctaaagattacacatatttcagaaagactttacccaattcagttgtcagacataatgatttatttgaaggcttgttttatttgaagaaaagcatattgccaaaaattctggttaaaagcttcctaacgggtaacagaccatgggagagatatgtggttgggtaatgcaaatgtagttatacaaagaaaaatacagatgtctccagacctgaggactttttaatagggcagttgttgtgttggtggcacattggatatttctaacatgtacaaagctatgtattttgatttactttcatttcttgctatgtatatgtacttttcttaaaatgccaagaactttctcttgctatcattgctccttttgaaacaattcaattttcatgtctacagctgactgttttgttaagattgagtcatcgacattcaggatttaagtctgaggtagtcaaccctcaggaaaaaaaaaatggcttatctgaaatcagtactgtggaaatgaactatattagctattatgaataatgtccagtataagaatatgcttctggaattgagttctccttttaagtaccaatgatacttaaatttctcagaaatgtaatggtgtgtcattgccttgaaatgcttgcttagggcttcttttatgttatcttaaaaagtgctggtgaattttccattttttacatccatttcacatgtaagagacaaaaaagtctagattggtcttgatattgagataataaaaagtaagtagcattaagaaaggtaacaatcttcattctacagatgaactcattgaaacaatttaggggaatgaggggcaaaaggggagaaatactgctaaagaacatgagcataaaaatgcgtgcgtttcagtgtttaagaaggcttgataaagaatgtcacttttttatttaactgataagatttttgttattttttactttgataagtaaaccaaagaatatttgtatttcaagcagtttgtgtggtgtttctatataattttctgtgtataaataataaagtaggcatttgtttattttgtaaaaaagaaatgaaaatctgctggccagctatgtcctctaggaaatgacagacccaaccaccagcaataaacatttccattgtc

SEQ ID NO: 105754 - DNA, 3591 bp, Artificial Sequence
  derived and/or modified sequence
ttctcctcttctcccttctctggctggctatatcttcctcccttcatcctgctctttcagtgaaattgagataacatgttagaatcttaggcaggttagaatctctcagcagtaggatgtgatttaatatctagacctcttacattaatatttataatagccttcactgcttgtgaatagcataagcactcttttctgttcaaagtcaatactgaaataaaacccaagagtatgttttataaaaatttacttttaatggtgcaatggtaataatctatgtagtccttatggttttcaaatccctttgtgcttatattaccttatttaatacagacataaatctgtgaagtaaataatactatttttatcttcattttacaaatgaggaactggaggctcagagaggttaatttgcataaggtcatacaaatgatagatggcagaactggatttaagttcagactccttaaatccatgtcttttgtacgttcttttcactaaatttgccatagtgtttctattggtttttgcctatataaaatcggaaacgaagaaaaagaaacgaactggaaaataaatttgtcaaaagagtatatttttttctcataatttccaagcggatctttcagatatgttatttgaggactttttgcctcagactggcgataaaacaagtgttctacaaaatacctccgtaagacaggcctatcagtggcagctcttgtccccgctttgcagaagggaaaaccaaggctccacagagctaaggggacttcctctcagccaatttgtaggggcctgtgggccagacccgggggcagaattgagatctgttgtgaaggctgtccggcttctttattctatcagcatttcaaatcctgaaaacctcccctttggcattttgaaggaattcatccccagtttttgctggtagccgggagggaaccgtgctctccccctgaggaaggccctttggagtaactgcagcaatgagtgcccgggctgtgcttggagtaccagtgctcgcccggggctatactgaatgagtaagcagccccgtctgcttttgctgtgcaaaggtaagggtggaggccgctccactttcttcaaaaggccccgctctgggacttgtgaaattgtgctctcttaagctggtccttgcaaccccatggacgatatccatgcgactttcctacaaaaataacataccaaagccgctttaaaatccgtaatttttgggttgcaagactccaagacaaagtcaaatgggcatcaaaaaatgtaatccaaaaatacagaggcattggttctaccctatatgcatttgctatttatgtaaaactacagtgtgctctgagatgagactttttttttctttttatacctttttttccgcccgtctggtgcgtttgccgacggttcttctcggccctgtgtctcgggagagtcggctgccgtctgggcctgtgccccacctgcgtgcgcccgggccgagccagccccgccaggtcgcctccgcccggctgccggcccgagcgcgcggctccgggggcggactcccgccgcccagctgacacgcgattcgtcactcttgcagaactttccccctgaaaatccctgcaccagaacccgctctcccgccccggggaggttttgattttagtggctttcttccttttattttccgtcgtgtgcggatttcgctgcagagcgaacttgcggctcgtccgagtacatgtgagcggtaatcgcccctgcagctggttatcctgacattatgcactccgaagcagaagaatccaaggaagtggccacagatgtctttaattccaaaaacctggccgttcaggcacaaaagaagatcttgggtaaaatggtgtccaaatccatcgccaccaccttaatagacgacacaagtagtgaggtgctggatgagctctacagagtgaccagggagtacacccaaaacaagaaggaggcagagaagatcatcaagaacctcatcaagacagtcatcaagctggccattctttataggaataatcagtttaatcaagatgagctagcattgatggagaaatttaagaagaaagttcatcagcttgctatgaccgtggtcagtttccatcaggtggattatacctttgaccggaatgtgttatccaggctgttaaatgaatgcagagagatgctgcaccaaatcattcagcgccacctcactgccaagtcacatggacgggttaataatgtgtttgatcatttttcagattgtgaatttttggctgccttgtataatccttttgggaattttaaaccccacttacaaaaactatgtgatggtatcaacaaaatgttggatgaagagaacatatgagcacatgagttaagattgtgactgatcatgatttatttgaagatggagcactgctgatttatgaaggaaaaaagaagaattttctaaagattacacatatttcagaaagactttacccaattcagttgtcagacataatgatttatttgaaggcttgttttatttgaagaaaagcatattgccaaaaattctggttaaaagcttcctaacgggtaacagaccatgggagagatatgtggttgggtaatgcaaatgtagttatacaaagaaaaatacagatgtctccagacctgaggactttttaatagggcagttgttgtgttggtggcacattggatatttctaacatgtacaaagctatgtattttgatttactttcatttcttgctatgtatatgtacttttcttaaaatgccaagaactttctcttgctatcattgctccttttgaaacaattcaattttcatgtctacagctgactgttttgttaagattgagtcatcgacattcaggatttaagtctgaggtagtcaaccctcaggaaaaaaaaaatggcttatctgaaatcagtactgtggaaatgaactatattagctattatgaataatgtccagtataagaatatgcttctggaattgagttctccttttaagtaccaatgatacttaaatttctcagaaatgtaatggtgtgtcattgccttgaaatgcttgcttagggcttcttttatgttatcttaaaaagtgctggtgaattttccattttttacatccatttcacatgtaagagacaaaaaagtctagattggtcttgatattgagataataaaaagtaagtagcattaagaaaggtaacaatcttcattctacagatgaactcattgaaacaatttaggggaatgaggggcaaaaggggagaaatactgctaaagaacatgagcataaaaatgcgtgcgtttcagtgtttaagaaggcttgataaagaatgtcacttttttatttaactgataagatttttgttattttttactttgataagtaaaccaaagaatatttgtatttcaagcagtttgtgtggtgtttctatataattttctgtgtataaataataaagtaggcatttgtttattttgtaaaaaagaaatgaaaatctgctggccagctatgtcctctaggaaatgacagacccaaccaccagcaataaacatttccattgtc

SEQ ID NO: 105755 - DNA, 1101 bp, Artificial Sequence
  derived and/or modified sequence
atggaaaagtaccttacaccccagctcccaccggtcccgattatccctgaacataagaagtaccggagggacagcgctagcgtagtggaccagttttttactgacacagaaggccttccttattctatcaatatgaacgtgttccttcccgatatcacacatctgcggactggactatataagtcgcagcggccttgcgtcactcatattaaaaccgagcctgttgctatcttctctcaccagtcggaaactacagctcccccaccagcccccacacaggctctcccagagttcaccagcatcttttcaagccatcaaactgctgcgcccgaggtgaataatatctttattaaacaagagctacctacaccagacctccatctcagcgtccctacccagcagggccacttgtaccagctgcttaataccccagacctagatatgcctagttctactaatcagaccgcggctatggacacactaaacgtgtctatgtctgcagctatggccgggttgaacactcatacatctgcagtgccacagacggctgtgaagcagttccagggaatgccaccatgtacgtacactatgccatcacagtttctgccccaacaggcaacctattttcctccttctcccccttccagcgaacctggctctcctgatcgtcaggcagagatgttacaaaacctgaccccccccccaagttacgcagctactatcgcttctaaattggcgatccataaccctaatctacctaccactttacccgtgaacagccagaacattcagcccgtgcgttacaataggcggagcaatcctgatctcgagaagcgtcgaatacactactgcgattacccgggatgcactaaagtctacactaaaagttcccacctgaaggcacacttgcggacacataccggagaaaagccatataagtgcacatgggagggctgcgattggcgcttcgcccgctctgatgagctcacgcggcactatcggaaacatacaggggctaagcccttccagtgtggcgtgtgtaatcggtccttcagtaggtctgaccacctggccttgcacatgaagaggcaccagaattag

SEQ ID NO: 105756 - DNA, 1101 bp, Artificial Sequence
  derived and/or modified sequence
atggagaagtacctgaccccccagctgccccctgtgcccatcatccctgagcacaagaagtaccgccgggacagcgcctctgtggtggaccagttcttcacagacacagagggcctgccctacagcatcaacatgaatgtgttcctgcctgacatcacccacctgaggacaggcctgtacaagagccagaggccctgtgtgacccacatcaagacagagcctgtggccatcttcagccaccagagcgagaccacagcccctcctccagcccccacccaggccctgcctgagttcaccagcatcttcagcagccaccagacagctgcccctgaggtgaacaacatcttcatcaagcaggagctgcccaccccagacctgcacctgtctgtgcccacccagcagggccacctgtaccagctgctgaacaccccagacctggacatgcccagcagcaccaaccagacagctgccatggacaccctgaatgtgtccatgtctgctgccatggccggcctgaacacccacaccagcgctgtgccccagacagctgtgaagcagttccagggcatgccaccctgcacctacaccatgcccagccagttcctgccccagcaggccacctacttcccccccagcccccccagcagcgagcccggcagcccagaccggcaggccgagatgctgcagaacctgaccccaccacccagctatgctgccaccatcgccagcaagctggccatccacaaccccaacctgcccaccaccctgcctgtgaacagccagaacatccagcctgtgcgctacaacagaagaagcaacccagacctggagaagaggcgcatccactactgtgactacccaggctgcaccaaggtgtacaccaagagcagccacctgaaggcccacctgcggacccacactggagagaagccctacaagtgcacctgggagggctgtgactggaggtttgcccggagtgatgagctgaccaggcactacaggaagcacactggagccaagcccttccagtgtggggtgtgcaacagaagcttcagcagaagtgaccacctggccctgcacatgaagaggcaccagaactag

SEQ ID NO: 105757 - DNA, 1101 bp, Artificial Sequence
  derived and/or modified sequence
atggagaagtacctgaccccccagctgccccccgtgcccatcatccccgagcataagaagtacaggagagattcagccagcgttgtggatcaattcttcacagacaccgagggacttccgtattccattaatatgaatgtcttcctccctgacataactcatcttcgtactggcctgtacaaaagtcagcgtccgtgcgtcacacacatcaaaaccgaacccgttgctatcttttcgcaccaatcagaaaccactgccccccccccggcgccaacacaggccctcccagaatttacaagcattttctcgtctcaccagaccgctgcccccgaggtcaataatattttcataaaacaggaattgccaaccccagatctgcatctgtcggtgccgacccaacaaggtcacctatatcagttgctcaacacgcctgacttggacatgccctcttccaccaaccagaccgcagccatggacacactgaacgtctccatgtcagcagctatggctggcctgaacacccacacatccgccgtcccccagacagctgtgaagcagtttcagggaatgccgccgtgtacttacaccatgccctctcaatttctgccccaacaggcaacttacttcccgcctagcccgcccagctcggagccgggatcccccgatcgccaggcagaaatgctccagaacctcacaccacctcccagttatgccgccactattgcaagtaaattagcaatacacaacccaaatctacccaccactctgcccgtcaacagccagaatattcagccggtgagatataatcggcgctcaaacccggacctagagaaaagaagaattcactattgcgattacccagggtgcacgaaggtgtacaccaaatcgtctcaccttaaggcccacctccgaacccacacaggcgagaaaccctacaaatgcacctgggagggatgcgactggcggttcgccaggagcgacgaactgacacggcattaccgcaagcacactggagctaagcccttccaatgcggagtgtgtaaccgaagctttagccgcagcgatcacctggccctacatatgaagagacaccagaattag

SEQ ID NO: 105758 - DNA, 1101 bp, Artificial Sequence
  derived and/or modified sequence
atggagaaatacctgacccctcagcttccaccagtgcctatcattccggagcataaaaagtatcgaagggattcggcctctgtagtcgaccagttttttactgacacggagggattgccgtactcgatcaatatgaacgtctttcttccagatatcactcatctgcggaccggactgtacaaaagtcagcgtccttgcgtgacacatatcaagactgaacctgtcgctatcttctctcaccagtcagagaccacagcgccacctccagctcccactcaggcactccctgaattcacttctatattctcatcgcaccagacagcagcacctgaggtcaacaatatcttcattaaacaggaactgccaaccccagatctacatttgtcagtgcccacccagcaagggcacctctatcagcttcttaatacccctgatctggacatgccctcttctactaatcagaccgcagcaatggatactctaaacgtgtcaatgtctgccgctatggccggactcaacactcacacgagcgccgttccccagaccgccgtgaaacagtttcaggggatgcccccttgtacttacaccatgccgtcccagttcctcccccagcaagccacctacttcccacccagccccccttcaagcgaacccggttcccccgataggcaggcggagatgttgcaaaatttgacccctcctccatcatatgctgctactatcgccagcaagcttgcgatacacaaccccaacttacctaccaccctgccggttaactcccaaaacatccagcccgtccgctataatcggcgtagcaaccctgacctcgaaaagagaagaatccattactgtgactaccccggatgtactaaagtctacaccaaatcatctcacctcaaggctcacttaaggacgcacactggtgagaaaccctacaaatgtacatgggaggggtgcgactggagatttgctcggagcgacgagttgacccggcactacaggaagcacactggagcaaaacctttccagtgtggcgtgtgcaaccgttctttctctcggtcagatcatctggccctgcatatgaaacggcatcagaattag

SEQ ID NO: 105759 - DNA, 1101 bp, Artificial Sequence
  derived and/or modified sequence
atggagaagtacctgaccccccagctgccccccgtgcccatcatccccgagcacaagaagtacagaagagacagcgccagcgtggtggaccagttcttcaccgacaccgagggcctgccctacagcatcaacatgaacgtgttcctgcccgacatcacccacctgagaaccggcctgtacaagagccagagaccctgcgtgacccacatcaagaccgagcccgtggccatcttcagccaccagagcgagaccaccgcccccccccccgcccccacccaggccctgcccgagttcaccagcatcttcagcagccaccagaccgccgcccccgaggtgaacaacatcttcatcaagcaggagctgcccacccccgacctgcacctgagcgtgcccacccagcagggccacctgtaccagctgctgaacacccccgacctggacatgcccagcagcaccaaccagaccgccgccatggacaccctgaacgtgagcatgagcgccgccatggccggcctgaacacccacaccagcgccgtgccccagaccgccgtgaagcagttccagggcatgcccccctgcacctacaccatgcccagccagttcctgccccagcaggccacctacttcccccccagcccccccagcagcgagcccggcagccccgacagacaggccgagatgctgcagaacctgacccccccccccagctacgccgccaccatcgccagcaagctggccatccacaaccccaacctgcccaccaccctgcccgtgaacagccagaacatccagcccgtgagatacaacagaagaagcaaccccgacctggagaagagaagaatccactactgcgactaccccggctgcaccaaggtgtacaccaagagcagccacctgaaggcccacctgagaacccacaccggcgagaagccctacaagtgcacctgggagggctgcgactggagattcgccagaagcgacgagctgaccagacactacagaaagcacaccggcgccaagcccttccagtgcggcgtgtgcaacagaagcttcagcagaagcgaccacctggccctgcacatgaagagacaccagaactag

SEQ ID NO: 105760 - protein, 279 aa, Artificial Sequence
  derived and/or modified sequence
MGKGNEDSDLHCSSIQCSTDQPPFQQISFTEKGSDEKKPFKEKGKTAFSHSSEKHIQRQAGSEPNPNKENSEETKLKAGNSTAGSEPESSSYRENCRKRKMSSKDSCQDTAGNCPEKECSLSLNKKSRSSTAVHNSEIQETCDAHHRGHSRACTGHSKRHRSRALGVQTPSIRKSLVTSVRAMSEAVYQDLAQVWAQQIHSPLTCEQLTLLTRLRGPLCAQVQTLYSMATQAAYVFPAESWLVPATLPGPGESALDREAHPFPGQEITETVSGSDEAKL

SEQ ID NO: 105761 - DNA, 840 bp, Artificial Sequence
  derived and/or modified sequence
atgggcaagggcaacgaggacagcgacctgcactgcagcagcatccagtgcagcaccgaccagccccccttccagcagatcagcttcaccgagaagggcagcgacgagaagaagcccttcaaggagaagggcaagaccgccttcagccacagcagcgagaagcacatccagagacaggccggcagcgagcccaaccccaacaaggagaacagcgaggagaccaagctgaaggccggcaacagcaccgccggcagcgagcccgagagcagcagctacagagagaactgcagaaagagaaagatgagcagcaaggacagctgccaggacaccgccggcaactgccccgagaaggagtgcagcctgagcctgaacaagaagagcagaagcagcaccgccgtgcacaacagcgagatccaggagacctgcgacgcccaccacagaggccacagcagagcctgcaccggccacagcaagagacacagaagcagagccctgggcgtgcagacccccagcatcagaaagagcctggtgaccagcgtgagagccatgagcgaggccgtgtaccaggacctggcccaggtgtgggcccagcagatccacagccccctgacctgcgagcagctgaccctgctgaccagactgagaggccccctgtgcgcccaggtgcagaccctgtacagcatggccacccaggccgcctacgtgttccccgccgagagctggctggtgcccgccaccctgcccggccccggcgagagcgccctggacagagaggcccaccccttccccggccaggagatcaccgagaccgtgagcggcagcgacgaggccaagctgtag

SEQ ID NO: 105762 - DNA, 840 bp, Artificial Sequence
  derived and/or modified sequence
atggggaagggaaacgaggattccgaccttcactgttcatctatccagtgctctaccgaccagcctccattccagcagatttcatttaccgaaaaaggcagcgatgaaaaaaagccttttaaggaaaaggggaaaactgcatttagccattcttcagaaaagcatatacaaaggcaggcgggatcagaaccaaatcctaataaggaaaactcagaggagacaaagctcaaggcaggcaacagtacagctggatctgagccggagtcttcttcctatcgagagaactgccgcaagcggaaaatgtcgtccaaggacagctgccaggacaccgccggcaactgcccagaaaaggagtgctccttgtcattgaataaaaaatctagaagttctactgccgtgcacaattcagaaatccaagaaacatgcgacgctcatcatcgagggcacagcagagcgtgtactggccactctaaacgacatcgcagcagggcactgggggttcagacaccaagcatccggaaaagcctggtgacttccgtgcgggcaatgagcgaggccgtgtaccaggatctggctcaagtctgggctcagcaaattcacagccctctaacctgcgagcagctaaccctactcacgaggctgcgaggtcccctttgtgcccaggttcaaactctttatagtatggccactcaggcggcatatgtattccctgcggagtcatggttggttcctgccacattgcctggtcccggagagtccgcactcgacagagaggctcatccttttcccgggcaagaaatcaccgagacagtgtccggcagtgacgaagcaaaactatag

SEQ ID NO: 105763 - DNA, 840 bp, Artificial Sequence
  derived and/or modified sequence
atgggcaaaggaaatgaagacagcgacctgcactgcagcagcatccagtgcagcacagaccagccccccttccagcagatctccttcacagagaagggcagtgatgagaagaagcccttcaaggagaagggcaagacagccttcagccacagcagcgagaagcacatccagaggcaggccggcagcgagcccaaccccaacaaggaaaattctgaggagaccaagctgaaggccggcaacagcacagctggcagcgagcctgagagcagcagctaccgggagaactgcaggaagaggaagatgagcagcaaggacagctgccaggacacagctggcaactgcccagagaaggagtgcagcctgagcctgaacaagaagagccgcagcagcacagctgtgcacaacagcgagatccaggagacctgtgatgcccaccaccggggccacagccgggcctgcaccggccacagcaagaggcacaggagccgggccctgggcgtgcagacccccagcatcaggaagagcctggtgacctctgtgcgggccatgtctgaggccgtgtaccaggacctggcccaggtgtgggcccagcagatccacagccccctgacctgtgagcagctgaccctgctgacccggctgcggggccccctgtgtgcccaggtgcagaccctgtacagcatggccacccaggccgcctacgtgtttcctgctgagagctggctggtgcctgccaccctgcccggccctggagagagcgccctggaccgggaggcccaccccttccctggccaggagatcacagagaccgtgtctggcagtgatgaggccaagctgtag

SEQ ID NO: 105764 - DNA, 840 bp, Artificial Sequence
  derived and/or modified sequence
atgggcaagggcaacgaggacagcgacctgcactgcagcagcatccagtgcagtactgaccagccaccatttcagcagatcagcttcaccgagaagggttctgatgagaagaagccgttcaaggaaaaggggaaaaccgcctttagccattccagcgagaagcatatccagcgccaggccggtagtgaacctaatcccaacaaagagaactccgaggaaacgaagttaaaggccggtaactctaccgccgggtcagagccggaatcttcaagttacagagagaactgtagaaaacgcaagatgtcatcgaaggattcctgtcaggacaccgccggtaattgtcctgaaaaggagtgctcgctgtccctgaacaagaagagtcggtctagtacagctgtacacaattccgagatccaagagacctgcgatgcacatcaccgggggcatagcagagcttgcaccggacactctaaaaggcatcggagccgagcccttggggtccagacaccgtcgattcggaagagcttggtaaccagcgtgagggccatgagcgaagctgtctatcaggaccttgcacaagtttgggctcagcagatacactccccgctaacttgcgaacagctgactctgctcactaggttgcgcggtcccttatgcgcccaggtgcagacgttgtattcaatggcgacccaagccgcctatgtgtttcctgcagagtcctggctggtgccggcaactctgccgggacccggagaatctgctctggatagggaggctcatccttttcccggccaggagattactgaaaccgtttccggaagtgacgaggctaaactgtag

SEQ ID NO: 105765 - DNA, 840 bp, Artificial Sequence
  derived and/or modified sequence
atgggaaaggggaatgaagattcagatctccactgctcctccatacagtgcagtactgaccagccacccttccagcagatatccttcaccgaaaaaggcagcgacgaaaagaaaccattcaaagagaaaggaaaaactgcgtttagccactcttcagaaaagcacattcagaggcaggccggttctgagccaaatcccaacaaagagaatagtgaagagaccaaactcaaggccggaaatagtacagctgggtcagaaccagaaagctcctcttatcgcgagaattgtagaaagcggaaaatgtcaagcaaggactcttgtcaggatacggctggcaactgcccggaaaaagagtgctccctgtctcttaataaaaagagccggtcatccaccgcagtgcacaacagcgaaattcaggagacctgtgatgcgcatcacaggggtcattctcgcgcttgcactggccattctaagcggcacaggtcgagggcgcttggagttcaaacgccttcaattcggaaatctttggtcactagcgtccgggctatgtctgaagctgtataccaggacctggctcaggtttgggcccaacaaatccattctccactgacttgtgagcagctgactctgctgacccgcctacggggtccactctgtgcgcaggtgcaaaccttgtactcaatggcaactcaggctgcatacgtattccccgcagaatcctggcttgtgcccgcaactctgcctggacctggggaaagcgccttggacagggaggcccacccttttccaggccaagagatcacggagactgtgagtggcagcgatgaagccaagctatag

SEQ ID NO: 105766 - DNA, 893 bp, Artificial Sequence
  derived and/or modified sequence
cacactctgcctttggacgtgagagagagcgcacctttcacttgagcttcaacatgggaaagggaaatgaagactccgatctccactgctcctccatccagtgctccactgaccagccccctttccaacagatctcctttacagaaaagggctcagatgagaagaaaccattcaaagaaaaaggcaagaccgccttctcccattccagtgagaagcacatacaaaggcaagcaggatcggagcccaatccaaacaaggagaattctgaggaaaccaagctcaaggccgggaacagcactgctggatcagaaccagagtccagctcatatcgggaaaactgcaggaaaagaaaaatgagttccaaggacagctgccaagacacagcagggaactgtccagaaaaggagtgcagcttgtcattgaataaaaaatcaagatcctccactgctgtgcacaacagtgaaatccaggagacctgtgatgcccaccataggggacattccagggcttgcactgggcacagcaagcggcataggtctcgggccctaggagtccaaacaccgtcaattcgaaaaagcttggtgacttctgtgcgagctatgtcagaggctgtttatcaagacctagcccaggtgtgggcacagcagatccattctccacttacctgtgagcagctgacactgctcactcggctccgggggcctctgtgtgcccaggtgcagaccttgtattccatggccacccaggcagcttatgtcttccctgctgagagctggcttgtcccagccacactgccaggtcctggggaatcagccctggatagagaagcccatcccttccctgggcaggagataactgagactgtcagtggatcagatgaggctaagctgtga

SEQ ID NO: 105767 - protein, 142 aa, Artificial Sequence
  derived and/or modified sequence
MAPGVARGPTPYWRLRLGGAALLLLLIPVAAAQEPPGAACSQNTNKTCEECLKNVSACLKKKTRMLDLKTTKALQHISPDASCEVHAPQPSPAGRPRGHCGLLTLASEPASLPGQAAGELPLKDSPLVLQTGDLLFPVHLCF

SEQ ID NO: 105768 - DNA, 429 bp, Artificial Sequence
  derived and/or modified sequence
atggccccaggggtcgcccgcggccccacaccctactggcggctacggctgggcggcgccgccctcctgctgctcctgatcccggtggccgccgctcaggaaccgcccggagctgcctgctctcagaataccaacaagacgtgcgaagaatgtttgaaaaatgtttctgcctgccttaagaaaaaaacccggatgctggacttgaagactactaaggcccttcaacacatctctcccgatgctagttgcgaagtgcacgcgccacaacccagtcccgccgggcggcctcgggggcattgtggactgctgacactggcatccgagcccgcatcactgcctgggcaggcggcaggggaacttccgttgaaggactcacccctggtcttgcagaccggcgacctactctttcctgtacacctctgcttttag

SEQ ID NO: 105769 - DNA, 429 bp, Artificial Sequence
  derived and/or modified sequence
atggcccctggggtggcccggggccccaccccctactggaggctgcggctgggcggggccgccctgctgctgctgctgatccctgtggccgccgcccaggagcccccaggggccgcctgcagccagaacaccaacaagacctgtgaggagtgcctgaagaatgtgtctgcctgcctgaagaagaagaccaggatgctggacctgaagaccaccaaggccctgcagcacatcagcccagatgccagctgtgaggtgcacgccccccagcccagccctgctggccggccccggggccactgcggcctgctgaccctggccagcgagcccgccagcctgcccggccaggccgccggggagctgcccctgaaggacagccccctggtgctgcagacaggagacctgctcttccctgtgcacctgtgcttctag

SEQ ID NO: 105770 - DNA, 429 bp, Artificial Sequence
  derived and/or modified sequence
atggcccccggcgtggcccggggccccaccccctactggcggctgaggctggggggggctgcgcttctcttactgctgatacctgtggctgccgcacaggagccccctggcgccgcatgttctcaaaacaccaacaagacctgcgaggaatgcttgaaaaatgtgtccgcatgtctaaagaaaaagactcggatgctggatcttaagactacgaaggctctccaacatatatctcctgatgcatcctgcgaagtgcatgccccccagccatccccagctggccggccacgggggcactgtggactgctgacccttgccagcgaacctgcctcactcccaggccaagcagccggcgaactccctttgaaggacagccccctcgtccttcagacaggcgatttactgtttcccgtgcacctgtgcttttag

SEQ ID NO: 105771 - DNA, 1205 bp, Artificial Sequence
  derived and/or modified sequence
tgttccgggcggagaccgcttgtgctggagtcggagttgtaacgctccactgactgatagagcgaccggccgaccatggcgcccggagtggcccgcgggccgacgccgtactggaggttgcgcctcggtggcgccgcgctgctcctgctgctcatcccggtggccgccgcgcaggagcctcccggagctgcttgttctcagaacacaaacaaaacctgtgaagagtgcctgaagaacgtctccgcctgtttaaagaagaaaacccgtatgctagatttgaaaacaactaaagcgctccagcacatcagtcccgacgcttcctgtgaggtgcacgctccgcagcccagcccagccgggagaccacgtggccattgcggtctcctgaccttggccagtgaacctgccagccttccaggacaggcggccggagagctgcccctgaaggacagtcctctcgtcttgcagactggtgaccttctattccctgttcatctctgtttctagatttagtcacttgaaataagaaatctttggggtttgggcttttttatactcttctcagtttgtgaaacgctaactgcacacgaagccgcctgacggcacccagcgctgtggctgtcattctcccagggcagaaccctgcgtttctctctgtccactaacaagcttcacacgcaacacagggaagtcggtttgacttttgtcatgaggagaactgaccagccctcatcattccccataaaaccacggacagcgtctgtgtgcgcatcttgagtcttcacacctgttgactcacacggcttttgctgatgacacggggctccagtacacagtctgataaggacttaacgtcctaacctcaattgtattaaatagcattggggaatagctaaacctttttaaaaaaatttattggattttcctccctgcttaaaagatttcaccagaaaaccttcatataaaaattcaggccctttttggacaatttttaaaatttgtatctttactagaacatgagaatctttttcccttggaagcttgaattataaatgtggtgtttggcctgcctcagcagcaccagttgactgctcgtgtgccagcggtgtggggaggacggggcaggacgctgcagctctctccagccctgttggcatcctcagtgcctgcaggcctctcgctgcctgttgggctgtctggggggtggc

SEQ ID NO: 105772 - DNA, 429 bp, Artificial Sequence
  derived and/or modified sequence
atggcacctggtgtggcacgcggacctaccccctactggagactgcgactcggcggtgccgctctgctcctgctcctcatccctgtggctgccgcacaggaacctccaggagctgcttgcagtcagaacactaacaagacttgtgaagaatgtttaaaaaatgtgagtgcatgtttgaaaaagaagacccgcatgcttgacctcaagacaacgaaggctttacaacatatttctcctgacgccagctgcgaggtacatgcccctcagccttcccccgctggacggcctaggggccattgcggacttttaacattagcctctgaacccgcatccctgccaggccaggcagctggggagcttcctttgaaggactcacccctcgttctgcagaccggagatctccttttccccgttcacttgtgcttttag

SEQ ID NO: 105773 - DNA, 429 bp, Artificial Sequence
  derived and/or modified sequence
atggcccccggcgtggccagaggccccaccccctactggagactgagactgggcggcgccgccctgctgctgctgctgatccccgtggccgccgcccaggagccccccggcgccgcctgcagccagaacaccaacaagacctgcgaggagtgcctgaagaacgtgagcgcctgcctgaagaagaagaccagaatgctggacctgaagaccaccaaggccctgcagcacatcagccccgacgccagctgcgaggtgcacgccccccagcccagccccgccggcagacccagaggccactgcggcctgctgaccctggccagcgagcccgccagcctgcccggccaggccgccggcgagctgcccctgaaggacagccccctggtgctgcagaccggcgacctgctgttccccgtgcacctgtgcttctag

SEQ ID NO: 105774 - protein, 456 aa, Artificial Sequence
  derived and/or modified sequence
MRLKITLPSLREFLTDFWMVTIIGLDQDWEEYTIDVFFRQKWKDERLKFKGPMNILRLNNLMASKIWTPDTFFHNGKKSVAHNMTMPNKLLRIQDDGTLLYTMRLTVQAECPMHLEDFPMDAHSCPLKFGSYAYTTSEVTYIWTYNASDSVQVAPDGSRLNQYDLLGQSIGKETIKSSTGEYTVMTAHFHLKRKIGYFVIQTYLPCIMTVILSQVSFWLNRESVPARTVFGVTTVLTMTTLSISARNSLPKVAYATAMDWFIAVCYAFVFSALIEFATVNYFTKRGWAWDGKSVVNDKSPSIKAEGITLTYNSVKAILQGAKLIWSKYIAFSWPSLFQEKTLEYLEKWMDCLTFKQSSKKEKASVMIQNNAYAVAVANYAPNLSKDPVLSTISKSATTPEPNKKPENKPAEAKKTFNSVSKIDRMSRIVFPVLFGTFNLVYWATYLNREPVLGVSP

SEQ ID NO: 105775 - DNA, 2273 bp, Artificial Sequence
  derived and/or modified sequence
tcgtcaagatcagggcaaaaggaagaaaacaccgaattctgcttgccgtttcagagcggcggtgatgaagacaaaattgaacatctacaacatgcagttcctgctttttgttttcttggtgtgggaccctgccaggttggtgctggctaacatccaagaagatgaggctaaaaataacattaccatctttacgagaattcttgacagacttctggatggttacgataatcggcttagaccaggactgggaggaatatacaattgatgttttctttcgacaaaaatggaaagatgaacgtttaaaatttaaaggtcctatgaatatccttcgactaaacaatttaatggctagcaaaatctggactccagataccttttttcacaatgggaaaaaatcagtagctcataatatgacaatgccaaataagttgcttcgaattcaggatgatgggactctgctgtataccatgaggcttacagttcaagctgaatgcccaatgcacttggaggatttcccaatggatgctcattcatgtcctctgaaatttggcagctatgcatatacaacttcagaggtcacttatatttggacttacaatgcatctgattcagtacaggttgctcctgatggctctaggttaaatcaatatgacctgctgggccaatcaatcggaaaggagacaattaaatccagtacaggtgaatatactgtaatgacagctcatttccacctgaaaagaaaaattgggtattttgtgattcaaacctatctgccttgcatcatgactgtcattctctcccaagtttcattctggcttaacagagaatctgtgcctgcaagaactgtgtttggagtaacaactgtcctaacaatgacaactctaagcatcagtgctcggaattctctccccaaagtggcttatgcaactgccatggactggtttattgctgtttgttatgcatttgtgttctctgccctaattgaatttgcaactgttaattacttcaccaaaagaggatgggcttgggatgggaagagtgtagtaaatgacaagtccccttcaataaaagctgaaggcattacattaacatacaactcagtgaaagcaattcttcaaggagctaagctaatatggtccaagtatatagctttctcatggcccagtttattccaagaaaagactttagagtacttagagaagtggatggactgtttaaccttcaaacaatcttctaaaaaagaaaaggcttccgttatgatacagaacaacgcttatgcagtggctgttgccaattatgccccgaatctttcaaaagatccagttctctccaccatctccaagagtgcaaccacgccagaacccaacaagaagccagaaaacaagccagctgaagcaaagaaaactttcaacagtgttagcaaaattgacagaatgtccagaatagtttttccagttttgtttggtacctttaatttagtttactgggctacatatttaaacagagaacctgtattaggggtcagtccttgaattgagacccatgttatctttgggatgtatagcaacattaaatttggtttgttttgctatgtacagtctgactaataactgctaatttgtgatccaacatgtacagtatgtatatagtgacatagcttaccagtagacctttaatggagacatgcatttgctaactcatggaactgcagacagaaagcactccatgcgaaaacagccattgccttttttaaagatttaccctaggacctgatttaaagtgaatttcaagtgacctgattaatttcctattcttccaaatgagatgaaaatggggatcctgtacaaccctttgtggacccttttggtttagctcttaagtaggggtattttctactgttgcttaattatgatggaagataacattgtcattcctagatgaatcctttgaagtaacaaacattgtatctgacatcagctctgttcatgagtgctcagagtccctgctaatgtaattggaagcttggtacacataagaaaaactagagatttgaaatcagctatgaattactctatatagtatctatagccatgtacatattacagcatgacaagctcaaataattatgagtcagcccgaaaggatgttaattatgcctacgatgtaataactattggaatgtcatggtcattacatttttagcttcagagtttatttgaaagtaataattgaaatcctacaatttattttaatcattggaaactaccttaatt

SEQ ID NO: 105776 - DNA, 1371 bp, Artificial Sequence
  derived and/or modified sequence
atgaggctgaagatcacgctccccagtctcagggagttccttactgacttctggatggtgaccatcataggcctggaccaagattgggaagagtacacaatcgatgtattctttcggcaaaaatggaaagacgagcggctgaagttcaaaggacctatgaatattttgcggctgaataacctgatggcctctaaaatctggacaccagacacctttttccacaacggtaaaaagtccgtagcacacaacatgactatgcctaacaagctgttgcggatccaagacgatggaacgttgctgtatactatgaggctcacagttcaggcggagtgccctatgcatctcgaggacttccccatggatgctcactcttgccctcttaagtttgggtcctatgcgtacacaacctccgaagtcacctacatttggacctacaacgcctcggattctgtccaggttgcccctgacggcagtcggcttaatcagtacgatctactcggtcagagtattggcaaagaaacaatcaagtcgagcacaggggaatacacagtgatgacagctcacttccacctgaagcgaaaaataggatactttgtcattcagacctacctgccctgcatcatgaccgtgatccttagccaggtctcattctggcttaatcgcgaatcggtgccagcaagaaccgtattcggagtcacaactgtgttgaccatgacgacgctctcaatatccgcacggaattcattaccaaaggtggcatacgccaccgccatggactggttcatagccgtttgttatgccttcgtttttagcgccctgatcgagttcgctacggtcaactacttcactaagcggggctgggcatgggacgggaaatccgtggtaaatgataaatctccaagtattaaagcggagggtattaccttaacctataatagtgtgaaggcaatcctgcaaggcgccaagctcatctggtccaaatatatcgctttctcttggccgagtctctttcaagagaagactcttgaatacctggaaaaatggatggactgcctcacattcaagcaatcatcgaaaaaagagaaggcctcagtcatgattcagaataacgcttacgccgtggccgtagctaactatgctcccaacctcagcaaagatcccgtgttgagcaccatctccaaatccgctacaacgcctgagccaaacaagaagcccgaaaataaaccagccgaggccaaaaaaacatttaactccgtgagcaagatcgatcggatgtccagaatagtttttccagttctgtttggtacattcaatctggtatattgggccacctatctgaaccgcgaaccagttctaggagtatccccatag

SEQ ID NO: 105777 - DNA, 1371 bp, Artificial Sequence
  derived and/or modified sequence
atgaggctgaagatcaccctgcccagcctgcgggagttcctgacagacttctggatggtgaccatcatcggcctggaccaggactgggaggagtacaccattgatgtgttcttccggcagaagtggaaggatgagcggctgaagttcaagggccccatgaacatcctgcggctgaacaacctgatggccagcaagatctggaccccagacaccttcttccacaacgggaagaagtctgtggcccacaacatgaccatgcccaacaagctgctgcgcatccaggatgatggcaccctgctgtacaccatgaggctgactgtgcaggccgagtgccccatgcacctggaggacttccccatggatgcccacagctgccccctgaagtttggcagctatgcctacaccaccagcgaggtgacctacatctggacctacaatgccagtgacagcgtgcaggtggccccagatggcagccggctgaaccagtatgacctgctgggccagagcatcggcaaggagaccatcaagagcagcactggagagtacacagtgatgacagcccacttccacctgaagaggaagattggctacttcgtcatccagacctacctgccctgcatcatgaccgtcatcctgagccaggtgtccttctggctgaaccgggagagcgtgcctgccaggacagtgtttggagtgaccaccgtgctgaccatgaccaccctgagcatcagcgccaggaacagcctgcccaaggtggcctatgccacagccatggactggttcatcgctgtgtgctacgcctttgtgttttctgccctgattgaatttgccaccgtgaactacttcaccaagaggggctgggcctgggatggcaagtctgtggtgaatgacaagagccccagcatcaaggccgagggcatcaccctgacctacaacagcgtgaaggccatcctgcagggcgccaagctgatctggagcaagtacatcgccttctcctggcccagcctcttccaggagaagaccctggagtacctggagaagtggatggactgcctgaccttcaagcagagcagcaagaaggagaaggcctctgtgatgatccagaacaatgcctatgctgtggccgtggccaactatgcccccaacctgagcaaggaccctgtgctgagcaccatcagcaagagcgccaccaccccagagcccaacaagaagccagagaacaagccagctgaggccaagaagaccttcaacagcgtgtccaagattgacaggatgagccgcatcgtgtttcctgtgctgtttggcaccttcaacctggtgtactgggccacctacctgaaccgggagcctgtgctgggcgtgagcccctag

SEQ ID NO: 105778 - DNA, 1371 bp, Artificial Sequence
  derived and/or modified sequence
atgcggctgaagatcaccctgcccagcctgcgggagttcctgaccgatttctggatggtgaccatcattgggcttgaccaggactgggaggaatacacaattgacgtcttctttcgccagaaatggaaggatgaacgcttaaagttcaaaggaccgatgaatattttacggctaaataacctcatggcaagtaaaatttggacgccagacaccttctttcacaatgggaagaaatccgtggcacacaacatgacaatgcccaataagctactgcgcatccaggatgatggcacattgctgtacactatgcggcttaccgtgcaggcagaatgtccaatgcacctggaagattttccaatggacgcccacagctgtcctttgaagtttggctcatatgcgtataccacctcagaagtgacatatatctggacgtacaacgcaagcgattcagttcaggtagcccccgatggctctaggctgaatcagtatgacctcttagggcagagtatcggtaaagagactatcaagtcttccaccggtgaatacacagtgatgacggcccactttcacctgaaacggaagattgggtacttcgtgatccagacgtatctgccttgcataatgaccgtgatcctgagtcaagtgtcattctggctgaaccgcgagagcgttccggcccgaaccgtctttggcgtcaccacagtactgacaatgaccaccctttctatttcagcgcgcaactctctgccgaaggtggcttatgccaccgcaatggattggttcattgctgtgtgctacgcattcgtcttctccgccctcatagagtttgcgacagtgaactatttcaccaaaaggggctgggcttgggatgggaaatccgtggttaacgataaaagccccagcattaaggccgagggcatcacgttgacctacaattccgtgaaagcaatcctgcagggtgctaagctcatttggtctaaatacatcgctttcagttggcccagcctgtttcaagagaagaccctggaatacctcgagaaatggatggattgcttaacattcaagcagtcttccaaaaaggagaaagcctccgttatgatccaaaacaacgcctatgctgtcgcagtggccaattacgcacctaatctgtccaaagatcccgtcctgtctacaatttccaagtctgcgacaaccccagagccaaacaagaagccagagaacaaacctgccgaagcaaagaaaacatttaacagtgttagcaagatcgaccgtatgtctcggatcgtgtttccagtccttttcggcacattcaacttggtgtactgggctacctatctgaatcgcgagcctgtccttggtgtgtctccctag

SEQ ID NO: 105779 - DNA, 1371 bp, Artificial Sequence
  derived and/or modified sequence
atgagactgaagatcacacttcctagccttcgtgagttcctcaccgacttctggatggtgaccattattggactagaccaggattgggaggaatacacgattgacgttttctttcgccagaagtggaaggatgaaagactgaaatttaaaggtcctatgaacatcctcaggttaaacaatctcatggcttccaagatctggaccccagatactttcttccacaatggaaaaaagtctgtggcacacaacatgacaatgcccaataagcttctgaggattcaggacgacggcactctgctgtacaccatgcgactgacggtgcaagctgagtgcccgatgcacttagaggactttccaatggatgcccactcctgccccctgaagtttgggtcttacgcatatactacctccgaggtgacgtacatttggacctacaacgccagcgattctgtgcaggtagctcctgatggaagccgtcttaaccagtacgatcttcttggccagagtatcggtaaggaaacaatcaaaagctcaaccggcgagtataccgtgatgactgcccatttccacctcaaaaggaagattggttacttcgtgattcagacatatctgccttgtatcatgaccgtgatcctgtcacaggtctcattctggttgaacagggagtcagtgcctgccaggactgtttttggggtcaccacagtgctcactatgacgaccctctcaatctccgcacgtaactcactcccgaaggtcgcatatgccactgcgatggattggttcattgccgtgtgttacgcatttgtgttcagcgcccttattgagttcgccactgttaactactttaccaaacgcggatgggcatgggacggcaaatccgtggtgaacgataaatccccgtccatcaaggcagagggaattactcttacttacaattccgtgaaagcaattctgcagggggcaaagctgatttggtctaagtacattgcattcagttggccttccctgttccaagagaagaccctcgagtatcttgaaaagtggatggattgccttacttttaaacagtcttcaaagaaggaaaaggctagtgtcatgatccagaataacgcctatgccgtcgctgtcgctaactatgcgccaaacctgtcgaaggatcctgtgttgtccacgatctcaaaaagcgctactacacctgagcctaacaagaaacccgagaacaaacccgcagaggctaaaaaaacgtttaattcggtgtctaagatcgacaggatgtcccggatcgtgtttccggttctgttcggcaccttcaacctcgtctactgggccacctacctgaacagggagcctgtcctgggtgtcagcccatag

SEQ ID NO: 105780 - DNA, 1371 bp, Artificial Sequence
  derived and/or modified sequence
atgagactgaagatcaccctgcccagcctgagagagttcctgaccgacttctggatggtgaccatcatcggcctggaccaggactgggaggagtacaccatcgacgtgttcttcagacagaagtggaaggacgagagactgaagttcaagggccccatgaacatcctgagactgaacaacctgatggccagcaagatctggacccccgacaccttcttccacaacggcaagaagagcgtggcccacaacatgaccatgcccaacaagctgctgagaatccaggacgacggcaccctgctgtacaccatgagactgaccgtgcaggccgagtgccccatgcacctggaggacttccccatggacgcccacagctgccccctgaagttcggcagctacgcctacaccaccagcgaggtgacctacatctggacctacaacgccagcgacagcgtgcaggtggcccccgacggcagcagactgaaccagtacgacctgctgggccagagcatcggcaaggagaccatcaagagcagcaccggcgagtacaccgtgatgaccgcccacttccacctgaagagaaagatcggctacttcgtgatccagacctacctgccctgcatcatgaccgtgatcctgagccaggtgagcttctggctgaacagagagagcgtgcccgccagaaccgtgttcggcgtgaccaccgtgctgaccatgaccaccctgagcatcagcgccagaaacagcctgcccaaggtggcctacgccaccgccatggactggttcatcgccgtgtgctacgccttcgtgttcagcgccctgatcgagttcgccaccgtgaactacttcaccaagagaggctgggcctgggacggcaagagcgtggtgaacgacaagagccccagcatcaaggccgagggcatcaccctgacctacaacagcgtgaaggccatcctgcagggcgccaagctgatctggagcaagtacatcgccttcagctggcccagcctgttccaggagaagaccctggagtacctggagaagtggatggactgcctgaccttcaagcagagcagcaagaaggagaaggccagcgtgatgatccagaacaacgcctacgccgtggccgtggccaactacgcccccaacctgagcaaggaccccgtgctgagcaccatcagcaagagcgccaccacccccgagcccaacaagaagcccgagaacaagcccgccgaggccaagaagaccttcaacagcgtgagcaagatcgacagaatgagcagaatcgtgttccccgtgctgttcggcaccttcaacctggtgtactgggccacctacctgaacagagagcccgtgctgggcgtgagcccctag

SEQ ID NO: 105781 - protein, 525 aa, Artificial Sequence
  derived and/or modified sequence
MAAEQDPEARAAARPLLTDLYQATMALGYWRAGRARDAAEFELFFRRCPFGGAFALAAGLRDCVRFLRAFRLRDADVQFLASVLPPDTDPAFFEHLRALDCSEVTVRALPEGSLAFPGVPLLQVSGPLLVVQLLETPLLCLVSYASLVATNAARLRLIAGPEKRLLEMGLRRAQGPDGGLTASTYSYLGGFDSSSNVLAGQLRGVPVAGTLAHSFVTSFSGSEVPPDPMLAPAAGEGPGVDLAAKAQVWLEQVCAHLGLGVQEPHPGERAAFVAYALAFPRAFQGLLDTYSVWRSGLPNFLAVALALGELGYRAVGVRLDSGDLLQQAQEIRKVFRAAAAQFQVPWLESVLIVVSNNIDEEALARLAQEGSEVNVIGIGTSVVTCPQQPSLGGVYKLVAVGGQPRMKLTEDPEKQTLPGSKAAFRLLGSDGSPLMDMLQLAEEPVPQAGQELRVWPPGAQEPCTVRPAQLCEPLPSLAESRALAQLSLSRLSPEHRRLRSPAQYQVVLSERLQALVNSLCAGQSP

SEQ ID NO: 105782 - DNA, 1578 bp, Artificial Sequence
  derived and/or modified sequence
atggccgctgaacaagacccagaagccagagccgctgcaagaccgcttctgaccgacctgtaccaggctacaatggctctgggttactggagggctgggagagctagagacgccgcagagtttgaactgttctttagacggtgtcctttcggaggggcttttgcattggcagctggactgcgcgattgcgtccgctttctgcgtgcctttcgtttaagagatgccgatgtgcagtttctcgcaagcgtccttcccccagatactgatcctgcttttttcgagcatcttcgggctttggactgcagtgaggtcacggtccgcgctctgcctgagggttctcttgccttcccaggagtgcccctgctacaggtgagtggacccttactggtcgtgcagctgctggagactcccctgctgtgcttagtgtcttatgcttctctggtggctacgaatgcagccagactgaggctgattgcgggacctgagaagaggttgttggagatggggctgagacgggctcaaggtccagacgggggtctcaccgctagcacttactcatacctgggggggtttgactctagctctaatgtgttggctgggcagctgcgtggtgtgccagtcgccggcactcttgcccattctttcgtcactagtttcagcgggtcggaagttccacctgaccccatgctggccccggctgccggggagggtcctggtgtggatttggcagccaaagcacaagtttggctggaacaggtgtgcgcgcacctcggcctcggcgtccaagaaccgcatcctggtgagagggccgccttcgtggcctatgcactagcttttccaagagccttccaagggctgcttgatacctattccgtctggagatcgggcctccccaattttttggccgtggcgctggccttgggggaacttgggtatagagctgtcggggtaaggctagacagtggagacctcctacagcaggcacaggaaattcggaaggtcttccgcgcagccgcagctcagttccaggtgccctggcttgaatccgttctcattgttgtctccaataacatcgacgaagaggcactagctagactggcacaggagggaagtgaggtaaatgtcataggtattgggacaagcgtggtgacgtgccctcagcagccatcattggggggagtttataagctggtcgccgttgggggacagccccgcatgaagctcaccgaggatccagagaaacagacgctccccggttccaaggcggcttttagactgttggggtccgatggaagtcctcttatggacatgctacaactggccgaggaaccagttccccaagcaggccaggagcttcgggtctggccacccggcgcacaggaaccatgtacagttcgacctgcccagctctgcgagcctctaccttcactggccgaaagcagagcgttggcccaactgtccctgtctcggctgtcccctgagcatagacggctacggtctcctgctcaatatcaggttgttctttccgagagactccaagcactggtgaactccctgtgtgccgggcaatccccttag

SEQ ID NO: 105783 - DNA, 1578 bp, Artificial Sequence
  derived and/or modified sequence
atggctgctgagcaggaccctgaggcccgggccgccgcccggcccctgctgacagacctgtaccaggccaccatggccctgggctactggagggctggccgggccagagatgctgctgagtttgagctgttcttccgccgctgcccctttggaggagcctttgccctggccgccggcctgcgggactgtgtgcgcttcctgcgggccttccggctgagagatgctgatgtgcagttcctggcctctgtgctgcccccagacacagatcctgccttctttgagcacctgcgggccctggactgcagcgaggtgacagtgcgggccctgcctgagggcagcctggccttccctggggtgcccctgctgcaggtgtctggccccctgctggtggtgcagctgctggagacccccctgctgtgcctggtgtcctatgccagcctggtggccaccaatgctgcccggctgcggctgattgctggccctgagaagaggctgctggagatgggcctgcggcgggcccagggcccagatggcggcctgacagccagcacctacagctacctgggcggctttgacagcagcagcaatgtgctggccggccagctgcggggcgtgcctgtggccggcaccctggcccacagctttgtgaccagcttcagcggcagcgaggtgcccccagaccccatgctggccccagctgctggggagggccctggggtggacctggccgccaaggcccaggtgtggctggagcaggtgtgtgcccacctgggcctgggcgtgcaggagccccaccctggagagcgggccgcctttgtggcctatgccctggccttcccccgggccttccagggcctgctggacacctacagcgtgtggaggagcggcctgcccaacttcctggccgtggccctggccctgggggagctgggctacagagctgtgggcgtgcggctggacagcggggacctgctgcagcaggcccaggagatcaggaaggtgttccgggctgctgctgcccagttccaggtgccctggctggagagcgtgctgattgtggtgagcaacaacattgatgaggaggccctggcccggctggcccaggagggcagcgaggtgaatgtcatcggcatcggcacctctgtggtgacctgcccccagcagcccagcctgggcggcgtgtacaagctggtggccgtgggcggccagcccaggatgaagctgacagaggaccctgagaagcagaccctgcccggcagcaaggccgccttccggctgctgggcagtgatggcagccccctgatggacatgctgcagctggccgaggagcctgtgccccaggccggccaggagctgcgggtgtggcccccaggggcccaggagccctgcaccgtgcggcctgcccagctgtgtgagcccctgcccagcctggccgagagccgggccctggcccagctgagcctgagccggctgagccctgagcaccggcggctgcggagccctgcccagtaccaggtggtgctgtctgagcggctgcaggccctggtgaacagcctgtgtgccggccagagcccctag

SEQ ID NO: 105784 - DNA, 1578 bp, Artificial Sequence
  derived and/or modified sequence
atggccgccgagcaggaccccgaggcccgggccgccgcccggcccctcctaaccgacctctaccaagctacaatggcattagggtattggagggccggcagggctagagatgccgcagagttcgaacttttcttccggaggtgccctttcggcggtgcgttcgcacttgccgccgggcttcgcgactgtgtgcggtttttaagggcttttcgactgagagacgctgatgtacaattcctggcttctgtgctgccgcccgatactgaccctgccttctttgaacatctgcgtgcactggactgctccgaggttacagtccgcgccctgcctgaaggctccctggctttcccaggggtgcctctcttgcaggtaagcggccccttgctggttgtgcagctgctcgagacccccctcctgtgtctggtgtcttatgcaagcctggttgccacaaacgccgcacgattgagactcatcgccggccccgaaaaacgtcttctcgaaatgggattgcgtcgggctcaagggccagacggaggcttgactgcaagtacctacagttatctgggtggttttgattcttcgtctaacgtgctggctggacagctgcgaggagtgccagtggccggcacactggcccactctttcgtaactagcttcagcggaagcgaagtcccaccggatcctatgctggcccctgccgctggcgagggaccaggggtcgatctcgcagctaaggctcaggtctggctagagcaggtttgtgctcatctgggattaggcgtgcaggagcctcatcctggggagcgcgcagccttcgtcgcctatgcattagcttttccccgcgcctttcaagggctactcgacacctactccgtgtggagaagcgggctccctaatttcctggcggtggcccttgctttaggagaactgggatatagggccgtgggggtccgcctggacagtggtgatctactgcaacaggcccaggagatccgcaaagtgtttcgggccgctgctgcccagtttcaggttccttggttggagtctgtgctgatcgtagtctctaacaacattgatgaagaagctctggctcggctggcacaggagggcagcgaggtgaacgttataggcatcgggactagcgtcgttacatgcccgcaacagccgtctctgggaggggtgtataagctagtggccgtgggcggacagcccaggatgaagctaactgaagaccctgaaaaacaaacactccctggttcgaaggctgctttcaggttgttgggctccgacggctcccctctgatggacatgcttcagctggccgaggaacctgttccgcaagccggtcaggaactacgagtgtggccccctggcgcccaggaaccatgtactgtgaggccagcccagctgtgcgagcctctgccctcacttgccgaatctcgcgctctcgctcagctgagcctgtctaggctgagtccggaacacaggcggctcaggtcaccggctcagtaccaagttgtcctcagcgaaaggctgcaggccttggtcaattccttgtgcgccggccagtcaccttag

SEQ ID NO: 105785 - DNA, 1654 bp, Artificial Sequence
  derived and/or modified sequence
gcggagtccggacgtcgggagcaggatggcggcggagcaggaccccgaggcgcgcgcggcggcgcggccgctgctcactgacctctaccaggccaccatggcgttgggctattggcgcgcgggccgggcgcgggacgccgccgagttcgagctcttcttccgccgctgcccgttcggcggcgccttcgccttggccgccggcttgcgcgactgtgtgcgcttcctgcgcgccttccgcctgcgggacgccgacgtgcagttcctggcctcggtgctgcccccagacacggatcctgcgttcttcgagcaccttcgggccctcgactgctccgaggtgacggtgcgagccctgcccgagggctccctcgccttccccggagtgccgctcctgcaggtgtccgggccgctcctggtggtgcagctgctggagacaccgctgctctgcctggtcagctacgccagcctggtggccaccaacgcagcgcggcttcgcttgatcgcagggccagagaagcggctgctagagatgggcctgaggcgggctcagggccccgatgggggcctgacagcctccacctacagctacctgggcggcttcgacagcagcagcaacgtgctagcgggccagctgcgaggtgtgccggtggccgggaccctggcccactccttcgtcacttccttttcaggcagcgaggtgccccctgacccgatgttggcgccagcagctggtgagggccctggggtggacctggcggccaaagcccaggtgtggctggagcaggtgtgtgcccacctggggctgggggtgcaggagccgcatccaggcgagcgggcagcctttgtggcctatgccttggcttttccccgggccttccagggcctcctggacacctacagcgtgtggaggagtggtctccccaacttcctagcagtcgccctggccctgggagagctgggctaccgggcagtgggcgtgaggctggacagtggtgacctgctacagcaggctcaggagatccgcaaggtcttccgagctgctgcagcccagttccaggtgccctggctggagtcagtcctcatcgtagtcagcaacaacattgacgaggaggcgctggcccgactggcccaggagggcagtgaggtgaatgtcattggcattggcaccagtgtggtcacctgcccccaacagccttccctgggtggcgtctataagctggtggccgtggggggccagccacgaatgaagctgaccgaggaccccgagaagcagacgttgcctgggagcaaggctgctttccggctcctgggctctgacgggtctccactcatggacatgctgcagttagcagaagagccagtgccacaggctgggcaggagctgagggtgtggcctccaggggcccaggagccctgcaccgtgaggccagcccagctgtgtgagccgctcccatccctggcagagtctagagccttggcccagctgtccctgagccgactcagccctgagcacaggcggctgcggagccctgcacagtaccaggtggtgctgtccgagaggctgcaggccctggtgaacagtctgtgtgcggggcagtccccctgagactcggagcggggctgactggaaacaacacgaatcactcacttttcccca

SEQ ID NO: 105786 - DNA, 1578 bp, Artificial Sequence
  derived and/or modified sequence
atggctgcagagcaagaccccgaggctcgcgcagctgcacggccacttttaacggacctctatcaggccaccatggctctgggctactggcgggctgggcgtgcgagggacgcagccgaatttgaactgtttttcaggaggtgcccatttgggggagcctttgcactcgcggcaggattgcgcgattgtgtgcggttcctgcgcgcatttagactgcgcgacgctgatgtgcaattcctggctagcgtcctcccacctgacacagatccggcttttttcgagcaccttagagcgttggactgcagtgaggtgacggtgcgagccctgccggaggggtcactggcattccctggcgtgccactgctacaggtcagcggtcccttgctggtggtacagctcttagaaacgccgcttctctgtctggtttcttacgcaagcttggtggctactaatgcggctcgactcaggctgatagccggtcctgaaaaacggctgcttgagatggggcttcggagagcgcaggggcctgacggagggcttacagcttcaacttatagctatctgggagggttcgattcatctagcaacgtgttagccggacagctccgaggtgttccggtggccggtacgctggcacactcatttgtgactagcttttcaggaagtgaggtgccacccgaccccatgctggccccagctgcaggggaagggcctggtgtggacttggccgcaaaagcccaggtctggctcgaacaggtctgcgcccacctcggactaggggttcaggaaccccaccccggtgagcgggcagcctttgtagcttacgcattggcttttccaagagcattccagggcttactcgacacctattctgtgtggagaagtggtttaccaaacttcctcgccgtagccctcgcgttgggtgaactagggtatcgtgccgtcggcgtaaggctcgactccggggacctcctgcaacaggcccaggaaatccgtaaggtgttccgcgctgccgctgcacaattccaagtgccttggctagaaagcgttttaatcgtggtgtctaataacatagacgaggaggcccttgctcggctggcccaggagggcagcgaggtaaatgtgattggtatcggaactagcgttgtaacatgtcctcaacagccgtcactgggtggcgtgtacaaactcgtagcagtcggcggtcagcctcgtatgaaactaaccgaggacccagaaaagcagacactccctgggagtaaagccgcttttagactcctcggcagcgatgggtctccacttatggatatgttacaacttgcggaggagcccgtgccccaggctggccaggaactgcgtgtctggccaccaggtgcccaggagccctgcaccgtccgtcctgcgcagctctgcgagccactcccctctctggcggagtcaagggccctggcacaactgtccctttctaggttgagccccgaacatcgtagactgagatctccagctcaatatcaagtggtgttgtctgagaggctccaagctctggtgaacagcttgtgcgccggacagagcccttag

SEQ ID NO: 105787 - DNA, 1578 bp, Artificial Sequence
  derived and/or modified sequence
atggccgccgagcaggaccccgaggccagagccgccgccagacccctgctgaccgacctgtaccaggccaccatggccctgggctactggagagccggcagagccagagacgccgccgagttcgagctgttcttcagaagatgccccttcggcggcgccttcgccctggccgccggcctgagagactgcgtgagattcctgagagccttcagactgagagacgccgacgtgcagttcctggccagcgtgctgccccccgacaccgaccccgccttcttcgagcacctgagagccctggactgcagcgaggtgaccgtgagagccctgcccgagggcagcctggccttccccggcgtgcccctgctgcaggtgagcggccccctgctggtggtgcagctgctggagacccccctgctgtgcctggtgagctacgccagcctggtggccaccaacgccgccagactgagactgatcgccggccccgagaagagactgctggagatgggcctgagaagagcccagggccccgacggcggcctgaccgccagcacctacagctacctgggcggcttcgacagcagcagcaacgtgctggccggccagctgagaggcgtgcccgtggccggcaccctggcccacagcttcgtgaccagcttcagcggcagcgaggtgccccccgaccccatgctggcccccgccgccggcgagggccccggcgtggacctggccgccaaggcccaggtgtggctggagcaggtgtgcgcccacctgggcctgggcgtgcaggagccccaccccggcgagagagccgccttcgtggcctacgccctggccttccccagagccttccagggcctgctggacacctacagcgtgtggagaagcggcctgcccaacttcctggccgtggccctggccctgggcgagctgggctacagagccgtgggcgtgagactggacagcggcgacctgctgcagcaggcccaggagatcagaaaggtgttcagagccgccgccgcccagttccaggtgccctggctggagagcgtgctgatcgtggtgagcaacaacatcgacgaggaggccctggccagactggcccaggagggcagcgaggtgaacgtgatcggcatcggcaccagcgtggtgacctgcccccagcagcccagcctgggcggcgtgtacaagctggtggccgtgggcggccagcccagaatgaagctgaccgaggaccccgagaagcagaccctgcccggcagcaaggccgccttcagactgctgggcagcgacggcagccccctgatggacatgctgcagctggccgaggagcccgtgccccaggccggccaggagctgagagtgtggccccccggcgcccaggagccctgcaccgtgagacccgcccagctgtgcgagcccctgcccagcctggccgagagcagagccctggcccagctgagcctgagcagactgagccccgagcacagaagactgagaagccccgcccagtaccaggtggtgctgagcgagagactgcaggccctggtgaacagcctgtgcgccggccagagcccctag

SEQ ID NO: 105788 - protein, 556 aa, Artificial Sequence
  derived and/or modified sequence
MSALPRDLELSNPREKLTKPVQATLSSLKMLDVGKWPIFSLCSEEELQLIRQACVFGSAGNEVLYTTVNDEIFVLGTNCCGCLGLGDVQSTIEPRRLDSLNGKKIACLSYGSGPHIVLATTEGEVFTWGHNAYSQLGNGTTNHGLVPCHISTNLSNKQVIEVACGSYHSLVLTSDGEVFAWGYNNSGQVGSGSTVNQPIPRRVTGCLQNKVVVTIACGQMCCMAVVDTGEVYVWGYNGNGQLGLGNSGNQPTPCRVAALQGIRVQRVACGYAHTLVLTDEGQVYAWGANSYGQLGTGNKSNQSYPTPVTVEKDRIIEIAACHSTHTSAAKTQGGHVYMWGQCRGQSVILPHLTHFSCTDDVFACFATPAVTWRLLSVEPDDHLTVAESLKREFDNPDTADLKFLVDGKYIYAHKVLLKIRCEHFRSSLEDNEDDIVEMSEFSYPVYRAFLEYLYTDSISLSPEEAVGLLDLATFYRENRLKKLCQQTIKQGICEENAIALLSAAVKYDAQDLEEFCFRFCINHLTVVTQTSGFAEMDHDLLKNFISKASRVGAFKN

SEQ ID NO: 105789 - protein, 503 aa, Artificial Sequence
  derived and/or modified sequence
MLQDGSCKQMLLMLLIVQPVQATLSSLKMLDVGKWPIFSLCSEEELQLIRQACVFGSAGNEVLYTTVNDEIFVLGTNCCGCLGLGDVQSTIEPRRLDSLNGKKIACLSYGSGPHIVLATTEGEVFTWGHNAYSQLGNGTTNHGLVPCHISTNLSNKQVIEVACGSYHSLVLTSDGEVFAWGYNNSGQVGSGSTVNQPIPRRVTGCLQNKVVVTIACGQMCCMAVVDTGEVYVWGYNGNGQLGLGNSGNQPTPCRVAALQGIRVQRVACGYTHTSAAKTQGGHVYMWGQCRGQSVILPHLTHFSCTDDVFACFATPAVTWRLLSVEPDDHLTVAESLKREFDNPDTADLKFLVDGKYIYAHKVLLKIRCEHFRSSLEDNEDDIVEMSEFSYPVYRAFLEYLYTDSISLSPEEAVGLLDLATFYRENRLKKLCQQTIKQGICEENAIALLSAAVKYDAQDLEEFCFRFCINHLTVVTQTSGFAEMDHDLLKNFISKASRVGAFKN

SEQ ID NO: 105790 - protein, 556 aa, Artificial Sequence
  derived and/or modified sequence
PCSNRYPGGGADKAPACEEPVQATLSSLKMLDVGKWPIFSLCSEEELQLIRQACVFGSAGNEVLYTTVNDEIFVLGTNCCGCLGLGDVQSTIEPRRLDSLNGKKIACLSYGSGPHIVLATTEGEVFTWGHNAYSQLGNGTTNHGLVPCHISTNLSNKQVIEVACGSYHSLVLTSDGEVFAWGYNNSGQVGSGSTVNQPIPRRVTGCLQNKVVVTIACGQMCCMAVVDTGEVYVWGYNGNGQLGLGNSGNQPTPCRVAALQGIRVQRVACGYAHTLVLTDEGQVYAWGANSYGQLGTGNKSNQSYPTPVTVEKDRIIEIAACHSTHTSAAKTQGGHVYMWGQCRGQSVILPHLTHFSCTDDVFACFATPAVTWRLLSVEPDDHLTVAESLKREFDNPDTADLKFLVDGKYIYAHKVLLKIRCEHFRSSLEDNEDDIVEMSEFSYPVYRAFLEYLYTDSISLSPEEAVGLLDLATFYRENRLKKLCQQTIKQGICEENAIALLSAAVKYDAQDLEEFCFRFCINHLTVVTQTSGFAEMDHDLLKNFISKASRVGAFKN

SEQ ID NO: 105791 - DNA, 1671 bp, Artificial Sequence
  derived and/or modified sequence
atgagcgcccttccccgagatctggagctgagcaatcccagagaaaagctgacaaagccggtacaagctaccttgtcctcattaaaaatgctcgatgtggggaagtggcctatttttagtctgtgctccgaagaggagctacaattgatcagacaggcgtgcgtgtttggctctgcagggaatgaagtgctgtacaccacagtgaacgatgaaatcttcgtgctcgggacaaattgctgtggttgcttaggcttgggtgacgtacagtccacaatcgaaccccggaggttagactcactgaatgggaaaaaaatcgcatgcctgagctatggatccgggccccacattgtccttgccaccaccgaaggcgaagtgtttacatggggccacaacgcttactcacagctcggaaacggaaccacgaaccatggcttggttccctgccatatctcaaccaatctgagcaacaagcaggtgatcgaagtcgcatgcggatcataccacagtctcgtcctcacctctgatggtgaggtgtttgcatggggctacaataactctggacaggtggggagtgggtccactgtcaaccagcccatccctagacgggtgaccggctgcctgcagaataaagtggtggtgaccattgcttgtggacagatgtgctgcatggctgtggtggataccggggaggtgtatgtgtggggctacaacggcaatggacagttgggtctaggcaactccggcaaccagcctacgccctgcagggtcgccgctctgcagggcattagagtccagagagtagcgtgcggctatgctcacactctcgtgctgactgacgaaggccaggtctacgcgtggggtgccaactcttacggacagttgggcaccggaaacaaatctaaccagagctaccctactccagtcactgtggagaaggacaggatcattgagatcgcggcatgccacagcacccacacttcagctgcaaaaacacagggtggccacgtctacatgtggggtcagtgccggggacagtcagtgattttgccacatctcacgcatttctcctgcaccgacgacgtgttcgcctgctttgccaccccagccgtaacctggcgactgctctccgtggagcctgacgaccatctcaccgtagcagaatcccttaaaagagaattcgataatcccgacactgctgacttgaaatttttagtggacggaaaatacatatacgcacacaaagtcttactgaaaattaggtgcgagcatttccgatcttccctggaagacaacgaggacgatatcgtggagatgagtgagttttcctacccagtgtatagggctttcctcgaatatctttatacggactcaatttcactgagccccgaggaggccgtggggctgcttgacctggcaacgttttaccgggagaatcgcctaaaaaaattgtgccaacagacgattaagcaggggatctgcgaagaaaacgcgatcgcattattgtctgcagccgtgaaatatgacgcgcaagatttagaagaattctgcttcaggttctgcattaatcaccttacggttgtaacacaaaccagcggttttgccgagatggaccacgacctgctgaaaaacttcatttctaaggctagtcgcgtgggagcctttaagaattag

SEQ ID NO: 105792 - DNA, 1512 bp, Artificial Sequence
  derived and/or modified sequence
atgctgcaggacggcagctgtaagcagatgctgctgatgctactgatcgtacagcccgttcaagcgactctctcttcactgaaaatgcttgacgttgggaaatggcctattttttccctgtgcagcgaggaagaactgcaactgatccggcaagcatgcgtgttcggaagtgctggaaacgaagttttatacactacagtcaatgacgagatctttgttttaggcacaaactgctgtgggtgtcttgggcttggagatgtgcagagtaccattgaacccagaagactcgacagtctgaacgggaagaagatcgcctgtctcagttatggcagtggtcctcacatcgtgctggcaactactgagggagaggtcttcacatggggacataacgcttacagccagctgggcaacggaacaaccaatcacgggctggtaccctgtcacatttctacaaacctgagcaataagcaagtaatcgaggtggcgtgtggttcctatcacagtctagtcctgacaagcgacggagaagtctttgcttgggggtacaataactccgggcaggttggctccggctccaccgtcaatcagcctatcccacgtcgggtcaccggttgccttcagaacaaggtcgtagtcacaattgcctgcggacagatgtgttgcatggccgttgtggatactggagaggtatacgtgtggggttacaatgggaacggccagttaggactggggaacagcggcaatcaaccaacgccttgtagagtggcagcactccagggcattcgggtgcagcgagtggcttgcgggtatactcacactagcgccgccaagacgcagggggggcacgtgtatatgtgggggcagtgccgcggccaaagtgtgattctccctcatctcactcattttagttgtactgacgatgtgttcgcctgcttcgccactcccgccgtgacctggcgtctgctttccgttgaaccagacgatcacctgacagtggctgagtcactaaaaagggagttcgataatcccgacaccgcggatctgaaattcctggtcgatgggaagtatatatacgcccataaggtgttgctgaaaatcaggtgtgagcacttcaggagtagcctcgaagacaatgaggacgacatagtagagatgagtgagttctcttacccggtgtaccgggcgttcctcgaatatttgtacactgactcaatcagccttagtcctgaagaggcagtgggtctgctggatctcgccactttttatagagagaacagactcaagaagttgtgtcagcagacaatcaaacaaggcatatgtgaagagaacgccattgccctcctgagtgctgcagtcaagtatgacgcccaggacctcgaggagttctgctttaggttctgtatcaatcatctcacagtcgttacccagacatctggcttcgccgaaatggaccacgacctcctcaaaaactttattagtaaagccagtcgggtgggagccttcaaaaactag

SEQ ID NO: 105793 - DNA, 1671 bp, Artificial Sequence
  derived and/or modified sequence
ccctgtagcaatcgctacccgggcgggggcgctgacaaagctccagcttgcgaagagcccgtccaggcaactttgtcgagtctcaagatgctcgacgttggcaagtggcctatcttctccctctgtagtgaggaggagcttcagctgattaggcaagcatgtgtcttcgggagcgcggggaacgaggtgctgtatactaccgtgaacgatgaaattttcgtgctgggcacaaattgctgtggttgcctaggactcggcgacgtgcagtctacaatcgaaccccgaagactcgattcactgaacggaaagaaaatagcctgcctgagttacgggagtggccctcacatcgtgctggccactaccgagggggaggtattcacttggggccataacgcctattcacagctgggcaacggaaccacaaaccatggtctggtcccttgccacatcagcaccaacttaagcaacaaacaggtgattgaagtcgcttgtgggtcataccacagcctagtcctgacatcagacggcgaggtgttcgcgtggggctataacaacagcggccaggtcgggtcaggatctacggtgaatcagccaatccctcgacgagttaccggatgtcttcaaaacaaggttgttgttaccatcgcctgtggacaaatgtgttgcatggccgtggttgacactggagaggtctacgtatggggctataacgggaatggccagctcggtctgggaaactccggcaaccagcccacgccctgcagagtcgctgccctgcagggaattcgggtacaacgtgtggcctgcgggtacgctcatacgctggtgcttaccgatgagggccaggtatacgcgtggggagccaattcttatggccagctgggaacaggcaataagagtaaccagtcttatccaactccagtaaccgtggaaaaggaccgcattatcgagatagctgcctgtcattcaacacatacatcagcggcaaagacccaggggggccacgtctatatgtgggggcagtgtagaggccagtccgttatactaccccacctgacacatttctcttgtacagatgacgtgttcgcctgtttcgcaacacctgccgttacgtggcgattgctcagtgttgagcccgatgaccaccttaccgtggccgaatcattaaaacgcgaattcgataatccggatactgccgatcttaagtttttggtggatggcaaatacatttacgcgcataaagtgctgcttaaaattcgctgcgagcacttccgctcgagcctagaggacaacgaggatgatatcgtagaaatgtcggaattctcttatcctgtttaccgcgctttcttggagtacctgtacactgacagtattagtttgagtcctgaggaggcagttggtctcctagatctggctacattctacagagagaataggttgaagaaactgtgccagcagaccattaagcaggggatttgcgaggagaacgcaattgcccttctgagtgctgctgttaagtacgatgcacaggatctggaggagttttgcttccgtttctgcattaaccatctgactgtagtgacgcagacgtctggattcgccgagatggatcacgatcttcttaagaatttcatttcaaaggctagcagagttggtgcatttaagaactag

SEQ ID NO: 105794 - DNA, 1671 bp, Artificial Sequence
  derived and/or modified sequence
atgtctgccctgccccgggacctggagctgagcaacccccgggagaagctgaccaagcctgtgcaggccaccctgagcagcctgaagatgctggatgtgggcaagtggcccatcttcagcctgtgcagcgaggaggagctgcagctgatccggcaggcctgtgtgtttggcagcgctggaaatgaggtgctgtacaccaccgtgaatgatgagatctttgtgctgggcaccaactgctgcggctgcctgggcctgggagatgtgcagagcaccatcgagccccggcggctggacagcctgaatggcaagaagatcgcctgcctgtcctatggcagcggcccccacatcgtgctggccaccacagaaggagaggtgttcacctggggccacaatgcctacagccagctgggcaatggcaccaccaaccacggcctggtgccctgccacatcagcaccaacctgagcaacaagcaggtgattgaggtggcctgtggcagctaccacagcctggtgctgaccagtgatggagaggtgtttgcctggggctacaacaacagcggccaggtgggcagcggcagcacagtgaaccagcccatccccaggagagtgacaggctgcctgcagaacaaggtggtggtgaccatcgcctgtggccagatgtgctgcatggctgtggtggacaccggggaggtgtatgtgtggggctacaatggaaatggccagctgggcctgggcaacagcggcaaccagcccaccccctgccgggtggccgccctgcagggcatccgggtgcagagggtggcctgtggctacgcccacaccctggtgctgacagatgagggccaggtgtatgcctggggcgccaacagctatggccagctgggcaccggcaacaagagcaaccagagctaccccacccctgtgacagtggagaaggaccgcatcatcgagattgctgcctgccacagcacccacaccagcgctgccaagacccagggcggccacgtgtacatgtggggccagtgccggggccagagcgtcatcctgccccacctgacccacttcagctgcacagatgatgtgtttgcctgctttgccaccccagctgtgacctggaggctgctgtctgtggagccagatgaccacctgactgtggccgagagcctgaagcgggagtttgacaacccagacacagctgacctgaagttcctggtggatggcaagtacatctatgcccacaaggtgctgctgaagatccgctgtgagcacttccgcagcagcctggaggacaatgaagatgacatcgtggagatgtctgagttctcctaccctgtgtaccgggccttcctggagtacctgtacacagacagcatcagcctgagccctgaggaggccgtgggcctgctggacctggccaccttctacagagaaaatcggctgaagaagctgtgccagcagaccatcaagcagggcatctgtgaagaaaatgccatcgccctgctgtctgctgctgtgaagtatgatgcccaggacctggaggagttctgcttccgcttctgcatcaaccacctgactgtggtgacccagaccagcggctttgctgagatggaccatgacctgctgaagaacttcatcagcaaggccagccgggtgggcgccttcaagaactag

SEQ ID NO: 105795 - DNA, 1512 bp, Artificial Sequence
  derived and/or modified sequence
atgctgcaggacggcagctgcaagcagatgctgctgatgctgctgattgtgcagcctgtgcaggccaccctgagcagcctgaagatgctggatgtgggcaagtggcccatcttcagcctgtgcagcgaggaggagctgcagctgatccggcaggcctgtgtgtttggatctgctggaaatgaggtgctgtacaccaccgtgaatgatgagatctttgtgctgggcaccaactgctgcggctgcctgggcctgggagatgtgcagagcaccatcgagccccggcggctggacagcctgaatggcaagaagatcgcctgcctgtcctatggcagcggcccccacatcgtgctggccaccacagaaggagaggtgttcacctggggccacaatgcctacagccagctgggcaatggcaccaccaaccacggcctggtgccctgccacatcagcaccaacctgagcaacaagcaggtgattgaggtggcctgtggcagctaccacagcctggtgctgaccagtgatggagaggtgtttgcctggggctacaacaacagcggccaggtgggcagcggcagcacagtgaaccagcccatcccccggcgggtgacaggctgcctgcagaacaaggtggtggtgaccatcgcctgtggccagatgtgctgcatggctgtggtggacacaggagaggtgtatgtgtggggctacaatggaaatggccagctgggcctgggcaacagcggcaaccagcccaccccctgccgggtggccgccctgcagggcatccgggtgcagagggtggcctgtggctacacccacaccagcgctgccaagacccagggcggccacgtgtacatgtggggccagtgccggggccagagcgtcatcctgccccacctgacccacttcagctgcacagatgatgtgtttgcctgctttgccaccccagctgtgacctggaggctgctgtctgtggagccagatgaccacctgactgtggccgagagcctgaagcgggagtttgacaacccagacacagctgacctgaagttcctggtggatggcaagtacatctatgcccacaaggtgctgctgaagatccgctgtgagcacttccgcagcagcctggaggacaatgaagatgacatcgtggagatgtctgagttctcctaccctgtgtaccgggccttcctggagtacctgtacacagacagcatcagcctgagccctgaggaggccgtgggcctgctggacctggccaccttctaccgggagaaccggctgaagaagctgtgccagcagaccatcaagcagggcatctgtgaggagaatgccatcgccctgctgtctgctgctgtgaagtatgatgcccaggacctggaggagttctgcttccgcttctgcatcaaccacctgactgtggtgacccagaccagcggctttgctgagatggaccatgacctgctgaagaacttcatcagcaaggccagccgggtgggcgccttcaagaactag

SEQ ID NO: 105796 - DNA, 1671 bp, Artificial Sequence
  derived and/or modified sequence
ccctgcagcaaccgctacccaggcggcggcgctgacaaggccccagcctgtgaggagcctgtgcaggccaccctgagcagcctgaagatgctggatgtgggcaagtggcccatcttcagcctgtgcagcgaggaggagctgcagctgatccggcaggcctgtgtgtttggcagcgctggaaatgaggtgctgtacaccaccgtgaatgatgagatctttgtgctgggcaccaactgctgcggctgcctgggcctgggagatgtgcagagcaccatcgagccccggcggctggacagcctgaatggcaagaagatcgcctgcctgtcctatggcagcggcccccacatcgtgctggccaccacagaaggagaggtgttcacctggggccacaatgcctacagccagctgggcaatggcaccaccaaccacggcctggtgccctgccacatcagcaccaacctgagcaacaagcaggtgattgaggtggcctgtggcagctaccacagcctggtgctgaccagtgatggagaggtgtttgcctggggctacaacaacagcggccaggtgggcagcggcagcacagtgaaccagcccatccccaggagagtgacaggctgcctgcagaacaaggtggtggtgaccatcgcctgtggccagatgtgctgcatggctgtggtggacaccggggaggtgtatgtgtggggctacaatggaaatggccagctgggcctgggcaacagcggcaaccagcccaccccctgccgggtggccgccctgcagggcatccgggtgcagagggtggcctgtggctacgcccacaccctggtgctgacagatgagggccaggtgtatgcctggggcgccaacagctatggccagctgggcaccggcaacaagagcaaccagagctaccccacccctgtgacagtggagaaggaccgcatcatcgagattgctgcctgccacagcacccacaccagcgctgccaagacccagggcggccacgtgtacatgtggggccagtgccggggccagagcgtcatcctgccccacctgacccacttcagctgcacagatgatgtgtttgcctgctttgccaccccagctgtgacctggaggctgctgtctgtggagccagatgaccacctgactgtggccgagagcctgaagcgggagtttgacaacccagacacagctgacctgaagttcctggtggatggcaagtacatctatgcccacaaggtgctgctgaagatccgctgtgagcacttccgcagcagcctggaggacaatgaagatgacatcgtggagatgtctgagttctcctaccctgtgtaccgggccttcctggagtacctgtacacagacagcatcagcctgagccctgaggaggccgtgggcctgctggacctggccaccttctacagagaaaatcggctgaagaagctgtgccagcagaccatcaagcagggcatctgtgaagaaaatgccatcgccctgctgtctgctgctgtgaagtatgatgcccaggacctggaggagttctgcttccgcttctgcatcaaccacctgactgtggtgacccagaccagcggctttgctgagatggaccatgacctgctgaagaacttcatcagcaaggccagccgggtgggcgccttcaagaactag

SEQ ID NO: 105797 - DNA, 1671 bp, Artificial Sequence
  derived and/or modified sequence
atgagcgccctgccccgggacctggagctgagcaacccccgggagaaactcacaaaacctgtccaagctactctttccagtctgaagatgctcgatgtgggcaagtggccgatcttttcactctgctccgaagaggaacttcagctgatccggcaagcttgtgtcttcggtagtgcaggaaacgaggtcctgtacacaacggtcaacgacgagatctttgtcctcgggacaaattgctgcggctgcctagggctgggggacgtccagtcaacaatcgagccgagaaggctggactcactcaatggcaaaaaaatcgcctgcctaagctacggcagtggccctcacattgtgctggccacgacagagggagaagtctttacttggggacacaatgcttactcccagttgggtaatggaacaactaatcacggcctagtaccctgtcacatcagcaccaatctctcgaataaacaagtgatagaggttgcctgcggatcttatcactccttagtcctgacatccgatggtgaggttttcgcatggggctacaacaattccggacaggtgggctcgggctccacagtgaatcagcccataccccggcgcgtcactggctgtctccagaacaaagtcgtggtgactattgcatgcgggcaaatgtgttgcatggctgtcgttgacacgggggaggtgtacgtgtggggctacaatggcaatggccagctcggtctcggcaattctggtaaccagcctaccccctgtcgagtggccgcactgcaaggcattcgcgtgcagcgggtggcatgcgggtatgcccatacactcgtgctgactgatgaaggccaggtgtatgcctggggcgcgaactcctatggacagctagggactggcaacaagtcgaaccaaagctatcctactccagtgacggtggaaaaagaccggatcattgagatcgccgcttgccacagtacccacacatctgcggccaaaacccagggagggcacgtgtacatgtggggccagtgtagaggacagtccgtgattctgccacaccttacccatttttcctgcacagacgacgtatttgcttgcttcgccactccggctgtgacctggcgtcttctgagcgttgagccagacgaccacctgactgtggcagagtccctaaaaagagaatttgataaccccgatactgcagacttgaaattcctcgtggatgggaaatatatctacgcacataaggtgctactaaagattagatgcgaacacttccgctcctcccttgaagacaatgaggacgacattgttgaaatgtcagaattttcatatccggtatatagggccttcctagagtacctgtacacagatagtattagcctctccccagaggaggccgtgggactgcttgatctggccacattctatagggaaaaccgcttgaagaaactctgtcaacagaccattaagcagggcatctgtgaagaaaacgccatcgctcttctgagcgctgctgttaagtatgatgcacaggacctcgaggagttctgtttcaggttctgtataaatcacttaacggtggtcacacagacatctggattcgcagaaatggaccacgatctcctgaagaatttcatttccaaagcgagccgcgtgggagcctttaaaaactag

SEQ ID NO: 105798 - DNA, 1512 bp, Artificial Sequence
  derived and/or modified sequence
atgctgcaggacggcagctgcaagcagatgctgctgatgctgctgatcgtacagcctgtccaggccacactgtcaagcctgaaaatgctcgatgtgggaaagtggccaatcttcagcctgtgtagcgaagaggaactgcagctcattcggcaggcgtgtgtttttggcagcgccgggaatgaagtgctgtacacgacagtaaacgatgaaatatttgtcttgggcactaactgctgtggatgcctcggccttggtgacgtgcagtctacaatagaacctcggaggttagattctttgaatgggaagaagattgcgtgtctctcatacggctccggaccacatatcgttttggccaccaccgaaggcgaggtgtttacttggggtcataacgcatactcccagctgggtaacggaaccaccaaccatgggctcgtcccttgccacatcagcacaaatttgtctaataaacaggtcatcgaagtggcctgcggatcttaccattcacttgttcttacatccgatggtgaggtctttgcttggggctacaataatagcggacaggtgggaagcgggagcactgtcaaccagcctattccccgcagagtaacgggctgtctacaaaataaagtggtagtgacaattgcttgtgggcagatgtgttgtatggccgtcgtagatactggggaagtatatgtgtggggatataatgggaatggacagctcggcctgggtaattcaggcaatcagccaaccccatgcagggtcgctgctctccaagggattagagtacagagggttgcatgtggatacacccacacatctgccgccaaaacccaaggcggacatgtgtacatgtggggccaatgccggggacaatccgtgattctcccacatttgacacatttcagctgtacagacgacgtattcgcctgttttgccactccggcagtaacctggagactgctttccgttgagcctgacgatcacctgaccgtggctgaatcactcaagagggagtttgataacccagataccgcagatctcaagtttctggtagatggcaaatacatttatgcccacaaagtgctgctcaagatccggtgtgagcattttagaagcagtctcgaggacaacgaggacgacattgtggaaatgtctgaattttcctatccggtgtatcgagccttccttgagtacttatacaccgatagtattagcctgagtcctgaagaggccgtaggcctactggatctggctaccttctacagagaaaaccgccttaagaaactgtgtcagcagacgatcaagcagggcatctgtgaagagaatgcaatcgctctgctgagtgcagcagtgaaatacgacgcccaggatctggaagagttctgctttcgattctgtatcaatcacctcacagtggtgactcaaactagcggattcgccgagatggaccatgacttgttgaaaaattttatcagcaaggcatcgagagtgggcgcattcaaaaactag

SEQ ID NO: 105799 - DNA, 1671 bp, Artificial Sequence
  derived and/or modified sequence
ccctgcagcaaccggtaccccggcggcggcgccgacaaggcccccgcttgcgaagaacccgtgcaagcaacattatcctccctgaaaatgcttgacgtgggaaaatggcctatctttagcttgtgctcggaggaggagctgcagctcatccggcaagcatgtgtctttggctcagccggcaacgaagttctgtacacaaccgttaatgatgaaatcttcgtcctcggcacgaactgttgcggatgtctgggccttggagatgtacagagcaccatcgagccacggaggcttgattctttaaacggtaaaaagatagcttgcctgtcctacggatccgggcctcatatagtgctggccaccacggaaggagaggtgttcacctggggacataatgcttatagccagctcggcaacggcactacaaaccatggactggttccgtgccacatctccaccaatttgtcgaataagcaagtgattgaggtcgcatgcgggtcctaccacagcttagtgctgacttctgatggtgaggtatttgcttggggttacaacaattcaggccaagttgggtctggttctacggttaatcagccaatcccccgcagggtcactgggtgcctacagaataaggtggtagttacgatagcctgtgggcagatgtgctgcatggcggtcgtcgataccggcgaagtgtatgtgtggggttacaacgggaacggacagctgggcttgggcaacagcggtaaccaacccacgccatgtagggtggccgccttgcagggcatcagggttcagcgagttgcatgtggatatgcccacaccctggtcttaaccgatgagggacaggtgtacgcctggggggctaattcctatggacagctgggcaccggaaataagagcaaccagagttatcctactcctgttacagtggaaaaagaccgcattatcgagatcgctgcctgccactccacgcacacctcagcggctaaaacacagggcgggcatgtttacatgtggggtcagtgcagaggtcagtccgtcatcctgccacatctcacacactttagttgtaccgacgacgtgttcgcttgcttcgcgacccccgccgttacgtggagactgctttccgttgaacccgatgatcacctcactgtggcggagtctcttaaacgtgagtttgataaccccgacacagccgacctgaaattcctcgtcgatgggaagtatatctacgctcataaagtgcttttaaagatacgttgcgaacacttcagatcttcactggaggataacgaagatgacattgtggagatgagtgagttttcatacccagtttacagagctttcctggaatacctgtacacagattctataagtctcagtccggaagaggcagtgggactgctggatctagccaccttttacagagagaataggctcaagaagctctgtcagcagaccatcaaacagggaatttgcgaagaaaacgccattgccctgttatctgccgctgtgaaatatgatgctcaagaccttgaagaattttgcttccgtttctgtatcaaccacctgacagtcgtcacgcagacatctgggtttgcggagatggaccatgacttgctgaagaactttatctcaaaggcgagcagggtcggggcattcaaaaattag

SEQ ID NO: 105800 - DNA, 1671 bp, Artificial Sequence
  derived and/or modified sequence
atgtccgccttaccgagggacttggaactttcaaacccacgagagaagttgaccaaaccagtgcaggccacactttcgtctctgaagatgctggatgtgggcaagtggcccattttctccctctgcagcgaggaagagctgcagctgatcagacaagcctgtgttttcggaagcgcagggaatgaagttttatatacaacagttaacgatgagatttttgtccttgggaccaactgctgtggttgcctggggctgggcgacgtgcagtccactatcgaacctcggcgactcgactctctcaacggcaagaagattgcgtgcctctcttatggtagcggcccacatatcgtccttgctaccacagagggcgaagtctttacctggggacacaatgcctattctcagttgggaaacggaaccacaaatcacggtctagtcccatgccatatctctacaaatctgtccaacaaacaggtgatcgaagtcgcctgcggaagttatcattcactggtgctcacttctgatggcgaagtgttcgcctgggggtacaacaactctggccaggttggcagcgggagcacggtgaatcagcccatccctcgtagggtgaccgggtgcttacaaaacaaggtcgttgtaacaatcgcctgcgggcagatgtgctgcatggcagtggtggatacaggggaggtctatgtgtgggggtacaacggtaacggccagcttgggcttggaaacagtggcaatcagccgacgccatgtcgagtagccgcattgcagggaatacgcgtccagagagtggcttgtgggtatgcccacactctcgttctgaccgatgaggggcaggtgtatgcctggggggctaatagttatggccagctgggaacagggaacaaatctaatcaaagctacccgactcccgtcaccgtcgaaaaggataggatcattgaaattgccgcatgccactcaacccatacatcagcagccaaaactcagggcggacacgtgtacatgtggggacaatgcagggggcagtccgtaatactgccacacctgacgcactttagttgtactgatgatgtgttcgcctgttttgccacacctgccgtcacatggcgcttgttgtccgtggagccggatgaccaccttactgttgcagagtctctcaaacgggaatttgacaaccccgatacggcagacctcaaatttttagtggatggcaaatacatctacgcacataaggtccttttgaagattagatgcgaacattttcggtccagtttggaggacaatgaagacgacatagtcgaaatgagtgagttctcctacccagtgtacagggcatttcttgagtatctatatactgacagcatttctctgtctccggaggaggccgtcggcctcctggacttggccacattttatcgggagaaccgactcaaaaagctctgtcagcagacaatcaagcaggggatctgcgaggagaacgccatcgcattgctgtcagcagccgtgaaatatgacgcccaggacctagaagagttttgcttcagattttgcatcaatcatctgacagtggtgacacagacatcagggtttgcagagatggaccatgacctcctcaagaacttcatcagcaaagccagccgggtgggggcttttaagaactag

SEQ ID NO: 105801 - DNA, 1512 bp, Artificial Sequence
  derived and/or modified sequence
atgctccaggatgggagctgtaaacagatgctgttaatgctgcttattgtgcagcccgtgcaggccactctttcttctctgaagatgctggacgttgggaagtggccaatatttagcctgtgtagtgaggaggaactgcagctcatccggcaggcatgcgtgtttggatcagcgggtaacgaggtgctgtacactacagtcaacgacgagattttcgtcctggggactaattgttgcggctgtctgggcttgggagacgtacagtccactattgaacccaggaggctcgactcactcaacggaaagaagattgcatgtctctcttatggaagcggaccccacatcgtgcttgctaccaccgagggggaggtgttcacatgggggcacaacgcctatagtcaactcggcaatggcaccaccaatcatgggttggttccatgtcacataagcacaaatctttccaacaaacaagttattgaagtcgcctgtgggtcctatcactctctagtcctgacatcagatggtgaggtctttgcttggggctacaacaactctggccaggtggggtcaggatcaactgtgaaccagccaattccacgtagagtgactggctgtctccaaaacaaggtagtcgtgactattgcctgcggccagatgtgctgcatggcagtggtggataccggtgaggtatacgtgtggggctacaacgggaatggccagttgggactggggaactccggaaatcaacctactccctgccgagtggctgctcttcaggggattagggtgcaacgtgtggcttgtggctatacacacacgtccgctgccaaaacacaaggaggtcatgtttatatgtggggacaatgtcggggacagtctgttatactcccccatcttacccattttagctgcacagatgatgtgtttgcgtgcttcgccaccccagccgttacatggcgcctactgagtgtggaacctgacgatcacctcaccgtggctgagagccttaaaagagaattcgacaatcccgatacagccgatctgaaattcttggtggatggcaaatatatatacgctcacaaagtgctcctcaaaatacgatgtgaacactttcgctccagcctcgaagataacgaagatgacatagtcgagatgagcgaattctcatatcccgtgtatcgcgcatttctcgaatacctgtatacagactccataagcctatcccctgaggaggccgtgggtttgctcgacctcgctacattctatcgggagaaccggctcaaaaaactgtgtcagcagacgattaaacaaggcatttgcgaagagaacgcgattgccctgctctctgccgctgtgaagtacgatgctcaggatctcgaggagttctgctttcgtttctgcatcaaccacctgactgtggtgacacagactagtggctttgccgaaatggaccatgacttgctgaaaaactttatcagcaaagcgtctcgcgtgggagcgttcaaaaactag

SEQ ID NO: 105802 - DNA, 1671 bp, Artificial Sequence
  derived and/or modified sequence
ccgtgtagcaatcggtaccccggaggcggagctgataaggcccctgcatgcgaggaacccgtgcaggcaacactttcttccctcaaaatgttggatgttggcaagtggcctatcttctctctgtgcagcgaagaggagctccagttaatacggcaggcatgtgttttcggatccgccggtaatgaggtcctatacaccactgtgaacgatgaaatcttcgtgcttggcacaaactgttgcgggtgtctgggacttggcgacgtccagagcacaatcgagccacggaggctggactccctcaacggaaagaagatcgcatgcctgagttatggatcaggtccccacatagttctggcgaccactgaaggggaggtgttcacctggggtcataacgcgtactctcaactaggcaatggaacaacaaaccatggcctcgtgccctgtcacattagtaccaacctctccaacaagcaggtgatcgaggtggcctgtggcagttatcattctcttgttttaacctcggatggcgaggtgttcgcatggggatataataatagcggacaagtgggctcaggaagcaccgttaaccaacccataccccgtagggtgaccggttgcctacagaacaaggtggtcgttaccattgcttgtggtcagatgtgctgtatggcagtcgtggataccggcgaagtgtacgtatgggggtataacggcaacggccagttgggtctgggcaacagtggcaatcagccaaccccatgccgggtggctgcattacagggaattagggtgcagagagtagcttgcggttacgcccacacattggtgttaaccgacgaaggacaagtctacgcttggggagccaattcatatggccaattggggactggaaacaaatctaatcaatcttatccaactcccgtgacggttgaaaaggatcggattatcgaaatcgcagcctgtcacagcacgcataccagtgcagcgaaaacgcaaggcggacatgtgtatatgtggggacagtgtaggggacaatccgtcatcctcccacatctgacacatttctcttgcaccgatgacgtatttgcttgcttcgccacacccgctgtaacctggaggcttctctcggtcgaaccagacgaccacctgactgtcgccgagtcactaaagagggagtttgacaatccagacacggccgatctaaagtttttagttgatggcaaatatatatatgctcataaagtgctgctgaaaatccgttgtgaacattttcggagttctcttgaagataacgaggacgatatcgtcgaaatgtcagagtttagttaccccgtctatcgtgccttcctggaatacctctacactgactctataagtctgagccccgaagaagctgtgggactacttgatctggcgactttctacagggagaacaggctgaaaaaactttgccagcagacaattaaacagggcatctgcgaagaaaacgccattgccctgctgagtgccgcagtgaagtacgacgcgcaagacctggaggagttttgttttagattttgcatcaaccacctgacagtggtcacccagaccagcggattcgctgagatggaccacgatttactgaagaacttcatcagcaaggctagcagagtgggagccttcaagaactag

SEQ ID NO: 105803 - DNA, 2400 bp, Artificial Sequence
  derived and/or modified sequence
gcagtaaccgctacccaggaggcggagcggacaaggctccggcctgcgaggagtcacattaactttgctctagaagacaactttacaaggatctaaaaggaacaggattaaagatgactgaatactgggttccagaaatttaaaacaatcagcttagcaaatcatatattcttctgtggagctgagaattgatgtccgctcttccccgtgatttggaactttccaatcccagagaaaagttgacaaagccagtacaggctactctgtcatctttgaagatgttagatgtgggaaagtggccaattttttccctttgttctgaagaagaactacagttaattcgtcaggcttgtgtctttggcagtgctggcaatgaagttttatacactacagtaaatgatgagatttttgtgcttggcacaaactgctgtggctgtttggggttaggtgacgtccagagcaccattgaacctcggagactggattctttaaatggcaaaaaaatagcctgcctcagctatgggagtggtccacatattgtccttgcaacaacagaaggagaagtctttacctggggtcataatgcttatagccagctgggcaatgggacaactaatcatggtttagtgccctgtcatatctctactaatctgtcaaacaaacaagtcattgaagttgcctgtgggtcttaccattctttggtgctaacatctgatggagaggtatttgcctggggttataataactctgggcaggtaggatctggatcaacagttaatcagccaatccctcgaagagtcactggctgcctacaaaataaagtagttgtgaccatagcatgtgggcagatgtgctgcatggcagtagtagacacgggggaggtctatgtctggggttacaacggaaacgggcagcttggactcggcaacagtggcaaccagccaaccccttgcagagtggcagctttgcaaggcatccgtgtccagagggtcgcctgtggctacgcacacacattagtattaacagatgaaggccaagtgtatgcttggggcgccaattcttatgggcagttgggcactggcaataaaagcaaccagtcctatcctactcctgtcactgtggaaaaggacaggattatcgagattgcagcctgtcactccacacacacgtctgcggccaagacgcagggtgggcacgtgtacatgtggggccagtgccggggtcagtccgtgatcctcccgcacctcacccacttctcctgcactgacgacgtgtttgcctgctttgccacgcccgccgtcacgtggcgcctcctctccgtggaacctgatgaccacctcacagtggctgagtcactgaagagggaatttgacaacccggacactgcagacctgaagtttctagttgatggaaagtacatttatgcacataaagtccttctcaagattcgatgtgagcattttcgttcgtcattggaagataacgaggatgatattgtagaaatgagtgaattttcatatcctgtttaccgggccttcctggaatacctatacacagacagcatcagcctttctcctgaggaggcagtaggactgctagacttggctacattttatagagaaaatcgtttgaaaaagctctgccaacaaactatcaagcaaggcatctgcgaggagaatgccatcgctctgctctcggctgcggtgaagtatgatgcacaggatttagaagaattctgcttcaggttttgcataaaccatctgactgtagtaacacaaacatcaggttttgcagaaatggaccatgatctcctgaagaactttatcagcaaagcaagcagagttggagcctttaaaaattgatcccatctgcaggaaagtttttgagcctttccatttcccctgcaaaagccagagatgaatcacttctctttaattaatagtatgtatgatgagctatgtttggctgagtacttgtaactgtcagaagaaggatggtggtgagtggtctttgtctgcctaaacccagagtttatgtagaaagcattgaatgttctgatcagatgtgactaaggtcaaggaaaaaaaattgaaatatcttatttaccatttcctctttttgagtcacttaaattggacacctttggtaccctggtctcagtatatgctattctggcccaaatgttccattattcagctggctgataccacatagatagcttgacaaggagtgctgtctgtccttaccacattttcagcactcagcacagtgccttgtgtataataggcactcaatttattataaatcttcagtatgtcctgagaacagctttagtcatggaatactgggagaaggaataactttcacaaaataaacttaaaacagcctgtaattattgag

SEQ ID NO: 105804 - DNA, 2656 bp, Artificial Sequence
  derived and/or modified sequence
atgcttcaagatggcagctgtaagcaaatgcttctaatgctgctgatagttcagccagtacaggctactctgtcatctttgaagatgttagatgtgggaaagtggccaattttttccctttgttctgaagaagaactacagttaattcgtcaggcttgtgtctttggcagtgctggcaatgaagttttatacactacagtaaatgatgagatttttgtgcttggcacaaactgctgtggctgtttggggttaggtgacgtccagagcaccattgaacctcggagactggattctttaaatggcaaaaaaatagcctgcctcagctatgggagtggtccacatattgtccttgcaacaacagaaggagaagtctttacctggggtcataatgcttatagccagctgggcaatgggacaactaatcatggtttagtgccctgtcatatctctactaatctgtcaaacaaacaagtcattgaagttgcctgtgggtcttaccattctttggtgctaacatctgatggagaggtatttgcctggggttataataactctgggcaggtaggatctggatcaacagttaatcagccaatccctcgaagagtcactggctgcctacaaaataaagtagttgtgaccatagcatgtgggcagatgtgctgcatggcagtagtagacacgggggaggtctatgtctggggttacaacggaaacgggcagcttggactcggcaacagtggcaaccagccaaccccttgcagagtggcagctttgcaaggcatccgtgtccagagggtcgcctgtggctacacacacacgtctgcggccaagacgcagggtgggcacgtgtacatgtggggccagtgccggggtcagtccgtgatcctcccgcacctcacccacttctcctgcactgacgacgtgtttgcctgctttgccacgcccgccgtcacgtggcgcctcctctccgtggaacctgatgaccacctcacagtggctgagtcactgaagagggaatttgacaacccggacactgcagacctgaagtttctagttgatggaaagtacatttatgcacataaagtccttctcaagattcgatgtgagcattttcgttcgtcattggaagataacgaggatgatattgtagaaatgagtgaattttcatatcctgtttaccgggccttcctggaatacctatacacagacagcatcagcctttctcctgaggaggcagtaggactgctagacttggctacattttatagagaaaatcgtttgaaaaagctctgccaacaaactatcaagcaaggcatctgcgaggagaatgccatcgctctgctctcggctgcggtgaagtatgatgcacaggatttagaagaattctgcttcaggttttgcataaaccatctgactgtagtaacacaaacatcaggttttgcagaaatggaccatgatctcctgaagaactttatcagcaaagcaagcagagttggagcctttaaaaattgatcccatctgcaggaaagtttttgagcctttccatttcccctgcaaaagccagagatgaatcacttctctttaattaatagtatgtatgatgagctatgtttggctgagtacttgtaactgtcagaagaaggatggtggtgagtggtctttgtctgcctaaacccagagtttatgtagaaagcattgaatgttctgatcagatgtgactaaggtcaaggaaaaaaaattgaaatatcttatttaccatttcctctttttgagtcacttaaattggacacctttggtaccctggtctcagtatatgctattctggcccaaatgttccattattcagctggctgataccacatagatagcttgacaaggagtgctgtctgtccttaccacattttcagcactcagcacagtgccttgtgtataataggcactcaatttattataaatcttcagtatgtcctgagaacagctttagtcatggaatactgggagaaggaataactttcacaaaataaacttaaaacagcctgtaattattgaggttcatattcttctggtatatcattctgagaaattgtggctaatttagaacattgtttagaattgacaaaaggccctggcaattaaattgtcaaggcccaagggctaattttaattttctttttacttggagtcattcattaatttctcacatgggattatggagtatgaagtattatctttgaatgaaattcctgggctgatctgccttacataatcacataaggtcctttgcttttctttgtgttaagagggacttgcctctgtaaatgaaaatgacaatgtgcttttcttgtagttgactttcatgtcactcactataaaataggtctcttaacctggcaccagtataactataaagcactagctgagaaggaactgatacttacatttcatggacagcattaacaagaatgagataaatttgtactttttagatcaaaacaaattacctaattgcaaaagagaaactgaaatggaacatagtctcagattcttctaatgtgtatctcacaatgtcatgtaatgtaaaggaaacccttttggaattagaattcttgttctgatgctgaactatttggtaataaagtgcttatttgcagataac

SEQ ID NO: 105805 - DNA, 2815 bp, Artificial Sequence
  derived and/or modified sequence
ccgtgcagtaaccgctacccaggaggcggagcggacaaggctccggcctgcgaggagccagtacaggctactctgtcatctttgaagatgttagatgtgggaaagtggccaattttttccctttgttctgaagaagaactacagttaattcgtcaggcttgtgtctttggcagtgctggcaatgaagttttatacactacagtaaatgatgagatttttgtgcttggcacaaactgctgtggctgtttggggttaggtgacgtccagagcaccattgaacctcggagactggattctttaaatggcaaaaaaatagcctgcctcagctatgggagtggtccacatattgtccttgcaacaacagaaggagaagtctttacctggggtcataatgcttatagccagctgggcaatgggacaactaatcatggtttagtgccctgtcatatctctactaatctgtcaaacaaacaagtcattgaagttgcctgtgggtcttaccattctttggtgctaacatctgatggagaggtatttgcctggggttataataactctgggcaggtaggatctggatcaacagttaatcagccaatccctcgaagagtcactggctgcctacaaaataaagtagttgtgaccatagcatgtgggcagatgtgctgcatggcagtagtagacacgggggaggtctatgtctggggttacaacggaaacgggcagcttggactcggcaacagtggcaaccagccaaccccttgcagagtggcagctttgcaaggcatccgtgtccagagggtcgcctgtggctacgcacacacattagtattaacagatgaaggccaagtgtatgcttggggcgccaattcttatgggcagttgggcactggcaataaaagcaaccagtcctatcctactcctgtcactgtggaaaaggacaggattatcgagattgcagcctgtcactccacacacacgtctgcggccaagacgcagggtgggcacgtgtacatgtggggccagtgccggggtcagtccgtgatcctcccgcacctcacccacttctcctgcactgacgacgtgtttgcctgctttgccacgcccgccgtcacgtggcgcctcctctccgtggaacctgatgaccacctcacagtggctgagtcactgaagagggaatttgacaacccggacactgcagacctgaagtttctagttgatggaaagtacatttatgcacataaagtccttctcaagattcgatgtgagcattttcgttcgtcattggaagataacgaggatgatattgtagaaatgagtgaattttcatatcctgtttaccgggccttcctggaatacctatacacagacagcatcagcctttctcctgaggaggcagtaggactgctagacttggctacattttatagagaaaatcgtttgaaaaagctctgccaacaaactatcaagcaaggcatctgcgaggagaatgccatcgctctgctctcggctgcggtgaagtatgatgcacaggatttagaagaattctgcttcaggttttgcataaaccatctgactgtagtaacacaaacatcaggttttgcagaaatggaccatgatctcctgaagaactttatcagcaaagcaagcagagttggagcctttaaaaattgatcccatctgcaggaaagtttttgagcctttccatttcccctgcaaaagccagagatgaatcacttctctttaattaatagtatgtatgatgagctatgtttggctgagtacttgtaactgtcagaagaaggatggtggtgagtggtctttgtctgcctaaacccagagtttatgtagaaagcattgaatgttctgatcagatgtgactaaggtcaaggaaaaaaaattgaaatatcttatttaccatttcctctttttgagtcacttaaattggacacctttggtaccctggtctcagtatatgctattctggcccaaatgttccattattcagctggctgataccacatagatagcttgacaaggagtgctgtctgtccttaccacattttcagcactcagcacagtgccttgtgtataataggcactcaatttattataaatcttcagtatgtcctgagaacagctttagtcatggaatactgggagaaggaataactttcacaaaataaacttaaaacagcctgtaattattgaggttcatattcttctggtatatcattctgagaaattgtggctaatttagaacattgtttagaattgacaaaaggccctggcaattaaattgtcaaggcccaagggctaattttaattttctttttacttggagtcattcattaatttctcacatgggattatggagtatgaagtattatctttgaatgaaattcctgggctgatctgccttacataatcacataaggtcctttgcttttctttgtgttaagagggacttgcctctgtaaatgaaaatgacaatgtgcttttcttgtagttgactttcatgtcactcactataaaataggtctcttaacctggcaccagtataactataaagcactagctgagaaggaactgatacttacatttcatggacagcattaacaagaatgagataaatttgtactttttagatcaaaacaaattacctaattgcaaaagagaaactgaaatggaacatagtctcagattcttctaatgtgtatctcacaatgtcatgtaatgtaaaggaaacccttttggaattagaattcttgttctgatgctgaactatttggtaataaagtgcttatttgcagataac

SEQ ID NO: 105806 - DNA, 1671 bp, Artificial Sequence
  derived and/or modified sequence
atgagcgccctgcccagagacctggagctgagcaaccccagagagaagctgaccaagcccgtgcaggccaccctgagcagcctgaagatgctggacgtgggcaagtggcccatcttcagcctgtgcagcgaggaggagctgcagctgatcagacaggcctgcgtgttcggcagcgccggcaacgaggtgctgtacaccaccgtgaacgacgagatcttcgtgctgggcaccaactgctgcggctgcctgggcctgggcgacgtgcagagcaccatcgagcccagaagactggacagcctgaacggcaagaagatcgcctgcctgagctacggcagcggcccccacatcgtgctggccaccaccgagggcgaggtgttcacctggggccacaacgcctacagccagctgggcaacggcaccaccaaccacggcctggtgccctgccacatcagcaccaacctgagcaacaagcaggtgatcgaggtggcctgcggcagctaccacagcctggtgctgaccagcgacggcgaggtgttcgcctggggctacaacaacagcggccaggtgggcagcggcagcaccgtgaaccagcccatccccagaagagtgaccggctgcctgcagaacaaggtggtggtgaccatcgcctgcggccagatgtgctgcatggccgtggtggacaccggcgaggtgtacgtgtggggctacaacggcaacggccagctgggcctgggcaacagcggcaaccagcccaccccctgcagagtggccgccctgcagggcatcagagtgcagagagtggcctgcggctacgcccacaccctggtgctgaccgacgagggccaggtgtacgcctggggcgccaacagctacggccagctgggcaccggcaacaagagcaaccagagctaccccacccccgtgaccgtggagaaggacagaatcatcgagatcgccgcctgccacagcacccacaccagcgccgccaagacccagggcggccacgtgtacatgtggggccagtgcagaggccagagcgtgatcctgccccacctgacccacttcagctgcaccgacgacgtgttcgcctgcttcgccacccccgccgtgacctggagactgctgagcgtggagcccgacgaccacctgaccgtggccgagagcctgaagagagagttcgacaaccccgacaccgccgacctgaagttcctggtggacggcaagtacatctacgcccacaaggtgctgctgaagatcagatgcgagcacttcagaagcagcctggaggacaacgaggacgacatcgtggagatgagcgagttcagctaccccgtgtacagagccttcctggagtacctgtacaccgacagcatcagcctgagccccgaggaggccgtgggcctgctggacctggccaccttctacagagagaacagactgaagaagctgtgccagcagaccatcaagcagggcatctgcgaggagaacgccatcgccctgctgagcgccgccgtgaagtacgacgcccaggacctggaggagttctgcttcagattctgcatcaaccacctgaccgtggtgacccagaccagcggcttcgccgagatggaccacgacctgctgaagaacttcatcagcaaggccagcagagtgggcgccttcaagaactag

SEQ ID NO: 105807 - DNA, 1512 bp, Artificial Sequence
  derived and/or modified sequence
atgctgcaggacggcagctgcaagcagatgctgctgatgctgctgatcgtgcagcccgtgcaggccaccctgagcagcctgaagatgctggacgtgggcaagtggcccatcttcagcctgtgcagcgaggaggagctgcagctgatcagacaggcctgcgtgttcggcagcgccggcaacgaggtgctgtacaccaccgtgaacgacgagatcttcgtgctgggcaccaactgctgcggctgcctgggcctgggcgacgtgcagagcaccatcgagcccagaagactggacagcctgaacggcaagaagatcgcctgcctgagctacggcagcggcccccacatcgtgctggccaccaccgagggcgaggtgttcacctggggccacaacgcctacagccagctgggcaacggcaccaccaaccacggcctggtgccctgccacatcagcaccaacctgagcaacaagcaggtgatcgaggtggcctgcggcagctaccacagcctggtgctgaccagcgacggcgaggtgttcgcctggggctacaacaacagcggccaggtgggcagcggcagcaccgtgaaccagcccatccccagaagagtgaccggctgcctgcagaacaaggtggtggtgaccatcgcctgcggccagatgtgctgcatggccgtggtggacaccggcgaggtgtacgtgtggggctacaacggcaacggccagctgggcctgggcaacagcggcaaccagcccaccccctgcagagtggccgccctgcagggcatcagagtgcagagagtggcctgcggctacacccacaccagcgccgccaagacccagggcggccacgtgtacatgtggggccagtgcagaggccagagcgtgatcctgccccacctgacccacttcagctgcaccgacgacgtgttcgcctgcttcgccacccccgccgtgacctggagactgctgagcgtggagcccgacgaccacctgaccgtggccgagagcctgaagagagagttcgacaaccccgacaccgccgacctgaagttcctggtggacggcaagtacatctacgcccacaaggtgctgctgaagatcagatgcgagcacttcagaagcagcctggaggacaacgaggacgacatcgtggagatgagcgagttcagctaccccgtgtacagagccttcctggagtacctgtacaccgacagcatcagcctgagccccgaggaggccgtgggcctgctggacctggccaccttctacagagagaacagactgaagaagctgtgccagcagaccatcaagcagggcatctgcgaggagaacgccatcgccctgctgagcgccgccgtgaagtacgacgcccaggacctggaggagttctgcttcagattctgcatcaaccacctgaccgtggtgacccagaccagcggcttcgccgagatggaccacgacctgctgaagaacttcatcagcaaggccagcagagtgggcgccttcaagaactag

SEQ ID NO: 105808 - DNA, 1671 bp, Artificial Sequence
  derived and/or modified sequence
ccctgcagcaacagataccccggcggcggcgccgacaaggcccccgcctgcgaggagcccgtgcaggccaccctgagcagcctgaagatgctggacgtgggcaagtggcccatcttcagcctgtgcagcgaggaggagctgcagctgatcagacaggcctgcgtgttcggcagcgccggcaacgaggtgctgtacaccaccgtgaacgacgagatcttcgtgctgggcaccaactgctgcggctgcctgggcctgggcgacgtgcagagcaccatcgagcccagaagactggacagcctgaacggcaagaagatcgcctgcctgagctacggcagcggcccccacatcgtgctggccaccaccgagggcgaggtgttcacctggggccacaacgcctacagccagctgggcaacggcaccaccaaccacggcctggtgccctgccacatcagcaccaacctgagcaacaagcaggtgatcgaggtggcctgcggcagctaccacagcctggtgctgaccagcgacggcgaggtgttcgcctggggctacaacaacagcggccaggtgggcagcggcagcaccgtgaaccagcccatccccagaagagtgaccggctgcctgcagaacaaggtggtggtgaccatcgcctgcggccagatgtgctgcatggccgtggtggacaccggcgaggtgtacgtgtggggctacaacggcaacggccagctgggcctgggcaacagcggcaaccagcccaccccctgcagagtggccgccctgcagggcatcagagtgcagagagtggcctgcggctacgcccacaccctggtgctgaccgacgagggccaggtgtacgcctggggcgccaacagctacggccagctgggcaccggcaacaagagcaaccagagctaccccacccccgtgaccgtggagaaggacagaatcatcgagatcgccgcctgccacagcacccacaccagcgccgccaagacccagggcggccacgtgtacatgtggggccagtgcagaggccagagcgtgatcctgccccacctgacccacttcagctgcaccgacgacgtgttcgcctgcttcgccacccccgccgtgacctggagactgctgagcgtggagcccgacgaccacctgaccgtggccgagagcctgaagagagagttcgacaaccccgacaccgccgacctgaagttcctggtggacggcaagtacatctacgcccacaaggtgctgctgaagatcagatgcgagcacttcagaagcagcctggaggacaacgaggacgacatcgtggagatgagcgagttcagctaccccgtgtacagagccttcctggagtacctgtacaccgacagcatcagcctgagccccgaggaggccgtgggcctgctggacctggccaccttctacagagagaacagactgaagaagctgtgccagcagaccatcaagcagggcatctgcgaggagaacgccatcgccctgctgagcgccgccgtgaagtacgacgcccaggacctggaggagttctgcttcagattctgcatcaaccacctgaccgtggtgacccagaccagcggcttcgccgagatggaccacgacctgctgaagaacttcatcagcaaggccagcagagtgggcgccttcaagaactag

SEQ ID NO: 105809 - DNA, 846 bp, Artificial Sequence
  derived and/or modified sequence
atgttagatgtgggcaagtggccaatatttagtctttgtagcgaggaagagctgcagctcattcgacaggcatgtgtctttgggtcagccggcaatgaggttttgtatacgacggttaacgatgaaattttcgtgttgggaaccaactgctgcggttgcctgggactcggagatgtgcagagtacaatcgaacctcgtcgactcgacagtctcaatggaaagaagattgcttgcctgtcttacggatccggacctcacatcgttctggcaaccacagaaggcgaggtttttacatgggggcacaatgcatactcacaacttgggaatggaacaaccaaccacgggttagtcccgtgccatatcagcactaacctctctaataaacaggtgatcgaagtggcgtgcggcagttaccacagtctggtgctgacttccgacggagaagtctttgcctggggctacaacaactccggccaggtcgggagcgggtccacggttaatcagcccataccaagacgagtgactggctgcctgcagaacaaggtggtggtcacaattgcctgcggccagatgtgctgcatggccgtagtcgacacaggggaagtgtacgtttgggggtacaatggcaacggccagttgggcttgggtaactcgggaaatcaacccactccatgccgcgttgcagctctacaaggtattagagtgcagagggattaccgcgattgcagtctgtccctgcacactcacgtgtgcggtcaggatgccggttgggccagggtacatgttggcccagtgccaggtagcgtgagggacccaccagctccacaccccttgctgctgcactag

SEQ ID NO: 105810 - DNA, 846 bp, Artificial Sequence
  derived and/or modified sequence
atgctggatgtgggcaagtggcccatcttcagcctgtgcagcgaggaggagctgcagctgatccggcaggcctgtgtgtttggatctgctggaaatgaggtgctgtacaccaccgtgaatgatgagatctttgtgctgggcaccaactgctgcggctgcctgggcctgggagatgtgcagagcaccatcgagccccggcggctggacagcctgaatggcaagaagatcgcctgcctgtcctatggcagcggcccccacatcgtgctggccaccacagaaggagaggtgttcacctggggccacaatgcctacagccagctgggcaatggcaccaccaaccacggcctggtgccctgccacatcagcaccaacctgagcaacaagcaggtgattgaggtggcctgtggcagctaccacagcctggtgctgaccagtgatggagaggtgtttgcctggggctacaacaacagcggccaggtgggcagcggcagcacagtgaaccagcccatcccccggcgggtgacaggctgcctgcagaacaaggtggtggtgaccatcgcctgtggccagatgtgctgcatggctgtggtggacacaggagaggtgtatgtgtggggctacaatggaaatggccagctgggcctgggcaacagcggcaaccagcccaccccctgccgggtggccgccctgcagggcatccgggtgcagagggactacagagactgcagcctgagcctgcacacccacgtgtgtggccaggatgctggctgggcccgggtgcacgtgggccctgtgcccggctctgtgcgggaccccccagccccccaccccctgctgctgcactag

SEQ ID NO: 105811 - DNA, 846 bp, Artificial Sequence
  derived and/or modified sequence
atgctggacgtgggcaagtggcccatcttcagcctgtgcagcgaggaggagttgcagttgattagacaggcatgtgtgttcgggtcagctggcaacgaagtcctgtatacaaccgtgaacgatgaaatcttcgtattaggaaccaactgctgcggttgcttgggcctgggagatgtgcagtcaactatcgagccgagacggctcgacagccttaacggcaaaaagattgcctgtttatcgtacggatccggcccccatatcgtgctggccactacagaaggtgaggtcttcacttgggggcacaatgcctatagtcagttaggcaacgggaccacgaatcatggcctcgtgccttgtcacattagcactaacctgtctaacaagcaggtaatcgaggttgcctgcggttcctaccattccctcgtgcttacatcagatggcgaggtgtttgcctggggatacaacaactccggtcaggttggatcaggctccaccgtgaaccaaccaattcctaggcgagtcacagggtgcctgcagaacaaggtcgtcgtgacaattgcctgtggccagatgtgttgtatggccgtggtcgataccggcgaagtgtatgtttggggatataacgggaatggtcagctgggcttaggaaacagcggaaaccagcctaccccttgtagggtcgccgctctccagggtatacgggttcagcgcgactaccgggattgctcactctccctgcatactcacgtatgcggccaagatgctggctgggcccgggtgcacgtgggaccagtgcccggatcggtgagagacccccctgctccccatcccctgctcctgcattag

SEQ ID NO: 105812 - DNA, 846 bp, Artificial Sequence
  derived and/or modified sequence
atgctggacgtgggaaaatggccgattttcagcttgtgctcggaagaggaattgcaacttatccgtcaggcctgcgtcttcgggtctgccggaaacgaagtcctatacacaacggtgaacgatgaaatttttgtgctggggacaaattgttgcggatgcttaggactcggtgatgttcaatccacaatcgagccccgaagactggattctctcaacgggaagaagatcgcttgtctctcatatgggagcgggccacatatcgtgcttgctacgaccgagggggaggtcttcacatggggccataacgcttactcccagctggggaatggcaccaccaaccacgggctggtcccctgccatattagcacgaacctttctaataaacaggttattgaggtcgcctgcggaagctaccactcacttgtgctcactagtgatggagaggtgtttgcctggggatacaacaattcgggccaggtgggctctggttcgacggtaaaccagccaatacctcgacgagtaactgggtgtctgcagaataaggtcgttgtcaccattgcctgcgggcagatgtgttgcatggcagtggttgataccggggaggtgtatgtgtgggggtacaacggcaatggacagctgggcctggggaacagcggcaaccagcctaccccttgtcgggtggccgctcttcagggcataagggtgcaaagagattacagagactgctcgcttagcctccacacccatgtttgcggacaagatgcagggtgggcgcgagttcacgttggtcccgtacctggatctgtgcgagatccccctgccccacacccgctcctgctgcactag

SEQ ID NO: 105813 - DNA, 846 bp, Artificial Sequence
  derived and/or modified sequence
atgctggacgtgggcaagtggcccatcttcagcctgtgcagcgaggaggagctgcagctgatcagacaggcctgcgtgttcggcagcgccggcaacgaggtgctgtacaccaccgtgaacgacgagatcttcgtgctgggcaccaactgctgcggctgcctgggcctgggcgacgtgcagagcaccatcgagcccagaagactggacagcctgaacggcaagaagatcgcctgcctgagctacggcagcggcccccacatcgtgctggccaccaccgagggcgaggtgttcacctggggccacaacgcctacagccagctgggcaacggcaccaccaaccacggcctggtgccctgccacatcagcaccaacctgagcaacaagcaggtgatcgaggtggcctgcggcagctaccacagcctggtgctgaccagcgacggcgaggtgttcgcctggggctacaacaacagcggccaggtgggcagcggcagcaccgtgaaccagcccatccccagaagagtgaccggctgcctgcagaacaaggtggtggtgaccatcgcctgcggccagatgtgctgcatggccgtggtggacaccggcgaggtgtacgtgtggggctacaacggcaacggccagctgggcctgggcaacagcggcaaccagcccaccccctgcagagtggccgccctgcagggcatcagagtgcagagagactacagagactgcagcctgagcctgcacacccacgtgtgcggccaggacgccggctgggccagagtgcacgtgggccccgtgcccggcagcgtgagagacccccccgccccccaccccctgctgctgcactag

SEQ ID NO: 105814 - protein, 277 aa, Artificial Sequence
  derived and/or modified sequence
MSGVTTETGSLDSATVATSQPLAEWQLCKASVSRGIIEIAACHSTHTSAAKTQGGHVYMWGQCRGQSVILPHLTHFSCTDDVFACFATPAVTWRLLSVEPDDHLTVAESLKREFDNPDTADLKFLVDGKYIYAHKVLLKIRCEHFRSSLEDNEDDIVEMSEFSYPVYRAFLEYLYTDSISLSPEEAVGLLDLATFYRENRLKKLCQQTIKQGICEENAIALLSAAVKYDAQDLEEFCFRFCINHLTVVTQTSGFAEMDHDLLKNFISKASRVGAFKN

SEQ ID NO: 105815 - DNA, 834 bp, Artificial Sequence
  derived and/or modified sequence
atgtctggcgtgactactgaaacaggtagtttggattctgcaacagtagcaactagccagcctctggcagaatggcagctgtgtaaagcctcagtgtcacgaggaattatcgaaatcgctgcttgccacagtacacatacatctgctgctaaaacacagggtggacacgtatacatgtggggccagtgtagaggacagtcagtgatcctaccacatctgacacacttttcttgtacagacgatgtctttgcctgctttgccaccccagctgtgacgtggaggctcctgtcagtcgaacctgacgatcacctgactgtggccgagtctctaaaacgcgaattcgacaatccagatacagcggaccttaaattcctggttgacgggaaatacatatacgcacataaggtcctcctcaagattagatgtgaacatttccgctcatctctcgaagacaacgaagacgacatcgtggagatgtcagagttctcctatccagtgtacagagccttcctggaatacctctacacagacagcatctctctgtctccggaggaagcagtcggactgctggatctggctacattctacagagagaacagacttaagaaactctgccagcagaccattaagcaaggcatttgtgaggaaaatgccatcgccctgctgtctgctgctgtcaagtacgacgcccaggatctggaggaattctgttttcgtttttgcattaaccaccttactgtcgttacccagacatccggctttgcggagatggatcatgacctactcaagaactttatctcaaaggcttcccgcgtcggagctttcaagaattag

SEQ ID NO: 105816 - DNA, 834 bp, Artificial Sequence
  derived and/or modified sequence
atgtctggagtgaccacagagaccggcagcctggacagcgccaccgtggccaccagccagcccctggccgagtggcagctgtgcaaggcctctgtgtcccggggcatcattgaaattgctgcctgccacagcacccacaccagcgctgccaagacccagggcggccacgtgtacatgtggggccagtgccggggccagagcgtcatcctgccccacctgacccacttcagctgcacagatgatgtgtttgcctgctttgccaccccagctgtgacctggaggctgctgtctgtggagccagatgaccacctgactgtggccgagagcctgaagcgggagtttgacaacccagacacagctgacctgaagttcctggtggatggcaagtacatctatgcccacaaggtgctgctgaagatccgctgtgagcacttccgcagcagcctggaggacaatgaagatgacatcgtggagatgtctgagttctcctaccctgtgtaccgggccttcctggagtacctgtacacagacagcatcagcctgagccctgaggaggccgtgggcctgctggacctggccaccttctaccgggagaaccggctgaagaagctgtgccagcagaccatcaagcagggcatctgtgaggagaatgccatcgccctgctgtctgctgctgtgaagtatgatgcccaggacctggaggagttctgcttccgcttctgcatcaaccacctgactgtggtgacccagaccagcggctttgctgagatggaccatgacctgctgaagaacttcatcagcaaggccagccgggtgggcgccttcaagaactag

SEQ ID NO: 105817 - DNA, 834 bp, Artificial Sequence
  derived and/or modified sequence
atgagcggcgtgaccaccgagaccggcagcctggacagcgccaccgttgctacatctcagcctttagcagaatggcagctttgcaaggcttctgtttctcgggggatcattgagattgcagcctgccacagcacacacacctccgccgccaagacacagggtggtcacgtgtacatgtggggtcaatgccggggccagtcagttattctgcctcacctgacccatttcagttgcaccgacgatgtgttcgcctgtttcgccacacccgccgtcacttggaggctcctttccgtggagccggacgaccatctgacggtggccgagagcttgaagagggaatttgacaatccagatactgctgatcttaagtttctggtcgatggtaagtacatttacgcccataaggtgctgcttaaaatccgatgtgagcacttcaggtcaagcctcgaggacaacgaggacgacatcgtggagatgtcagaattttcgtatcctgtgtacagggccttcctcgagtatttatataccgacagcatcagcctctccccggaagaggcagtgggccttctggatttagcaaccttttaccgcgaaaacaggctcaagaagctgtgtcagcagaccattaaacagggcatctgtgaagagaacgccatcgccttgctgagcgctgctgttaagtacgacgcacaggatctagaggagttctgctttagattttgtattaaccacctgaccgtggtgacgcagaccagcgggtttgctgagatggaccatgacctgctcaagaacttcattagcaaggcaagcagggtgggagctttcaagaattag

SEQ ID NO: 105818 - DNA, 834 bp, Artificial Sequence
  derived and/or modified sequence
atgagtggtgtaacgaccgagactgggagcttggactctgccaccgtggcaaccagtcagcccctggctgaatggcagctgtgcaaagcaagcgtgtcccgaggtatcatcgagatcgccgcttgccattctacccacacgtccgccgcaaagacccagggtggacacgtctatatgtggggacaatgccgagggcagtctgtaatcctaccccatctcactcattttagctgcacagatgacgtgttcgcctgcttcgccactccggctgttacatggcgcttactgagcgtggaacctgacgatcacctcactgtggcagagtccctcaagagggaatttgataatccagataccgccgacctcaagtttttagtggatgggaaatatatttatgcccacaaggtgcttcttaagattcgttgtgagcacttcagatcatccctggaggacaatgaggacgatattgttgaaatgtcagaattttcttacccagtgtacagggccttcttggaatacttatacactgactcaattagcctcagcccagaggaggctgtgggccttctggatctcgctaccttctatcgagaaaaccgactgaagaaactctgccaacagaccattaagcagggtatttgtgaagaaaatgccatcgctctgctatctgcagcagttaagtatgacgcacaagacctggaagaattctgtttccgcttctgtatcaatcacttaactgtcgtgacccaaacgagcggatttgccgagatggatcatgatttgctgaaaaattttatcagtaaggcctctcgggtgggagcctttaaaaactag

SEQ ID NO: 105819 - DNA, 1316 bp, Artificial Sequence
  derived and/or modified sequence
gcagtaaccgctacccaggaggcggagcggacaaggctccggcctgcgaggagccagtacaggctactctgtcatctttgaagatgttagatgtgggaaagtggccaattttttccctttgttctgaagaagaactacagttaattcgtcaggcttgtgtctttggcagtgctggcaatgaagttttatacactacagtaaatgatgagatttttgtgcttggcacaaactgctgtggctgtttggggttaggtgacgtccagagcaccattgaacctcggagactggattctttaaatggcaaaaaaatagcctgcctcagctatgggagtggtccacatattgtccttgcaacaacagttaatcagccaatccctcgaagagtcactggctgcctacaaaataaagtagttgtgaccatagcatgtgggcagatgtgctgcatggcagtagtagacacgggggaggtctatgtctggggttacaacggaaacgggcagcttggactcggcaacagtggcaaccagccaaccccttgcagagtggcagctttgcaaggcatccgtgtccagagggattatcgagattgcagcctgtcactccacacacacgtctgcggccaagacgcagggtgggcacgtgtacatgtggggccagtgccggggtcagtccgtgatcctcccgcacctcacccacttctcctgcactgacgacgtgtttgcctgctttgccacgcccgccgtcacgtggcgcctcctctccgtggaacctgatgaccacctcacagtggctgagtcactgaagagggaatttgacaacccggacactgcagacctgaagtttctagttgatggaaagtacatttatgcacataaagtccttctcaagattcgatgtgagcattttcgttcgtcattggaagataacgaggatgatattgtagaaatgagtgaattttcatatcctgtttaccgggccttcctggaatacctatacacagacagcatcagcctttctcctgaggaggcagtaggactgctagacttggctacattttatagagaaaatcgtttgaaaaagctctgccaacaaactatcaagcaaggcatctgcgaggagaatgccatcgctctgctctcggctgcggtgaagtatgatgcacaggatttagaagaattctgcttcaggttttgcataaaccatctgactgtagtaacacaaacatcaggttttgcagaaatggaccatgatctcctgaagaactttatcagcaaagcaagcagagttggagcctttaaaaattgatcccatctgca

SEQ ID NO: 105820 - DNA, 834 bp, Artificial Sequence
  derived and/or modified sequence
atgagcggcgtgaccaccgagaccggcagcctggacagcgccaccgtggccaccagccagcccctggccgagtggcagctgtgcaaggccagcgtgagcagaggcatcatcgagatcgccgcctgccacagcacccacaccagcgccgccaagacccagggcggccacgtgtacatgtggggccagtgcagaggccagagcgtgatcctgccccacctgacccacttcagctgcaccgacgacgtgttcgcctgcttcgccacccccgccgtgacctggagactgctgagcgtggagcccgacgaccacctgaccgtggccgagagcctgaagagagagttcgacaaccccgacaccgccgacctgaagttcctggtggacggcaagtacatctacgcccacaaggtgctgctgaagatcagatgcgagcacttcagaagcagcctggaggacaacgaggacgacatcgtggagatgagcgagttcagctaccccgtgtacagagccttcctggagtacctgtacaccgacagcatcagcctgagccccgaggaggccgtgggcctgctggacctggccaccttctacagagagaacagactgaagaagctgtgccagcagaccatcaagcagggcatctgcgaggagaacgccatcgccctgctgagcgccgccgtgaagtacgacgcccaggacctggaggagttctgcttcagattctgcatcaaccacctgaccgtggtgacccagaccagcggcttcgccgagatggaccacgacctgctgaagaacttcatcagcaaggccagcagagtgggcgccttcaagaactag

SEQ ID NO: 105821 - protein, 912 aa, Artificial Sequence
  derived and/or modified sequence
MEVFPFLLVLSVWWSRTWDSANADSIIHIGAIFDESAKKDDEVFRTAVGDLNQNEEILQTEKITFSVTFVDGNNPFQAVQEDIRGIQEFLDKVSQQGMDVALQKVENNINKMITTLFDTMRIEELNRYRDTLRRAILVMNPATAKSFITEVVETNLVAFDCHWIIINEEINDVDVQELVRRSIGRLTIIRQTFPVPQNISQRCFRGNHRISSTLCDPKDPFAQNMEISNLYIYDTVLLLANAFHKKLEDRKWHSMASLSCIRKNSKPWQGGRSMLETIKKGGVSGLTGELEFGENGGNPNVHFEILGTNYGEELGRGVRKLGCWNPVTGLNGSLTDKKLENNMRGVVLRVVTVLEEPFVMVSENVLGKPKKYQGFSIDVLDALSNYLGFNYEIYVAPDHKYGSPQEDGTWNGLVGELVFKRADIGISALTITPDRENVVDFTTRYMDYSVGVLLRRAEKTVDMFACLAPFDLSLWACIAGTVLLVGLLVYLLNWLNPPRLQMGSMTSTTLYNSMWFVYGSFVQQGGEVPYTTLATRMMMGAWWLFALIVISSYTANLAAFLTITRIESSIQSLQDLSKQTEIPYGTVLDSAVYEHVRMKGLNPFERDSMYSQMWRMINRSNGSENNVLESQAGIQKVKYGNYAFVWDAAVLEYVAINDPDCSFYTIGNTVADRGYGIALQHGSPYRDVFSQRILELQQNGDMDILKHKWWPKNGQCDLYSSVDTKQKGGALDIKSFAGVFCILAAGIVLSCFIAMLETWWNKRKGSRVPSKEDDKEIDLEHLHRRVNSLCTDDDSPHKQFSTSSIDLTPLDIDTLPTRQALEQISDFRNTHITTTTFIPEQIQTLSRTLSAKAASGFTFGNVPEHRTGPFRHRAPNGGFFRSPIKTMSSIPYQPTPTLGLNLGNDPDRGTSI

SEQ ID NO: 105822 - DNA, 2739 bp, Artificial Sequence
  derived and/or modified sequence
atggaggtgtttccgttcctcctggtgctgtcggtgtggtggagccggacatgggattcagcaaacgcagattcaatcatccacatcggcgccattttcgacgagagcgctaagaaggacgacgaggtgtttaggacggcagttggagatctgaaccagaatgaggaaatcctccagaccgagaagatcactttctcagtaacctttgtggatggaaataaccctttccaggcagtccaagaagacattagagggatccaggagtttctggataaagtctcgcagcaggggatggacgtcgctctgcagaaggtcgagaacaatattaacaagatgatcaccacactgtttgatacaatgaggatcgaagagctgaaccggtacagagacactcttagaagagccatccttgttatgaacccagcaacagccaaatcgttcatcacagaggttgtagaaactaatctggtggcattcgactgccactggatcatcataaacgaggagatcaacgatgtggatgtgcaagaactggtgagacggtcgataggccgcctgaccatcatcagacagacgtttcccgtgcctcagaacataagccagaggtgttttaggggaaatcacaggatttcttcaactctgtgcgaccctaaagatccatttgcacaaaatatggagattagtaatctctatatatacgatactgtcctgctgctcgcaaacgctttccataaaaagctcgaggaccgaaaatggcattctatggcctcccttagctgtattaggaagaatagcaagccatggcagggcggaaggtccatgttggagactatcaagaaggggggcgtctccggcctgaccggcgagttagagttcggcgagaacgggggaaatcctaatgtgcactttgagatcctgggaacgaactacggggaggaactgggcaggggcgtacgaaagcttggttgctggaacccggtcacaggactcaatggctctctcactgacaaaaagctggagaataacatgcggggtgtagtcctgcgtgttgtgacagtcctcgaggagccctttgtcatggttagcgagaacgtgctgggcaagcccaagaaatatcaggggttctcgatagacgtgctggatgctctgtctaattatctgggctttaactacgagatctatgtggccccagaccacaagtacggaagcccccaggaggacggaacatggaacggcctggttggagaactggtctttaaaagggccgatataggaattagcgctcttaccattactcctgatagagaaaatgtagtcgatttcaccacccgctacatggactattcagtgggtgttctgctgagaagggccgagaaaactgtcgatatgttcgcgtgcctggccccctttgatctctctctctgggcatgtatcgctgggacagtgctcctggtgggcctcctggtctatctgctgaactggctgaatccacctaggttgcagatgggaagcatgacctcaaccactctctataattctatgtggtttgtgtacgggtcattcgtgcagcagggcggagaggtcccttacacgaccctcgccacccgaatgatgatgggcgcctggtggctgttcgccctcattgttatatctagctatacagcaaatctggctgcctttctgacaattactcgtattgagtcctccatccagagtcttcaagatctgagcaaacaaacagagatcccatatggcacagtgctggactcggcagtctacgaacacgtccggatgaagggcctgaacccttttgagcgggactcaatgtacagccaaatgtggagaatgataaaccgcagtaatggaagcgaaaataacgtactggagagccaggccggcattcaaaaggtgaagtatgggaactatgcttttgtgtgggacgcagccgtgctggagtacgtagccatcaatgatcctgactgcagcttttacactatcgggaacaccgtcgcagatcgaggttatggcattgccctccagcacggatcaccttaccgcgacgtgttctctcaacggatactagaactgcagcagaatggagacatggatatccttaagcacaagtggtggcccaagaacggccagtgcgacctctattcttcagtagacacaaagcagaaaggcggagcgctcgacatcaagagctttgccggcgttttctgtattctggccgccggcatagtgttgtcttgctttattgctatgcttgagacatggtggaataagcggaaagggtctagggtgccaagcaaggaggatgataaagaaattgatctggagcacctccacaggagagtgaactccctctgcactgacgatgactcgcctcataagcagttcagtacttcttccatcgatttaacccctctggatatcgatacattgcccactcgccaggcgttggaacagatatctgacttccggaatactcacatcaccaccaccacatttatacctgagcagatacagaccttatcacgcacgctgagtgccaaggctgctagcggctttacattcggaaacgttccagagcataggaccggcccctttaggcacagagctcctaatggagggttcttcaggtccccgattaagacaatgtcctctattccgtaccagccgacccccactctgggccttaatttgggaaatgatccggacaggggtacctctatttag

SEQ ID NO: 105823 - DNA, 2739 bp, Artificial Sequence
  derived and/or modified sequence
atggaagttttcccctttctcttggttttgtccgtctggtggtctcgaacctgggactcggcgaatgcggattcgatcattcacatcggagcaatttttgatgaatctgccaaaaaggatgatgaggtatttcgcactgcggttggtgaccttaaccagaatgaggagatcttacagactgagaaaatcacattttcagtgacgtttgttgatggcaacaaccctttccaagcagttcaagaagatatccgtggaatacaggagttcttggacaaagtctctcagcagggaatggatgttgcacttcagaaggtagaaaacaacatcaataaaatgattaccactctctttgacaccatgagaatagaagaactgaatcgctatcgagacactcttaggcgagcgatccttgttatgaatcctgctacagccaaatccttcattactgaggttgtggagactaatttggttgcttttgactgtcactggatcattataaatgaggaaataaacgatgtggacgtacaggaacttgtaagaaggtcaattggaaggttaacgattattcggcagacatttccagttccccagaacataagtcagcggtgtttccgtggcaaccatcgaatatcttcaacattgtgtgatccaaaggatccatttgctcagaatatggagatttccaacctttacatatatgacacggtgcttctgcttgctaatgcttttcataagaagctggaggaccgaaagtggcacagcatggcaagtctgtcatgtatcagaaagaactcaaagccctggcagggtgggcgctccatgttggagaccatcaagaagggtggagttagtgggttgactggagagctagaatttggagaaaatggaggcaatcccaatgtccactttgaaatccttggaaccaactatggagaagagcttggcagaggtgttcgaaaacttggttgctggaatcctgtcacaggtctgaatgggtcactgactgacaagaaattggagaataacatgcgtggagtggttctacgtgtagtaactgttctggaagaaccttttgtgatggtctctgaaaatgtcttgggtaagccgaagaaataccagggcttctccattgatgttttggatgccttatctaactacctgggttttaactacgaaatttacgtagcaccggatcacaaatacggaagcccacaagaagatgggacatggaatggcttggtaggagaacttgtctttaagagagccgacatagggatttctgctttaaccatcactccagatcgtgaaaatgtggtggactttacgacacgttacatggactactcagtgggggtactacttcgaagggctgaaaagacagtggatatgtttgcctgtcttgcaccatttgatctctctctatgggcttgcattgctggcacagtccttctggtgggtctactggtctacctcttgaactggcttaatcccccacgattacaaatgggatcaatgacgtctactactctctacaactccatgtggtttgtgtatggatcttttgtacaacaaggcggggaagtcccgtacacgactctggctacccgaatgatgatgggggcttggtggctatttgctttgattgttatctcatcttacacggcaaacctcgctgctttcctcactattacacgcattgaaagttccatccagtctctccaggacctttccaagcaaacagaaatcccttatggcacagtcctagactctgcggtatatgagcatgtccgcatgaaaggactgaatccttttgagagggacagcatgtattcccaaatgtggcggatgatcaaccgaagcaatggatcggagaacaatgttctggagtcccaggcaggcattcaaaaggtaaaatatggaaattatgctttcgtatgggatgcagctgtattggaatatgtggctatcaatgacccagattgttccttttacaccattggaaatactgttgctgatcggggatatggaattgcattacaacatggcagtccttaccgagatgttttttcacaaaggatcctggagcttcagcagaatggtgacatggacatcctgaagcacaaatggtggcctaagaatggccagtgtgacctgtactcgtcagtggacacaaagcagaaaggaggcgccctggacataaagagctttgcaggggtcttttgtatcctggctgctggaattgtcctctcctgcttcatagccatgctggagacgtggtggaacaagaggaaaggctcccgggttccatcaaaagaggatgacaaggaaattgacctggagcacctccatagacgtgtaaatagcttgtgcacagatgacgacagcccccataaacagttttccacctcgtcaattgatttgacccctctggacattgacactttgccaacacgacaagcactggagcaaatcagtgatttcaggaacactcatattaccacaacaacctttatcccagagcagatccagactcttagccgcacactgtcagctaaagctgcttctggtttcacttttggcaacgtgcctgagcaccgaactggcccttttaggcacagggcacctaatgggggctttttcaggagtcctataaaaacaatgtcatctattccttatcaaccaactcctaccctggggctcaatctgggtaatgatccagaccgaggcacctccatatga

SEQ ID NO: 105824 - DNA, 2739 bp, Artificial Sequence
  derived and/or modified sequence
atggaggtgttccccttcctgctggtgctgtctgtgtggtggagcaggacctgggacagcgccaatgctgacagcatcatccacatcggggccatctttgatgagagcgccaagaaggatgatgaggtgttcagaacagctgtgggggacctgaaccagaatgaggagatcctgcagacagagaagatcaccttctctgtgacctttgtggatggcaacaaccccttccaggccgtgcaggaggacatccggggcatccaggagttcctggacaaggtgtcccagcagggcatggatgtggccctgcagaaggtggagaacaacatcaacaagatgatcaccaccctgtttgacaccatgagaattgaggagctgaaccgctacagagacaccctgcggcgggccatcctggtgatgaacccagccacagccaagagcttcatcacagaggtggtggagaccaacctggtggcctttgactgccactggatcatcatcaatgaggagatcaatgatgtggatgtgcaggagctggtgcggcgcagcatcggccgcctgaccatcatccggcagaccttccctgtgccccagaacatcagccagcgctgcttccggggcaaccaccgcatcagcagcaccctgtgtgaccccaaggacccctttgcccagaacatggagatcagcaacctgtacatctatgacacagtgctgctgctggccaatgccttccacaagaagctggaggacaggaagtggcacagcatggccagcctgagctgcatcaggaagaacagcaagccctggcagggcggccgctccatgctggagaccatcaagaagggcggcgtgtctggcctgactggagagctggagtttggagaaaatggaggcaaccccaacgtgcactttgagatcctgggcaccaactacggggaggagctgggccggggcgtgaggaagctgggctgctggaaccctgtgacaggcctgaatggcagcctgacagacaagaagctggagaacaacatgagaggagtggtgctgcgggtggtgacagtgctggaggagccctttgtgatggtgtctgaaaatgtgctgggcaagcccaagaagtaccagggcttcagcattgatgtgctggatgccctgagcaactacctgggcttcaactatgagatctacgtggccccagaccacaagtatggcagcccccaggaggatggcacctggaatggcctggtgggggagctggtgttcaagagagctgacatcggcatcagcgccctgaccatcaccccagaccgggagaatgtggtggacttcaccacccgctacatggactacagcgtgggcgtgctgctgcggcgggcagagaagacagtggacatgtttgcctgcctggccccctttgacctgagcctgtgggcctgcatcgccggcaccgtgctgctggtgggcctgctggtgtacctgctgaactggctgaaccccccccggctgcagatgggctccatgaccagcaccaccctgtacaacagcatgtggtttgtgtatggcagctttgtgcagcagggcggggaggtgccctacaccaccctggccaccaggatgatgatgggcgcctggtggctgtttgccctgattgtcatcagcagctacacagccaacctggccgccttcctgaccatcacccgcatcgagagcagcatccagagcctgcaggacctgagcaagcagacagagatcccctacggcaccgtgctggacagcgctgtgtatgaacatgtgaggatgaagggcctgaacccctttgagcgggacagcatgtacagccagatgtggaggatgatcaacagaagcaatggaagtgagaacaacgtgctggagagccaggccggcatccagaaggtgaagtatggcaactatgcctttgtgtgggatgctgctgtgctggagtatgtggccatcaatgaccctgactgcagcttctacaccatcggcaacacagtggccgaccggggctatggaattgccctgcagcacggcagcccctacagagatgtgttcagccagaggatcctggagctgcagcagaatggagacatggacatcctgaagcacaagtggtggcccaagaatggccagtgtgacctgtacagctctgtggacaccaagcagaagggcggggccctggacatcaagagctttgctggggtcttctgcatcctggccgccggcatcgtgctgagctgcttcatcgccatgctggagacctggtggaacaagaggaagggcagccgggtgcccagcaaggaggatgacaaggagattgacctggagcacctgcaccggcgggtgaacagcctgtgcacagatgatgacagcccccacaagcagttcagcaccagcagcattgacctgacccccctggacatcgacaccctgcccacccggcaggccctggagcagatcagtgacttcaggaacacccacatcaccaccaccaccttcatccctgagcagatccagaccctgagcaggaccctgagcgccaaggccgccagcggcttcacctttggaaatgtgcctgagcacaggacaggccccttccgccaccgggcccccaacggcggcttcttccgcagccccatcaagaccatgagcagcatcccctaccagcccacccccaccctgggcctgaacctgggcaatgaccctgaccggggcaccagcatctag

SEQ ID NO: 105825 - DNA, 2739 bp, Artificial Sequence
  derived and/or modified sequence
atggaggtgttccccttcctgctggtgctgagcgtgtggtggagccgcacttgggatagtgcaaacgccgactctatcatccatatcggtgcgatcttcgacgaatctgctaaaaaggatgatgaggtattccgcaccgccgttggcgacctaaatcaaaacgaggagatactgcagacagagaagattacctttagcgttaccttcgtggacgggaataatccctttcaggctgtgcaagaggatatcagagggatccaggagttcttggacaaggtctcacagcagggcatggacgtggccctgcaaaaagtggaaaacaacattaataaaatgattaccaccctgtttgacaccatgaggatcgaggaactcaatagatatagagacacactgcgcagggccatactagttatgaacccagcaaccgctaaatcgtttatcaccgaggtggttgagaccaatttggtagcttttgattgccactggatcatcatcaacgaggagatcaacgacgttgacgtgcaggagttggtgcggcgcagcattggacgcctgacgattattagacagacctttcctgtgccccagaatatcagccagcgatgctttagagggaatcaccgcatttcctcaaccctgtgcgaccctaaggaccctttcgcccaaaatatggagatatcaaatctgtatatctatgacaccgtgctacttctggcgaacgcattccacaagaaactggaagaccggaaatggcattcgatggcctccctatcgtgtattagaaaaaatagcaagccttggcaggggggtcggtctatgttagaaacaattaaaaagggcggcgttagcggtctgactggcgagcttgaattcggggagaacggaggcaatcccaacgtccatttcgaaatcctggggacaaactacggcgaggaactgggccgcggcgtccgaaagctgggatgttggaacccggtgaccggactcaatggatcgctgaccgacaagaaactggaaaacaatatgcgaggggttgtcctgcgggtagtgacagtgctggaggagccctttgtgatggtcagcgaaaacgtgctgggcaaaccgaagaaatatcagggcttctccattgatgtcctagatgccctaagcaactatttgggttttaactacgaaatctacgtggctcctgaccataaatacggctccccacaggaagacggcacatggaatggacttgtgggtgaattggtctttaagagggccgatattggtattagtgctctcacgattacccccgatagggagaatgtcgtggattttaccactcgttacatggactattctgtgggtgtccttcttcggcgggcagagaaaactgtggatatgttcgcctgcctggcaccttttgatctgtcactttgggcctgtatcgcagggaccgtgctgctggtcggcctgttggtgtacctgctgaattggctaaatccgccccgtctgcagatggggagcatgactagcacaactttgtacaactcaatgtggttcgtatatggtagtttcgtgcagcagggaggggaggtgccctacaccacattggctacaagaatgatgatgggcgcttggtggctgttcgcccttattgtgattagctcttacactgccaacctggcggcgtttctcaccattacccgcattgagagtagcatacagtccctgcaggacctgagcaaacagactgaaataccctacgggactgtactcgactctgccgtatacgagcacgttagaatgaagggtctaaatccttttgagcgcgacagtatgtatagccagatgtggagaatgattaacagatctaatggtagtgagaacaacgtgcttgagtcccaggctgggatccagaaggtaaaatatggcaattacgcattcgtgtgggatgcagctgtgctggagtacgttgctatcaacgacccagactgcagcttttatacaatcggcaatacggttgctgaccgcggttatggcattgccctccagcacggatcaccttatagagatgtgttctctcagagaatactggagctgcagcaaaatggcgatatggatatcctgaagcacaagtggtggcctaaaaacgggcagtgtgacctgtacagcagcgtcgacactaagcagaaagggggtgcactggacattaaatcttttgcgggtgttttctgtatcctcgcagcaggtatagtcctgtcctgcttcatagctatgctggagacttggtggaacaagcggaaggggtcccgcgtcccgtcgaaggaagacgacaaggagatcgaccttgagcatctacaccggcgtgtcaattcactctgcactgatgatgattcgccccataagcaattcagtactagcagcatcgatctcaccccccttgacattgatactctcccaactcgccaggcccttgagcagataagcgatttccggaatacacacattactacaaccacatttataccagagcagatacaaacgctgagccgcaccttgagcgctaaggccgccagtggtttcacctttgggaatgtacccgaacacaggaccggtccgttccggcacagagcacccaatgggggattttttcgttcccccatcaagacgatgtcctctattccttatcagccaactccgaccctgggactgaaccttgggaatgatcctgacagggggacttctatttag

SEQ ID NO: 105826 - DNA, 2739 bp, Artificial Sequence
  derived and/or modified sequence
atggaagttttcccatttctgctcgtgttatcagtgtggtggtcccggacatgggattcggctaacgcagactccatcatccatataggggctattttcgacgagtctgctaagaaagacgacgaggtttttagaacagccgttggcgacctcaaccagaacgaagaaatcctgcagactgaaaagataactttcagcgtcacattcgtcgatggaaataatccattccaagcagtacaagaagacatcagagggattcaagagttcctcgataaggtatcccagcagggaatggatgttgcactccaaaaagttgagaacaacattaataaaatgatcacaactctcttcgacacaatgaggattgaggagctgaatcggtaccgagatacattgcggagagccatccttgtgatgaatcccgctactgcaaagtcttttatcactgaagtggtggaaaccaatctcgttgcctttgattgtcattggattattattaatgaagaaattaatgacgttgacgtgcaagaactggtgcgcagatcaataggcaggcttaccataatccggcagactttcccagtgcctcagaatatttcgcagcgctgcttcaggggcaatcaccgtatcagttcaactctgtgcgatcccaaagacccgttcgcccagaatatggaaatcagcaacctgtatatttatgacacagtcctgttactggccaacgctttccataagaagttagaagacagaaagtggcacagtatggcctccctctcatgcattaggaaaaatagcaagccctggcaagggggaagatctatgttggaaaccatcaagaaggggggtgtctccggtctaacgggagaactcgagtttggagaaaacggaggaaacccgaacgtccattttgaaattctaggtacaaactatggggaagaactcggacgcggtgtgagaaaattaggatgctggaatccagtgactgggctcaatggaagtctcaccgataagaaacttgaaaacaacatgcgcggagtggtcctcagagtcgtcacggtcttggaggaaccattcgtgatggtatccgagaatgtcctaggcaaacctaagaagtatcaaggattcagtatcgacgtgcttgatgccctctctaactacctgggcttcaactacgaaatctatgtggcacccgatcataaatacgggtctcctcaggaggatggtacttggaacgggcttgttggtgagttagttttcaagagggctgatatcggtatctccgcactcacaatcacacctgacagagagaatgtcgtggactttacgacccgatacatggattactccgttggggtgttgttacgcagggccgagaaaacagtggatatgtttgcctgcctcgcccctttcgatttgtctctttgggcgtgcatcgcaggcactgttctcctcgtcggacttctggtgtatttgctgaactggctgaatccccctaggctgcagatggggagtatgacatctacgacactgtacaattctatgtggttcgtttatgggtcatttgtccagcaaggcggtgaggtaccctatacaacactagctacccgtatgatgatgggagcgtggtggctcttcgctctgattgtcatttcatcctataccgccaatttggccgcatttcttacaatcactcgcatcgaatctagtattcagagcctccaggatctgtccaagcagacagaaatcccgtacggtactgtgcttgatagcgcggtgtatgaacacgtccgtatgaagggactgaatccctttgaacgcgactcaatgtactcacagatgtggaggatgatcaacagaagtaatggaagcgagaataatgttctggaaagccaggctgggatccagaaagtgaagtacgggaattacgcattcgtgtgggacgccgctgtgctggaatatgtggccattaatgaccccgattgttccttttacacaatcgggaatacagtagcggatcgcggatacggtattgccctgcagcatggctctccctacagggatgtgttttcccagcgaatcctcgagctgcagcagaatggtgatatggatattctgaaacataaatggtggcccaaaaatggacagtgcgatctctattcctctgtggacactaaacagaaggggggtgcgctagacattaagagtttcgccggtgttttctgcatcctcgcggcaggaatcgtcctaagctgctttatcgccatgcttgaaacctggtggaataagcggaaaggctcaagagtgcccagcaaggaggacgacaaggagatagatctggagcatttgcacagacgagtgaactctctgtgcacagacgacgacagcccgcacaagcagtttagtacatcatccattgatctgacccctctggatatcgataccctgcccaccagacaagctctagaacagatttcagattttaggaatacccatataactacaacaacgtttatccccgaacagatccagactcttagtagaacactttcagcgaaggccgcttctggcttcacctttgggaacgtgcctgagcaccgcacaggcccttttcggcatagggcacccaatggcggattttttcgctcccccatcaaaacaatgagctcaattccgtaccaacccacaccaacacttgggttgaacctgggtaatgaccctgatagagggacatccatttag

SEQ ID NO: 105827 - DNA, 2739 bp, Artificial Sequence
  derived and/or modified sequence
atggaggtgttccccttcctgctggtgctgagcgtgtggtggagcagaacctgggacagcgccaacgccgacagcatcatccacatcggcgccatcttcgacgagagcgccaagaaggacgacgaggtgttcagaaccgccgtgggcgacctgaaccagaacgaggagatcctgcagaccgagaagatcaccttcagcgtgaccttcgtggacggcaacaaccccttccaggccgtgcaggaggacatcagaggcatccaggagttcctggacaaggtgagccagcagggcatggacgtggccctgcagaaggtggagaacaacatcaacaagatgatcaccaccctgttcgacaccatgagaatcgaggagctgaacagatacagagacaccctgagaagagccatcctggtgatgaaccccgccaccgccaagagcttcatcaccgaggtggtggagaccaacctggtggccttcgactgccactggatcatcatcaacgaggagatcaacgacgtggacgtgcaggagctggtgagaagaagcatcggcagactgaccatcatcagacagaccttccccgtgccccagaacatcagccagagatgcttcagaggcaaccacagaatcagcagcaccctgtgcgaccccaaggaccccttcgcccagaacatggagatcagcaacctgtacatctacgacaccgtgctgctgctggccaacgccttccacaagaagctggaggacagaaagtggcacagcatggccagcctgagctgcatcagaaagaacagcaagccctggcagggcggcagaagcatgctggagaccatcaagaagggcggcgtgagcggcctgaccggcgagctggagttcggcgagaacggcggcaaccccaacgtgcacttcgagatcctgggcaccaactacggcgaggagctgggcagaggcgtgagaaagctgggctgctggaaccccgtgaccggcctgaacggcagcctgaccgacaagaagctggagaacaacatgagaggcgtggtgctgagagtggtgaccgtgctggaggagcccttcgtgatggtgagcgagaacgtgctgggcaagcccaagaagtaccagggcttcagcatcgacgtgctggacgccctgagcaactacctgggcttcaactacgagatctacgtggcccccgaccacaagtacggcagcccccaggaggacggcacctggaacggcctggtgggcgagctggtgttcaagagagccgacatcggcatcagcgccctgaccatcacccccgacagagagaacgtggtggacttcaccaccagatacatggactacagcgtgggcgtgctgctgagaagagccgagaagaccgtggacatgttcgcctgcctggcccccttcgacctgagcctgtgggcctgcatcgccggcaccgtgctgctggtgggcctgctggtgtacctgctgaactggctgaacccccccagactgcagatgggcagcatgaccagcaccaccctgtacaacagcatgtggttcgtgtacggcagcttcgtgcagcagggcggcgaggtgccctacaccaccctggccaccagaatgatgatgggcgcctggtggctgttcgccctgatcgtgatcagcagctacaccgccaacctggccgccttcctgaccatcaccagaatcgagagcagcatccagagcctgcaggacctgagcaagcagaccgagatcccctacggcaccgtgctggacagcgccgtgtacgagcacgtgagaatgaagggcctgaaccccttcgagagagacagcatgtacagccagatgtggagaatgatcaacagaagcaacggcagcgagaacaacgtgctggagagccaggccggcatccagaaggtgaagtacggcaactacgccttcgtgtgggacgccgccgtgctggagtacgtggccatcaacgaccccgactgcagcttctacaccatcggcaacaccgtggccgacagaggctacggcatcgccctgcagcacggcagcccctacagagacgtgttcagccagagaatcctggagctgcagcagaacggcgacatggacatcctgaagcacaagtggtggcccaagaacggccagtgcgacctgtacagcagcgtggacaccaagcagaagggcggcgccctggacatcaagagcttcgccggcgtgttctgcatcctggccgccggcatcgtgctgagctgcttcatcgccatgctggagacctggtggaacaagagaaagggcagcagagtgcccagcaaggaggacgacaaggagatcgacctggagcacctgcacagaagagtgaacagcctgtgcaccgacgacgacagcccccacaagcagttcagcaccagcagcatcgacctgacccccctggacatcgacaccctgcccaccagacaggccctggagcagatcagcgacttcagaaacacccacatcaccaccaccaccttcatccccgagcagatccagaccctgagcagaaccctgagcgccaaggccgccagcggcttcaccttcggcaacgtgcccgagcacagaaccggccccttcagacacagagcccccaacggcggcttcttcagaagccccatcaagaccatgagcagcatcccctaccagcccacccccaccctgggcctgaacctgggcaacgaccccgacagaggcaccagcatctag

SEQ ID NO: 105828 - protein, 1076 aa, Artificial Sequence
  derived and/or modified sequence
MGEIEQRPTPGSRLGAPENSGISTLERGQKPPPTPSGKLVSIKIQMLDDTQEAFEVPQRAPGKVLLDAVCNHLNLVEGDYFGLEFPDHKKITVWLDLLKPIVKQIRRPKHVVVKFVVKFFPPDHTQLQEELTRYLFALQVKQDLAQGRLTCNDTSAALLISHIVQSEIGDFDEALDREHLAKNKYIPQQDALEDKIVEFHHNHIGQTPAESDFQLLEIARRLEMYGIRLHPAKDREGTKINLAVANTGILVFQGFTKINAFNWAKVRKLSFKRKRFLIKLRPDANSAYQDTLEFLMASRDFCKSFWKICVEHHAFFRLFEEPKPKPKPVLFSRGSSFRFSGRTQKQVLDYVKEGGHKKVQFERKHSKIHSIRSLASQPTELNSEVLEQSQQSTSLTFGEGAESPGGQSCRRGKEPKVSAGEPGSHPSPAPRRSPAGNKQADGAASAPTEEEEEVVKDRTQQSKPQPPQPSTGSLTGSPHLSELSVNSQGGVAPANVTLSPNLSPDTKQASPLISPLLNDQACPRTDDEDEGRRKRFPTDKAYFIAKEVSTTERTYLKDLEVITSWFQSTVSKEDAMPEALKSLIFPNFEPLHKFHTNFLKEIEQRLALWEGRSNAQIRDYQRIGDVMLKNIQGMKHLAAHLWKHSEALEALENGIKSSRRLENFCRDFELQKVCYLPLNTFLLRPLHRLMHYKQVLERLCKHHPPSHADFRDCRAALAEITEMVAQLHGTMIKMENFQKLHELKKDLIGIDNLVVPGRPGSFSLIRTPHLGQARRIPCAPERRPLLLVKEFIRLGSLSKLSGKGLQQRMFFLFNDVLLYTSRGLTASNQFKVHGQLPLYGMTIEESEDEWGVPHCLTLRGQRQSIIVAASSRSEMEKWVEDIQMAIDLAEKSSSPAPEFLASSPPDNKSPDEATAADQESEDDLSASRTSLERQAPHRGNTMVHVCWHRNTSVSMVDFSIAVENQLSGNLLRKFKNSNGWQKLWVVFTNFCLFFYKSHQDNHPLASLPLLGYSLTIPSESENIQKDYVFKLHFKSHVYYFRAESEYTFERWMEVIRSATSSASRPHVLSHKESLVY

SEQ ID NO: 105829 - protein, 153 aa, Artificial Sequence
  derived and/or modified sequence
  misc_feature (1)..(1): Xaa can be any naturally occurring amino acid
XLCKHHPPSHADFRDCRAALAEITEMVAQLHGTMIKMENFQKLHELKKDLIGIDNLVVPGRVSSSGLTMHCAGSRKEASEGLTFEPFEERPLQSKMSSFHPPGRQLEKHNSVVSSESLCSEEIKQSSDLIFCFFSLRGDSLLYLFPYHIPQKI

SEQ ID NO: 105830 - DNA, 3231 bp, Artificial Sequence
  derived and/or modified sequence
atgggcgagatcgagcagagacccacccccggcagcagactgggcgcccccgagaacagcggcatcagcaccctggagagaggccagaagcccccccccacccccagcggcaagctggtgagcatcaagatccagatgctggacgacacccaggaggccttcgaggtgccccagagagcccccggcaaggtgctgctggacgccgtgtgcaaccacctgaacctggtggagggcgactacttcggcctggagttccccgaccacaagaagatcaccgtgtggctggacctgctgaagcccatcgtgaagcagatcagaagacccaagcacgtggtggtgaagttcgtggtgaagttcttcccccccgaccacacccagctgcaggaggagctgaccagatacctgttcgccctgcaggtgaagcaggacctggcccagggcagactgacctgcaacgacaccagcgccgccctgctgatcagccacatcgtgcagagcgagatcggcgacttcgacgaggccctggacagagagcacctggccaagaacaagtacatcccccagcaggacgccctggaggacaagatcgtggagttccaccacaaccacatcggccagacccccgccgagagcgacttccagctgctggagatcgccagaagactggagatgtacggcatcagactgcaccccgccaaggacagagagggcaccaagatcaacctggccgtggccaacaccggcatcctggtgttccagggcttcaccaagatcaacgccttcaactgggccaaggtgagaaagctgagcttcaagagaaagagattcctgatcaagctgagacccgacgccaacagcgcctaccaggacaccctggagttcctgatggccagcagagacttctgcaagagcttctggaagatctgcgtggagcaccacgccttcttcagactgttcgaggagcccaagcccaagcccaagcccgtgctgttcagcagaggcagcagcttcagattcagcggcagaacccagaagcaggtgctggactacgtgaaggagggcggccacaagaaggtgcagttcgagagaaagcacagcaagatccacagcatcagaagcctggccagccagcccaccgagctgaacagcgaggtgctggagcagagccagcagagcaccagcctgaccttcggcgagggcgccgagagccccggcggccagagctgcagaagaggcaaggagcccaaggtgagcgccggcgagcccggcagccaccccagccccgcccccagaagaagccccgccggcaacaagcaggccgacggcgccgccagcgcccccaccgaggaggaggaggaggtggtgaaggacagaacccagcagagcaagccccagcccccccagcccagcaccggcagcctgaccggcagcccccacctgagcgagctgagcgtgaacagccagggcggcgtggcccccgccaacgtgaccctgagccccaacctgagccccgacaccaagcaggccagccccctgatcagccccctgctgaacgaccaggcctgccccagaaccgacgacgaggacgagggcagaagaaagagattccccaccgacaaggcctacttcatcgccaaggaggtgagcaccaccgagagaacctacctgaaggacctggaggtgatcaccagctggttccagagcaccgtgagcaaggaggacgccatgcccgaggccctgaagagcctgatcttccccaacttcgagcccctgcacaagttccacaccaacttcctgaaggagatcgagcagagactggccctgtgggagggcagaagcaacgcccagatcagagactaccagagaatcggcgacgtgatgctgaagaacatccagggcatgaagcacctggccgcccacctgtggaagcacagcgaggccctggaggccctggagaacggcatcaagagcagcagaagactggagaacttctgcagagacttcgagctgcagaaggtgtgctacctgcccctgaacaccttcctgctgagacccctgcacagactgatgcactacaagcaggtgctggagagactgtgcaagcaccacccccccagccacgccgacttcagagactgcagagccgccctggccgagatcaccgagatggtggcccagctgcacggcaccatgatcaagatggagaacttccagaagctgcacgagctgaagaaggacctgatcggcatcgacaacctggtggtgcccggcagacccggcagcttcagcctgatcagaaccccccacctgggccaggccagaagaatcccctgcgcccccgagagaagacccctgctgctggtgaaggagttcatcagactgggcagcctgagcaagctgagcggcaagggcctgcagcagagaatgttcttcctgttcaacgacgtgctgctgtacaccagcagaggcctgaccgccagcaaccagttcaaggtgcacggccagctgcccctgtacggcatgaccatcgaggagagcgaggacgagtggggcgtgccccactgcctgaccctgagaggccagagacagagcatcatcgtggccgccagcagcagaagcgagatggagaagtgggtggaggacatccagatggccatcgacctggccgagaagagcagcagccccgcccccgagttcctggccagcagcccccccgacaacaagagccccgacgaggccaccgccgccgaccaggagagcgaggacgacctgagcgccagcagaaccagcctggagagacaggccccccacagaggcaacaccatggtgcacgtgtgctggcacagaaacaccagcgtgagcatggtggacttcagcatcgccgtggagaaccagctgagcggcaacctgctgagaaagttcaagaacagcaacggctggcagaagctgtgggtggtgttcaccaacttctgcctgttcttctacaagagccaccaggacaaccaccccctggccagcctgcccctgctgggctacagcctgaccatccccagcgagagcgagaacatccagaaggactacgtgttcaagctgcacttcaagagccacgtgtactacttcagagccgagagcgagtacaccttcgagagatggatggaggtgatcagaagcgccaccagcagcgccagcagaccccacgtgctgagccacaaggagagcctggtgtactag

SEQ ID NO: 105831 - DNA, 462 bp, Artificial Sequence
  derived and/or modified sequence
tgactgtgcaagcaccacccccccagccacgccgacttcagagactgcagagccgccctggccgagatcaccgagatggtggcccagctgcacggcaccatgatcaagatggagaacttccagaagctgcacgagctgaagaaggacctgatcggcatcgacaacctggtggtgcccggcagagtgagcagcagcggcctgaccatgcactgcgccggcagcagaaaggaggccagcgagggcctgaccttcgagcccttcgaggagagacccctgcagagcaagatgagcagcttccacccccccggcagacagctggagaagcacaacagcgtggtgagcagcgagagcctgtgcagcgaggagatcaagcagagcagcgacctgatcttctgcttcttcagcctgagaggcgacagcctgctgtacctgttcccctaccacatcccccagaagatctag

SEQ ID NO: 105832 - DNA, 2301 bp, Artificial Sequence
  derived and/or modified sequence
gcggccgctgcccgctttgcgccgctcctccctgcgcgagtagcgctggccccggcgtcgaggcggccatggcgacccggagcccgctccccacccaccccgcctgctccgccctcccctccgccccgcgccacctttgatggctcggacctcagccggccaccgccagccctgctcgcgcgcccgcgccgccgccgcccgcgggtattaatagccggcgccgccgcgccctcggccgccgggggcttgggagccgccgatcccggagcccgagccgggagagggagccgccgcagccgccggcgctgtggagatattctctaagccgctttcatcatgggagaaatagagcagaggccgaccccaggatcacgactgggggccccggaaaattcggggatcagtaccttggaacgtggacagaagccgcccccaacaccttcaggaaaactcgtgtccatcaaaatccagatgctggatgacacccaggaggcatttgaagttccacaaagagctcctgggaaggtgctgctggatgcagtttgcaaccacctcaacctcgtggaaggtgactattttggcctcgagtttcctgatcacaaaaagatcacggtgtggctggatctcctaaaacccattgtgaaacagattagaaggccaaagcacgttgttgttaagtttgtggtgaaattctttccgcctgaccacacacaactccaagaagaactcacaaggtacctgttcgcgctgcaggtgaagcaggacttggctcaaggcaggttgacgtgtaatgacaccagcgcagctctcttgatttcacacattgtgcaatctgagattggggattttgatgaagccttggacagagagcacttagcaaaaaataaatacatacctcagcaagacgcactagaggacaaaatcgtggaatttcaccataaccacattggacaaacaccagcagaatcagatttccagctcctagagattgcccgtcggctagagatgtatggaatccggttgcacccggccaaggacagggaaggcacgaagatcaatctggccgttgccaacacgggaattctagtgtttcagggtttcactaagatcaatgccttcaactgggccaaggtgcggaagctgagcttcaagaggaagcgctttctcatcaagctccggccagatgccaatagtgcgtaccaggataccttggaattcctgatggccagtcgggatttctgcaagtccttctggaaaatctgtgttgaacatcatgccttctttagactttttgaagagcccaaaccaaagcccaagcccgtcctctttagccgggggtcatcatttcggttcagtggtcggactcagaagcaggttctcgactatgttaaagaaggaggacataagaaggtgcagtttgaaaggaagcacagcaagattcattctatccggagccttgcttcacagcctacagaactgaattcggaagtgctggagcagtctcagcagagcaccagccttacatttggagaaggtgccgaatctccagggggccagagctgccggcgaggaaaggaaccgaaggtttccgccggggagccggggtcgcacccgagccctgcgccgaggagaagccccgcgggtaacaagcaggcggacggagccgcctcggcgcccacggaggaagaggaggaggtcgttaaggataggacccagcagagtaaacctcagcccccgcagccaagcacaggctccctgactggcagtcctcacctttccgagctgtctgtgaactcgcaggggggagtggcccctgccaacgtgaccttgtctcccaacctgagccccgacaccaagcaggcctctcccttgatcagcccgctgctgaatgaccaggcctgcccccggacggacgatgaggatgagggccggaggaagagattcccaactgataaagcgtacttcatagctaaggaagtgtctaccaccgagcgaacatatctgaaggatctcgaagttatcacttcgtggtttcagagcacagtgagcaaagaggacgccatgccggaagcactgaaaagtctcatattcccgaattttgaacctttgcacaaatttcatactaattttctcaaggaaattgagcaacgacttgccctgtgggaaggccgctcaaatgcccaaatcagagattaccaaagaatcggcgatgtcatgctgaagaacattcagggcatgaaggctggagtgcaatggcgcgatctcggctcactgcagcctccgcctcccaggttcaagcca

SEQ ID NO: 105833 - DNA, 5012 bp, Artificial Sequence
  derived and/or modified sequence
gcggccgctgcccgctttgcgccgctcctccctgcgcgagtagcgctggccccggcgtcgaggcggccatggcgacccggagcccgctccccacccaccccgcctgctccgccctcccctccgccccgcgccacctttgatggctcggacctcagccggccaccgccagccctgctcgcgcgcccgcgccgccgccgcccgcgggtattaatagccggcgccgccgcgccctcggccgccgggggcttgggagccgccgatcccggagcccgagccgggagagggagccgccgcagccgccggcgctgtggagatattctctaagccgctttcatcatgggagaaatagagcagaggccgaccccaggatcacgactgggggccccggaaaattcggggatcagtaccttggaacgtggacagaagccgcccccaacaccttcaggaaaactcgtgtccatcaaaatccagatgctggatgacacccaggaggcatttgaagttccacaaagagctcctgggaaggtgctgctggatgcagtttgcaaccacctcaacctcgtggaaggtgactattttggcctcgagtttcctgatcacaaaaagatcacggtgtggctggatctcctaaaacccattgtgaaacagattagaaggccaaagcacgttgttgttaagtttgtggtgaaattctttccgcctgaccacacacaactccaagaagaactcacaaggtacctgttcgcgctgcaggtgaagcaggacttggctcaaggcaggttgacgtgtaatgacaccagcgcagctctcttgatttcacacattgtgcaatctgagattggggattttgatgaagccttggacagagagcacttagcaaaaaataaatacatacctcagcaagacgcactagaggacaaaatcgtggaatttcaccataaccacattggacaaacaccagcagaatcagatttccagctcctagagattgcccgtcggctagagatgtatggaatccggttgcacccggccaaggacagggaaggcacgaagatcaatctggccgttgccaacacgggaattctagtgtttcagggtttcactaagatcaatgccttcaactgggccaaggtgcggaagctgagcttcaagaggaagcgctttctcatcaagctccggccagatgccaatagtgcgtaccaggataccttggaattcctgatggccagtcgggatttctgcaagtccttctggaaaatctgtgttgaacatcatgccttctttagactttttgaagagcccaaaccaaagcccaagcccgtcctctttagccgggggtcatcatttcggttcagtggtcggactcagaagcaggttctcgactatgttaaagaaggaggacataagaaggtgcagtttgaaaggaagcacagcaagattcattctatccggagccttgcttcacagcctacagaactgaattcggaagtgctggagcagtctcagcagagcaccagccttacatttggagaaggtgccgaatctccagggggccagagctgccggcgaggaaaggaaccgaaggtttccgccggggagccggggtcgcacccgagccctgcgccgaggagaagccccgcgggtaacaagcaggcggacggagccgcctcggcgcccacggaggaagaggaggaggtcgttaaggataggacccagcagagtaaacctcagcccccgcagccaagcacaggctccctgactggcagtcctcacctttccgagctgtctgtgaactcgcaggggggagtggcccctgccaacgtgaccttgtctcccaacctgagccccgacaccaagcaggcctctcccttgatcagcccgctgctgaatgaccaggcctgcccccggacggacgatgaggatgagggccggaggaagagattcccaactgataaagcgtacttcatagctaaggaagtgtctaccaccgagcgaacatatctgaaggatctcgaagttatcacttcgtggtttcagagcacagtgagcaaagaggacgccatgccggaagcactgaaaagtctcatattcccgaattttgaacctttgcacaaatttcatactaattttctcaaggaaattgagcaacgacttgccctgtgggaaggccgctcaaatgcccaaatcagagattaccaaagaatcggcgatgtcatgctgaagaacattcagggcatgaagcacctggcggctcacctgtggaagcacagcgaggccttggaggccctggagaatggaatcaagagctcccggcggctggagaacttctgcagagactttgagctgcagaaggtgtgttacctaccgctcaacaccttcctcctgcggccactgcaccggctcatgcactacaagcaggtcctggagcggctgtgcaaacaccacccgccgagccacgccgacttcagggactgccgagccgctttggcagagatcacggagatggtggcacagctccacggtacgatgatcaagatggagaatttccagaagctgcacgaactcaagaaagatttgattggcattgacaatcttgtggttccgggaaggcctggctccttttcccttattaggactccacacttaggacaagccaggcgcatcccatgtgctccagagaggaggccattgttattagtaaaggagttcatccgtctgggcagcctcagcaagctctcggggaaggggctccagcagcgcatgttcttcctgttcaacgacgtcctgctatacacgagccgggggctgacggcctccaatcagtttaaagtccacgggcagctcccgctctatggcatgacgattgaggagagcgaagacgagtggggggtgccccactgcctgaccctccggggccagcggcagtccatcatcgtggccgccagttctcggtccgagatggagaagtgggttgaggacatccagatggccattgacctggcggagaagagcagcagccccgcccctgagttcctggccagcagcccccctgacaacaagtcccctgatgaagccaccgcggctgaccaggagtcagaggatgacctgagcgcctcgcgcacatcgctggagcgccaggccccgcaccgcggcaacacaatggtgcacgtgtgctggcaccgcaacaccagcgtctccatggtggacttcagcatcgcagtggagaatcagttgtctggaaacctgctgaggaaattcaaaaacagcaacgggtggcagaagctgtgggtggtgttcacaaacttctgcctgttcttctacaaatcacaccaggacaatcatccccttgccagcctgcctctgctcggctactcgctcaccatcccctctgagtccgagaacatccagaaagactacgtgttcaagctgcacttcaagtcccacgtctactacttcagggcggaaagcgagtacacgttcgaaaggtggatggaagtgatccgcagtgccaccagctctgcctcgcgaccccacgtgttgagtcacaaagagtctcttgtgtattgatggccggacacactcgtttccgcagtggctgctttcctggaagacgtttcctttcttctgtattaatgaagcctggtaaaattaacacctgtctgaaaatcaaaaacatggcttcccagcagctctcctgtctccacagccgcgttttttaaccccgacctctcagcgtctgaatgaacagcgctcccacctccagtcctggcatccgctgggggcgctgttctttagctagtgccagtattaaaacattgtcattacgagagtgccaaatgacatcttccctccaccctgcccctgaaaaacagtacacacacatccgttcaacacaagacagggcaagtgtttttcttcctaaaaaaagttctttcttttattattttcacctattggctgctgcattttacgaagtggacttcccggtgtttgtttgtttgtttgcaatacactcagtgcagccttaagcaaatgagatcattttcagatttcattttttttttcagtctttctacttttgtaataataggaagttagtaggactcacttctctgattaataagcaatttgcagcacacagcgttccactgcggggtttcacgctcacctgaaaacacctgttcccaacctacttcttggtgcaagttgaccaaatcgttttaagtggtaactctttccaaccgtagcagggttgttttctgttaagcaaagccgagatccagtgcaatacctggactgtcaccgtcctgtgagtggtgtacacaatgggaagataataagccgtggtgttttgctgtctgtctgtgtcacaagcatgaaaacccgtgtgtcattgatcagcaccatttgtggtatgttccgtgatgagcgtttagtgagcctgctggctgcagagcactatgaaatcatggtacgtagtccccggcacctgtcgttattcctatatcctcctgcaactgtggtttgaaactgcgcattctctagtagtatatatcgtgcctgtcttcaaaaacatttccctttttatactcattccccccaggcatggggtagtgtcagtcggactgcacagggaacacggtttccagtggctttggcccctactcgggaaacgtctgcctgttctcgatggtgatggggtggctgccattcccttggttttcctaagccctttctaacgagagtctcaaacaagcggaggcgagggccaattcaaccccattctttccagcgccccgcaccatagcacctgcccacctgagaaccaggaacgcaccctctctgtggagctctgactggtgtagctggaaacaaacagcaacttgcaaacggacgaagagcctgccgtgtgttaatcatttgccttacaagatgtaccagacggtttccagtactaacaaagggaataaaaatacctcacgccacaatccagcatattgatgttttaaggc

SEQ ID NO: 105834 - DNA, 578 bp, Artificial Sequence
  derived and/or modified sequence
ggctgtgcaaacaccacccgccgagccacgccgacttcagggactgccgagccgctttggcagagatcacggagatggtggcacagctccacggtacgatgatcaagatggagaatttccagaagctgcacgaactcaagaaagatttgattggcattgacaatcttgtggttccgggaagggtaagcagcagtggcctcactatgcactgcgcggggagcagaaaggaggcatcggagggacttacatttgaaccttttgaagagagacccttgcaaagcaaaatgtcctctttccatccacctgggagacaactggaaaaacacaacagtgtcgttagttcagaatcattgtgttcggaggagataaagcaatcctctgacctcatattctgctttttctccttacggggtgattcgcttctttaccttttcccctaccatatcccacagaagatttgagattgcttattttattttttttaaatgtacataaatgaaaatggaaaattaaaaaaaaaattaggtaaatagtaataaagccagaaaggtagtgcattaaattatgctagaaattcc

SEQ ID NO: 105835 - DNA, 3231 bp, Artificial Sequence
  derived and/or modified sequence
atgggtgagatcgaacaaagacctacccccggatcaagactaggagctcccgaaaacagcggcatctccaccctcgaacggggacaaaaaccacctcccaccccgagtggcaagcttgtgtctatcaagattcaaatgctggacgacacacaggaggcctttgaggtcccacagcgggcccctggcaaagtgctcctggacgcagtctgtaaccacctgaatctggtggagggggactattttggactcgagttccctgatcacaagaaaatcaccgtatggctggacctcttgaaacccatagtaaagcagataagacgccctaaacacgtggtcgtgaagttcgtcgttaagttctttcctcctgatcacacccaactgcaagaagaactgactagatacctgttcgccttacaggtgaagcaggatctggcacagggccgcctgacttgtaatgacacaagcgcagcactgctgatttcgcatatagtgcagagcgagataggggacttcgacgaagcactcgacagggagcacctggcaaagaataagtatataccccaacaggacgccctggaagataaaatcgtggagtttcatcacaatcatataggccaaacaccagccgaatctgactttcagttgctggagatcgctagacgcctagaaatgtatgggattagactgcaccccgcaaaggaccgtgagggaacgaagatcaacctggctgtggcgaatactggaatcctggttttccaaggattcacaaagatcaacgccttcaattgggcaaaagtgcgcaaactgtcctttaagcgcaaacggtttctgatcaagctgcgacccgatgctaactccgcctaccaagataccttggaatttttaatggcttcccgggatttctgcaagtccttctggaagatctgcgtagaacaccatgcatttttccgattgttcgaagagcctaaacccaagcctaaaccagtgctcttttctcgtggctcctcatttcggttctccggcagaacccagaagcaggtgctcgattacgttaaagaaggcggtcacaaaaaggtgcagttcgagagaaagcactctaaaatacacagcatcagaagcctagcaagccaacccacagaattgaacagcgaagtgctcgaacagtcacagcagtctacatctctcacatttggtgaaggggccgagtcacccgggggacagagctgtagaaggggaaaagagccgaaggtctccgctggggagccaggcagccaccccagcccggcacctcgccgctcacccgctgggaataaacaggctgatggggccgcttctgccccaactgaagaggaggaggaggtcgtaaaagataggactcagcagtccaagccacagcccccacagccctctacaggatccttgaccggaagtccacacctttccgagctcagtgttaactcccaggggggggtagcccctgctaacgtgaccctgtccccaaatctctcccctgacacgaagcaggcatcccctctgattagcccactcttgaacgaccaagcgtgtccccgcaccgacgatgaggatgaaggacgccggaaaagatttcctactgataaggcttacttcattgctaaagaagtgtcaactactgagaggacttacctgaaggacttagaggtgataacctcttggttccaaagcaccgtgtcaaaagaggacgctatgccggaggctctgaagtcgctgatttttccgaatttcgaaccactgcacaagtttcacaccaactttctgaaggaaattgagcagcggcttgcactgtgggaaggtcgcagcaacgcccagataagggattatcagcgcatcggagatgtaatgttgaagaacatccaaggtatgaaacatttagctgctcatctctggaaacacagtgaggccttagaagccctggaaaatggaatcaaaagcagtcgtcggctcgagaatttttgcagagatttcgaactgcagaaggtatgctacctcccactcaatacattcctccttcgtcccctgcaccgtctgatgcactataaacaggttctcgagcggttgtgtaagcatcatccaccatcgcatgcagatttccgggactgcagagctgctctggccgaaatcaccgagatggtggctcagcttcacggtaccatgatcaaaatggagaacttccagaagctgcatgaactgaaaaaggatctcattggcatagataatctggtggtgccgggccggcctggaagcttcagcctgattagaacccctcacctcggccaagcacgaagaattccctgcgcccccgagaggagaccgctgttgctcgtcaaagaatttatcagattgggaagcttgtctaagctcagcggaaaggggctgcagcaaaggatgttttttttgtttaacgacgtactgctctacacatctcgtggactgaccgccagtaatcagtttaaagtccacggccaactgcccctctatggaatgacaatagaagaaagtgaggacgagtggggtgtgccacactgtttgactctccggggccaaagacagtccattattgtcgcagcctcgtcccggtctgagatggagaagtgggttgaggacatccagatggcgattgatctggccgagaagtctagttcacccgcccctgagttcctcgcctcctcccctccagataacaaatcaccagacgaagctactgcagccgatcaggagagcgaggacgatctaagtgcatccagaacttcccttgaaaggcaggcacctcaccgcgggaacacaatggtccatgtatgttggcatcggaacactagcgttagcatggtggacttcagtatcgccgtggagaaccagcttagcggaaatttactgcgtaagttcaaaaattccaatggctggcaaaaactgtgggtagtttttactaatttctgtctttttttctataagagtcaccaggacaatcatccacttgcttctttacccctcttggggtattctctgaccatccccagtgagagcgagaatatccagaaagattatgtttttaagctgcattttaaatcccacgtgtactacttccgtgctgagtcggagtacactttcgaacggtggatggaggtcattcgatcggcaacatcttccgcttcaagaccccatgttctgtctcacaaggagtcactcgtgtattag

SEQ ID NO: 105836 - DNA, 462 bp, Artificial Sequence
  derived and/or modified sequence
taactgtgtaagcaccatcctccctcccacgccgatttccgtgattgcagggccgccctggctgaaataacggaaatggtggcgcagctgcacggaactatgataaaaatggagaatttccagaaactgcacgaattaaagaaagatcttattggtattgataatctggttgtcccaggccgggtctcttcctccggcttaacgatgcactgtgccggtagccgtaaggaagcgtccgaaggtctaacttttgaacctttcgaggagagacctttgcaatcgaagatgtcctcctttcacccaccaggccgccaactggagaaacacaattcagtggtctcctccgagtctttgtgttctgaagagattaaacagtcctcagatcttatcttctgttttttttccttacggggagattctctgctctatcttttcccatatcacataccgcaaaaaatttag

SEQ ID NO: 105837 - DNA, 3231 bp, Artificial Sequence
  derived and/or modified sequence
atgggagaaattgagcagaggcccaccccaggcagccggctgggcgcccctgagaacagcggcatcagcaccctggagcggggccagaagcccccacccacccccagcggcaagctggtgtccatcaagatccagatgctggatgacacccaggaggcctttgaggtgccccagagggcccctgggaaggtgctgctggatgctgtgtgcaaccacctgaacctggtggagggggactacttcggcctggagttcccagaccacaagaagatcaccgtgtggctggacctgctgaagcccatcgtgaagcagatccggcggcccaagcacgtggtggtgaagtttgtggtgaagttcttccccccagaccacacccagctgcaggaggagctgacccgctacctgtttgccctgcaggtgaagcaggacctggcccagggccgcctgacctgcaatgacaccagcgctgccctgctgatcagccacatcgtgcagagcgagatcggggactttgatgaggccctggaccgggagcacctggccaagaacaagtacatcccccagcaggatgccctggaggacaagatcgtggagttccaccacaaccacatcggccagaccccagctgagagtgacttccagctgctggagatcgcccggcggctggagatgtatggcatccggctgcacccagccaaggaccgggagggcaccaagatcaacctggccgtggccaacacaggcatcctggtgttccagggcttcaccaagatcaatgccttcaactgggccaaggtgaggaagctgtccttcaagaggaagcgcttcctgatcaagctgcggccagatgccaacagcgcctaccaggacaccctggagttcctgatggccagccgggacttctgcaagagcttctggaagatctgtgtggagcaccacgccttcttccggctgtttgaggagcccaagcccaagcccaagcctgtgctcttcagccggggcagcagcttccgcttcagcggccgcacccagaagcaggtgctggactatgtgaaggagggcggccacaagaaggtgcagtttgagaggaagcacagcaagatccacagcatccgcagcctggccagccagcccacagagctgaacagcgaggtgctggagcagagccagcagagcaccagcctgacctttggagagggcgctgagagccctgggggccagagctgccggcggggcaaggagcccaaggtgtctgctggggagcccggcagccaccccagccctgcccccaggaggagccctgctggcaacaagcaggctgatggagctgccagcgcccccacagaggaggaggaggaggtggtgaaggacaggacccagcagagcaagccccagcccccccagcccagcacaggcagcctgaccggcagcccccacctgtctgagctgtctgtgaacagccagggcggcgtggccccagccaacgtgaccctgagccccaacctgagcccagacaccaagcaggccagccccctcatcagccccctgctgaatgaccaggcctgccccaggacagatgatgaagatgagggccgcaggaagcgcttccccacagacaaggcctacttcatcgccaaggaggtgtccaccacagagaggacctacctgaaggacctggaggtgatcacctcctggttccagagcacagtgtccaaagaagatgccatgcctgaggccctgaagagcctcatcttccccaactttgagcccctgcacaagttccacaccaacttcctgaaggagattgagcagaggctggccctgtgggagggccgcagcaatgcccagatccgggactaccagagaattggagatgtgatgctgaagaacatccagggcatgaagcacctggccgcccacctgtggaagcacagcgaggccctggaggccctggagaatggcatcaagagcagccggcggctggagaacttctgccgggactttgagctgcagaaggtgtgctacctgcccctgaacaccttcctgctgcggcccctgcaccggctgatgcactacaagcaggtgctggagcggctgtgcaagcaccacccccccagccacgccgacttccgggactgcagagctgccctggccgagatcacagagatggtggcccagctgcacggcaccatgatcaagatggagaacttccagaagctgcacgagctgaagaaggacctgattggcatcgacaacctggtggtgcccggccggcccggcagcttcagcctcatccgcaccccccacctgggccaggcccggcgcatcccctgtgcccctgagcggcggcccctgctgctggtgaaggagttcatccggctgggcagcctgagcaagctgagcggcaagggcctgcagcagaggatgttcttcctgttcaatgatgtgctgctgtacaccagccggggcctgacagccagcaaccagttcaaggtgcacggccagctgcccctgtatggcatgaccatcgaggagagtgaagatgagtggggcgtgccccactgcctgaccctgcggggccagaggcagagcatcatcgtggccgccagcagccgctctgagatggagaagtgggtggaggacatccagatggccatcgacctggccgagaagagcagcagccctgcccctgagttcctggccagcagccccccagacaacaagagcccagatgaggccacagctgctgaccaggagagtgaagatgacctgagcgccagcaggaccagcctggagcggcaggccccccaccggggcaacaccatggtgcacgtgtgctggcacaggaacacctctgtgtccatggtggacttcagcattgctgtggagaaccagctgagcggcaacctgctgaggaagttcaagaacagcaatggctggcagaagctgtgggtggtgttcaccaacttctgcctcttcttctacaagagccaccaggacaaccaccccctggccagcctgcccctgctgggctacagcctgaccatccccagcgagagcgagaacatccagaaggactatgtgttcaagctgcacttcaagagccacgtgtactacttccgggcagagagcgagtacacctttgagcgctggatggaggtgatccgcagcgccaccagcagcgccagccggccccacgtgctgagccacaaggagagcctggtgtactag

SEQ ID NO: 105838 - DNA, 462 bp, Artificial Sequence
  derived and/or modified sequence
tgactgtgcaagcaccacccccccagccatgctgacttccgggactgccgggccgccctggccgagatcacagagatggtggcccagctgcacggcaccatgatcaagatggagaacttccagaagctgcacgagctgaagaaggacctgattggaattgacaacctggtggtgcccggccgggtgagcagcagcggcctgaccatgcactgtgccggcagcaggaaggaggccagcgagggcctgacctttgagccctttgaggagcggcccctgcagagcaagatgagcagcttccaccccccaggccggcagctggagaagcacaacagcgtggtgtcctctgagagcctgtgcagcgaggagatcaagcagagcagtgacctgatcttctgcttcttcagcctgcggggggacagcctgctgtacctgttcccctaccacatcccccagaagatctag

SEQ ID NO: 105839 - DNA, 3231 bp, Artificial Sequence
  derived and/or modified sequence
atgggcgagatcgagcagcggcccacccccggcagccggctgggcgcgccggagaactctggcatttcgaccctagagagaggccagaagccacctccaacgccttcagggaagctggtctccatcaaaattcagatgttggacgatactcaggaagctttcgaggtgccacagcgcgcccctggcaaagtgctactcgacgccgtctgtaatcatctgaaccttgtcgaaggagattatttcggcctcgaattccctgatcacaaaaaaatcaccgtctggctggatctgctaaaacctatcgtgaaacagatcaggcgtccgaagcatgtagtggtgaaatttgtcgtaaaattttttccgcccgaccacactcaattacaggaggagctcacacggtatcttttcgctttgcaggtgaagcaggatttggcgcaagggcggcttacctgtaacgatacatctgccgccctcctgatcagtcacatcgtccagagtgagataggcgactttgacgaggccttagacagagaacacttggccaaaaacaagtatattccacaacaggatgcactagaggataagatcgtagagtttcaccacaaccatatcggacagacccccgccgaatctgactttcagctacttgagattgctaggagactggagatgtacggtatccgcctccatcctgctaaggaccgtgaggggactaaaataaacttggccgttgccaacaccggcatcttggtgtttcaagggtttactaaaatcaatgctttcaattgggctaaagtgagaaaactaagttttaagaggaagcgattcctcatcaagcttcggccagatgctaattcggcataccaagataccctcgaattcctgatggcttctcgcgacttctgcaaaagcttttggaaaatctgcgtggagcatcatgcattttttaggctgtttgaggagcccaaacccaagcctaaaccagtgcttttcagtcggggcagttctttccggttttctggccgcacgcaaaaacaggtcctggactacgttaaggagggtgggcacaagaaagttcagttcgaaaggaagcactcaaagatccactctattcgctctctcgctagccaacccacagaactgaactccgaagtcctggagcaaagccaacagtccacaagcctcactttcggagaaggagcggagagccctggcggccagtcatgtagacgcggaaaagagcctaaagtgtccgcgggagagccgggatctcatccctcaccagctccgcgaaggtccccggccggaaacaaacaggccgacggtgctgcaagcgcacccacagaagaagaggaggaggtcgtaaaagaccggacacagcagagtaagccccagccaccacagccatccaccggatcccttacgggcagcccccatctgtcggagctcagtgtgaactcacaaggcggggtggctcccgcaaacgtaacactctccccaaacctgagcccagatacaaaacaggcttccccattgatttccccacttctgaatgatcaggcatgtcccaggaccgacgatgaagacgaggggcgccggaagcgtttccctactgacaaagcttactttattgccaaagaggtctccacaacagaacgcacctatcttaaggatcttgaggttattaccagctggtttcagtcaaccgtttctaaggaggacgctatgccagaagcactcaagtcattaatattcccaaatttcgaaccactccacaaatttcataccaactttctcaaggaaattgaacagcgcctggccttgtgggaaggtcgctcaaacgcccagataagggactaccagcggattggggatgtcatgctcaaaaacatccagggaatgaagcatctggccgcgcacctatggaagcatagcgaggctctcgaggcgctagaaaacggaatcaagagctcccgtagactagaaaacttttgccgtgactttgagctgcaaaaggtgtgctacctgccactgaatacgttcctgcttcggcctctccaccgcctgatgcactataagcaggtacttgaacgattgtgtaaacaccatcccccttcgcacgccgacttccgcgactgccgggcagcattggcagagattaccgagatggtagcccagctgcatggcacaatgatcaaaatggaaaatttccagaagctccatgaactgaaaaaggacctgataggcatagataacctcgttgttcccggtcgcccaggatcattttctctaatcaggactcctcatctaggccaagcaaggcgaattccctgcgctccggagcggagaccactactactggttaaggagtttatccgactggggagcctgagcaagctctctgggaaaggactgcagcagagaatgttttttctcttcaacgacgtactgctctatacaagccggggactgaccgcgtcaaaccaatttaaagtccatgggcagctgccgctttatgggatgacgatcgaagaaagtgaagatgagtggggagtgccccattgcttgacactccggggtcagcgtcagtcgattatcgtggccgctagcagccggtcagaaatggagaagtgggtcgaagatattcagatggccattgacctcgcagagaaatccagctctccagcaccagagttcctcgcttccagcccccctgacaacaaatcccctgatgaggcaaccgccgccgaccaggagtctgaggacgacctgagcgcttcacgcacatctcttgagaggcaagcaccccaccgggggaacactatggtacacgtgtgttggcatcgtaatacttcagtctcgatggtcgacttttctattgccgtggagaatcagctgtctggcaacttgctgagaaagttcaagaactctaatgggtggcagaaattgtgggtggtcttcaccaacttctgtctgttcttctataagtctcaccaagataaccacccactggcctcattgccactcctcggatattctctgaccatccctagcgagtcagagaatatccaaaaggattatgtctttaaactgcatttcaaatcgcacgtgtattacttccgagcggagtctgagtacacctttgagaggtggatggaagtgattcgaagtgcaacatctagtgccagccgccctcacgtactgagtcacaaggagtccctggtctactag

SEQ ID NO: 105840 - DNA, 462 bp, Artificial Sequence
  derived and/or modified sequence
tgactgtgcaagcaccacccccccagccacgccgacttccgggactgccgagccgcactggccgaaatcacagagatggtggcccagttgcacggcaccatgataaaaatggagaatttccagaagttacatgaattgaaaaaggacttaatcggaattgacaatctcgttgttccaggacgcgtgagctcctcaggactgactatgcactgcgctggtagtagaaaggaagcctccgaaggcctgactttcgaacctttcgaggagcgaccccttcagtcgaaaatgagtagtttccaccccccaggccgacaattagaaaagcacaattctgtcgtctcctcagaatccctgtgctcagaagaaatcaaacagagctcagaccttatcttctgcttctttagcctcagaggagactcccttctttacttgttcccttaccatatcccacaaaagatttag

SEQ ID NO: 105841 - DNA, 3231 bp, Artificial Sequence
  derived and/or modified sequence
atgggcgagatcgaacaaagacctacccctgggtctaggctgggcgctccggagaactcaggaatttctaccctcgaacgaggccagaagccccctcctaccccgagtggcaagttggtgtcaattaagattcagatgcttgatgatacacaagaggcctttgaggtgccacagagggcgcctgggaaggttctgctcgatgcggtatgcaaccatctcaacctggtcgaaggagactactttgggttagaattcccagaccacaagaagatcacagtctggctggatctgctgaagccgatcgttaaacagatccggaggccaaaacatgtggtggtcaagttcgtagttaaattttttccgccagaccatacgcagctccaggaggaactgaccaggtacttgttcgccctgcaggtaaaacaagatctcgcacagggcagactgacctgcaacgatacctctgcagccctgctcatatcacacatcgtacagtcggagattggggatttcgatgaggcccttgaccgtgaacatctcgctaagaacaaatacattccacagcaagatgccttggaggacaaaatcgtcgagttccatcataaccatataggtcagaccccggctgagagcgattttcagctgctcgagatcgccagaaggctcgagatgtacggcattagactacatccggcaaaagatagagagggaaccaaaattaaccttgctgtggccaatacgggcatcctcgttttccagggcttcactaaaattaacgcctttaactgggccaaggtgcgtaaactgtcctttaaacgaaagcggttcctgatcaaactccgcccagacgctaacagtgcctatcaggatacattggagttcttgatggcttcacgggatttttgtaaatcattttggaagatctgcgtagagcatcacgccttcttccgcctgtttgaggaacccaagccgaagcccaaaccagtgctgtttagccggggttcttcttttagattcagcggtaggacacagaaacaggtgctggactatgtgaaggagggaggacataagaaggtgcagtttgaaaggaagcattccaaaattcattcaatcagatcacttgccagccagcccacagagctgaatagtgaggtgctggagcaaagccagcagtccacttccctgacctttggagagggggcagagagtcccggaggccagagttgtagacgcggtaaggagcccaaagtatcggcaggtgaacccggatcccatccctctcctgcccctcggaggtcccccgctggtaacaagcaagcagatggggcagccagcgccccaacagaagaggaggaagaggtcgttaaagaccgaacccagcagtccaagccccagccacctcagccctccaccggatcactaaccggtagtccacatctgtccgaactgagcgtgaatagtcagggcggagtggctccagcaaacgtcacactatcccctaacctctctcccgacacaaaacaggcctctccactgatttcacctttgctgaatgatcaggcatgtccaagaaccgacgatgaggatgagggaaggcgaaagagattccctactgacaaggcttatttcatcgcaaaggaggtgagcacgacagagcggacttaccttaaagatttagaggtgattactagctggtttcagtctacagtttctaaggaggatgctatgccagaagcactgaaatccttaatctttcctaacttcgaacccctgcataaatttcatacgaatttcctcaaggagatcgaacagcggctcgctctctgggagggccgtagcaacgcccagatcagagactatcagagaattggagatgtgatgctcaaaaatatacagggtatgaaacatcttgccgctcacttatggaagcacagcgaggctctcgaggctctcgagaatgggattaaaagttcgagacgtttggagaatttttgtagggatttcgaacttcagaaggtgtgttacctccccctcaatacatttctactgcggcctctgcacagactgatgcattacaagcaggtattggaacgcctctgcaagcaccaccccccatcacacgccgatttccgtgattgccgggctgcgctagctgagataaccgagatggtcgcccagttacacggcacgatgatcaagatggagaactttcaaaaactgcacgaactgaaaaaggatctcattggcatcgacaatctcgtcgtccccggtcgacccggatctttcagcttgattaggacaccccacttagggcaagccaggaggatcccatgcgcccctgaacgacggccactgttgctggtgaaggagtttatcagactgggcagcttatccaagctgtctggtaagggtctccaacagcggatgttctttctattcaatgacgtgctgctgtacacctcaaggggactcaccgcaagcaatcagttcaaggtgcacgggcaactccccctttacggaatgaccatcgaagaatccgaggacgaatggggcgtaccccactgcctgactctaagggggcagaggcaaagtattattgttgcagctagctctcgctctgagatggagaagtgggtggaggacattcagatggctattgatctcgccgagaaatcctcatcacctgctcctgaatttttggcaagtagtccgcctgacaacaaatccccagacgaagcgacagccgcagatcaggagtctgaggacgacctctctgcttcgaggacttctctggagcggcaggctcctcaccgcggaaacacaatggtccatgtgtgctggcacagaaacacctctgtttctatggttgatttttctatcgccgtggagaaccagttgagcggaaatctgttaagaaaattcaaaaactctaacggctggcagaagctttgggttgtattcacaaacttctgtctgtttttctacaagagtcatcaggacaaccacccactagctagtctcccccttctgggatattccctgacgatcccttccgagagcgaaaacatccagaaagattacgtctttaaacttcacttcaagtctcacgtgtactacttccgagccgagagtgagtacaccttcgaaagatggatggaggtgattcgctctgctactagttcggcgtctagaccccatgtattgtcacataaagaatctctggtatactag

SEQ ID NO: 105842 - DNA, 462 bp, Artificial Sequence
  derived and/or modified sequence
taactttgtaagcaccaccctccgtctcatgcagacttcagggactgcagggccgcactcgcagaaatcaccgagatggtagcccaactgcatggcacaatgatcaagatggagaattttcaaaagcttcacgagctgaaaaaggacttgattggaatcgacaatctcgtggtgcccggtagggtcagttcttctgggcttactatgcactgcgccggatcaagaaaggaggcatctgaaggcctgacattcgaaccctttgaggagaggcctctgcaatccaaaatgtcctccttccatccaccaggtcgacaactagaaaaacacaacagtgtggtgtcaagtgagtccttatgcagcgaagaaattaagcaatcaagcgacctcatattctgttttttttccctgcgaggggacagcctgctgtatttgttcccttatcatatacctcagaagatttag

SEQ ID NO: 105843 - protein, 580 aa, Artificial Sequence
  derived and/or modified sequence
MENRALDPGTRDSYGATSHLPNKGALAKVKNNFKDLMSKLTEGQYVLCRWTDGLYYLGKIKRVSSSKQSCLVTFEDNSKYWVLWKDIQHAGVPGEEPKCNICLGKTSGPLNEILICGKCGLGYHQQCHIPIAGSADQPLLTPWFCRRCIFALAVRKGGALKKGAIARTLQAVKMVLSYQPEELEWDSPHRTNQQQCYCYCGGPGEWYLRMLQCYRCRQWFHEACTQCLNEPMMFGDRFYLFFCSVCNQGPEYIERLPLRWVDVVHLALYNLGVQSKKKYFDFEEILAFVNHHWELLQLGKLTSTPVTDRGPHLLNALNSYKSRFLCGKEIKKKKCIFRLRIRVPPNPPGKLLPDKGLLPNENSASSELRKRGKSKPGLLPHEFQQQKRRVYRRKRSKFLLEDAIPSSDFTSAWSTNHHLASIFDFTLDEIQSLKSASSGQTFFSDVDSTDAASTSGSASTSLSYDSRWTVGSRKRKLAAKAYMPLRAKRWAAELDGRCPSDSSAEGASVPERPDEGIDSHTFESISEDDSSLSHLKSSITNYFGAAGRLACGEKYQVLARRVTPEGKVQYLVEWEGTTPY

SEQ ID NO: 105844 - protein, 563 aa, Artificial Sequence
  derived and/or modified sequence
MENRALDPGTRDSYGATSHLPNKGALAKVKNNFKDLMSKLTEGQYVLCRWTDGLYYLGKIKRVSSSKQSCLVTFEDNSKYWVLWKDIQHAGVPGEEPKCNICLGKTSGPLNEILICGKCGLGYHQQCHIPIAGSADQPLLTPWFCRRCIFALAVRKGGALKKGAIARTLQAVKMVLSYQPEELEWDSPHRTNQQQCYCYCGGPGEWYLRMLQCYRCRQWFHEACTQCLNEPMMFGDRFYLFFCSVCNQGPEYIERLPLRWVDVVHLALYNLGVQSKKKYFDFEEILAFVNHHWELLQLGKLTSTPVTDRGPHLLNALNSYKSRFLCGKEIKKKKCIFRLRIRVPPNPPGKLLPDKGLLPNENSASSELRKRGKSKPGLLPHEFQQQKRRVYRRKRSKFLLEDAIPSSDFTSAWSTNHHLASIFDFTLDEIQSLKSASSGQTFFSDVDSTDAASTSGSASTSLSYDSRWTVGSRKRKLAAKAYMPLRAKRWAAELDGRCPSDSSAEGASVPERPDEGIDSHTFESISEDDSSLSHLKSSITNYFGAAGRLAWGEVPGVGSEGHT

SEQ ID NO: 105845 - DNA, 1743 bp, Artificial Sequence
  derived and/or modified sequence
atggaaaacagggccctggaccccggcactcgcgacagttacggggctacctctcatctgcctaacaagggggccctggccaaggtgaaaaataattttaaggatctgatgtctaagcttacggaagggcaatatgtgctctgccggtggacagacggactgtattacctgggaaagatcaagcgcgtcagcagttccaaacagagctgtttggtaacttttgaggacaactccaagtactgggttctatggaaggatatccagcatgctggggtaccaggggaggaacctaagtgcaatatctgtctcggcaaaacatctggacccctgaatgagattcttatttgcggaaagtgtgggttgggctatcaccaacagtgccatatcccaatagccggaagcgccgaccaacctttgctgactccttggttttgtcgcagatgcattttcgcactcgctgtcagaaagggaggggctcttaaaaagggcgctatcgcgaggacactgcaggctgtgaagatggtgttgtcctatcagccagaagagttagaatgggattctccccaccggacgaatcagcaacaatgctattgctattgcggtgggcctggggagtggtacctgcgaatgttgcagtgctacagatgccgacagtggttccacgaggcatgcacacaatgtctgaacgagcctatgatgttcggcgaccgattctatctgttcttctgttctgtttgcaatcaaggacctgagtacattgagagactgccactccgctgggtggatgtggtgcacctggccctttacaatctgggcgtgcagagtaaaaagaagtacttcgacttcgaagagatactggcgtttgtaaatcaccattgggaactgcttcaactcggaaagctgacatccactcctgtcactgacaggggtccacacttattgaatgcccttaatagctataaaagcaggtttttgtgcggcaaggagattaaaaagaaaaagtgcatctttcgcctccgcattcgagtgcctcctaatccccctggcaaactcctccctgacaagggtttgctgcccaacgagaactccgcttcatcagaattgcggaagagaggaaaaagtaagccgggccttctaccccatgaatttcagcagcagaaaagacgcgtttacagaagaaagcggtcgaagtttctgctagaggatgccattcctagttctgatttcacttctgcctggtccaccaaccaccacctggcatccatttttgattttactcttgacgagatacagtcattgaagtccgcttcatctggacagactttcttttccgacgtcgacagcaccgacgccgcatctacgagcggcagcgcaagtaccagtttgtcctatgatagccgctggacagtcggatcacgcaagaggaaactggctgctaaggcttatatgccactgcgcgccaaaaggtgggccgccgaactcgacggccgctgcccttccgacagctccgctgagggggcctccgtgcccgagaggccagacgagggcattgattcacacacctttgaatcaatctctgaggatgactcgtcactgagccacctcaaaagcagcataaccaattacttcggtgcagccggccgacttgcctgtggcgagaagtatcaagtgctggccagacgagtgacacctgaggggaaggtgcagtatctcgtagaatgggaaggtactacaccctattag

SEQ ID NO: 105846 - DNA, 1692 bp, Artificial Sequence
  derived and/or modified sequence
atggagaatcgagcactggatcctggtactcgcgacagttacggcgcaactagtcatctgccgaataaaggcgcactggcaaaggtgaagaacaattttaaagatctgatgtcaaaactgaccgagggccaatatgtgctgtgtaggtggaccgacggcctctattacctaggcaaaatcaagcgggtttcctctagcaagcagagctgtctcgtgacatttgaggacaattcgaaatactgggtgttgtggaaggatatacaacacgcgggcgttcccggcgaggagcccaagtgcaacatttgccttggaaaaacatctggacctctaaacgagatattgatctgcgggaagtgcgggttgggatatcatcaacagtgtcatattcccatcgccgggtcagccgaccagcctctcctcacaccctggttctgccggaggtgcatttttgctcttgccgtgcggaaggggggagctctgaagaagggcgcaattgcccggactctccaagcagtgaaaatggtactgtcctaccagccagaggaactcgaatgggactctccccatcgcacaaaccagcagcagtgctattgctattgcggggggccaggtgagtggtacctgaggatgcttcagtgttacaggtgccgtcagtggttccatgaggcgtgcactcaatgcttaaacgagcccatgatgttcggcgaccggttttatctgtttttctgttcagtgtgcaatcaaggccccgagtatattgagcggctgccactgcgttgggtcgacgtggtccacctcgcgctgtacaacttaggtgttcagtctaaaaaaaagtactttgattttgaggaaatcttagccttcgttaatcaccattgggagctattacaactcggcaagctgacaagcacacccgtgacggaccgcggtccccaccttttgaatgccttgaacagttacaagtcccgattcctgtgtgggaaagaaatcaaaaagaagaagtgcatatttcgtctcagaatcagagtgccgcccaacccccctgggaagctgctgcctgataaaggattgctgccgaacgagaactctgcatcctctgagctgcgaaagcggggcaaaagcaaacccggactcctgccccacgaatttcagcaacagaaaaggagggtgtacaggagaaaacgcagcaagtttctgttagaagatgcaattcctagttctgactttacatccgcgtggtcaacaaaccaccatctggctagtatcttcgatttcacactagatgaaatccagtctcttaagtccgcttctagcgggcagacttttttcagcgacgtggactctaccgacgcggcctctacatcaggctctgccagcacgagcctctcttacgatagccggtggacggtgggttcccgcaagcgcaaattggccgccaaggcctacatgccgctccgtgcaaagcgatgggcggctgaactggacggacgctgcccttcggatagctcagctgaaggggcatcagttcctgaacgtccagacgaggggattgactcacataccttcgaatctatatcagaagacgatagttcgctatcccatctcaaaagctccatcacgaattactttggcgctgccgggagattagcatggggtgaagtgcccggcgtgggcagtgagggacacacctag

SEQ ID NO: 105847 - DNA, 1743 bp, Artificial Sequence
  derived and/or modified sequence
atggagaacagagccctggaccccggcacccgggacagctatggagccaccagccacctgcccaacaagggggccctggccaaggtgaagaacaacttcaaggacctgatgagcaagctgacagagggccagtatgtgctgtgccgctggacagatggcctgtactacctgggcaagatcaagagggtgagcagcagcaagcagagctgcctggtgacctttgaggacaacagcaagtactgggtgctgtggaaggacatccagcacgccggcgtgcctggagaggagcccaagtgcaacatctgcctgggcaagaccagcggccccctgaatgagatcctgatctgtgggaaatgtggcctgggctaccaccagcagtgccacatccccatcgccggcagcgctgaccagcccctgctgaccccctggttctgccgccgctgcatctttgccctggccgtgaggaagggcggggccctgaagaagggggccatcgcccggaccctgcaggccgtgaagatggtgctgagctaccagcctgaggagctggagtgggacagcccccacaggaccaaccagcagcagtgctactgctactgcggcggccctggagagtggtacctgaggatgctgcagtgctaccgctgccggcagtggttccacgaggcctgcacccagtgcctgaatgagcccatgatgtttggagaccgcttctacctgttcttctgcagcgtgtgcaaccagggccctgagtacatcgagcggctgcccctgcgctgggtggatgtggtgcacctggccctgtacaacctgggcgtgcagagcaagaagaagtactttgattttgaggagatcctggcctttgtgaaccaccactgggagctgctgcagctgggcaagctgaccagcacccctgtgacagaccggggcccccacctgctgaatgccctgaacagctacaagagccgcttcctgtgtgggaaggagatcaagaagaagaagtgcatcttccggctgcgcatccgggtgccccccaaccccccaggcaagctgctgcctgacaagggcctgctgcccaatgaaaattctgccagcagcgagctgaggaagaggggcaagagcaagccaggcctgctgccccatgagttccagcagcagaagagaagagtgtacagaaggaagaggagcaagttcctgctggaggatgccatccccagcagtgacttcaccagcgcctggagcaccaaccaccacctggccagcatctttgacttcaccctggatgagatccagagcctgaagagcgccagcagcggccagaccttcttcagtgatgtggacagcacagatgctgccagcaccagcggcagcgccagcaccagcctgtcctatgacagccgctggacagtgggcagcaggaagaggaagctggccgccaaggcctacatgcccctgcgggccaagcgctgggccgctgagctggatggccgctgccccagcgacagcagcgctgagggcgcctctgtgcctgagaggccagatgagggcatcgacagccacacctttgagagcatcagtgaagatgacagcagcctgagccacctgaagagcagcatcaccaactactttggagctgctggccgcctggcctgtggggagaagtaccaggtgctggcccggcgggtgaccccagagggcaaggtgcagtacctggtggagtgggagggcaccaccccctactag

SEQ ID NO: 105848 - DNA, 1692 bp, Artificial Sequence
  derived and/or modified sequence
atggagaacagagccctggaccccggcacccgggacagctatggagccaccagccacctgcccaacaagggggccctggccaaggtgaagaacaacttcaaggacctgatgagcaagctgacagagggccagtatgtgctgtgccgctggacagatggcctgtactacctgggcaagatcaagagggtgagcagcagcaagcagagctgcctggtgacctttgaggacaacagcaagtactgggtgctgtggaaggacatccagcacgccggcgtgcctggagaggagcccaagtgcaacatctgcctgggcaagaccagcggccccctgaatgagatcctgatctgtgggaaatgtggcctgggctaccaccagcagtgccacatccccatcgccggcagcgctgaccagcccctgctgaccccctggttctgccgccgctgcatctttgccctggccgtgaggaagggcggggccctgaagaagggggccatcgcccggaccctgcaggccgtgaagatggtgctgagctaccagcctgaggagctggagtgggacagcccccacaggaccaaccagcagcagtgctactgctactgcggcggccctggagagtggtacctgaggatgctgcagtgctaccgctgccggcagtggttccacgaggcctgcacccagtgcctgaatgagcccatgatgtttggagaccgcttctacctgttcttctgcagcgtgtgcaaccagggccctgagtacatcgagcggctgcccctgcgctgggtggatgtggtgcacctggccctgtacaacctgggcgtgcagagcaagaagaagtactttgattttgaggagatcctggcctttgtgaaccaccactgggagctgctgcagctgggcaagctgaccagcacccctgtgacagaccggggcccccacctgctgaatgccctgaacagctacaagagccgcttcctgtgtgggaaggagatcaagaagaagaagtgcatcttccggctgcgcatccgggtgccccccaaccccccaggcaagctgctgcctgacaagggcctgctgcccaatgaaaattctgccagcagcgagctgaggaagaggggcaagagcaagccaggcctgctgccccatgagttccagcagcagaagagaagagtgtacagaaggaagaggagcaagttcctgctggaggatgccatccccagcagtgacttcaccagcgcctggagcaccaaccaccacctggccagcatctttgacttcaccctggatgagatccagagcctgaagagcgccagcagcggccagaccttcttcagtgatgtggacagcacagatgctgccagcaccagcggcagcgccagcaccagcctgtcctatgacagccgctggacagtgggcagcaggaagaggaagctggccgccaaggcctacatgcccctgcgggccaagcgctgggccgctgagctggatggccgctgccccagcgacagcagcgctgagggcgcctctgtgcctgagaggccagatgagggcatcgacagccacacctttgagagcatcagtgaagatgacagcagcctgagccacctgaagagcagcatcaccaactactttggagctgctggccgcctggcctggggcgaggtgcctggggtgggcagcgagggccacacctag

SEQ ID NO: 105849 - DNA, 1743 bp, Artificial Sequence
  derived and/or modified sequence
atggagaaccgggccctggaccccggcacccgggacagctacggcgccacaagtcaccttcctaacaagggcgccttggctaaagtcaagaacaacttcaaagaccttatgtccaagctcacggagggccagtatgtgttatgccgttggaccgacggcttatactacctcggcaaaatcaaacgggtgtcttccagcaagcaatcatgcttggttacgttcgaagacaactccaaatactgggttctttggaaggacattcagcacgcgggggtgccaggggaggagcccaagtgcaatatctgcctgggcaagacatccggacctctcaatgaaatcctgatttgtggcaagtgcggtttaggataccaccagcagtgccacattcccattgcaggaagtgccgaccagccattacttaccccttggttctgtcggcgctgtatatttgccctggcagtgaggaaaggtggcgccctcaagaagggcgctatagccaggactctgcaggctgtgaagatggtcctgagctatcagccggaggagctagagtgggactcgccacatcgtaccaaccagcagcagtgttactgctactgcggcggcccgggggagtggtacctcagaatgcttcagtgttacaggtgtcgtcagtggttccatgaggcgtgtacccaatgcttgaacgaacctatgatgtttggcgaccgattttatttgttcttttgctcagtgtgtaatcaggggccagagtacatcgagaggctgcccctcagatgggtggacgtggtacatctggctctttacaacctaggggtgcaatctaagaaaaaatactttgacttcgaggagatactagccttcgtcaaccaccactgggaactgctccagctagggaaactgacgagcacccccgttacagatagggggccacatctgttgaacgccctcaactcctacaagtcccgattcctgtgtggcaaggagatcaagaaaaagaaatgtatcttcagactccggattagagtaccacccaatcctcctggcaaactcctccccgacaaaggcctgctgcctaatgagaatagcgcctcgtcagaactgcggaaacgcggcaaatccaagccggggctcctaccccacgagtttcagcagcagaagcgcagagtctaccgaagaaagagatcaaagtttctgcttgaggatgcaatcccaagtagtgatttcacatctgcctggagcacgaaccatcacttagcgtctattttcgacttcacgctcgatgagattcagtcactgaagagtgcaagctccggacagacattcttttccgatgtggattcaaccgatgcagccagtacaagtgggtccgccagcacgagcctgtcctatgactctaggtggaccgtgggctcacgcaagcgaaagctggccgccaaggcgtatatgcctctcagggcaaagcgctgggccgctgagctcgatggtagatgccccagcgattctagcgcggagggggcctccgtccctgagcgtcccgacgagggcatagattcacacacttttgagagcatttccgaggacgattccagcctgagccacctcaagagctcaataacaaattacttcggcgctgctggacgccttgcatgtggagaaaaataccaggtactggctagaagagtgacgccagaggggaaggttcagtatttagtcgagtgggagggcaccactccctactag

SEQ ID NO: 105850 - DNA, 1692 bp, Artificial Sequence
  derived and/or modified sequence
atggagaaccgggccctggaccccggcacccgggacagctacggcgccacctcccatttgcctaacaaaggggccctggctaaagttaagaataatttcaaagatctgatgagtaaactcactgagggacagtacgtgctttgcaggtggaccgatggcttgtattatctggggaaaataaaacgggtgtccagcagcaaacagtcatgtctggtgacatttgaggacaatagtaaatattgggtgctctggaaggatattcagcacgcgggagtgcctggggaggagccgaaatgtaatatttgtctgggcaagacatctggcccgctgaacgagatcttaatttgcgggaaatgtggattgggctaccatcagcagtgtcacatacccatcgctggatccgctgaccagccactgcttactccctggttctgtcgaagatgcatttttgctctggccgtgcggaagggcggagctttaaaaaagggagctattgcgagaaccctccaggccgtgaagatggttctcagctatcagccagaggaactggagtgggactccccccatcgcacgaaccagcaacagtgctactgctactgcggagggccaggcgagtggtatctgcgcatgcttcagtgctatcgatgtcgccagtggtttcacgaggcctgtacacagtgccttaatgagccaatgatgttcggggaccgcttttatctgtttttctgtagtgtctgcaatcaagggcctgagtatatcgagcggctgcccctgcgctgggtagatgtggttcacctggctttgtacaatcttggagtgcaatctaagaagaagtattttgactttgaggaaatcctggctttcgtgaaccaccattgggagctgcttcagttgggtaagttgactagcactccagtgacagatcgtgggccacatctgctgaacgccttgaattcctataagtcaaggtttttgtgcggaaaagagattaagaaaaaaaagtgcatattcaggcttcgcatcagggtgccccccaatccgccaggaaaactcctcccggataagggtcttctgccgaacgaaaatagtgctagcagtgaattgcgcaaacggggtaagtctaaacctggactcctgccccatgaatttcaacagcagaaaaggcgagtgtatcggcgaaagcgcagtaaattcctgttagaggatgctatcccttcttcagatttcacgtctgcgtggtcgaccaatcatcacctggcctcaatcttcgactttacactcgatgagatccaatcgctcaaaagcgcgagcagtggccaaacattcttctctgacgtggattcaactgatgccgcttcaactagtgggagcgcatccacaagtttgtcctatgacagtaggtggaccgtggggagccgtaagcgaaaacttgccgccaaggcatacatgcctttgcgggcaaagaggtgggcggcggaactggatggtaggtgtccctcggactcctccgccgaaggtgcctccgtgcccgaacgccccgacgaaggaatcgactcccacacattcgaatctatcagcgaggacgatagctccctatcacatcttaaatcatccattacgaattacttcggtgccgccggtcgcctcgcctggggggaagtgcccggagtgggatctgagggccacacttag

SEQ ID NO: 105851 - DNA, 4241 bp, Artificial Sequence
  derived and/or modified sequence
gaaaaagatggcgccccgcgcccggggggccccttcctgagcgccccggcccctccctccgccgcctccccctcctccccgcggcgcccccgccccgccccgcccccgccgagaccccgaccccggccccacgggcggacactcggccgggcagccgcgggccgagcgcagccgcctccgccaccgatgcgcctggtggccagactccaagtgggaccggcggacacgcagcctcgcgtgtcaggggaagctgatggagaatcgagctctggatccagggactcgggactcctatggtgccaccagccacctccccaacaagggggccctggcgaaggtcaagaacaacttcaaagacttgatgtccaaactgacggagggccagtatgtgctgtgccggtggacagatggcctgtactacctcgggaagatcaagagggtcagcagctctaagcaaagctgcctcgtgactttcgaagataattccaaatactgggtcctatggaaggacatacagcatgccggtgttccaggagaggagcccaagtgcaacatctgcctagggaagacatcagggccgctgaatgagatcctcatctgcgggaagtgtggcctgggttaccaccagcagtgccacatccccatagcgggcagtgctgaccagcccctgctcacaccttggttctgccgacgctgcatcttcgcactggctgtgcggaaaggcggcgcgctgaagaagggcgccatcgccaggacgctgcaggccgtgaagatggtgctgtcctaccagcccgaggagctcgagtgggactcgccccatcgcaccaaccagcagcaatgctactgctactgcggcgggcccggagaatggtacctgcggatgctgcaatgttaccggtgcaggcagtggttccacgaggcctgcacccagtgcctcaatgagcccatgatgtttggagaccggttttacctgttcttctgctccgtgtgtaaccagggcccagagtacatcgagaggctgcccctgcgatgggtggatgtggttcacctggccctctataatctgggggtacagagcaagaagaagtactttgactttgaggagattctggcctttgtcaaccaccactgggagctcctgcagcttggcaagctcaccagcaccccagtgacagatcgaggaccacatctcctcaacgctctgaacagttataaaagccggttcctctgcggcaaggagatcaagaagaagaagtgcatcttccgcctgcgcatccgcgtcccacccaacccgccagggaagctgctgcctgacaaaggactgctgccaaatgagaacagcgcctcctctgagctgcgtaagagaggaaagagcaagcctggtttgttgcctcacgaattccagcagcagaaaaggcgagtttatagaagaaaaagatcaaagtttttgctggaagatgctattcccagtagtgacttcacctcagcctggagcaccaaccaccacctggctagcatatttgacttcacgctggatgaaattcaaagtttaaaaagtgccagctcaggccagaccttcttctcagatgtcgactccaccgacgctgccagcacctctggctctgcctccaccagcctctcctatgactccagatggacagtgggcagccgaaagaggaagctggcagccaaggcatacatgcccctgcgggcaaagcggtgggcagctgagctggatggacgctgcccctcggacagcagtgcagagggggcttcagtccccgagcggccagacgaaggcattgacagccacacatttgagagcatcagtgaagatgactcatccctgtcccacctcaagtcatctatcaccaactactttggtgcagctgggcggttggcctgtggggagaagtaccaggtgttggctcggagggtcacacctgagggcaaggttcagtacctggtggagtgggaagggaccaccccttactgactagcccccgggggtgccaggggtcctgaaaaccaaaggaggagcagcagaagccataggctccccagctttctccaggctggggtgggagaaggaagcaggacagagctgcaagtgcctggcagaatgccctgcctgcctgcctgccaggccaaggcctgcgtctctctgctgtaccagctctgttccagggcctcctcaggctcgttacccctgtgcctgtgtctctacacactccacaccccctcaaactctgtttatctgttctctgaccttgtgtcccctgcgctgggacccttcctcctgaggcccaggtctttgtccccagttgtgtgccttgacctctctcgcccctttctgggtgtgttcgcacatcctgtgtgtgcacagctgtccctccactggatccccttcacacgtgacccgtggggcagccagtcctcccagggactacataacaggcacctttgagagagcatgggagaaggtggataagaggatgctgctcagtgcttttctcttccactttcctgccactccccactaccctcggagagaggtggtgggatgggagagagcccctgtgaaagcctgtgaggatctgaagagtaaagggctgggtctgcctcagaaggcaccagcaccagggcccaggtattaaggctgagagtgaaggctgccaatgtcagctttggaggtcccagaagtcttctgttctctggcctcaccccctcagtcgccatagagctgggcctggccttgctggaatggaggcatccttccaaacctgggggacgggggtggggggtggtagtggtgggagggaaaccatgtcttgctaaacctgtttctggtgcctcccatccccagacccaccagacaccacacagcagacaatacacacccactcgcacaagcttccatccacatgtgttgtactttcagctctaggcatgcagacaaccccacacggccacaccaccacatgcccaagtgtacacacacagagccacaccgtccctctgggcctgctggctcctcccttggctttcccttggcccacttccagggcccaggtgctgcaactaaatgtgaaagctcagtggccgctccttctttcagcccatcaaccagcattggtcccatagggaagcacaggggactcaccctctttcatatcccttgccctgccctgaaatggacaatcactttttgggataggttgaaatttttaaagagcctgcatcatttggttccctcaaagggaagcccttgccagtgggggtttgaaagagaatttttggaaccaacattcaaattctgcctcatctggagggaaaccaaaattgggagggggaagaggacccctgatgttttgctgcttccagagatattagaaactgactcacttgattggaaaatggacaaaagtgccttgacgtggagggtgggcaccagatggggaccagccttgccaactgctgctgtggcctccagcttggctggttttgcaggccgccagcaggaaggcgaaggtggtagtacagcaagaggcactggcggggcagcaggcctgcaggagctgtttttccattgctaggcctgacccctctctacctgtgagcgttcagggggtccctgagatagtttagatgcccccccatcttagacctcagctcccacagtgccttttaagggggacctcacctcctgtgcacagcccacccactttcctctgcttccctggcacagcccaggcatagacgagctggcgttggacccagttcttcccccttttcagccccacagctgctgccacaggggccaactagggccaggtggaaggggagctgagaagccaacccctagcccaggggtgctgtgggaactgggatccaatttgtagcttcctgcctggcttcagagagcccagcaaccttctaggcctgctttccagacttctgagatagcctgggatgagcaatcctgttatagtacatctggaccttccctacctgggctctggggaggctgtgggcctggagagggaaaaggagggagggggtgtctgcaccacctgggaagatagcacaaggcctaatgaggtcaccctgactccccaccccagcatttcattcataccagataatagctgcattactgccaactgaccttataaccctctgcaccttcaaaaagattcatggtttttaattgctgcttttaataacatttgttaaagtta

SEQ ID NO: 105852 - DNA, 4100 bp, Artificial Sequence
  derived and/or modified sequence
actcggccgggcagccgcgggccgagcgcagccgcctccgccaccgatgcgcctggtggccagactccaagtgggaccggcggacacgcagcctcgcgtgtcaggggaagctgatggagaatcgagctctggatccagggactcgggactcctatggtgccaccagccacctccccaacaagggggccctggcgaaggtcaagaacaacttcaaagacttgatgtccaaactgacggagggccagtatgtgctgtgccggtggacagatggcctgtactacctcgggaagatcaagagggtcagcagctctaagcaaagctgcctcgtgactttcgaagataattccaaatactgggtcctatggaaggacatacagcatgccggtgttccaggagaggagcccaagtgcaacatctgcctagggaagacatcagggccgctgaatgagatcctcatctgcgggaagtgtggcctgggttaccaccagcagtgccacatccccatagcgggcagtgctgaccagcccctgctcacaccttggttctgccgacgctgcatcttcgcactggctgtgcggaaaggcggcgcgctgaagaagggcgccatcgccaggacgctgcaggccgtgaagatggtgctgtcctaccagcccgaggagctcgagtgggactcgccccatcgcaccaaccagcagcaatgctactgctactgcggcgggcccggagaatggtacctgcggatgctgcaatgttaccggtgcaggcagtggttccacgaggcctgcacccagtgcctcaatgagcccatgatgtttggagaccggttttacctgttcttctgctccgtgtgtaaccagggcccagagtacatcgagaggctgcccctgcgatgggtggatgtggttcacctggccctctataatctgggggtacagagcaagaagaagtactttgactttgaggagattctggcctttgtcaaccaccactgggagctcctgcagcttggcaagctcaccagcaccccagtgacagatcgaggaccacatctcctcaacgctctgaacagttataaaagccggttcctctgcggcaaggagatcaagaagaagaagtgcatcttccgcctgcgcatccgcgtcccacccaacccgccagggaagctgctgcctgacaaaggactgctgccaaatgagaacagcgcctcctctgagctgcgtaagagaggaaagagcaagcctggtttgttgcctcacgaattccagcagcagaaaaggcgagtttatagaagaaaaagatcaaagtttttgctggaagatgctattcccagtagtgacttcacctcagcctggagcaccaaccaccacctggctagcatatttgacttcacgctggatgaaattcaaagtttaaaaagtgccagctcaggccagaccttcttctcagatgtcgactccaccgacgctgccagcacctctggctctgcctccaccagcctctcctatgactccagatggacagtgggcagccgaaagaggaagctggcagccaaggcatacatgcccctgcgggcaaagcggtgggcagctgagctggatggacgctgcccctcggacagcagtgcagagggggcttcagtccccgagcggccagacgaaggcattgacagccacacatttgagagcatcagtgaagatgactcatccctgtcccacctcaagtcatctatcaccaactactttggtgcagctgggcggttggcctggggagaagtaccaggtgttggctcggagggtcacacctgagggcaaggttcagtacctggtggagtgggaagggaccaccccttactgactagcccccgggggtgccaggggtcctgaaaaccaaaggaggagcagcagaagccataggctccccagctttctccaggctggggtgggagaaggaagcaggacagagctgcaagtgcctggcagaatgccctgcctgcctgcctgccaggccaaggcctgcgtctctctgctgtaccagctctgttccagggcctcctcaggctcgttacccctgtgcctgtgtctctacacactccacaccccctcaaactctgtttatctgttctctgaccttgtgtcccctgcgctgggacccttcctcctgaggcccaggtctttgtccccagttgtgtgccttgacctctctcgcccctttctgggtgtgttcgcacatcctgtgtgtgcacagctgtccctccactggatccccttcacacgtgacccgtggggcagccagtcctcccagggactacataacaggcacctttgagagagcatgggagaaggtggataagaggatgctgctcagtgcttttctcttccactttcctgccactccccactaccctcggagagaggtggtgggatgggagagagcccctgtgaaagcctgtgaggatctgaagagtaaagggctgggtctgcctcagaaggcaccagcaccagggcccaggtattaaggctgagagtgaaggctgccaatgtcagctttggaggtcccagaagtcttctgttctctggcctcaccccctcagtcgccatagagctgggcctggccttgctggaatggaggcatccttccaaacctgggggacgggggtggggggtggtagtggtgggagggaaaccatgtcttgctaaacctgtttctggtgcctcccatccccagacccaccagacaccacacagcagacaatacacacccactcgcacaagcttccatccacatgtgttgtactttcagctctaggcatgcagacaaccccacacggccacaccaccacatgcccaagtgtacacacacagagccacaccgtccctctgggcctgctggctcctcccttggctttcccttggcccacttccagggcccaggtgctgcaactaaatgtgaaagctcagtggccgctccttctttcagcccatcaaccagcattggtcccatagggaagcacaggggactcaccctctttcatatcccttgccctgccctgaaatggacaatcactttttgggataggttgaaatttttaaagagcctgcatcatttggttccctcaaagggaagcccttgccagtgggggtttgaaagagaatttttggaaccaacattcaaattctgcctcatctggagggaaaccaaaattgggagggggaagaggacccctgatgttttgctgcttccagagatattagaaactgactcacttgattggaaaatggacaaaagtgccttgacgtggagggtgggcaccagatggggaccagccttgccaactgctgctgtggcctccagcttggctggttttgcaggccgccagcaggaaggcgaaggtggtagtacagcaagaggcactggcggggcagcaggcctgcaggagctgtttttccattgctaggcctgacccctctctacctgtgagcgttcagggggtccctgagatagtttagatgcccccccatcttagacctcagctcccacagtgccttttaagggggacctcacctcctgtgcacagcccacccactttcctctgcttccctggcacagcccaggcatagacgagctggcgttggacccagttcttcccccttttcagccccacagctgctgccacaggggccaactagggccaggtggaaggggagctgagaagccaacccctagcccaggggtgctgtgggaactgggatccaatttgtagcttcctgcctggcttcagagagcccagcaaccttctaggcctgctttccagacttctgagatagcctgggatgagcaatcctgttatagtacatctggaccttccctacctgggctctggggaggctgtgggcctggagagggaaaaggagggagggggtgtctgcaccacctgggaagatagcacaaggcctaatgaggtcaccctgactccccaccccagcatttcattcataccagataatagctgcattactgccaactgaccttataaccctctgcaccttcaaaaagattcatggtttttaattgctgcttttaataacatttgttaaagttat

SEQ ID NO: 105853 - DNA, 1743 bp, Artificial Sequence
  derived and/or modified sequence
atggagaatagagcactcgatcccggaacccgcgactcctacggggcaacaagccatcttcccaataaaggcgctctggctaaggtcaaaaataatttcaaggatctgatgagcaagctcaccgaaggccagtacgtgctgtgccggtggacggacggcctgtattatctgggcaagatcaagcgcgtgtcaagtagcaagcagagctgcttagtaacattcgaggataactccaagtactgggtcttgtggaaggatatccagcatgccggtgtcccaggcgaggagccaaaatgcaacatttgcctcgggaaaacttccgggccactgaatgagatcttgatctgtgggaagtgcggtttgggatatcaccagcaatgtcacatccctattgctgggagcgctgaccagcccctcctgaccccctggttttgccggaggtgcatctttgcacttgccgtgagaaagggcggagctctaaagaagggagctatagcccgtaccctgcaggccgttaaaatggttctatcataccaacctgaagagctggagtgggactcaccgcacagaacaaaccagcagcagtgttattgttattgcgggggtccaggtgaatggtatttgcggatgcttcaatgttatcgatgtagacaatggttccacgaggcgtgcactcaatgtctcaatgagccaatgatgtttggtgaccgcttttacttgttcttttgttctgtgtgtaatcagggacccgaatacatcgagaggctgccactgcgctgggtggacgttgtgcatctcgctctttacaacctgggcgtacagagcaaaaaaaaatatttcgattttgaagagatattggcatttgtcaaccatcactgggagctgctccaactgggcaaattaacttccacgccagtcactgaccggggaccccacttgctgaatgccttgaactcctacaaatcacggttcctgtgtggcaaagagataaagaaaaaaaaatgcattttccgtcttcggataagggtcccccctaatcctcccggtaagctactgcctgacaaaggcttacttccgaatgagaacagtgcatccagcgaattgagaaaacgaggcaaatcgaagccgggtctgctgcctcacgagttccagcaacagaagcgccgtgtttatcggaggaaacgtagtaagttcctcctggaggatgcaattccatcatccgatttcacatcggcgtggagtaccaaccatcatctcgcaagtatatttgatttcactctcgatgagatacagtccctcaagtccgcctcatccggccagacttttttctcggatgtagatagcactgatgccgcttccacatcggggtcagcctcaacatctctttcctatgatagccgttggaccgttggatcgcggaaacgcaagctggccgctaaagcttacatgccactgagagctaagcggtgggccgcagagctggacggcaggtgcccctctgattccagtgctgaaggcgcaagcgtgcccgaaaggccagacgagggaattgacagccacacattcgagtctatatcagaagatgatagctccttatcccaccttaagtcatctatcaccaactacttcggagctgctggaagactggcctgcggcgaaaagtaccaagtgctcgccagacgcgtgactccggaggggaaggttcagtatctcgtggagtgggagggcacaacaccctattag

SEQ ID NO: 105854 - DNA, 1692 bp, Artificial Sequence
  derived and/or modified sequence
atggaaaacagggcgctggatcccggaacacgcgacagctatggcgctacatcccatctgcctaacaaaggggctctggccaaggtaaagaacaacttcaaagaccttatgagtaagttaactgagggacagtacgtgttgtgcaggtggacagatgggctctattacctgggaaaaattaaacgggtgagttcgagcaaacagagctgtctggttacatttgaggataatagtaaatattgggtgctttggaaggatattcaacatgcgggtgtaccaggagaggaaccaaagtgcaacatttgtttgggtaagacctccggcccacttaacgaaatcctgatctgcggcaaatgcggactgggttatcaccaacagtgccatatacctatcgccggttctgcagatcagccactgttgacaccttggttttgccgcaggtgtatttttgccctagctgtacgtaagggcggagcattgaagaagggagccatcgcaagaactctccaggcagtaaagatggtcctgtcttatcaaccagaagagctggagtgggatagtccacacaggactaaccaacagcagtgttattgctactgcggcggacctggggagtggtatttgagaatgctgcagtgttaccggtgcagacagtggttccacgaggcttgcacacagtgcttgaacgaacctatgatgttcggggacaggttttatctttttttctgcagcgtttgtaatcaggggccagagtatatcgaacggctgcccttgcggtgggtggacgtagtacacctagctctctataacctcggagtccagagtaaaaagaagtactttgattttgaagaaatcttggcctttgtgaatcatcactgggaactgctccagctggggaagctgacttccacaccagtcaccgacaggggaccacacctgttaaacgcactgaattcttacaaaagccggttcttgtgtggaaaagagatcaagaagaagaagtgtatcttcaggctacggatccgggtgccgccaaatccccctgggaaactgctcccggacaagggactcctgccaaacgagaatagcgcctcctccgagttgaggaaaaggggaaaatctaaacccggactcttgcctcacgaattccaacagcaaaaacggagagtatatcgccgtaagcgctccaagtttctgttagaagatgcaatacctagcagtgacttcacttctgcgtggagcactaatcatcatctggcttcaatcttcgacttcacactggatgagattcaatcgttgaagtccgcttctagcggacagacatttttctcagacgttgactcgaccgatgccgcatctactagcggcagcgctagcacatcccttagttatgacagccgctggacagtcggctccaggaaaaggaagctcgcagccaaagcctatatgccacttcgggctaaacgctgggccgctgaactcgatggaaggtgcccttctgatagttcggccgagggcgcatcggtgccagaacgacccgacgaggggatcgactctcacaccttcgagagcataagcgaggatgacagcagcctaagccatctcaaaagcagtatcacaaactatttcggggctgcgggacggttagcctggggtgaggtgccaggagttggtagtgaggggcacacctag

SEQ ID NO: 105855 - DNA, 1743 bp, Artificial Sequence
  derived and/or modified sequence
atggagaacagagccctggaccccggcaccagagacagctacggcgccaccagccacctgcccaacaagggcgccctggccaaggtgaagaacaacttcaaggacctgatgagcaagctgaccgagggccagtacgtgctgtgcagatggaccgacggcctgtactacctgggcaagatcaagagagtgagcagcagcaagcagagctgcctggtgaccttcgaggacaacagcaagtactgggtgctgtggaaggacatccagcacgccggcgtgcccggcgaggagcccaagtgcaacatctgcctgggcaagaccagcggccccctgaacgagatcctgatctgcggcaagtgcggcctgggctaccaccagcagtgccacatccccatcgccggcagcgccgaccagcccctgctgaccccctggttctgcagaagatgcatcttcgccctggccgtgagaaagggcggcgccctgaagaagggcgccatcgccagaaccctgcaggccgtgaagatggtgctgagctaccagcccgaggagctggagtgggacagcccccacagaaccaaccagcagcagtgctactgctactgcggcggccccggcgagtggtacctgagaatgctgcagtgctacagatgcagacagtggttccacgaggcctgcacccagtgcctgaacgagcccatgatgttcggcgacagattctacctgttcttctgcagcgtgtgcaaccagggccccgagtacatcgagagactgcccctgagatgggtggacgtggtgcacctggccctgtacaacctgggcgtgcagagcaagaagaagtacttcgacttcgaggagatcctggccttcgtgaaccaccactgggagctgctgcagctgggcaagctgaccagcacccccgtgaccgacagaggcccccacctgctgaacgccctgaacagctacaagagcagattcctgtgcggcaaggagatcaagaagaagaagtgcatcttcagactgagaatcagagtgccccccaacccccccggcaagctgctgcccgacaagggcctgctgcccaacgagaacagcgccagcagcgagctgagaaagagaggcaagagcaagcccggcctgctgccccacgagttccagcagcagaagagaagagtgtacagaagaaagagaagcaagttcctgctggaggacgccatccccagcagcgacttcaccagcgcctggagcaccaaccaccacctggccagcatcttcgacttcaccctggacgagatccagagcctgaagagcgccagcagcggccagaccttcttcagcgacgtggacagcaccgacgccgccagcaccagcggcagcgccagcaccagcctgagctacgacagcagatggaccgtgggcagcagaaagagaaagctggccgccaaggcctacatgcccctgagagccaagagatgggccgccgagctggacggcagatgccccagcgacagcagcgccgagggcgccagcgtgcccgagagacccgacgagggcatcgacagccacaccttcgagagcatcagcgaggacgacagcagcctgagccacctgaagagcagcatcaccaactacttcggcgccgccggcagactggcctgcggcgagaagtaccaggtgctggccagaagagtgacccccgagggcaaggtgcagtacctggtggagtgggagggcaccaccccctactag

SEQ ID NO: 105856 - DNA, 1692 bp, Artificial Sequence
  derived and/or modified sequence
atggagaacagagccctggaccccggcaccagagacagctacggcgccaccagccacctgcccaacaagggcgccctggccaaggtgaagaacaacttcaaggacctgatgagcaagctgaccgagggccagtacgtgctgtgcagatggaccgacggcctgtactacctgggcaagatcaagagagtgagcagcagcaagcagagctgcctggtgaccttcgaggacaacagcaagtactgggtgctgtggaaggacatccagcacgccggcgtgcccggcgaggagcccaagtgcaacatctgcctgggcaagaccagcggccccctgaacgagatcctgatctgcggcaagtgcggcctgggctaccaccagcagtgccacatccccatcgccggcagcgccgaccagcccctgctgaccccctggttctgcagaagatgcatcttcgccctggccgtgagaaagggcggcgccctgaagaagggcgccatcgccagaaccctgcaggccgtgaagatggtgctgagctaccagcccgaggagctggagtgggacagcccccacagaaccaaccagcagcagtgctactgctactgcggcggccccggcgagtggtacctgagaatgctgcagtgctacagatgcagacagtggttccacgaggcctgcacccagtgcctgaacgagcccatgatgttcggcgacagattctacctgttcttctgcagcgtgtgcaaccagggccccgagtacatcgagagactgcccctgagatgggtggacgtggtgcacctggccctgtacaacctgggcgtgcagagcaagaagaagtacttcgacttcgaggagatcctggccttcgtgaaccaccactgggagctgctgcagctgggcaagctgaccagcacccccgtgaccgacagaggcccccacctgctgaacgccctgaacagctacaagagcagattcctgtgcggcaaggagatcaagaagaagaagtgcatcttcagactgagaatcagagtgccccccaacccccccggcaagctgctgcccgacaagggcctgctgcccaacgagaacagcgccagcagcgagctgagaaagagaggcaagagcaagcccggcctgctgccccacgagttccagcagcagaagagaagagtgtacagaagaaagagaagcaagttcctgctggaggacgccatccccagcagcgacttcaccagcgcctggagcaccaaccaccacctggccagcatcttcgacttcaccctggacgagatccagagcctgaagagcgccagcagcggccagaccttcttcagcgacgtggacagcaccgacgccgccagcaccagcggcagcgccagcaccagcctgagctacgacagcagatggaccgtgggcagcagaaagagaaagctggccgccaaggcctacatgcccctgagagccaagagatgggccgccgagctggacggcagatgccccagcgacagcagcgccgagggcgccagcgtgcccgagagacccgacgagggcatcgacagccacaccttcgagagcatcagcgaggacgacagcagcctgagccacctgaagagcagcatcaccaactacttcggcgccgccggcagactggcctggggcgaggtgcccggcgtgggcagcgagggccacacctag

SEQ ID NO: 105857 - protein, 312 aa, Artificial Sequence
  derived and/or modified sequence
MGSKALPAPIPLHPSLQLTNYSFLQAVNTFPATVDHLQGLYGLSAVQTMHMNHWTLGYPNVHEITRSTITEMAAAQGLVDARFPFPALPFTTHLFHPKQGAIAHVLPALHKDRPRFDFANLAVAATQEDPPKMGDLSKLSPGLGSPISGLSKLTPDRKPSRGRLPSKTKKEFICKFCGRHFTKSYNLLIHERTHTDERPYTCDICHKAFRRQDHLRDHRYIHSKEKPFKCQECGKGFCQSRTLAVHKTLHMQESPHKCPTCGRTFNQRSNLKTHLLTHTDIKPYSCEQCGKVFRRNCDLRRHSLTHTPRQDF

SEQ ID NO: 105858 - protein, 433 aa, Artificial Sequence
  derived and/or modified sequence
MGLRAEEGKRKPPRSVRGEVSPSQGPLAQEDEARRLRSCTPACHPGKRGKGGHRARRQRSAWDLTTHPLTHRSQELRGAAATEGFLYVLLSHWVFVGAPRPPASDSWKKGLVPSAPPASRKMGSKALPAPIPLHPSLQLTNYSFLQAVNTFPATVDHLQGLYGLSAVQTMHMNHWTLGYPNVHEITRSTITEMAAAQGLVDARFPFPALPFTTHLFHPKQGAIAHVLPALHKDRPRFDFANLAVAATQEDPPKMGDLSKLSPGLGSPISGLSKLTPDRKPSRGRLPSKTKKEFICKFCGRHFTKSYNLLIHERTHTDERPYTCDICHKAFRRQDHLRDHRYIHSKEKPFKCQECGKGFCQSRTLAVHKTLHMQESPHKCPTCGRTFNQRSNLKTHLLTHTDIKPYSCEQCGKVFRRNCDLRRHSLTHTPRQDF

SEQ ID NO: 105859 - DNA, 1302 bp, Artificial Sequence
  derived and/or modified sequence
atggggctgagagctgaagaaggcaaacggaaaccccctaggtcagtaaggggggaagtcagtccctctcaaggaccgctggctcaagaggatgaagccagaagactgcggagctgcacaccggcttgccaccctggaaaaagaggcaaaggcggccaccgggctcgacggcagcgctctgcttgggacctcacgacccaccccctgactcaccgcagccaggagctgcgaggagccgctgcaactgagggatttttgtacgtacttcttagccattgggtcttcgtgggcgcgccccgaccccccgcatccgattcatggaagaagggtctcgtccctagcgcacctcccgcatcacgtaaaatgggttccaaagcattaccagctccaatcccactccacccgagcctgcagctgacaaattatagcttcttacaggcggtcaataccttccccgccactgtggaccacctccaggggttgtatggcctgagcgccgttcaaaccatgcacatgaatcattggaccctcggttaccctaacgtacacgaaatcactcgatccacaatcactgaaatggccgctgcccaaggcctggtggatgctcggtttccatttcccgcccttccatttactacgcatctgtttcatcctaaacagggagcgattgcccatgtcttacctgccctgcataaggataggcctcgattcgatttcgccaatctggccgtggccgctacacaggaagacccccccaaaatgggggacctgagcaagctgtcgccagggctgggctcacctatatcaggcttgtcaaaactgacacccgaccgtaagccttcacgaggcaggctgccttccaaaacgaaaaaagagttcatctgcaagttttgtggccgtcactttacaaaatcatacaacttgcttatccatgaaaggactcacacagatgagcgaccctacacatgtgatatctgccacaaggctttccgtcgccaagatcatctcagagatcatcggtatattcacagcaaggaaaagccctttaagtgtcaggaatgcgggaaaggattttgtcagtctaggacactcgcagtgcataaaacattgcacatgcaggaatctccccacaaatgccccacgtgcggtcgcacattcaaccagcggtcaaatcttaagactcacctcttgacacatacggacatcaaaccttacagctgcgaacagtgcgggaaagtctttcgccgcaactgtgacctccggcgccactcattaacccatacccccagacaagatttttag

SEQ ID NO: 105860 - DNA, 1302 bp, Artificial Sequence
  derived and/or modified sequence
atgggcctgcgggcagaggagggcaagaggaagccacccaggtctgtgcggggggaggtgagccccagccagggccccctggcccaggaggatgaggcccggcggctgcggagctgcaccccagcctgccaccctgggaagaggggcaagggcggccaccgggcccggcggcagaggtctgcctgggacctgaccacccaccccctgacccacaggagccaggagctgcggggagctgctgccacagagggcttcctgtatgtgctgctgagccactgggtgtttgtgggcgccccccggcccccagccagtgacagctggaagaagggcctggtgcccagcgcccccccagccagcaggaagatgggcagcaaggccctgcctgcccccatccccctgcaccccagcctgcagctgaccaactacagcttcctgcaggccgtgaacaccttccctgccaccgtggaccacctgcagggcctgtatggcctgtctgctgtgcagaccatgcacatgaaccactggaccctgggctacccaaatgtgcatgagatcaccaggagcaccatcacagagatggctgctgcccagggcctggtggatgcccgcttccccttccctgccctgcccttcaccacccacctgttccaccccaagcagggcgccatcgcccacgtgctgcctgccctgcacaaggaccggcccaggtttgattttgccaacctggccgtggccgccacccaggaggacccccccaagatgggagacctgagcaagctgagccctggcctgggcagccccatcagcggcctgagcaagctgaccccagacaggaagcccagccggggccgcctgcccagcaagaccaagaaggagttcatctgcaagttctgtggccgccacttcaccaagagctacaacctgctgattcatgagaggacccacacagatgagcggccctacacctgtgacatctgccacaaggccttccggcggcaggaccacctgcgggaccaccgctacatccacagcaaggagaagcccttcaagtgccaggagtgtgggaagggcttctgccagagcaggaccctggccgtgcacaagaccctgcacatgcaggagagcccccacaagtgccccacctgtggccgcaccttcaaccagaggagcaacctgaagacccacctgctgacccacacagacatcaagccctacagctgtgagcagtgtgggaaggtgttcagaagaaactgtgacctgcggcggcacagcctgacccacaccccccggcaggacttctag

SEQ ID NO: 105861 - DNA, 1302 bp, Artificial Sequence
  derived and/or modified sequence
atgggcctgcgggccgaggagggcaagcggaagcccccccggagcgtccggggagaggtgagtccaagccagggtccactcgcccaggaggatgaggcacggcggctgcgaagctgtacccctgcatgccacccaggaaaacgaggaaagggtgggcatagggctaggaggcagaggagcgcatgggacttgacaacacatcccctgacccataggagtcaggaattgaggggagccgccgcgactgagggtttcttatacgttctcttgagccattgggtcttcgtgggggcccctaggccccccgcgagcgactcatggaaaaagggtctggtgccaagcgcaccaccagcctcccggaagatgggctcgaaagcactgccagctcctataccccttcaccctagccttcaactgacaaactatagtttcctgcaggcggtgaatacttttcccgctacagtcgaccatctccaggggttatacggactgtcagcggttcagacaatgcatatgaatcactggaccttgggctacccgaacgttcacgagattacacggagcaccatcactgaaatggccgccgcccagggactggtagacgctcggtttccattccctgctctgcctttcaccacgcatctgttccaccccaagcaaggtgccatcgcccacgtgctgccagccttacacaaggaccggccgagatttgatttcgccaatctagcagttgctgccacccaggaagaccccccgaagatgggcgatctgagcaaattgtcacccgggctgggcagcccgataagcggactgtcaaagctcacccctgaccggaaaccatcacgcggtagactgccaagcaaaactaagaaagaattcatctgcaaattttgcgggcgtcatttcaccaaatcctacaaccttctgatccacgagcgaactcataccgacgagcggccctatacctgtgatatatgtcataaagccttcaggcgtcaggatcatctgcgagatcaccgttacattcattctaaggagaaacctttcaaatgtcaagaatgcggtaaaggtttttgccagtctcggaccctggctgtccacaaaacactgcatatgcaggaatcccctcataaatgccccacctgtggaagaacctttaatcagcgatcgaacctcaagacccacttactgactcatacagacatcaagccctattcatgcgagcaatgtggcaaagtttttagacggaactgcgaccttcggagacacagccttacccatacccctcggcaggatttttag

SEQ ID NO: 105862 - DNA, 1528 bp, Artificial Sequence
  derived and/or modified sequence
tcgctttagctgctcgcggtcctccagatcatgtccgcgactcctgcgactccgcgcggaaaaaaaagtttgccaggcgtggactcaatgacctttccaagctgtgcgcctcgctgcctggaccgggtctgagcgcggctgcccaggttgacctttctgcgggagatggggctgagggcagaggaaggaaaaagaaaacctccgaggtcagtgcggggcgaggtgagcccctcccagggccctctggcccaggaggatgaagcgcgccggcttcgctcttgcacgccggcttgccatccgggtaagcgcgggaaaggcggccacagggcgcggcggcagcgcagcgcgtgggatctcacgacccatccgttaacccaccgttcccaggagctccgaggcgcagcggcgacagagggctttctctacgtgctgttgtctcactgggtttttgtcggagccccacgccctccggcctctgattcctggaagaaagggttggtcccctcagcacccccagcatcccggaaaatggggagcaaggctctgccagcgcccatcccgctccacccgtcgctgcagctcaccaattactccttcctgcaggccgtgaacaccttcccggccacggtggaccacctgcagggcctgtacggtctcagcgcggtacagaccatgcacatgaaccactggacgctggggtatcccaatgtgcacgagatcacccgctccaccatcacggagatggcggcggcgcagggcctcgtggacgcgcgcttccccttcccggccctgccttttaccacccacctattccaccccaagcagggggccattgcccacgtcctcccagccctgcacaaggaccggccccgttttgactttgccaatttggcggtggctgccacgcaagaggatccgcctaagatgggagacctgagcaagctgagcccaggactgggtagccccatctcgggcctcagtaaattgactccggacagaaagccctctcgaggaaggttgccctccaaaacgaaaaaagagtttatctgcaagttttgcggcagacactttaccaaatcctacaatttgctcatccatgagaggacccacacggacgagaggccgtacacgtgtgacatctgccacaaggccttccggaggcaagatcacctgcgggatcacagatacatccattccaaagaaaaacccttcaaatgtcaggagtgtgggaaaggattttgtcagtctagaactctagcagttcacaaaactttacacatgcaggaatctccacacaaatgtcccacatgtggaagaacctttaatcagagaagtaatctgaaaactcaccttctcacccatacagacatcaagccctacagctgcgagcagtgcggcaaagtgttcaggcgaaactgtgatctgcggcggcacagcctgactcacaccccgcggcaggacttctagagaagcccaggatctgtcccgtgccgccgctgctcccctccccagacacctctccacgtct

SEQ ID NO: 105863 - DNA, 1302 bp, Artificial Sequence
  derived and/or modified sequence
atggggttgagagcagaagagggaaaaaggaaaccgccacgctccgttaggggggaggtgtctccgagccagggtccacttgcgcaagaagacgaggccaggcgcctacgatcgtgcaccccggcatgccatccgggaaaacgtggcaaaggcggacatcgcgctcggaggcagcggtccgcttgggacctgaccactcaccccctaactcatcgcagccaggagctccgaggcgctgccgcaaccgaggggttcttgtacgtcctgcttagccactgggttttcgtcggagcacccagaccaccagcatccgattcatggaagaaggggctcgttcccagtgcaccccctgcctcaagaaagatgggctctaaggccctccctgcacccattcccttgcacccttcactgcaactgaccaattatagctttctgcaggccgtgaacacatttcccgcaacggtggaccatttgcagggattgtatggcctctccgcagtgcagactatgcatatgaaccactggaccttaggctatccgaacgtgcacgaaatcactaggagcactattaccgagatggccgctgcacagggcctggtagacgcacgcttccccttcccagcgttgccttttacaacacacctgtttcaccccaaacagggggcaatcgcccatgttctaccggctctccacaaagatcgacccaggtttgacttcgctaatcttgccgtggccgcaacccaggaggatccacctaaaatgggcgacctttctaaactgtcacctggtttggggtcgcccatctccggtttgtccaagctgaccccagaccgaaaaccctcacgcggtcggctgcctagcaaaactaaaaaggaattcatctgcaagttctgcgggaggcatttcaccaagtcttacaatcttctgatacatgaaagaacacatactgatgagcgaccatatacgtgtgacatttgccacaaggcatttagacgacaggaccacctgcgcgatcacaggtatattcacagcaaagagaagccctttaagtgtcaggaatgtgggaaggggttctgccagagtcgcactctggcagtgcacaagacgttgcacatgcaagagtcaccacataagtgtccgacatgtgggaggacattcaaccagcggtctaacttgaagactcacctactgacgcacaccgatattaagccttactcttgcgaacagtgtgggaaggtctttcgtcggaattgtgatctaaggcgccattccctgacacatactcctcgacaagacttctag

SEQ ID NO: 105864 - DNA, 1302 bp, Artificial Sequence
  derived and/or modified sequence
atgggcctgagagccgaggagggcaagagaaagccccccagaagcgtgagaggcgaggtgagccccagccagggccccctggcccaggaggacgaggccagaagactgagaagctgcacccccgcctgccaccccggcaagagaggcaagggcggccacagagccagaagacagagaagcgcctgggacctgaccacccaccccctgacccacagaagccaggagctgagaggcgccgccgccaccgagggcttcctgtacgtgctgctgagccactgggtgttcgtgggcgcccccagaccccccgccagcgacagctggaagaagggcctggtgcccagcgccccccccgccagcagaaagatgggcagcaaggccctgcccgcccccatccccctgcaccccagcctgcagctgaccaactacagcttcctgcaggccgtgaacaccttccccgccaccgtggaccacctgcagggcctgtacggcctgagcgccgtgcagaccatgcacatgaaccactggaccctgggctaccccaacgtgcacgagatcaccagaagcaccatcaccgagatggccgccgcccagggcctggtggacgccagattccccttccccgccctgcccttcaccacccacctgttccaccccaagcagggcgccatcgcccacgtgctgcccgccctgcacaaggacagacccagattcgacttcgccaacctggccgtggccgccacccaggaggacccccccaagatgggcgacctgagcaagctgagccccggcctgggcagccccatcagcggcctgagcaagctgacccccgacagaaagcccagcagaggcagactgcccagcaagaccaagaaggagttcatctgcaagttctgcggcagacacttcaccaagagctacaacctgctgatccacgagagaacccacaccgacgagagaccctacacctgcgacatctgccacaaggccttcagaagacaggaccacctgagagaccacagatacatccacagcaaggagaagcccttcaagtgccaggagtgcggcaagggcttctgccagagcagaaccctggccgtgcacaagaccctgcacatgcaggagagcccccacaagtgccccacctgcggcagaaccttcaaccagagaagcaacctgaagacccacctgctgacccacaccgacatcaagccctacagctgcgagcagtgcggcaaggtgttcagaagaaactgcgacctgagaagacacagcctgacccacacccccagacaggacttctag

SEQ ID NO: 105865 - DNA, 1116 bp, Artificial Sequence
  derived and/or modified sequence
atgctgcagtgctaccgctgcaggcaatggttccatgaagcttgtactcagtgtctgaatgagcccatgatgttcggcgataggttctatctatttttctgctcagtgtgtaaccaagggccggagtatattgagcgcctgccactccgttgggttgatgtcgtgcacctggcactgtacaatctgggtgtccagagtaaaaagaaatactttgactttgaggagatcttagccttcgtgaatcatcactgggagctgctacagcttggaaagctgacatcaacccctgtaacagatagaggcccacatcttctgaatgctcttaacagctataagtctagatttctctgtgggaaagagattaagaaaaagaaatgtatctttaggctgcggatcagagtccctcccaacccaccaggcaaacttctcccagataagggcctgttaccgaatgagaactcggcgagttcggagctccgtaagagagggaaatctaaacccggactacttccccatgagtttcaacagcaaaaaaggagagtgtatcggagaaagcggtctaagttcctgctcgaggacgccataccaagcagcgactttacctcagcctggtccaccaaccatcatctggcctccattttcgatttcacccttgacgagatccagagcctcaagagcgcctcttctggccagaccttcttcagcgacgtagactcaactgacgcagctagcacgagtggtagtgccagcacctctctatcatacgatagccgttggaccgtgggctctaggaagcggaagctggccgccaaggcctatatgcctttgcgcgcaaaaaggtgggccgctgaactggacggaagatgtccaagtgactcctcagccgagggtgctagcgtgccagagaggccggatgagggaattgacagccatacgtttgagtctatatccgaggacgacagcagcttatcccatctcaagtctagcatcaccaattatttcggagccgcgggcaggctcgcctgcggggagaagtatcaagttctggccaggcgagtgacaccggagggaaaagtccagtacctggttgagtgggaggggacgaccccttactag

SEQ ID NO: 105866 - DNA, 1116 bp, Artificial Sequence
  derived and/or modified sequence
atgctgcagtgctaccgctgccggcagtggttccacgaggcctgcacccagtgcctgaatgagcccatgatgtttggagaccgcttctacctgttcttctgcagcgtgtgcaaccagggccctgagtacatcgagcggctgcccctgcgctgggtggatgtggtgcacctggccctgtacaacctgggcgtgcagagcaagaagaagtactttgattttgaggagatcctggcctttgtgaaccaccactgggagctgctgcagctgggcaagctgaccagcacccctgtgacagaccggggcccccacctgctgaatgccctgaacagctacaagagccgcttcctgtgtgggaaggagatcaagaagaagaagtgcatcttccggctgcgcatccgggtgccccccaaccccccaggcaagctgctgcctgacaagggcctgctgcccaatgaaaacagcgccagcagcgagctgaggaagaggggcaagagcaagccaggcctgctgccccatgagttccagcagcagaagagaagagtgtacagaaggaagaggagcaagttcctgctggaggatgccatccccagcagtgacttcaccagcgcctggagcaccaaccaccacctggccagcatctttgacttcaccctggatgagatccagagcctgaagagcgccagcagcggccagaccttcttcagtgatgtggacagcacagatgctgccagcaccagcggcagcgccagcaccagcctgtcctatgacagccgctggacagtgggcagcaggaagaggaagctggccgccaaggcctacatgcccctgcgggccaagcgctgggccgctgagctggatggccgctgccccagcgacagcagcgctgagggcgcctctgtgcctgagaggccagatgagggcatcgacagccacacctttgagagcatcagtgaagatgacagcagcctgagccacctgaagagcagcatcaccaactactttggagctgctggccgcctggcctgtggggagaagtaccaggtgctggcccggcgggtgaccccagagggcaaggtgcagtacctggtggagtgggagggcaccaccccctactag

SEQ ID NO: 105867 - DNA, 1116 bp, Artificial Sequence
  derived and/or modified sequence
atgctgcagtgctaccggtgccggcagtggttccacgaggcctgcactcagtgtcttaacgagcccatgatgttcggtgatcgtttctacttgtttttttgcagtgtgtgtaatcagggtcctgagtacattgaaaggttgcccctgcggtgggtagatgtggtgcacctcgctctgtacaacctgggggtgcagagtaaaaaaaagtacttcgattttgaggaaatcctggcgtttgtgaaccaccattgggagctgcttcagctcggaaagttgacctcgacacccgttacagacaggggccctcacttgcttaacgctctcaatagttacaagagcaggtttctgtgcgggaaggaaatcaaaaaaaagaaatgtatctttaggctgcgtatccgtgtgccccctaatccacccggtaagttgcttcctgataagggcctcctccccaacgaaaacagcgcaagttcagagctgcgaaagaggggcaagagcaaacccggtcttctcccccatgagtttcagcaacaaaagagaagagtgtataggcggaagcgctctaaatttctgctggaggacgccatacctagctcagacttcaccagcgcctggtcaaccaatcatcacctcgctagtatctttgattttacacttgacgagattcaatccttgaagtccgcctcctctggccagaccttctttagcgacgtagattcaaccgatgctgcgtctacctctggctccgcttcaaccagcttgagttacgatagccgttggaccgtcggtagtcgcaagagaaaacttgccgcaaaggcttatatgccccttagggccaagcgatgggcagcagagctcgacggccggtgtccttccgacagctccgccgagggtgcctccgtaccggaaaggcctgacgaagggattgattcccatacgtttgagtctatatccgaagatgactcatcactgtctcaccttaaatcttcaattaccaactacttcggagcagccggtcgactggcatgcggagaaaagtaccaggtactagcacgccgagtcacaccagaaggtaaagtgcaatacctcgtcgagtgggagggaaccacgccctattag

SEQ ID NO: 105868 - DNA, 1116 bp, Artificial Sequence
  derived and/or modified sequence
atgctacagtgttaccggtgccgtcagtggttccacgaggcttgcactcagtgcctgaatgaacccatgatgttcggggaccgcttttaccttttcttctgcagtgtctgtaatcaggggcctgaatatattgagaggctgccacttcggtgggtggatgtggtccacttggccttgtacaacctcggcgtccagtctaagaagaaatatttcgattttgaagagatcctcgcgttcgtcaaccatcattgggaattgcttcaactcggcaagctaacctctacgccggtcaccgatagagggcctcaccttctgaatgcgctgaattcctataaaagccgcttcctttgtggaaaagaaatcaagaagaaaaagtgcatcttccgtctgagaatccgcgtcccccctaacccgccaggcaagctgttgcccgataagggcttgctgccaaatgagaactctgccagtagcgaactcaggaaaagagggaaaagcaaacccggactgctgccacatgagtttcagcagcaaaagcgcagagtctacaggcgcaaacggtccaagttcttactggaggatgccatccctagctcagacttcaccagcgcctggagcactaaccaccacctggctagcatctttgacttcacactggatgaaatccagtcacttaagagtgcctccagtggacagactttcttctcagatgtggacagcaccgacgctgctagcaccagtggctccgccagcacctccttatcatacgatagtaggtggaccgtgggcagtaggaagaggaagttagcggctaaagcctacatgcccctgcgtgctaagagatgggccgcagaactggatgggaggtgcccttcagacagttccgcggagggcgcatctgtccccgaacgaccagatgaaggtattgattcccacacattcgagagtatctccgaagatgacagcagtctgagccatctgaagtcctcaattacgaactattttggagcggcagggaggctggcctgcggtgagaagtatcaggtgttagcgagaagagtaaccccggagggcaaggtgcaatacttggtcgagtgggaaggcacgaccccttactag

SEQ ID NO: 105869 - DNA, 1116 bp, Artificial Sequence
  derived and/or modified sequence
atgctgcagtgctacagatgcagacagtggttccacgaggcctgcacccagtgcctgaacgagcccatgatgttcggcgacagattctacctgttcttctgcagcgtgtgcaaccagggccccgagtacatcgagagactgcccctgagatgggtggacgtggtgcacctggccctgtacaacctgggcgtgcagagcaagaagaagtacttcgacttcgaggagatcctggccttcgtgaaccaccactgggagctgctgcagctgggcaagctgaccagcacccccgtgaccgacagaggcccccacctgctgaacgccctgaacagctacaagagcagattcctgtgcggcaaggagatcaagaagaagaagtgcatcttcagactgagaatcagagtgccccccaacccccccggcaagctgctgcccgacaagggcctgctgcccaacgagaacagcgccagcagcgagctgagaaagagaggcaagagcaagcccggcctgctgccccacgagttccagcagcagaagagaagagtgtacagaagaaagagaagcaagttcctgctggaggacgccatccccagcagcgacttcaccagcgcctggagcaccaaccaccacctggccagcatcttcgacttcaccctggacgagatccagagcctgaagagcgccagcagcggccagaccttcttcagcgacgtggacagcaccgacgccgccagcaccagcggcagcgccagcaccagcctgagctacgacagcagatggaccgtgggcagcagaaagagaaagctggccgccaaggcctacatgcccctgagagccaagagatgggccgccgagctggacggcagatgccccagcgacagcagcgccgagggcgccagcgtgcccgagagacccgacgagggcatcgacagccacaccttcgagagcatcagcgaggacgacagcagcctgagccacctgaagagcagcatcaccaactacttcggcgccgccggcagactggcctgcggcgagaagtaccaggtgctggccagaagagtgacccccgagggcaaggtgcagtacctggtggagtgggagggcaccaccccctactag

SEQ ID NO: 105870 - DNA, 324 bp, Artificial Sequence
  derived and/or modified sequence
atggaaaaccgggctctggatccaggcacgcgggattcatatggagctacgagccatctgcctaacaagggtgctctcgctaaagtgaagaacaacttcaaggacttaatgtctaaactgacagaaggccaatatgtcctatgtagatggactgatggtctttactacctcgggaagattaagcgggtttcctcaagcaagcaaagctgtctggtgactttcgaggataacagtaaatactgggtcttatggaaggatatccagcacgccggggtgcctggtgaagaacccaaatgtaatatttgcttaggaaagacaagctag

SEQ ID NO: 105871 - DNA, 324 bp, Artificial Sequence
  derived and/or modified sequence
atggagaacagagccctggaccccggcacccgggacagctatggagccaccagccacctgcccaacaagggggccctggccaaggtgaagaacaacttcaaggacctgatgagcaagctgacagagggccagtatgtgctgtgccgctggacagatggcctgtactacctgggcaagatcaagagggtgagcagcagcaagcagagctgcctggtgacctttgaggacaacagcaagtactgggtgctgtggaaggacatccagcacgccggcgtgcctggagaggagcccaagtgcaacatctgcctgggcaagaccagctag

SEQ ID NO: 105872 - DNA, 324 bp, Artificial Sequence
  derived and/or modified sequence
atggagaaccgggccctggaccccggcacccgggacagctacggcgccactagccacctaccaaacaaaggcgcactggccaaagtgaaaaacaacttcaaggacctcatgtcaaagctgaccgagggacagtacgttctctgtcgctggacagatggactgtattatcttggtaaaataaagcgtgtctcttcaagcaagcaatcctgcctagtcaccttcgaggacaatagtaagtactgggtactgtggaaagacatacaacacgctggggtacccggggaagagccaaaatgcaacatatgtttaggtaagacatcctag

SEQ ID NO: 105873 - DNA, 324 bp, Artificial Sequence
  derived and/or modified sequence
atggaaaatagagctttagatcccggaaccagagacagctacggcgctacatcacatctgcccaataaaggcgctctagcgaaagtgaaaaacaatttcaaagacctgatgtccaagctcaccgaggggcagtacgtcctgtgtaggtggacggacggcttgtactatcttggaaaaattaaacgagtgtcgagtagcaaacaaagttgtctggtaaccttcgaagacaattctaagtattgggtcctgtggaaggatatccagcacgcaggcgtccccggtgaggagcccaagtgtaacatttgtctcggcaaaactagttag

SEQ ID NO: 105874 - DNA, 324 bp, Artificial Sequence
  derived and/or modified sequence
atggagaacagagccctggaccccggcaccagagacagctacggcgccaccagccacctgcccaacaagggcgccctggccaaggtgaagaacaacttcaaggacctgatgagcaagctgaccgagggccagtacgtgctgtgcagatggaccgacggcctgtactacctgggcaagatcaagagagtgagcagcagcaagcagagctgcctggtgaccttcgaggacaacagcaagtactgggtgctgtggaaggacatccagcacgccggcgtgcccggcgaggagcccaagtgcaacatctgcctgggcaagaccagctag

SEQ ID NO: 105875 - protein, 650 aa, Artificial Sequence
  derived and/or modified sequence
MAASPGPAGVGGAGAVYGSGSSGFALDSGLEIKTRSVEQTLLPLVSQITTLINHKDNTKKSDKTLQAIQRVGQAVNLAVGRFVKVGEAIANENWDLKEEINIACIEAKQAGETIAALTDITNLNHLESDGQITIFTDKTGVIKAARLLLSSVTKVLLLADRVVIKQIITSRNKVLATMERLEKVNSFQEFVQIFSQFGNEMVEFAHLSGDRQNDLKDEKKKAKMAAARAVLEKCTMMLLTASKTCLRHPNCESAHKNKEGVFDRMKVALDKVIEIVTDCKPNGETDISSISIFTGIKEFKMNIEALRENLYFQSKENLSVTLEVILERMEDFTDSAYTSHEHRERILELSTQARMELQQLISVWIQAQSKKTKSIAEELELSILKISHSLNELKKEIISAAETLTLHPSSKIAKENLDVFCEAWESQISDMSTLLREINDVFEGRRGEKYGYLSLPKPMKNNANLKSLKPDKPDSEEQAKIAKLGLKLGLLTSDADCEIEKWEDQENEIVQYGRNMSSMAYSLYLFTRGEGPLKTSQDLIHQLEVFAAEGLKLTSSVQAFSKQLKDDDKLMLLLEINKLIPLCHQLQTVTKTSLQNKVFLKVDKCITKTRSMMALLVQLLSLCYKLLKKLQMENNGWVSVTNKDTMDSKT

SEQ ID NO: 105876 - protein, 183 aa, Artificial Sequence
  derived and/or modified sequence
MAASPGPAGVGGAGAVYGSGSSGFALDSGLEIKTRSVEQTLLPLVSQITTLINHKDNTKKSDKTLQAIQRVGQAVNLAVGRFVKVGEAIANENWDLKEEINIACIEAKQAGETIAALTDITNLNHLESDGQITIFTDKTGVIKAARLLLSSVTKVLLLADRVVIKQIITSRNKRLTIYNLRHS

SEQ ID NO: 105877 - protein, 718 aa, Artificial Sequence
  derived and/or modified sequence
MAASPGPAGVGGAGAVYGSGSSGFALDSGLEIKTRSVEQTLLPLVSQITTLINHKDNTKKSDKTLQAIQRVGQAVNLAVGRFVKVGEAIANENWDLKEEINIACIEAKQAGETIAALTDITNLNHLESDGQITIFTDKTGVIKAARLLLSSVTKVLLLADRVVIKQIITSRNKVLATMERLEKVNSFQEFVQIFSQFGNEMVEFAHLSGDRQNDLKDEKKKAKMAAARAVLEKCTMMLLTASKTCLRHPNCESAHKNKEGVFDRMKVALDKVIEIVTDCKPNGETDISSISIFTGIKEFKMNIEALRENLYFQSKENLSVTLEVILERMEDFTDSAYTSHEHRERILELSTQARMELQQLISVWIQAQSKKTKSIAEELELSILKISHSLNELKKELHSTATQLAADLLKYHADHVVLKALKLTGVEGNLEALAEYACKLSEQKEQLVETCRLLRHISGTEPLEITCIHAEETFQVTGQQIISAAETLTLHPSSKIAKENLDVFCEAWESQISDMSTLLREINDVFEGRRGEKYGYLSLPKPMKNNANLKSLKPDKPDSEEQAKIAKLGLKLGLLTSDADCEIEKWEDQENEIVQYGRNMSSMAYSLYLFTRGEGPLKTSQDLIHQLEVFAAEGLKLTSSVQAFSKQLKDDDKLMLLLEINKLIPLCHQLQTVTKTSLQNKVFLKVDKCITKTRSMMALLVQLLSLCYKLLKKSETRY

SEQ ID NO: 105878 - DNA, 1953 bp, Artificial Sequence
  derived and/or modified sequence
atggcagcaagcccaggtcctgccggggtcgggggggcgggcgctgtgtacggatccggaagcagtggatttgcacttgattccggtctggaaatcaaaacacggagcgtcgaacagactttattacccctcgtttcccaaatcacaacactcatcaaccataaagacaatacaaaaaaatcagacaagaccttgcaggcaatccagcgcgtggggcaagctgtcaatctcgccgtgggtcgatttgtgaaagtgggcgaggcgattgcgaacgagaattgggacctgaaggaggagatcaacatcgcgtgtatcgaggcgaagcaggctggcgaaactattgccgccctaactgacatcactaacctgaaccatctcgaaagcgacgggcagataaccatcttcacagataagacaggcgtgatcaaagccgccaggctgctactctcttccgtgactaaggtactcttgctggcagatagagttgtcattaaacagattattacaagccggaataaggtgctcgcaaccatggagcgactggagaaagtgaatagcttccaagaattcgtgcaaatcttctctcagttcgggaacgagatggtggaatttgcacacttgagcggggataggcaaaatgacctcaaggacgagaagaagaaggctaagatggctgccgccagagcagtgctagagaagtgcacaatgatgctgctgacagcatccaagacttgcctccgccaccccaactgcgaaagtgctcacaagaataaagaaggcgtgttcgacagaatgaaggtcgccctcgacaaagtgatagaaatcgtcacagattgtaagccaaacggggagaccgacatcagtagcattagcattttcaccggcattaaggagtttaaaatgaatatagaggcgctacgagagaatctctattttcaatccaaggagaatctcagtgttactctggaagtgatcctggaacgcatggaagatttcacagactcagcttacacttcgcatgaacacagagagcgaattctcgagctgtctacccaggcccgtatggaactgcagcagctcatcagcgtgtggatccaggcccaatccaagaaaactaaaagtatcgccgaggagctcgagttgtctatcctaaagatctcacactctctgaacgaactcaagaaagagatcataagcgcagcagaaacgctcactctgcatccgtctagcaagattgctaaagagaatctcgatgtattttgtgaggcctgggaatcacagatttcagatatgtctaccttactcagagaaattaatgatgtgtttgaaggacggcgaggcgaaaagtacggatatctttcccttcctaaaccaatgaaaaacaacgcgaacttgaaaagtctgaaacccgataaaccggattcggaagagcaggccaagattgctaagctggggctcaaactgggtctccttaccagcgatgctgactgtgaaattgagaagtgggaggaccaggagaatgaaatcgtgcagtacggacgcaacatgtcgtcgatggcctatagcctgtacctgtttacaaggggggagggtccattgaaaacttctcaggatctcatccaccagctggaggtgtttgcagccgagggcttgaagctgacgtcttctgttcaagccttctcaaaacagctcaaggacgacgacaaactcatgctgctgctcgagatcaacaagctcatcccactttgtcaccaattgcagaccgttactaagactagtctgcagaacaaagtcttcctgaaggtagataagtgcattaccaaaacacggagtatgatggccctcctggtgcaattgttgtcactgtgctacaaattgctgaagaaactacaaatggagaataacggttgggtttcagtgacaaataaggacacgatggacagtaagacctag

SEQ ID NO: 105879 - DNA, 552 bp, Artificial Sequence
  derived and/or modified sequence
atggccgcttcccctggaccagccggcgtaggcggcgccggcgcagtctacggctcaggatcatccggctttgccttggatagcgggcttgaaatcaaaacccggtcagtggaacagactctacttccattggtgagtcagatcactacgctgataaatcataaagacaacacaaagaagtccgacaaaacattgcaggctatacagagggtgggtcaagctgtgaatttggcggttggtaggtttgttaaggtgggagaagcaatcgcaaacgagaactgggatttgaaagaagagattaacatcgcctgcattgaagccaaacaagctggagaaacgatcgccgctctgactgacattacaaacctgaaccacctggagagcgacggccagatcacaatatttacagacaaaactggcgtaattaaagcggcaagacttcttctgagctcagtgaccaaggtgctgctcctcgccgatcgggtggtcattaaacagatcattactagccgcaataagagactgactatctacaaccttcgacacagttag

SEQ ID NO: 105880 - DNA, 2157 bp, Artificial Sequence
  derived and/or modified sequence
atggctgcttcgcctgggcccgctggtgtcggtggagccggcgctgtgtacgggagtggctctagcgggttcgcgctggactccgggctcgagatcaaaacgaggtcagtggagcagacgctactgccgctcgtgtcccagattaccaccttgataaatcataaggacaataccaagaagtctgataagaccctgcaggccatccaacgagtgggccaagccgtgaacttagctgtgggccgctttgtgaaagtcggggaagcgattgctaatgaaaattgggacctgaaagaagagatcaatattgcatgcattgaggccaaacaggccggggagactattgcagccctaaccgacatcactaacttaaatcacctggagtctgacggccagattacaatctttaccgataaaactggggttattaaagcagcacgactcctgttgtctagcgttacgaaggtgctgctgctcgctgatcgcgtggtgattaagcaaattattacctctagaaataaagtgcttgccactatggagcgcttggaaaaggtgaactctttccaggagttcgtccagatcttttcacagttcggcaatgagatggtggaatttgcgcatctgtccggcgaccgtcagaatgacttgaaggacgagaaaaaaaaggccaagatggctgctgcgagagctgtgttggaaaaatgcaccatgatgctgcttactgcgagtaaaacctgcttaagacatcccaattgtgagtctgctcataaaaataaagaaggagtgttcgacagaatgaaagtcgctctcgataaagtaatagagatagtcaccgactgtaaacctaatggagaaacggacatatcttcaatcagcatatttacaggtattaaggagtttaagatgaatattgaagccctcagggagaatctgtattttcagtccaaagagaacctaagcgtcacactggaagttattctggagcgaatggaagatttcacagattccgcctacacatcccatgaacaccgcgagcggatcctagaactctctacgcaggcgcggatggaactccagcagttgattagcgtttggatccaggctcagtccaaaaagaccaaaagcatagccgaggaactcgaactatcgatacttaagatctcccactctttaaacgagcttaagaaggaacttcactcaaccgccacccagctagcggcagacctcctgaagtaccacgccgaccacgtggtgctgaaagctctgaagttaacgggggtcgaaggaaacctggaggccctagcagagtacgcatgcaaacttagtgagcaaaaggagcagctggtagaaacttgtcggctgctgagacacatatccgggaccgagcctttagaaataacctgtatacatgcggaggaaacattccaagtgaccgggcagcaaattatttccgcagcagagacattaaccctgcatcccagttcaaaaattgccaaagaaaacctagatgtcttctgtgaggcctgggagagtcagatatcagacatgtctaccctccttagagaaattaacgatgtgtttgaaggacgtaggggggaaaaatacggctatctgagtctgccaaagcctatgaaaaataacgctaacctgaagtcactgaagcccgacaagcccgactccgaggaacaggctaagatcgctaaacttggtctcaaattgggacttctaacctctgacgcagactgcgagatcgagaaatgggaggatcaggagaacgaaatcgttcaatacggcagaaacatgtccagtatggcgtactctctctatttattcactcgcggggagggaccgcttaagacgagtcaggacctgatacatcagctggaggtctttgcagccgagggccttaagctgacctcttccgttcaggcattctcgaagcaacttaaagatgatgataaactgatgctgcttcttgagatcaacaagctcatcccactgtgtcaccagctacaaactgtgaccaaaaccagtctgcagaacaaagtttttcttaaagtggacaagtgcatcaccaaaacacggagcatgatggccctgctggtgcagcttctctccctgtgttataagttgttgaaaaagagcgagacccggtattag

SEQ ID NO: 105881 - DNA, 1953 bp, Artificial Sequence
  derived and/or modified sequence
atggccgccagccctggccctgctggggtgggcggggccggggctgtgtatggcagcggcagcagcggctttgccctggacagcggcctggagatcaagaccaggtctgtggagcagaccctgctgcccctggtgtcccagatcaccaccctcatcaaccacaaggacaacaccaagaagagtgacaagaccctgcaggccatccagagggtgggccaggccgtgaacctggccgtgggccgctttgtgaaggtgggggaggccatcgccaatgaaaactgggacctgaaggaggagatcaacatcgcctgcatcgaggccaagcaggccggggagaccatcgccgccctgacagacatcaccaacctgaaccacctggagagtgatggccagatcaccatcttcacagacaagacaggagtcatcaaggccgcccggctgctgctgagctctgtgaccaaggtgctgctgctggccgacagagtggtgatcaagcagatcatcaccagcaggaacaaggtgctggccaccatggagcggctggagaaggtgaacagcttccaggagtttgtgcagatcttcagccagtttggaaatgagatggtggagtttgcccacctgagcggggaccggcagaatgacctgaaggatgagaagaagaaggccaagatggccgccgcccgggctgtgctggagaagtgcaccatgatgctgctgacagccagcaagacctgcctgcggcaccccaactgtgagagcgcccacaagaacaaggagggcgtgtttgacaggatgaaggtggccctggacaaggtgattgaaattgtgacagactgcaagcccaacggggagacagacatcagcagcatcagcatcttcaccggcatcaaggagttcaagatgaacatcgaggccctgcgggagaacctgtacttccagagcaaggagaacctgtctgtgaccctggaggtgatcctggagaggatggaggacttcacagattctgcctacaccagccatgagcaccgggagcgcatcctggagctgagcacccaggccaggatggagctgcagcagctgatctctgtgtggatccaggcccagagcaagaagaccaagagcattgctgaggagctggagctgagcatcctgaagatcagccacagcctgaatgagctgaagaaggagatcatctctgctgctgagaccctgaccctgcaccccagcagcaagatcgccaaggagaacctggatgtgttctgtgaggcctgggagagccagatcagtgacatgagcaccctgctgcgggagatcaatgatgtgtttgagggcagaagaggagagaagtatggctacctgagcctgcccaagcccatgaagaacaatgccaacctgaagagcctgaagccagacaagccagattctgaggagcaggccaagatcgccaagctgggcctgaagctgggcctgctgaccagtgatgctgactgtgaaattgagaagtgggaggaccaggagaatgaaattgtgcagtatggcaggaacatgagctccatggcctacagcctgtacctgttcaccagaggagagggccccctgaagaccagccaggacctgatccaccagctggaggtgtttgctgctgagggcctgaagctgaccagctctgtgcaggccttcagcaagcagctgaaggatgatgacaagctgatgctgctgctggagatcaacaagctgatccccctgtgccaccagctgcagacagtgaccaagaccagcctgcagaacaaggtgttcctgaaggtggacaagtgcatcaccaagaccaggtccatgatggccctgctggtgcagctgctgagcctgtgctacaagctgctgaagaagctgcagatggagaacaacggctgggtgtctgtgaccaacaaggacaccatggacagcaagacctag

SEQ ID NO: 105882 - DNA, 552 bp, Artificial Sequence
  derived and/or modified sequence
atggccgccagccctggccctgctggggtgggcggggccggggctgtgtatggcagcggcagcagcggctttgccctggacagcggcctggagatcaagaccaggtctgtggagcagaccctgctgcccctggtgtcccagatcaccaccctcatcaaccacaaggacaacaccaagaagagtgacaagaccctgcaggccatccagagggtgggccaggccgtgaacctggccgtgggccgctttgtgaaggtgggggaggccatcgccaatgaaaactgggacctgaaggaggagatcaacatcgcctgcatcgaggccaagcaggccggggagaccatcgccgccctgacagacatcaccaacctgaaccacctggagagtgatggccagatcaccatcttcacagacaagacaggagtcatcaaggccgcccggctgctgctgagctctgtgaccaaggtgctgctgctggccgacagagtggtgatcaagcagatcatcaccagcaggaacaagaggctgaccatctacaacctgcggcacagctag

SEQ ID NO: 105883 - DNA, 2157 bp, Artificial Sequence
  derived and/or modified sequence
atggccgccagccctggccctgctggggtgggcggggccggggctgtgtatggcagcggcagcagcggctttgccctggacagcggcctggagatcaagaccaggtctgtggagcagaccctgctgcccctggtgtcccagatcaccaccctcatcaaccacaaggacaacaccaagaagagtgacaagaccctgcaggccatccagagggtgggccaggccgtgaacctggccgtgggccgctttgtgaaggtgggggaggccatcgccaatgaaaactgggacctgaaggaggagatcaacatcgcctgcatcgaggccaagcaggccggggagaccatcgccgccctgacagacatcaccaacctgaaccacctggagagtgatggccagatcaccatcttcacagacaagacaggagtcatcaaggccgcccggctgctgctgagctctgtgaccaaggtgctgctgctggccgacagagtggtgatcaagcagatcatcaccagcaggaacaaggtgctggccaccatggagcggctggagaaggtgaacagcttccaggagtttgtgcagatcttcagccagtttggaaatgagatggtggagtttgcccacctgagcggggaccggcagaatgacctgaaggatgagaagaagaaggccaagatggccgccgcccgggctgtgctggagaagtgcaccatgatgctgctgacagccagcaagacctgcctgcggcaccccaactgtgagagcgcccacaagaacaaggagggcgtgtttgacaggatgaaggtggccctggacaaggtgattgaaattgtgacagactgcaagcccaacggggagacagacatcagcagcatcagcatcttcaccggcatcaaggagttcaagatgaacatcgaggccctgcgggagaacctgtacttccagagcaaggagaacctgtctgtgaccctggaggtgatcctggagaggatggaggacttcacagattctgcctacaccagccatgagcaccgggagcgcatcctggagctgagcacccaggccaggatggagctgcagcagctgatctctgtgtggatccaggcccagagcaagaagaccaagagcattgctgaggagctggagctgagcatcctgaagatcagccacagcctgaatgagctgaagaaggagctgcacagcacagccacccagctggccgctgacctgctgaagtaccacgccgaccacgtggtgctgaaggccctgaagctgactggagtggagggcaacctggaggccctggccgagtatgcctgcaagctgtctgagcagaaggagcagctggtggagacctgccgcctgctgcggcacatcagcggcacagagcccctggagatcacctgcatccacgccgaggagaccttccaggtgacaggccagcagatcatctctgctgctgagaccctgaccctgcaccccagcagcaagatcgccaaggagaacctggatgtgttctgtgaggcctgggagagccagatcagtgacatgagcaccctgctgcgggagatcaatgatgtgtttgagggcagaagaggagagaagtatggctacctgagcctgcccaagcccatgaagaacaatgccaacctgaagagcctgaagccagacaagccagattctgaggagcaggccaagatcgccaagctgggcctgaagctgggcctgctgaccagtgatgctgactgtgaaattgagaagtgggaggaccaggagaatgaaattgtgcagtatggcaggaacatgagctccatggcctacagcctgtacctgttcaccagaggagagggccccctgaagaccagccaggacctgatccaccagctggaggtgtttgctgctgagggcctgaagctgaccagctctgtgcaggccttcagcaagcagctgaaggatgatgacaagctgatgctgctgctggagatcaacaagctgatccccctgtgccaccagctgcagacagtgaccaagaccagcctgcagaacaaggtgttcctgaaggtggacaagtgcatcaccaagaccaggtccatgatggccctgctggtgcagctgctgagcctgtgctacaagctgctgaagaagtctgagacccgctactag

SEQ ID NO: 105884 - DNA, 1953 bp, Artificial Sequence
  derived and/or modified sequence
atggccgccagccccggccccgccggcgtgggcggcgccggcgccgtttacggctccggcagctcaggtttcgctcttgacagtggcctggagatcaaaacacgatcggtggagcaaacgttgctgcccctggtgagccagataaccaccctgatcaaccataaggacaatacaaaaaaatcagataagaccctccaggcaatccaaagagtgggacaggctgttaatttagccgtggggcggtttgtgaaagtcggcgaagctatcgcaaatgagaattgggaccttaaggaggagattaacattgcctgtatagaggccaagcaggctggggagactatagctgcgctgacagatataaccaaccttaaccacctggagtcggatggccagattacaatctttaccgataaaactggagttatcaaggctgctaggcttcttctgagttccgtgacaaaggtgctgttattagcagatcgggtcgtgattaagcagataatcaccagccggaacaaagtgctagccacaatggagcgattggagaaagtaaactcctttcaagagtttgttcagatcttctcccagttcggtaacgagatggtagaattcgctcacctgtccggagaccgccagaacgatctcaaggacgaaaagaaaaaagctaagatggccgctgcccgtgcagttctagagaagtgtacaatgatgctactaactgcctccaagacttgccttcgacatccaaactgtgagtcagcacataaaaacaaggagggcgtcttcgataggatgaaggtcgctctggataaagtgatcgaaattgtgacggactgtaaacccaatggggagactgatatttccagcatttctatatttacaggaataaaggagtttaagatgaatatcgaggctttgcgcgagaacctgtattttcagagtaaggaaaaccttagtgtcacattggaagtgatactggaacgtatggaagactttacagacagcgcctatacttctcatgaacaccgtgagaggattcttgaactgagcacccaggcccgcatggagctgcaacagcttatttctgtgtggatacaggcgcagagcaaaaaaacgaaatctatcgccgaagaattggaattgagcatcctgaagatcagtcactcacttaatgaattaaagaaagaaatcatctctgccgcagaaaccctaactctccacccaagtagcaagattgccaaggagaatctggatgtcttttgcgaggcttgggaatctcagatatccgatatgtctacactgttgcgggagataaatgatgtgttcgagggccgacgcggggagaagtacggctatttatctctcccaaagcctatgaagaacaacgcaaacctgaaatcactaaagcccgacaagccagatagtgaagagcaggctaagatcgccaagctcgggctaaagctgggcctgctgacatctgacgccgattgcgaaattgaaaagtgggaggaccaagagaatgaaattgtgcaatacggacgaaatatgagtagtatggcatattcgctttacctctttaccagaggggagggtccactgaaaacctcccaggacctaatccatcagctggaggtgtttgccgccgaaggattgaaactgaccagtagcgtgcaggcattcagtaaacaacttaaagacgatgataagctgatgcttcttctggaaataaacaaactcattcccctttgccatcaactccagacagtgacaaagacaagtctccagaataaggtgtttctgaaagttgacaaatgtattaccaagaccaggtccatgatggcactgctggttcaactgctgagtctgtgctataaattgctcaaaaaactccaaatggagaataatggatgggtgtcagtcacaaataaggacacaatggatagcaaaacctag

SEQ ID NO: 105885 - DNA, 552 bp, Artificial Sequence
  derived and/or modified sequence
atggccgccagccccggccccgccggcgtgggcggcgccggcgccgtgtatggttccggctcgtcgggcttcgcgttggattcgggactcgagattaagacaaggagcgtagagcaaaccctgctgccactggtatcccagattactactttgatcaaccataaggacaacacaaaaaaaagcgacaagactctgcaggctatccaacgcgttggccaggcagttaacctggcagttgggaggttcgtgaaggtgggggaggccatagctaacgagaattgggatctcaaagaggaaataaacatcgcgtgcattgaagccaaacaggccggcgagaccattgccgccctgactgatattaccaacttgaaccacctagagtccgacggccaaatcactattttcaccgacaagactggcgtgattaaggcagccagactacttctgagttccgttacaaaagttctactgctcgcggacagagttgtaatcaaacagataatcacatcccgcaacaagcgtctcaccatctacaatctgcgccactcgtag

SEQ ID NO: 105886 - DNA, 2157 bp, Artificial Sequence
  derived and/or modified sequence
atggccgccagccccggccccgccggcgtgggcggcgccggcgccgtgtacggctctggaagcagcggttttgcactggactctggacttgagatcaagacaagaagtgtggagcagacactcctgccactggtatcacagattacaacattgatcaatcacaaggataacaccaaaaaatctgacaagaccctgcaggctatccagcgggtcggtcaggcagttaacctcgcagtggggcgctttgtcaaggtgggcgaggccatagctaacgagaactgggatctgaaggaagagatcaatatagcgtgcatcgaagcaaaacaggctggtgagacaatcgctgccttgactgatattactaacctgaaccacctggagtccgacggccagatcacgatttttaccgacaaaacaggagtcattaaagctgcacggttgttgttgtcttctgtcacaaaggttctgttactggcagatagggtcgtgattaaacagattattacaagccgcaacaaagttctcgctactatggaacggctggagaaagtcaattcatttcaggagttcgtgcagatttttagccagttcgggaatgagatggtggaatttgcgcacctcagcggtgatcggcagaacgacctgaaagacgagaagaagaaagcaaaaatggccgcagccagggctgtgttggaaaagtgtaccatgatgctgcttaccgcctcaaaaacatgcttgcggcatcctaactgtgagagcgcccataaaaacaaggagggggtttttgatcggatgaaggtcgccctcgacaaagtaatcgaaattgtcaccgattgcaagcccaatggcgagacggatatctcttcaatttccatcttcacaggaatcaaagaattcaaaatgaacatcgaagcactgagggaaaacttgtattttcagtccaaagagaacttgtccgttaccctcgaggtgatcttggaaagaatggaggacttcaccgatagtgcttacacgagccacgagcatagagagcggatcctagagttatcaacccaggcgcgcatggagctgcagcagttgattagtgtctggatccaggcacagtcaaaaaaaactaaatccattgcagaagagttggagctctctattctcaaaatttctcacagcctgaatgagcttaagaaggaactgcacagcaccgcaacccagttagccgccgacctgttgaagtatcacgccgatcatgtggttctgaaagctttgaagctgacaggcgtcgagggcaatcttgaagcactcgctgagtatgcctgcaaactgtctgaacagaaggagcagctggtcgaaacttgcaggctcctgagacacatcagtgggactgagccactcgagataacgtgtatccatgctgaggagacattccaggtaacaggacagcaaatcatttcagccgccgaaaccctcactcttcatccttcgtcgaaaatcgcgaaagaaaacctggatgtcttttgtgaagcgtgggagagtcaaatcagtgatatgagtaccttactgcgcgagatcaatgatgtcttcgaggggcgccggggggaaaagtatgggtatctgtcgctcccgaagcctatgaagaataacgctaatctgaaaagcttgaaacccgacaagcctgactcggaggagcaggcgaaaattgccaaattggggctcaaactgggcctgctgacatctgacgccgactgtgagattgagaagtgggaagatcaggagaacgagattgtgcagtatgggcgcaacatgtcgtccatggcctattctctatatctgtttaccaggggagagggtcccctaaaaacctctcaggacttgatccaccaactggaagtgttcgctgccgaggggctcaaactaacctcttcggtgcaagcattcagtaagcagctgaaggacgacgacaagctaatgcttttgctggaaatcaacaagctgattccgctctgtcaccagcttcaaacagtgaccaagacctctctgcagaacaaggtctttttaaaggtcgataagtgcattacaaagacacggtcaatgatggcccttctcgtgcagcttttgtctctttgctacaagttgctgaaaaaatccgagacgcgctactag

SEQ ID NO: 105887 - DNA, 1953 bp, Artificial Sequence
  derived and/or modified sequence
atggccgctagtccagggccagccggagtggggggagcgggagccgtttacggttctggctcctccgggttcgccttagatagtgggctggagatcaagactcgatcggtcgagcagaccctgctcccactggttagccagattaccaccttaatcaaccacaaagacaacactaaaaagtcagacaagacactgcaggccatccagagggtgggacaagctgtgaatcttgcagttggacgcttcgtaaaggtgggtgaagctattgccaacgaaaactgggacttaaaggaggagattaacattgcatgcattgaggctaagcaggctggagaaaccattgccgctctgacagatatcactaatctgaatcacttagagtccgacgggcaaataactatctttaccgacaaaactggggtgatcaaagcagctcgactcctcctcagctcagtgacaaaagttcttctgctcgccgacagagtcgtaattaaacaaatcatcacatcaaggaataaagttctggctaccatggaaaggctggaaaaggtcaactcatttcaggagtttgtccagatcttttcacagtttgggaacgaaatggtggagtttgcccacctgagcggagaccgccaaaacgatctgaaggatgaaaagaagaaggctaaaatggccgcagctcgcgctgtcctggaaaagtgcacaatgatgcttcttacagcaagcaagacctgcctgcggcacccgaattgcgagagcgcccacaaaaataaagagggtgttttcgatcggatgaaggtggccctcgacaaggtcattgagatagtgactgactgcaaacccaacggagagactgacatctcatctatctcgatcttcacaggtatcaaagaatttaagatgaacatcgaagctttaagggaaaatctgtacttccagtccaaagagaacctgagcgtcacacttgaggtgattttggaacggatggaggatttcacagatagtgcatacacctcccatgagcaccgtgaaagaattctcgaattaagtacccaggcacgtatggagcttcagcagctgatcagcgtctggatacaagcccagtccaagaaaaccaaaagcattgctgaggagttggaattgagcattctcaagatttctcactcgctcaatgaactgaaaaaggagatcattagcgccgcagaaacattgactttgcacccaagttccaaaatcgcaaaagaaaatctggatgttttttgcgaagcttgggagtcacaaatcagcgatatgagtaccctcctgcgcgagattaacgacgtgttcgaaggccgtcgaggggaaaaatacggatacctgagtctgccaaaaccaatgaaaaataatgccaatttgaagagcctgaagcccgataaaccagatagtgaagagcaggccaaaatcgcgaagttgggacttaaactgggacttttgaccagtgacgccgattgtgagatagaaaagtgggaggatcaggaaaacgagattgtgcaatatggtcgtaacatgtctagcatggcttattctctctacctcttcaccagaggcgaggggcctttgaaaacaagtcaagacctaatccatcaactcgaagtttttgccgcagagggcctgaagctgacgagttcggtgcaggcattctctaagcagctgaaagacgatgataagctgatgctgcttttggaaattaataaactgataccactatgtcatcagctccagacggtcacaaagacatccctacagaataaggtatttctgaaggtggacaagtgcattacaaaaacacggagtatgatggccctgctcgtgcaattgttatcactctgctataagttactgaaaaagctgcagatggaaaacaacgggtgggttagcgtgactaacaaggacactatggactccaaaacttag

SEQ ID NO: 105888 - DNA, 552 bp, Artificial Sequence
  derived and/or modified sequence
atggccgcttctccaggccctgcaggggttggaggagcaggggctgtgtacgggtccggttccagcggatttgcactcgattctggacttgagatcaagactcggagtgtggagcagaccctcctccccctagtcagtcagatcaccaccttgatcaaccataaggacaacacgaagaagagtgacaagaccttgcaggctatccagagggttggtcaggccgtaaacttagctgtgggcaggtttgttaaggtgggcgaagcaatcgccaacgaaaactgggacctcaaggaagaaataaatatcgcctgtattgaagcaaagcaggcaggagaaactatcgccgctttaaccgatatcaccaacctgaaccacctggagagcgatggccaaatcactatttttacggacaagaccggggtcatcaaagccgctcgcctgcttttatcctcagtgacaaaggtacttctgctggcagatagagtcgtcattaagcagatcatcacaagtaggaataagcgcctgacaatctataacctccgacactcttag

SEQ ID NO: 105889 - DNA, 2157 bp, Artificial Sequence
  derived and/or modified sequence
atggctgcgagcccgggacccgctggagtgggaggggcaggggctgtttacggatcagggagctccgggttcgccttagactcaggtctggagatcaagactcgctcagttgaacaaactctgctgccactggtgtcccagatcaccacgctcatcaaccacaaggataacaccaaaaaatcagacaagacgctacaggccatccagcgcgtcgggcaggctgttaacctagcggttggacgatttgtgaaagtgggagaagcaattgccaacgaaaactgggacctcaaagaggaaattaatatcgcctgcatcgaggccaaacaggcaggtgaaaccatcgcggctctcactgacattaccaacctgaaccaccttgaatcagatggccagattaccatttttactgacaaaactggggtcatcaaggcagcccgactgctgcttagctctgtgaccaaggtcttgttgctagccgacagggttgtgatcaaacagatcataacctcacgcaataaagtacttgccacgatggagagactagaaaaggtgaacagtttccaggagtttgtacagatttttagccagtttgggaacgagatggttgagttcgcgcatctcagcggagacagacagaatgacctgaaggacgaaaagaaaaaagcgaagatggccgctgcgagggccgtcctggagaaatgtactatgatgctgcttactgctagtaaaacctgtcttcgtcatcccaactgtgagagcgctcacaaaaacaaggaaggtgttttcgatcgcatgaaagtagccctggataaggttatcgagatcgttaccgattgtaagcccaatggagagactgacatctcctcgatatcaatctttaccgggattaaggagttcaagatgaatattgaggccctcagagaaaatctgtatttccagagcaaggaaaatctcagcgtgactttggaagttatcttagagcgcatggaggacttcactgattccgcctatacatcacacgagcacagagaacgcattcttgagctttctacacaggccagaatggaacttcagcaactgatcagtgtctggattcaggctcagagcaaaaaaacaaaatctatcgccgaagagctcgaattgtctattctgaaaatttcacattcactcaatgagctgaaaaaagagctgcacagcacagccacccagttggctgccgacctcctgaagtaccacgccgatcatgtggtcctcaaagctctgaaactgacaggagtggaagggaaccttgaggctttggcagagtacgcttgtaagctttctgagcagaaggagcagctggtggagacctgccgtctgctgcggcacatcagcggcacagagcctttagagattacctgcattcacgcagaagagaccttccaggttaccgggcagcagattatttccgcagctgagactctgaccctccacccaagctcaaaaatcgcaaaagagaacttagacgtgttttgcgaggcctgggagtcgcagatctctgacatgtcaacactgctccgggagattaacgatgtgttcgaggggagacgaggggagaaatacggttatcttagcctgcccaaaccaatgaaaaacaatgccaacctgaagtctctgaagcccgataaacctgattctgaagaacaggcgaagatagccaagttggggttgaaacttggactgctgacctctgatgccgactgcgaaatcgagaagtgggaagaccaggagaacgagattgtacagtatgggcgaaatatgtcgtctatggcctactctctctacttgttcactagaggggaggggccattaaaaacaagccaggacctgattcatcagcttgaagtgttcgcagccgagggcctgaagctcacctcctctgtgcaggccttctccaaacaattaaaagatgacgacaagctcatgttgctgctcgaaatcaacaagctcatacccttgtgccaccaattgcagacagttactaagacctccctgcagaataaggtattccttaaagtcgataagtgcattactaagacaagatctatgatggccctgctcgtgcaattgctttctctgtgctataagctactgaaaaaaagcgagacacggtactag

SEQ ID NO: 105890 - DNA, 2201 bp, Artificial Sequence
  derived and/or modified sequence
gactggcggcaggctcgccgcggcgcggagtcccggctgcgggatagaccgagggccatggccgcctctcccggacccgccggcgttggcggcgccggagcagtctacggctccggctcttcgggcttcgccctcgactcgggactggagatcaaaactcgctcggtggagcagacgctactcccgctggtttctcagatcaccacgcttattaatcataaagataataccaaaaagtctgataaaactctgcaagcaattcagcgtgtaggacaagctgtcaacttggcagttggaagatttgttaaagtaggagaagctatagccaatgaaaactgggatttgaaagaagaaataaatattgcttgtattgaagctaaacaagcaggagaaacaattgcagcacttacagacataaccaacttgaaccatctggaatctgatgggcagatcacaatttttacagacaaaacaggagtgataaaggctgcaagattacttctttcttcagtgacaaaagtgttgttgctggcagaccgagtagtcattaaacagataataacatcaagaaataaggttctcgcaactatggaaagactagagaaagtgaatagctttcaagagtttgtccaaatattcagtcaatttggaaatgaaatggtggagtttgcacatctgagtggagatagacaaaatgatttgaaagatgaaaagaaaaaggcaaaaatggcagcagctagggcagttcttgaaaagtgtacaatgatgcttctcacagcttcaaagacatgtctgaggcatcctaactgcgaatcagcccataaaaacaaagaaggagtatttgaccgtatgaaagtggcattggataaggtcattgaaattgtgactgactgtaaaccgaatggagagactgacatttcatctatcagtatttttactggaattaaggaattcaagatgaatattgaagctcttcgggagaatctttattttcagtccaaagagaacctttctgtgacattggaagtcatcttggagcgtatggaggactttactgattctgcctacaccagccatgagcacagagaacgcatcttggaactgtcaactcaggcgagaatggaactgcagcagttaatttctgtgtggattcaagctcaaagcaagaaaacaaaaagcatcgctgaagaactggaactcagtattttgaaaatcagtcacagtcttaatgaacttaagaaagaaataatttctgctgctgaaacattgacattgcatccatctagtaaaattgctaaagaaaacctagatgtattttgtgaagcttgggaatcccaaattagtgacatgtcaacactgctgagagaaatcaatgacgtgtttgaaggaagacgaggagagaagtatggctacctttcacttccaaagccaatgaagaataatgcaaacctgaaatcattaaagccagacaagcctgactctgaggagcaagccaagatagcaaagcttggacttaagctgggtttgctcacctctgacgctgactgcgaaattgagaagtgggaagatcaggagaatgagattgttcaatatggacggaacatgtccagtatggcctattctctgtatttatttactagaggagaggggccactgaaaacttcccaggatttaattcatcaactagaggtttttgctgcagagggtttaaagcttacttccagtgttcaagctttttcaaaacagctgaaagacgatgacaagcttatgcttctcctggaaataaacaagctaattcctctatgccaccagctccagacagtaactaagacttctttgcagaataaagtatttctaaaggttgacaagtgtattacgaagacaagatccatgatggctctcttagtccaacttctttcactttgttataaactgctgaagaagcttcagatggaaaataacggatgggtctcagttacaaataaggacactatggatagtaaaacttgagaagcttttggggtcagatctctggaacatcatgtgatgaagctgacatttttaaaaatcaaatgatcctttatcttttcagaaattcatcaattttataaagaaaacaatattgaaattttgctctattttctgatcatgaaactgattgtaaagctttttgacaactaataaatgtcttggtaattgct

SEQ ID NO: 105891 - DNA, 761 bp, Artificial Sequence
  derived and/or modified sequence
gggcgggtgggctgactggcggcaggctcgccgcggcgcggagtcccggctgcgggatagaccgagggccatggccgcctctcccggacccgccggcgttggcggcgccggagcagtctacggctccggctcttcgggcttcgccctcgactcgggactggagatcaaaactcgctcggtggagcagacgctactcccgctggtttctcagatcaccacgcttattaatcataaagataataccaaaaagtctgataaaactctgcaagcaattcagcgtgtaggacaagctgtcaacttggcagttggaagatttgttaaagtaggagaagctatagccaatgaaaactgggatttgaaagaagaaataaatattgcttgtattgaagctaaacaagcaggagaaacaattgcagcacttacagacataaccaacttgaaccatctggaatctgatgggcagatcacaatttttacagacaaaacaggagtgataaaggctgcaagattacttctttcttcagtgacaaaagtgttgttgctggcagaccgagtagtcattaaacagataataacatcaagaaataagagactaacaatatataacttaagacacagttaaatcagtggaaatgataattatccacaactacaaaatttctgtactcagagtccctaaatgttactgaataatctcaaaacttacagaacagatttaaactcttccagtccagaagttaatctctcagatgatggtcatg

SEQ ID NO: 105892 - DNA, 2520 bp, Artificial Sequence
  derived and/or modified sequence
ccgccgcctcgggcgggtgggctgactggcggcaggctcgccgcggcgcggagtcccggctgcgggatagaccgagggccatggccgcctctcccggacccgccggcgttggcggcgccggagcagtctacggctccggctcttcgggcttcgccctcgactcgggactggagatcaaaactcgctcggtggagcagacgctactcccgctggtttctcagatcaccacgcttattaatcataaagataataccaaaaagtctgataaaactctgcaagcaattcagcgtgtaggacaagctgtcaacttggcagttggaagatttgttaaagtaggagaagctatagccaatgaaaactgggatttgaaagaagaaataaatattgcttgtattgaagctaaacaagcaggagaaacaattgcagcacttacagacataaccaacttgaaccatctggaatctgatgggcagatcacaatttttacagacaaaacaggagtgataaaggctgcaagattacttctttcttcagtgacaaaagtgttgttgctggcagaccgagtagtcattaaacagataataacatcaagaaataaggttctcgcaactatggaaagactagagaaagtgaatagctttcaagagtttgtccaaatattcagtcaatttggaaatgaaatggtggagtttgcacatctgagtggagatagacaaaatgatttgaaagatgaaaagaaaaaggcaaaaatggcagcagctagggcagttcttgaaaagtgtacaatgatgcttctcacagcttcaaagacatgtctgaggcatcctaactgcgaatcagcccataaaaacaaagaaggagtatttgaccgtatgaaagtggcattggataaggtcattgaaattgtgactgactgtaaaccgaatggagagactgacatttcatctatcagtatttttactggaattaaggaattcaagatgaatattgaagctcttcgggagaatctttattttcagtccaaagagaacctttctgtgacattggaagtcatcttggagcgtatggaggactttactgattctgcctacaccagccatgagcacagagaacgcatcttggaactgtcaactcaggcgagaatggaactgcagcagttaatttctgtgtggattcaagctcaaagcaagaaaacaaaaagcatcgctgaagaactggaactcagtattttgaaaatcagtcacagtcttaatgaacttaagaaagaacttcatagtacagcgacacagctggcagcagatctattaaaataccatgctgatcatgtggttctaaaagcattaaaacttactggagtagaaggaaatttagaagctttggctgaatatgcctgtaaactctctgaacagaaagagcagcttgttgagacctgtcgattgttacgacacatatctgggacagaacctctggaaataacctgtatacatgcagaggagacatttcaggtgactggccaacagataatttctgctgctgaaacattgacattgcatccatctagtaaaattgctaaagaaaacctagatgtattttgtgaagcttgggaatcccaaattagtgacatgtcaacactgctgagagaaatcaatgacgtgtttgaaggaagacgaggagagaagtatggctacctttcacttccaaagccaatgaagaataatgcaaacctgaaatcattaaagccagacaagcctgactctgaggagcaagccaagatagcaaagcttggacttaagctgggtttgctcacctctgacgctgactgcgaaattgagaagtgggaagatcaggagaatgagattgttcaatatggacggaacatgtccagtatggcctattctctgtatttatttactagaggagaggggccactgaaaacttcccaggatttaattcatcaactagaggtttttgctgcagagggtttaaagcttacttccagtgttcaagctttttcaaaacagctgaaagacgatgacaagcttatgcttctcctggaaataaacaagctaattcctctatgccaccagctccagacagtaactaagacttctttgcagaataaagtatttctaaaggttgacaagtgtattacgaagacaagatccatgatggctctcttagtccaacttctttcactttgttataaactgctgaagaagagtgaaaccagatactaattgtcttaactctttccagcttcagatggaaaataacggatgggtctcagttacaaataaggacactatggatagtaaaacttgagaagcttttggggtcagatctctggaacatcatgtgatgaagctgacatttttaaaaatcaaatgatcctttatcttttcagaaattcatcaattttataaagaaaacaatattgaaattttgctctattttctgatcatgaaactgattgtaaagctttttgacaactaataaatgtcttggtaattgctagattct

SEQ ID NO: 105893 - DNA, 1953 bp, Artificial Sequence
  derived and/or modified sequence
atggccgccagccccggccccgccggcgtgggcggcgccggcgccgtgtacggcagcggcagcagcggcttcgccctggacagcggcctggagatcaagaccagaagcgtggagcagaccctgctgcccctggtgagccagatcaccaccctgatcaaccacaaggacaacaccaagaagagcgacaagaccctgcaggccatccagagagtgggccaggccgtgaacctggccgtgggcagattcgtgaaggtgggcgaggccatcgccaacgagaactgggacctgaaggaggagatcaacatcgcctgcatcgaggccaagcaggccggcgagaccatcgccgccctgaccgacatcaccaacctgaaccacctggagagcgacggccagatcaccatcttcaccgacaagaccggcgtgatcaaggccgccagactgctgctgagcagcgtgaccaaggtgctgctgctggccgacagagtggtgatcaagcagatcatcaccagcagaaacaaggtgctggccaccatggagagactggagaaggtgaacagcttccaggagttcgtgcagatcttcagccagttcggcaacgagatggtggagttcgcccacctgagcggcgacagacagaacgacctgaaggacgagaagaagaaggccaagatggccgccgccagagccgtgctggagaagtgcaccatgatgctgctgaccgccagcaagacctgcctgagacaccccaactgcgagagcgcccacaagaacaaggagggcgtgttcgacagaatgaaggtggccctggacaaggtgatcgagatcgtgaccgactgcaagcccaacggcgagaccgacatcagcagcatcagcatcttcaccggcatcaaggagttcaagatgaacatcgaggccctgagagagaacctgtacttccagagcaaggagaacctgagcgtgaccctggaggtgatcctggagagaatggaggacttcaccgacagcgcctacaccagccacgagcacagagagagaatcctggagctgagcacccaggccagaatggagctgcagcagctgatcagcgtgtggatccaggcccagagcaagaagaccaagagcatcgccgaggagctggagctgagcatcctgaagatcagccacagcctgaacgagctgaagaaggagatcatcagcgccgccgagaccctgaccctgcaccccagcagcaagatcgccaaggagaacctggacgtgttctgcgaggcctgggagagccagatcagcgacatgagcaccctgctgagagagatcaacgacgtgttcgagggcagaagaggcgagaagtacggctacctgagcctgcccaagcccatgaagaacaacgccaacctgaagagcctgaagcccgacaagcccgacagcgaggagcaggccaagatcgccaagctgggcctgaagctgggcctgctgaccagcgacgccgactgcgagatcgagaagtgggaggaccaggagaacgagatcgtgcagtacggcagaaacatgagcagcatggcctacagcctgtacctgttcaccagaggcgagggccccctgaagaccagccaggacctgatccaccagctggaggtgttcgccgccgagggcctgaagctgaccagcagcgtgcaggccttcagcaagcagctgaaggacgacgacaagctgatgctgctgctggagatcaacaagctgatccccctgtgccaccagctgcagaccgtgaccaagaccagcctgcagaacaaggtgttcctgaaggtggacaagtgcatcaccaagaccagaagcatgatggccctgctggtgcagctgctgagcctgtgctacaagctgctgaagaagctgcagatggagaacaacggctgggtgagcgtgaccaacaaggacaccatggacagcaagacctag

SEQ ID NO: 105894 - DNA, 552 bp, Artificial Sequence
  derived and/or modified sequence
atggccgccagccccggccccgccggcgtgggcggcgccggcgccgtgtacggcagcggcagcagcggcttcgccctggacagcggcctggagatcaagaccagaagcgtggagcagaccctgctgcccctggtgagccagatcaccaccctgatcaaccacaaggacaacaccaagaagagcgacaagaccctgcaggccatccagagagtgggccaggccgtgaacctggccgtgggcagattcgtgaaggtgggcgaggccatcgccaacgagaactgggacctgaaggaggagatcaacatcgcctgcatcgaggccaagcaggccggcgagaccatcgccgccctgaccgacatcaccaacctgaaccacctggagagcgacggccagatcaccatcttcaccgacaagaccggcgtgatcaaggccgccagactgctgctgagcagcgtgaccaaggtgctgctgctggccgacagagtggtgatcaagcagatcatcaccagcagaaacaagagactgaccatctacaacctgagacacagctag

SEQ ID NO: 105895 - DNA, 2157 bp, Artificial Sequence
  derived and/or modified sequence
atggccgccagccccggccccgccggcgtgggcggcgccggcgccgtgtacggcagcggcagcagcggcttcgccctggacagcggcctggagatcaagaccagaagcgtggagcagaccctgctgcccctggtgagccagatcaccaccctgatcaaccacaaggacaacaccaagaagagcgacaagaccctgcaggccatccagagagtgggccaggccgtgaacctggccgtgggcagattcgtgaaggtgggcgaggccatcgccaacgagaactgggacctgaaggaggagatcaacatcgcctgcatcgaggccaagcaggccggcgagaccatcgccgccctgaccgacatcaccaacctgaaccacctggagagcgacggccagatcaccatcttcaccgacaagaccggcgtgatcaaggccgccagactgctgctgagcagcgtgaccaaggtgctgctgctggccgacagagtggtgatcaagcagatcatcaccagcagaaacaaggtgctggccaccatggagagactggagaaggtgaacagcttccaggagttcgtgcagatcttcagccagttcggcaacgagatggtggagttcgcccacctgagcggcgacagacagaacgacctgaaggacgagaagaagaaggccaagatggccgccgccagagccgtgctggagaagtgcaccatgatgctgctgaccgccagcaagacctgcctgagacaccccaactgcgagagcgcccacaagaacaaggagggcgtgttcgacagaatgaaggtggccctggacaaggtgatcgagatcgtgaccgactgcaagcccaacggcgagaccgacatcagcagcatcagcatcttcaccggcatcaaggagttcaagatgaacatcgaggccctgagagagaacctgtacttccagagcaaggagaacctgagcgtgaccctggaggtgatcctggagagaatggaggacttcaccgacagcgcctacaccagccacgagcacagagagagaatcctggagctgagcacccaggccagaatggagctgcagcagctgatcagcgtgtggatccaggcccagagcaagaagaccaagagcatcgccgaggagctggagctgagcatcctgaagatcagccacagcctgaacgagctgaagaaggagctgcacagcaccgccacccagctggccgccgacctgctgaagtaccacgccgaccacgtggtgctgaaggccctgaagctgaccggcgtggagggcaacctggaggccctggccgagtacgcctgcaagctgagcgagcagaaggagcagctggtggagacctgcagactgctgagacacatcagcggcaccgagcccctggagatcacctgcatccacgccgaggagaccttccaggtgaccggccagcagatcatcagcgccgccgagaccctgaccctgcaccccagcagcaagatcgccaaggagaacctggacgtgttctgcgaggcctgggagagccagatcagcgacatgagcaccctgctgagagagatcaacgacgtgttcgagggcagaagaggcgagaagtacggctacctgagcctgcccaagcccatgaagaacaacgccaacctgaagagcctgaagcccgacaagcccgacagcgaggagcaggccaagatcgccaagctgggcctgaagctgggcctgctgaccagcgacgccgactgcgagatcgagaagtgggaggaccaggagaacgagatcgtgcagtacggcagaaacatgagcagcatggcctacagcctgtacctgttcaccagaggcgagggccccctgaagaccagccaggacctgatccaccagctggaggtgttcgccgccgagggcctgaagctgaccagcagcgtgcaggccttcagcaagcagctgaaggacgacgacaagctgatgctgctgctggagatcaacaagctgatccccctgtgccaccagctgcagaccgtgaccaagaccagcctgcagaacaaggtgttcctgaaggtggacaagtgcatcaccaagaccagaagcatgatggccctgctggtgcagctgctgagcctgtgctacaagctgctgaagaagagcgagaccagatactag

SEQ ID NO: 105896 - protein, 724 aa, Artificial Sequence
  derived and/or modified sequence
MESGRGSSTPPGPIAALGMPDTGPGSSSLGKLQALPVGPRAHCGDPVSLAAAGDGSPDIGPTGELSGSLKIPNRDSGIDSPSSSVAGENFPCEEGLEAGPSPTVLGAHAEMALDSQVPKVTPQEEADSDVGEEPDSENTPQKADKDAGLAQHSGPQKLLHIAQELLHTEETYVKRLHLLDQVFCTRLTDAGIPPEVIMGIFSNISSIHRFHGQFLLPELKTRITEEWDTNPRLGDILQKLAPFLKMYGEYVKNFDRAVGLVSTWTQRSPLFKDVVHSIQKQEVCGNLTLQHHMLEPVQRVPRYELLLKDYLKRLPQDAPDRKDAERSLELISTAANHSNAAIRKVEKMHKLLEVYEQLGGEEDIVNPANELIKEGQIQKLSAKNGTPQDRHLFLFNSMILYCVPKLRLMGQKFSVREKMDISGLQVQDIVKPNTAHTFIITGRKRSLELQTRTEEEKKEWIQIIQATIEKHKQNSETFKAFGGAFSQDEDPSLSPDMPITSTSPVEPVVTTEGSSGAAGLEPRKLSSKTRRDKEKQSCKSCGETFNSITKRRHHCKLCGAVICGKCSEFKAENSRQSRVCRDCFLTQPVAPESTETPTADPQPSLLCGPLRLSESGETWSEVWAAIPMSDPQVLHLQGGSQDGRLPRTIPLPSCKLSVPDPEERLDSGHVWKLQWAKQSWYLSASSAELQQQWLETLSTAAHGDTAQDSPGALQLQVPMGAAAP

SEQ ID NO: 105897 - DNA, 3221 bp, Artificial Sequence
  derived and/or modified sequence
attccctgctgggcccctcctccctgaagatctacacagcagatctactcacaaaagtccacccagcagaagcaggaggatggtggttgtgggtcctctgtgagcagccctgttaacctttaaaccagcacggccgccgcagctgtgagcctagcacctgatcagtggagagctgtggattgcatgtttgtttgccattgcccccgccaccctgcaagttgcaccttctagaatcagcaagccaagctcctctcacccagcgtaatgatgcggaaatgcaaatgcaccatcatgttgtgacccatattgcgaaaattagaaaaaaggaagttgtgtttcgctattgcacgaagttcagcccagaggagaaactcgctcgccttcagaagacagtacctcctaaatggctctactttgaacctgctgggcaaggaagagattttcaaggaaaccatctaccgtgtgcaagctcctgccggccaaccccagaccccagcacggagccaggcgcctgtgcccgccgaccctcagcatcctcctcagaaaggctggtggcatcaggaagcccctggccagcctccacctgagcccagtgagctcagctttaaggatggagtcaggcagggggtcctcaacccctccaggacccattgctgccctagggatgccagacactgggcctggcagttcctccctagggaagcttcaggcgctccctgttgggcccagagcccactgtggggaccctgtcagcctggctgcagcaggggacggctctccagacataggccccacgggagagctgagtggtagcttaaagatccccaaccgggacagcgggatcgacagtccctcctccagtgtggctggagagaactttccctgcgaggagggcttggaggctggcccaagccccactgtactgggggcgcacgcagagatggccctggacagccaggtcccgaaggtcaccccccaggaggaggcggacagcgacgtgggtgaggaacctgactctgagaacaccccccagaaggctgacaaggatgccggcctggcccagcactctggcccccagaagcttctccacattgcccaggagctcctgcacaccgaggagacctatgtgaagcggctgcacctgctggaccaggttttctgcaccaggctgacggatgcggggatccctccagaagtcatcatgggcatattctctaacatctcctccatccaccgcttccacgggcagttcctgctgccggagctgaagacgcggatcacggaggagtgggacacaaacccacggctcggggacatcctgcagaagctggccccattcctgaagatgtacggcgagtatgtcaagaactttgaccgagccgtagggctggtgagcacgtggacccagcgctccccactgtttaaagacgtcgtccacagcatccagaagcaggaggtatgcgggaacctgacgctgcagcaccacatgctggagcccgtgcagagggtcccccggtacgagctgctgctcaaggactatctgaagaggctcccgcaggacgccccagaccggaaggatgcggagaggtccttggagctcatctccacagccgccaaccactccaatgctgccattcggaaagtggagaaaatgcacaagctcttggaggtgtacgagcagctgggtggggaagaagacattgtcaacccggccaatgaactgatcaaggagggccaaatccagaaactgtcagccaagaacggcaccccccaggaccgccacctcttcctgttcaacagcatgatcctttactgtgtgcccaagctgcggctcatgggccagaagttcagcgtccgggagaagatggacatctcaggcctccaggtgcaggatatcgtcaagccaaacacagcacatacattcatcataacaggaagaaaaaggtccctggagctgcagacgcggacagaggaagagaagaaagaatggattcagatcatccaggccaccatcgagaagcacaaacagaacagcgaaaccttcaaggcttttggtggcgccttcagccaggatgaggaccccagcctctctccagacatgcctatcacgagcaccagccctgtggagcctgtggtgaccaccgaaggcagttcgggtgcagcagggctcgagcccagaaaactatcctctaagaccagacgtgacaaggagaagcagagctgtaagagctgtggtgagaccttcaactccatcaccaagaggaggcatcactgcaagctgtgtggggcggtcatctgtgggaagtgctccgagttcaaggccgagaacagccggcagagccgtgtctgcagagattgtttcctgacacagccagtggcccctgagagcacagagacacccactgcagacccccagcccagcctgctctgcggccccctgcggctgtcagagagcggtgagacctggagcgaggtgtgggccgccatccccatgtcagatccccaggtgctgcacctgcagggaggcagccaggacggccggctgccccgcaccatccctctccccagctgcaaactgagtgtgccggaccctgaggagaggctggactcggggcatgtgtggaagctgcagtgggccaagcagtcctggtacctgagcgcctcctccgcagagctgcagcagcagtggctggaaaccctaagcactgctgcccatggggacacggcccaggacagcccgggggccctgcagcttcaggtccctatgggcgcagctgctccgtgagctgagtctcccactgccctgcacaccaccacattggacctgtgctgtcctgggaggtggtgttggaggccccatgaagagcgccctggactgctgagggtgggccaacagcccagagctcaggacacttggctttggggggaaggaaactgaggcccagagaggggcaaccactggccaagggtcacccagcaagttttggctaagagcctggcctccagccccagcagtgtggcccagagcaggggccgactgccaaagtaaccatcatccatatgggccgtgtggtgatgctggcccggaaggcagaaagaggcagcatgggcactgccagggacagccacatcctgctggtctgcagcgtggtccaccccgcctctgcccagcctgtctacaccgtgtgagctgaatcgtgacttgcttcccacctcctttc

SEQ ID NO: 105898 - DNA, 2175 bp, Artificial Sequence
  derived and/or modified sequence
atggaatcaggccgtggaagtagcactcctcccggacccattgccgcattagggatgcctgataccggacctgggtccagctcgctgggaaagctgcaggctttgcctgtaggacctcgagcgcactgcggagacccggtgtctctggctgccgccggggatggtagcccagatatcggtcccactggtgagctttctgggtctctcaagattcccaatcgggactccggtattgactcccctagctcatcagtagccggtgagaactttccctgtgaggagggcctagaggccggtccttcccctaccgtgctgggggcacatgctgagatggcactagacagccaagtccccaaagtcactccacaggaagaggctgactccgacgtcggcgaggaacctgactccgaaaacacgcctcagaaagccgataaagacgccggcctggctcagcacagcggcccacagaaactgctacatatagcacaggaactgctgcacactgaggagacttatgttaagcgcctccatcttctggatcaggttttctgtaccaggctgactgatgccggcattcctccggaagtgattatgggaatttttagcaacatctctagcatccatcggttccatgggcagtttttgctgccggagctgaagacacgcatcaccgaagagtgggatacaaatcccaggctgggggacatcctccagaagcttgccccatttttgaaaatgtacggtgagtacgtaaagaacttcgatcgggcggtggggctggtgagtacttggacacaaagatccccacttttcaaggatgtcgttcattctattcagaagcaggaggtttgtggaaatttaaccctccagcaccacatgttggagcctgtacagagagttccacggtatgagctgctgctcaaggactatctaaagaggctccctcaggacgcaccagaccgcaaagacgccgagaggtctctcgagttaataagcactgccgcaaatcactcaaatgccgccatccggaaagtcgagaaaatgcataagctgttagaggtctacgaacaactaggcggtgaggaagacatcgtgaatcctgcgaatgagcttataaaggaaggccagattcagaagctgtctgcaaagaatggaaccccacaggatagacatctgtttctttttaactcaatgattctttactgcgtgccaaagctgcggttgatgggacaaaagttcagcgtgcgggaaaaaatggatatctcgggtctccaggtccaggatattgttaaaccgaacaccgcgcatacatttatcattacagggcggaagcggtccctggagttgcaaacaagaaccgaagaagagaaaaaggaatggatacagatcatccaggcgacaatagagaaacacaagcagaacagcgagacatttaaagcatttggtggcgccttctcacaggacgaagatccaagtctgagtcccgacatgccgatcacatctacctctcccgtggagccggtggtgactacagaggggtctagtggagcggctggactggagcctaggaaattgtctagcaaaacaaggcgcgataaggagaagcagtcctgtaaaagttgtggagagacatttaattcaataactaagaggcggcaccactgcaaactgtgcggggctgttatttgtggaaaatgttcagaatttaaggcagaaaactcaaggcaaagccgtgtttgccgagactgttttctgacccaaccggttgcccccgaatctactgagacacctacagctgatccgcagcctagtctgctgtgtggtccgcttcgcctgtccgaaagcggggaaacctggagcgaagtctgggccgccattcccatgtctgatccccaagtgttacatctgcaaggaggctctcaagacggtcggctacctaggacgataccattaccttcttgcaaattgtctgtcccagacccggaggagcggctggacagcggccacgtgtggaaacttcagtgggccaaacagtcttggtacttgagcgcatcgagcgccgaacttcaacagcagtggctggaaacactgtccacagcagctcacggagacacagcacaggatagccccggcgcacttcagttgcaggtccctatgggagcagcggccccttag

SEQ ID NO: 105899 - DNA, 2175 bp, Artificial Sequence
  derived and/or modified sequence
atggagagcggccggggcagcagcaccccacctggccccatcgccgccctgggcatgccagacaccggccctggcagcagcagcctgggcaagctgcaggccctgcctgtgggcccccgggcccactgtggggaccctgtgtccctggccgctgctggagatggcagcccagacatcggccccaccggggagctgagcggcagcctgaagatccccaacagagacagcggcatcgacagccccagcagctctgtggccggggagaacttcccctgtgaggagggcctggaggccggccccagccccaccgtgctgggcgcccatgctgagatggccctggacagccaggtgcccaaggtgaccccccaggaggaggccgacagtgatgtgggggaggagccagacagcgagaacaccccccagaaggctgacaaggatgctggcctggcccagcacagcggcccccagaagctgctgcacatcgcccaggagctgctgcacacagaggagacctacgtgaagaggctgcacctgctggaccaggtgttctgcacccggctgacagatgctggcatccccccagaggtgatcatgggcatcttcagcaacatcagcagcatccaccgcttccacggccagttcctgctgcctgagctgaagacccgcatcacagaggagtgggacaccaacccccggctgggggacatcctgcagaagctggcccccttcctgaagatgtatggagaatatgtgaagaactttgacagagctgtgggcctggtgtccacctggacccagaggagccccctcttcaaggatgtggtgcacagcatccagaagcaggaggtgtgtggcaacctgaccctgcagcaccacatgctggagcctgtgcagagggtgcccaggtatgagctgctgctgaaggactacctgaagaggctgccccaggatgccccagacaggaaggatgctgagaggagcctggagctgatcagcacagctgccaaccacagcaatgctgccatcaggaaggtggagaagatgcacaagctgctggaggtgtatgagcagctgggcggggaggaggacatcgtgaacccagccaatgaactcatcaaggagggccagatccagaagctgagcgccaagaatggcaccccccaggacagacacctgttcctgttcaacagcatgatcctgtactgtgtgcccaagctgcggctgatgggccagaagttctctgtgcgggagaagatggacatcagcggcctgcaggtgcaggacatcgtgaagcccaacacagcccacaccttcatcatcactggaaggaagaggagcctggagctgcagaccaggacagaggaggagaagaaggagtggatccagatcatccaggccaccatcgagaagcacaagcagaacagcgagaccttcaaggcctttggaggagccttcagccaggatgaggaccccagcctgagcccagacatgcccatcaccagcaccagccctgtggagcctgtggtgaccacagagggcagcagtggagctgctggcctggagcccaggaagctgagcagcaagacccggcgggacaaggagaagcagagctgcaagagctgtggggagaccttcaacagcatcaccaagagaagacaccactgcaagctgtgtggggccgtcatctgtgggaaatgttctgagttcaaggccgagaacagccggcagagccgggtgtgccgggactgcttcctgacccagcctgtggcccctgagagcacagagacccccacagctgacccccagcccagcctgctgtgtggccccctgcggctgtctgagagcggggagacctggagcgaggtgtgggccgccatccccatgtctgacccccaggtgctgcacctgcagggcggcagccaggacggccgcctgcccaggaccatccccctgcccagctgcaagctgtctgtgcctgaccctgaggagcggctggacagcggccacgtgtggaagctgcagtgggccaagcagagctggtacctgagcgccagcagcgctgagctgcagcagcagtggctggagaccctgagcacagctgcccacggggacacagcccaggacagccctggggccctgcagctgcaggtgcccatgggcgccgccgccccctag

SEQ ID NO: 105900 - DNA, 2175 bp, Artificial Sequence
  derived and/or modified sequence
atggagagcggccggggcagcagcaccccccccggccccatcgccgccttgggcatgcctgatactgggccgggtagctcatcgttaggaaaactgcaggcccttcccgtgggaccacgcgcacattgcggcgacccagtctctctggccgcagcgggagatgggtctccagatatagggcccaccggtgaacttagcggatctcttaaaatccccaatcgcgactcggggatcgactctccatcttcctctgtcgcaggcgagaatttcccctgcgaggaaggactggaagcaggcccatcacccaccgttctgggggcccacgcggaaatggcgctcgacagtcaggttccaaaagttacccctcaggaagaggccgactccgacgttggggaggagcccgactctgaaaacacaccacagaaggccgataaagatgctggcctggcccaacactctggtcctcagaaactgctgcatattgcccaggagctgctgcataccgaggaaacctatgtcaagagactgcacctcctggatcaggtgttttgcactaggctaaccgacgctgggatcccccccgaggtcataatgggcattttcagcaacatcagctctattcatcgcttccacggccagtttttgcttccagaactgaagacccgaattaccgaagaatgggacaccaatccacggctgggagacatcctccagaagttggctcctttcctgaaaatgtacggggagtacgttaagaactttgatcgggccgtggggctagtctccacctggacccagagatcaccactgtttaaggacgtcgtccactctatccaaaagcaggaagtgtgcggaaacctgactctccagcaccacatgttggagcccgtgcaaagggtccccagatacgaacttctgctgaaagattacctgaaacggttgccacaggacgctcctgaccgtaaggacgccgaaagatctttggagctgatttccaccgcagcgaatcactccaatgcagcaatccggaaggtggagaagatgcataaattgctcgaggtatacgagcaactggggggagaagaagacattgtgaaccccgccaacgaattgatcaaggagggacagattcaaaagttgtctgcaaaaaacggcacaccccaggataggcatctgtttctgtttaattccatgatactgtattgcgttcctaagctgcgtctgatggggcagaagttttctgttcgggaaaagatggacatctccggtcttcaagttcaggatattgtgaaaccaaacacagcacacacattcatcatcactggaaggaaacgctcactagaactccagactagaaccgaggaagagaagaaggaatggatacagataatacaggctaccatcgagaaacataaacagaactctgagacctttaaagcattcggcggagcattctcccaggacgaggacccctccctgtctccggacatgcctattactagcacctcccccgtggagcccgtagtgacaactgaaggttcatcgggagcagccgggcttgagcccaggaagctttcgagcaagacaaggagagacaaggagaagcagagttgtaaaagctgcggggagacgttcaacagcattacaaagagacgccaccattgcaagttgtgcggtgcagtcatatgtggcaaatgtagcgagttcaaggcagagaacagtagacaaagcagagtctgtcgcgattgctttcttacacagcctgtcgccccggagtcaactgagactccgacagctgatcctcaaccttcgttattatgcggcccccttagactgagcgaatcaggcgagacctggtcagaagtgtgggccgccatccctatgtccgacccacaggtgctgcatctgcagggagggtcccaggatggccggcttccacgaaccattcccttacccagctgcaagctgtcggtgcccgatccagaagagagactggatagtggacacgtctggaagctccagtgggccaagcagagctggtatctcagcgctagctcagcagaactgcagcagcagtggcttgagaccctctctactgcagcccacggggatactgcccaggactcacctggtgcgctgcagctacaagtgcctatgggtgcagcggcaccttag

SEQ ID NO: 105901 - DNA, 2175 bp, Artificial Sequence
  derived and/or modified sequence
atggaaagcgggagaggcagctccactcctcccggacctatagccgctttgggtatgccagacaccggacccggttcctccagcctggggaaattacaggcccttccagtggggccaagagctcactgtggggaccctgtctctctggcagccgctggcgatggcagccctgacatcggaccaacgggagaattaagcggttcactgaaaattcccaacagagacagtggtattgattctccgtcctcttccgtggctggagaaaacttcccctgtgaagagggtctggaggccggaccctctcccacagtgctcggcgctcatgccgagatggccttggacagtcaggtgccaaaagtgactccacaggaggaggctgacagcgacgtgggcgaggagcccgatagtgagaacacgccacagaaggctgataaggatgcaggtctggcccagcactctggccctcagaagttattgcatattgcgcaggagctgctgcacactgaagagacttacgttaagaggctccacctgctcgatcaggtgttttgcactcgcctgactgatgccggtataccccctgaggtgattatgggcatcttttctaacatctctagtatccaccgattccatggccagtttctgctgccagagttgaaaactcgtatcacggaggaatgggacactaacccgaggctcggagacatactgcaaaagttggccccattcctaaagatgtatggagaatatgtgaagaacttcgatcgcgcagtgggcctagtcagtacatggacacagcgaagccctttgttcaaagacgtggttcactcaatccaaaagcaagaggtgtgtgggaatctgactctgcagcaccatatgcttgagccggtgcagcgtgtgccaagatacgaactcctcctcaaagattacttgaaacgacttccccaggatgccccagatagaaaagatgcagaaaggtctctggaacttatcagcaccgcagccaaccattccaacgccgcaatccggaaagtggagaaaatgcacaaattattggaggtctatgagcagctgggaggagaggaggacattgtgaatccagccaatgagctgataaaagaggggcagatccagaagctgagcgctaaaaatggtacacctcaggatcgtcatctattcttgttcaattcgatgattctgtactgtgtgccgaaacttcggttaatgggccaaaagttcagcgttcgagaaaaaatggatatctccggtctgcaggtccaagatatcgtgaaacctaatacagcccatacctttattattacaggcaggaagcgttccctggagctgcaaacaaggacagaagaagagaagaaagaatggatccaaataatacaggccacaattgaaaaacataagcaaaattctgaaactttcaaagcttttggcggtgcctttagccaggacgaagatcctagtctgtcccctgacatgccaatcacatccacctctcccgtagagccagtcgtgactaccgaaggctccagtggcgctgccggtctggaacctcgcaagctgtcctcaaaaacccgcagggacaaagagaaacaatcctgtaagagttgcggcgaaacctttaacagcattacaaaaaggagacaccactgcaaactgtgtggagcagtgatctgcgggaaatgcagcgagttcaaagccgagaacagcaggcaatctcgcgtctgtcgagattgtttcttaacacagccggtggctcctgagtctacagagacccccaccgcagacccacagcccagcttactttgcgggccactcagacttagtgagagcggagaaacttggtccgaagtgtgggctgctatacctatgagcgatccacaggtgctccatttacaaggtggaagccaggacggcaggcttcccagaaccatccccctcccttcctgcaagctaagcgtgcctgatccagaggagagactagatagcggacatgtttggaagctgcagtgggccaagcagagctggtacctcagcgcaagctcggccgaactgcaacaacagtggttggaaacattgagcacagccgctcacggggatactgcccaggactccccaggcgctctgcagctgcaagtgcccatgggagctgcagcgccttag

SEQ ID NO: 105902 - DNA, 2175 bp, Artificial Sequence
  derived and/or modified sequence
atggagagcggcagaggcagcagcaccccccccggccccatcgccgccctgggcatgcccgacaccggccccggcagcagcagcctgggcaagctgcaggccctgcccgtgggccccagagcccactgcggcgaccccgtgagcctggccgccgccggcgacggcagccccgacatcggccccaccggcgagctgagcggcagcctgaagatccccaacagagacagcggcatcgacagccccagcagcagcgtggccggcgagaacttcccctgcgaggagggcctggaggccggccccagccccaccgtgctgggcgcccacgccgagatggccctggacagccaggtgcccaaggtgaccccccaggaggaggccgacagcgacgtgggcgaggagcccgacagcgagaacaccccccagaaggccgacaaggacgccggcctggcccagcacagcggcccccagaagctgctgcacatcgcccaggagctgctgcacaccgaggagacctacgtgaagagactgcacctgctggaccaggtgttctgcaccagactgaccgacgccggcatcccccccgaggtgatcatgggcatcttcagcaacatcagcagcatccacagattccacggccagttcctgctgcccgagctgaagaccagaatcaccgaggagtgggacaccaaccccagactgggcgacatcctgcagaagctggcccccttcctgaagatgtacggcgagtacgtgaagaacttcgacagagccgtgggcctggtgagcacctggacccagagaagccccctgttcaaggacgtggtgcacagcatccagaagcaggaggtgtgcggcaacctgaccctgcagcaccacatgctggagcccgtgcagagagtgcccagatacgagctgctgctgaaggactacctgaagagactgccccaggacgcccccgacagaaaggacgccgagagaagcctggagctgatcagcaccgccgccaaccacagcaacgccgccatcagaaaggtggagaagatgcacaagctgctggaggtgtacgagcagctgggcggcgaggaggacatcgtgaaccccgccaacgagctgatcaaggagggccagatccagaagctgagcgccaagaacggcaccccccaggacagacacctgttcctgttcaacagcatgatcctgtactgcgtgcccaagctgagactgatgggccagaagttcagcgtgagagagaagatggacatcagcggcctgcaggtgcaggacatcgtgaagcccaacaccgcccacaccttcatcatcaccggcagaaagagaagcctggagctgcagaccagaaccgaggaggagaagaaggagtggatccagatcatccaggccaccatcgagaagcacaagcagaacagcgagaccttcaaggccttcggcggcgccttcagccaggacgaggaccccagcctgagccccgacatgcccatcaccagcaccagccccgtggagcccgtggtgaccaccgagggcagcagcggcgccgccggcctggagcccagaaagctgagcagcaagaccagaagagacaaggagaagcagagctgcaagagctgcggcgagaccttcaacagcatcaccaagagaagacaccactgcaagctgtgcggcgccgtgatctgcggcaagtgcagcgagttcaaggccgagaacagcagacagagcagagtgtgcagagactgcttcctgacccagcccgtggcccccgagagcaccgagacccccaccgccgacccccagcccagcctgctgtgcggccccctgagactgagcgagagcggcgagacctggagcgaggtgtgggccgccatccccatgagcgacccccaggtgctgcacctgcagggcggcagccaggacggcagactgcccagaaccatccccctgcccagctgcaagctgagcgtgcccgaccccgaggagagactggacagcggccacgtgtggaagctgcagtgggccaagcagagctggtacctgagcgccagcagcgccgagctgcagcagcagtggctggagaccctgagcaccgccgcccacggcgacaccgcccaggacagccccggcgccctgcagctgcaggtgcccatgggcgccgccgccccctag

SEQ ID NO: 105903 - protein, 374 aa, Artificial Sequence
  derived and/or modified sequence
MACSRPPSQCEPTSLPPGPPAGRRHLPLSRRRREMSSNKEQRSAVFVILFALITILILYSSNSANEVFHYGSLRGRSRRPVNLKKWSITDGYVPILGNKTLPSRCHQCVIVSSSSHLLGTKLGPEIERAECTIRMNDAPTTGYSADVGNKTTYRVVAHSSVFRVLRRPQEFVNRTPETVFIFWGPPSKMQKPQGSLVRVIQRAGLVFPNMEAYAVSPGRMRQFDDLFRGETGKDREKSHSWLSTGWFTMVIAVELCDHVHVYGMVPPNYCSGPASSACPTTTTSPRGRTNVSPTSRMSTVARATTTASSPRKGSSHRGPSCMASPSPTPPGPRPPSLWDLRRVRGEAASAQPLGQGPSSGQSRLAGVSPSQSGP

SEQ ID NO: 105904 - protein, 200 aa, Artificial Sequence
  derived and/or modified sequence
MSSNKEQRSAVFVILFALITILILYSSNSANEVFHYGSLRGRSRRPVNLKKWSITDGYVPILGNKTLPSRCHQCVIVSSSSHLLGTKLGPEIERAECTIRMNDAPTTGYSADVGNKTTYRVVAHSSVFRVLRRPQEFVNRTPETVFIFWGPPSKMQKPQGSLVRVIQRAGLVFPNMEAYAVSPGRMRQFDDLFRGETGKD

SEQ ID NO: 105905 - DNA, 1125 bp, Artificial Sequence
  derived and/or modified sequence
atggcctgcagcagaccccccagccagtgcgagcccaccagcctgccccccggcccccccgccggcagaagacacctgcccctgagcagaagaagaagagagatgagcagcaacaaggagcagagaagcgccgtgttcgtgatcctgttcgccctgatcaccatcctgatcctgtacagcagcaacagcgccaacgaggtgttccactacggcagcctgagaggcagaagcagaagacccgtgaacctgaagaagtggagcatcaccgacggctacgtgcccatcctgggcaacaagaccctgcccagcagatgccaccagtgcgtgatcgtgagcagcagcagccacctgctgggcaccaagctgggccccgagatcgagagagccgagtgcaccatcagaatgaacgacgcccccaccaccggctacagcgccgacgtgggcaacaagaccacctacagagtggtggcccacagcagcgtgttcagagtgctgagaagaccccaggagttcgtgaacagaacccccgagaccgtgttcatcttctggggcccccccagcaagatgcagaagccccagggcagcctggtgagagtgatccagagagccggcctggtgttccccaacatggaggcctacgccgtgagccccggcagaatgagacagttcgacgacctgttcagaggcgagaccggcaaggacagagagaagagccacagctggctgagcaccggctggttcaccatggtgatcgccgtggagctgtgcgaccacgtgcacgtgtacggcatggtgccccccaactactgcagcggccccgccagcagcgcctgccccaccaccaccaccagccccagaggcagaaccaacgtgagccccaccagcagaatgagcaccgtggccagagccaccaccaccgccagcagccccagaaagggcagcagccacagaggccccagctgcatggccagccccagccccaccccccccggccccagaccccccagcctgtgggacctgagaagagtgagaggcgaggccgccagcgcccagcccctgggccagggccccagcagcggccagagcagactggccggcgtgagccccagccagagcggcccctag

SEQ ID NO: 105906 - DNA, 1125 bp, Artificial Sequence
  derived and/or modified sequence
atggcctgtagcaggccaccctctcagtgtgaacccacatctctgccgcctgggcctccagcagggcgaagacatctgcccctgtctcggaggcgcagagaaatgagctctaacaaagagcagagatcggccgtattcgtgatattatttgctctcataacaattctcattctttacagctccaatagtgccaacgaggtcttccattacggcagccttcgaggtaggtcccgtcgaccggtgaacttaaaaaagtggagcatcaccgatggctacgtgcctattctcggcaataagaccttgccgagcaggtgccatcagtgcgtcatcgtgtcaagcagctcccacctgctcggcacgaaactcggcccagaaattgaacgcgccgaatgcaccattcgaatgaacgacgcccccactactggatactcggccgacgtgggcaacaagactacctacagggtcgtggcccatagctctgtatttagagtattacggcgcccccaggaattcgtgaatcggacccctgaaaccgtttttattttttggggcccaccatcaaagatgcaaaaacctcaaggttcactggtgcgggttatccagcgtgctggcctcgtcttcccaaatatggaagcttatgctgtgagcccaggacgcatgcggcaattcgacgatctgttccggggcgaaacagggaaagatcgggagaagagccactcttggctgagcactggctggttcacgatggtaattgctgtggagctgtgcgatcacgtgcacgtgtacgggatggtcccacctaattattgcagtggacccgcaagcagtgcgtgtccaaccacaaccacttcaccacggggaaggaccaacgtgtcacctacctctcgaatgagcacagtagccagggccactactaccgcctcctcacctagaaagggctccagtcacagaggaccgtcatgcatggctagccccagcccaactccacctggaccccggccaccttccttgtgggatctgcgcagggtgcgcggcgaagcagcttctgcacagccattgggacaggggccatccagcggtcagtcgcgtttggctggagtgagtcctagtcagtcgggaccatag

SEQ ID NO: 105907 - DNA, 1125 bp, Artificial Sequence
  derived and/or modified sequence
atggcctgcagccggccccccagccagtgtgagcccaccagcctgcccccaggccccccagctggaagaagacacctgcccctgagcagaagaagaagagagatgagcagcaacaaggagcagaggtctgctgtgtttgtgatcctgtttgccctgatcaccatcctgatcctgtacagcagcaacagcgccaatgaggtgttccactacggcagcctgcggggccgcagccggcggcctgtgaacctgaagaagtggagcatcacagatggctacgtgcccatcctgggcaacaagaccctgcccagccgctgccaccagtgtgtgattgtgagcagcagcagccacctgctgggcaccaagctgggccctgagattgaaagagctgagtgcaccatccgcatgaatgatgcccccaccaccggctacagcgcagatgtgggcaacaagaccacctacagagtggtggcccacagcagcgtcttccgggtgctgcggcggccccaggagtttgtgaacagaacacctgagaccgtcttcatcttctggggcccccccagcaagatgcagaagccccagggcagcctggtgcgggtcatccagagagctggcctggtgttccccaacatggaggcctatgctgtgtccccaggccgcatgaggcagtttgatgacctcttccggggggagaccgggaaggaccgggagaagagccacagctggctgagcacaggctggttcaccatggtgattgctgtggagctgtgtgaccacgtgcacgtgtatggcatggtgccccccaactactgcagcggccctgccagcagcgcctgccccaccaccaccaccagcccccggggccgcaccaacgtgagccccaccagcaggatgagcacagtggcccgggccaccaccacagccagcagccccaggaagggcagcagccaccggggccccagctgcatggccagccccagccccaccccacctggcccccggccccccagcctgtgggacctgcggcgggtgcggggggaggccgccagcgcccagcccctgggccagggccccagcagcggccagagccggctggccggcgtgagccccagccagagcggcccctag

SEQ ID NO: 105908 - DNA, 1125 bp, Artificial Sequence
  derived and/or modified sequence
atggcctgcagccggccccccagccagtgcgagcccaccagcctgccacctggaccgccagccgggcgccggcaccttcccctctcccggaggagaagggagatgagtagcaacaaggaacagcgcagcgccgtgttcgtcatcctgttcgcacttatcacaatcctcatactctatagcagcaactctgcaaacgaagtttttcactatggtagcctccgcggacgttccagacgtcccgtgaatctgaagaaatggtcgatcactgacggttacgtgcccatcctcggaaacaaaactctgcccagccggtgtcatcagtgcgtgatcgtatctagttcgtcgcacctcctcggcaccaagctgggaccggagatcgagagggccgagtgtaccattagaatgaatgacgcccctactaccgggtattctgcagatgtgggaaacaagacaacctacagggtcgtcgcacactcttccgtcttcagggtgctgcggagacctcaggaatttgtgaatagaaccccggaaactgtgtttatcttctggggccccccgtctaaaatgcagaaaccccagggtagcttggtccgtgtcattcaacgggctggcctggtttttccgaatatggaggcgtatgctgtgtctccgggaaggatgcggcagtttgacgatttgtttagaggtgagacgggaaaggacagagagaagtctcacagctggctcagtactggctggtttacgatggttattgctgtggagttgtgcgaccacgtgcacgtgtatggcatggttccaccaaactactgcagtgggccagcaagttccgcttgccccacgactacaacttctcctcgcggaagaacgaacgtgtcccccacaagccggatgtccaccgtggctagagcgacaaccacggcttcaagtccccggaagggctctagccaccggggtccatcgtgtatggcatcccccagcccaactccaccaggaccacgcccaccaagtctctgggatctgaggcgggtgagaggagaggccgctagcgcgcagcctctcgggcagggaccatcttctggacaatcacggttagctggcgtgtctccaagccagagtggaccttag

SEQ ID NO: 105909 - DNA, 1125 bp, Artificial Sequence
  derived and/or modified sequence
atggcctgcagtcgtcctccgtctcagtgcgagcccacctctctacccccaggcccaccagccggacgaaggcacttacccctgtcccgtaggcggagagagatgagcagcaacaaggaacaacgcagtgccgtgtttgtcatactattcgcattgatcactatattgatcctgtactcttcaaactcggctaacgaggtctttcattacggttccctgcggggtagatcacgcaggcctgtgaatctgaaaaagtggagcattaccgatgggtacgtcccaattcttggtaataagacgctgccgtctcgatgccaccagtgcgtcatcgtttcctcatcttcacatctcctcggaacgaaactggggcctgagatcgagcgcgcagaatgcactatcaggatgaatgatgccccaacaaccgggtattccgcggacgtcggcaacaagacaacctatcgagtggtggcacactccagcgtgtttcgcgtcttgcgaagacctcaggagttcgtgaaccgaacccctgagaccgtctttatcttctggggccctccaagcaaaatgcagaaacctcagggcagtctggtgcgagtcatacagagagccggattggtgtttcccaatatggaagcatatgcggtcagccccggaagaatgcgtcagtttgacgacctcttcaggggagaaactggtaaggaccgagagaagagccattcctggctttccaccggatggttcactatggtgatagctgtagaactgtgtgatcacgtccatgtctacgggatggtccccccaaattactgtagtggcccagcttcctccgcttgtcccacaaccactactagccctcgcggacgaacaaatgtctcccccacttcgagaatgtctactgtggcccgtgctacgacaacagctagctccccacgcaagggatctagccacagagggccatcctgcatggcaagcccctcacctactccccctggtcctcgccctcccagcctttgggatttaagaagagtccgtggcgaagcagcatccgcacagcctctcggacaagggccatcaagcggtcagagcaggctggccggagtcagcccgtctcagagcggtccatag

SEQ ID NO: 105910 - DNA, 2448 bp, Artificial Sequence
  derived and/or modified sequence
gccgtgacggcggcgctaggacccggcgggccgcgggtgcggcgaggcctgggcggcctgaggagcgcggaccccggcgctcggctcccggcgccatgtgagggggctcgggggccgcggggggccgggcgctccccgccggagatgaggaaactgaggctcagagaggtcacatggcttgctcgaggccccccagccagtgtgaacccacatccctgcccccagggccacctgcaggacgccgacacctacccctcagcagacgccggagagaaatgagtagcaacaaagagcagcggtcagcagtgttcgtgatcctctttgccctcatcaccatcctcatcctctacagctccaacagtgccaatgaggtcttccattacggctccctgcggggccgtagccgccgacctgtcaacctcaagaagtggagcatcactgacggctatgtccccattctcggcaacaagacactgccctctcggtgccaccagtgtgtgattgtcagcagctccagccacctgctgggcaccaagctgggccctgagatcgagcgggctgagtgtacaatccgcatgaatgatgcacccaccactggctactcagctgatgtgggcaacaagaccacctaccgcgtcgtggcccattccagtgtgttccgcgtgctgaggaggccccaggagtttgtcaaccggacccctgaaaccgtgttcatcttctgggggcccccgagcaagatgcagaagccccagggcagcctcgtgcgtgtgatccagcgagcgggcctggtgttccccaacatggaagcatatgccgtctctcccggccgcatgcggcaatttgacgacctcttccggggtgagacgggcaaggacagggagaagtctcattcgtggttgagcacaggctggtttaccatggtgatcgcggtggagttgtgtgaccacgtgcatgtctatggcatggtcccccccaactactgcagcggccccgcctccagcgcatgccctaccactactacgagcccaaggggccggacgaatgtgtcacctacatccagaatgagcacagtcgcaagggcaaccaccaccgcttcatcaccgagaaaagggtcttctcatcgtgggcccagctgtatggcatcaccttctcccacccctcctggacctaggccacccagcctgtgggacctcaggagggtcagaggagaagcagcctccgcccagccgctaggccagggaccatcttctggccaatcaaggcttgctggagtgtctcccagccaatcagggccttgaggaggatgtatcctccagccaatcagggcctggggaatctgttggcgaatcagggatttgggagtctatgcggttaatcaggggtgtctttcttgtgcagtcagggtctgcgcacagtcaatcagggtagagggggtatttctgagtcaatctgaggctaaggacatgtcctttcccatgaggccttggttcagagccccaggaatggaccccccaatcactccccactctcctgggataatggggtcctgtcccaaggagctgggaacttggtgttgccccctcaatttccagcaccagaaagagagattgtgtgggggtagaagctgtctggaggcccggccagagaatttgtggggttgtggaggttgtgggggcggtggggaggtcccagaggtgggaggccggcatccaggtcttggctctgccctgagaccttggacaaacccttccccctctctgggcacccttctgcccacaccagtttccagtgcggagtctgagaccctttccacctcccctacaagtgccctcgggtctgtcctccccgtctggaccctcccagccactatcccttgctggaaggctcagctctttggggggtctggggtgacctccccacctcctggaaaactttagggtatttttgcgcaaactccttcagggttgggggactctgaaggaaacgggacaaaaccttaagctgttttcttagcccctcagccagctgccattagcttggctcttaaagggccaggcctccttttctgccctctagcagggaggttttccaactgttggaggcgcctttggggctgcccctttgtctggagtcactgggggcttccgagggtctccctcgaccctctgtcgtcctgggatggctgtcgggagctgtatcacctgggttctgtcccctggctctgtatcaggcactttattaaagctgggcctcagtggggtgtgtttgtctcctgctcttctggagcctggaaggaaagggcttcaggaggaggctgtgaggctggagggaccagatggaggaggccagcagctagccattgcacactggggtgatgggtgggggcggtgactgccccagacttggttttgtaatgatttgtacaggaataaacacacctacgctccg

SEQ ID NO: 105911 - protein, 299 aa, Artificial Sequence
  derived and/or modified sequence
MSSNKEQRSAVFVILFALITILILYSSNSANEVFHYGSLRGRSRRPVNLKKWSITDGYVPILGNKTLPSRCHQCVIVSSSSHLLGTKLGPEIERAECTIRMNDAPTTGYSADVGNKTTYRVVAHSSVFRVLRRPQEFVNRTPETVFIFWGPPSKMQKPQGSLVRVIQRAGLVFPNMEAYAVSPGRMRQFDDLFRGETGKDREKSHSWLSTGWFTMVIAVELCDHVHVYGMVPPNYCSQRPRLQRMPYHYYEPKGPDECVTYIQNEHSRKGNHHRFITEKRVFSSWAQLYGITFSHPSWT

SEQ ID NO: 105912 - protein, 133 aa, Artificial Sequence
  derived and/or modified sequence
MRSSITAPCGAVAADLSTSRSGASLTAMSPFSATREKSHSWLSTGWFTMVIAVELCDHVHVYGMVPPNYCSQRPRLQRMPYHYYEPKGPDECVTYIQNEHSRKGNHHRFITEKRVFSSWAQLYGITFSHPSWT

SEQ ID NO: 105913 - DNA, 900 bp, Artificial Sequence
  derived and/or modified sequence
atgagcagcaacaaggagcagagaagcgccgtgttcgtgatcctgttcgccctgatcaccatcctgatcctgtacagcagcaacagcgccaacgaggtgttccactacggcagcctgagaggcagaagcagaagacccgtgaacctgaagaagtggagcatcaccgacggctacgtgcccatcctgggcaacaagaccctgcccagcagatgccaccagtgcgtgatcgtgagcagcagcagccacctgctgggcaccaagctgggccccgagatcgagagagccgagtgcaccatcagaatgaacgacgcccccaccaccggctacagcgccgacgtgggcaacaagaccacctacagagtggtggcccacagcagcgtgttcagagtgctgagaagaccccaggagttcgtgaacagaacccccgagaccgtgttcatcttctggggcccccccagcaagatgcagaagccccagggcagcctggtgagagtgatccagagagccggcctggtgttccccaacatggaggcctacgccgtgagccccggcagaatgagacagttcgacgacctgttcagaggcgagaccggcaaggacagagagaagagccacagctggctgagcaccggctggttcaccatggtgatcgccgtggagctgtgcgaccacgtgcacgtgtacggcatggtgccccccaactactgcagccagagacccagactgcagagaatgccctaccactactacgagcccaagggccccgacgagtgcgtgacctacatccagaacgagcacagcagaaagggcaaccaccacagattcatcaccgagaagagagtgttcagcagctgggcccagctgtacggcatcaccttcagccaccccagctggacctag

SEQ ID NO: 105914 - DNA, 603 bp, Artificial Sequence
  derived and/or modified sequence
atgagcagcaacaaggagcagagaagcgccgtgttcgtgatcctgttcgccctgatcaccatcctgatcctgtacagcagcaacagcgccaacgaggtgttccactacggcagcctgagaggcagaagcagaagacccgtgaacctgaagaagtggagcatcaccgacggctacgtgcccatcctgggcaacaagaccctgcccagcagatgccaccagtgcgtgatcgtgagcagcagcagccacctgctgggcaccaagctgggccccgagatcgagagagccgagtgcaccatcagaatgaacgacgcccccaccaccggctacagcgccgacgtgggcaacaagaccacctacagagtggtggcccacagcagcgtgttcagagtgctgagaagaccccaggagttcgtgaacagaacccccgagaccgtgttcatcttctggggcccccccagcaagatgcagaagccccagggcagcctggtgagagtgatccagagagccggcctggtgttccccaacatggaggcctacgccgtgagccccggcagaatgagacagttcgacgacctgttcagaggcgagaccggcaaggactag

SEQ ID NO: 105915 - DNA, 900 bp, Artificial Sequence
  derived and/or modified sequence
atgagtagtaataaagagcaaaggtcggctgtatttgtgattctgtttgccctgatcacgatattaatcctttacagctctaacagtgcaaatgaggtgttccattatggaagcttgagaggacgctctcgacgacccgtaaacctgaaaaaatggtccattaccgacggctacgtccccatcttaggcaacaagactctgccttcccggtgtcaccagtgcgtaattgtcagctcatcaagtcatctgctgggtactaaactcgggcccgagattgagagggcagagtgtacaattcggatgaatgacgcccccaccaccggttactccgcagacgtcggcaacaagacaacatatagggtcgtggcccactcctcagtgtttagagtcttacggcggccccaggagtttgtgaacaggacccctgaaacagtctttatattctggggacccccatctaaaatgcagaaaccccagggctccctcgtacgcgtgatacagcgggctgggttagtgttccctaatatggaagcctacgccgtgtcacctggcagaatgcggcagttcgacgacctgtttcggggcgaaactggcaaggaccgtgagaaaagccactcatggctctctaccgggtggtttaccatggtgatcgccgtggaactctgtgaccatgtgcatgtttacggcatggtgccccccaattactgcagtcagcgccctcgactccagcgcatgccctaccactattatgagcccaaggggcctgacgaatgtgttacatacatccagaacgaacattcccgcaaggggaaccatcacagatttatcacagagaagcgggtcttcagctcctgggcacagttgtatggcattacattctcccacccaagctggacatag

SEQ ID NO: 105916 - DNA, 900 bp, Artificial Sequence
  derived and/or modified sequence
atgagcagtaataaagagcaacgatcagccgtattcgtcattctgtttgccctgatcactatcttaatcctctactccagtaattcagccaatgaagtgttccattatggcagcctgcgcgggaggtcacggcgcccggtcaatctgaaaaagtggtcgattacagacggatatgtgcccattttgggcaacaagacactgcctagtcgctgtcaccagtgcgttattgtttccagttcctcgcatctgcttggaacaaaactaggacctgaaatcgagcgagcagagtgtaccattcggatgaatgacgctcccaccactggatacagtgctgatgtggggaataagacgacatacagggtcgtggcccacagcagcgtgtttagggtcttacggcggccccaggaattcgtaaatcggactcctgaaaccgtgttcattttttggggcccacccagcaagatgcagaagccacagggttcattggttagagttatccagagggccgggttagtttttccgaatatggaagcttatgcagtctctcctgggcgaatgagacagttcgatgaccttttcaggggcgaaactggtaaggaccgggagaaatctcattcatggttatccaccgggtggttcacgatggtgatcgccgtggaactgtgtgatcatgtgcacgtgtacggtatggtaccacctaactactgcagccagcgcccaagacttcagcgcatgccctaccattactacgagccaaaagggcccgacgagtgcgtcacctatatccagaacgagcactcgcgcaagggaaatcaccacagatttataaccgagaagcgcgtgttctcttcatgggcccagctgtacgggattacattctctcatcccagttggacctag

SEQ ID NO: 105917 - DNA, 603 bp, Artificial Sequence
  derived and/or modified sequence
atgagctcaaataaggaacagaggtccgcagtattcgtaattctgtttgcgttgattacaatcttgattctgtatagcagcaactctgctaacgaggtgtttcactatggttccctccgtgggcgatcaaggcgccctgttaatctgaaaaagtggtcaattaccgatggttatgtgcccatcttgggcaataaaacactgccaagtcggtgtcaccagtgcgtaatcgtgtccagcagttctcatctgcttggtactaaactggggccagagatcgagagggccgagtgcactattcgtatgaacgacgccccgactactgggtattccgcagatgtgggtaacaagactacttaccgcgtggttgcacattcttccgtgtttcgcgtactgagacgcccccaagagtttgtcaacagaacccctgagacggtgtttattttctggggtccgcccagtaagatgcagaaaccgcagggatcactcgtacgtgtcattcagcgtgccgggcttgtgttccccaacatggaagcatacgcggtgtctccaggcaggatgcgacaatttgatgatctttttcgaggcgagactggtaaggactag

SEQ ID NO: 105918 - DNA, 900 bp, Artificial Sequence
  derived and/or modified sequence
atgagcagcaacaaggagcagaggtctgctgtgtttgtgatcctgtttgccctgatcaccatcctgatcctgtacagcagcaacagcgccaatgaggtgttccactacggcagcctgcggggccgcagccggcggcctgtgaacctgaagaagtggagcatcacagatggctacgtgcccatcctgggcaacaagaccctgcccagccgctgccaccagtgtgtgattgtgagcagcagcagccacctgctgggcaccaagctgggccctgagattgaaagagctgagtgcaccatccgcatgaatgatgcccccaccaccggctacagcgcagatgtgggcaacaagaccacctacagagtggtggcccacagcagcgtcttccgggtgctgcggcggccccaggagtttgtgaacagaacacctgagaccgtcttcatcttctggggcccccccagcaagatgcagaagccccagggcagcctggtgcgggtcatccagagagctggcctggtgttccccaacatggaggcctatgctgtgtccccaggccgcatgaggcagtttgatgacctcttccggggggagaccgggaaggaccgggagaagagccacagctggctgagcacaggctggttcaccatggtgattgctgtggagctgtgtgaccacgtgcacgtgtatggcatggtgccccccaactactgcagccagaggccccggctgcagaggatgccctaccactactatgagcccaagggcccagatgaatgtgtgacctacatccagaatgagcacagcaggaaaggaaaccaccaccgcttcatcacagagaagagggtcttcagctcctgggcccagctgtatggcatcaccttcagccaccccagctggacctag

SEQ ID NO: 105919 - DNA, 603 bp, Artificial Sequence
  derived and/or modified sequence
atgagcagcaacaaggagcagaggtctgctgtgtttgtgatcctgtttgccctgatcaccatcctgatcctgtacagcagcaacagcgccaatgaggtgttccactacggcagcctgcggggccgcagccggcggcctgtgaacctgaagaagtggagcatcacagatggctacgtgcccatcctgggcaacaagaccctgcccagccgctgccaccagtgtgtgattgtgagcagcagcagccacctgctgggcaccaagctgggccctgagattgaaagagctgagtgcaccatccgcatgaatgatgcccccaccaccggctacagcgcagatgtgggcaacaagaccacctacagagtggtggcccacagcagcgtcttccgggtgctgcggcggccccaggagtttgtgaacagaacacctgagaccgtcttcatcttctggggcccccccagcaagatgcagaagccccagggcagcctggtgcgggtcatccagagagctggcctggtgttccccaacatggaggcctatgctgtgtccccaggccgcatgaggcagtttgatgacctcttccggggggagaccgggaaggactag

SEQ ID NO: 105920 - DNA, 900 bp, Artificial Sequence
  derived and/or modified sequence
atgagcagcaacaaggagcagcggagcgccgtgttcgtgatcctgttcgctttgataacaatacttatactctatagtagtaacagcgccaatgaagtattccactacgggtcgctgcgtggaaggagccgacggcccgtcaatctcaagaagtggtctatcacagacggatatgtaccaattcttgggaataaaaccctccccagcagatgccaccagtgtgtgattgtgtccagctcgagtcacctgttaggcactaaactgggccccgagatcgaacgtgctgaatgtactattcggatgaatgatgcacctacaacaggatactccgccgatgtgggcaacaagaccacctacagggtcgtagcacacagcagcgtgtttcgggtcctgcgacggccccaggagttcgttaaccgtacgcccgaaacggtgtttatattctggggtccccctagcaaaatgcagaaacctcagggaagtctcgtcagagtgatccaacgggcaggcttggtgttccccaacatggaggcttatgccgttagccctggtcggatgaggcagttcgacgacctgttccggggggagaccggaaaagaccgcgaaaagagccactcatggttaagcacaggttggttcactatggtgattgctgttgagttgtgtgatcatgtccacgtgtacggcatggtgcctccaaactattgttcccagcgccctagactgcaaaggatgccatatcactattatgaaccaaagggccctgatgaatgcgtcacctatattcagaacgagcactcccgcaaagggaaccaccataggtttattaccgaaaaaagggtgttcagctcatgggcacagctatacggaatcacgttttctcacccatcatggacctag

SEQ ID NO: 105921 - DNA, 900 bp, Artificial Sequence
  derived and/or modified sequence
atgagcagcaacaaggagcagcggagcgccgtgttcgtgatcctgttcgccctgattaccatactgattctatactcttcaaactcagccaatgaagtcttccactatggctccctccgaggtcgatcaagaaggcctgtgaatttgaagaaatggtccattacggacggctacgttcccattctggggaacaaaacactcccttcgcgctgccaccagtgtgtcattgtgtcatcctcatcccacttgctgggaacaaagctaggaccagagattgagagagcagagtgtaccatccgaatgaatgacgcccctacgaccggatattcagcagatgtcggcaacaaaacaacatatcgggtcgtggctcactcctcagtgtttcgcgtccttaggcggcctcaggagtttgtgaataggaccccggaaaccgtgtttatcttctggggtcccccatcaaagatgcagaagcctcagggctccctggtcagagtgattcaaagggctggattagttttccctaacatggaggcttacgcagtctccccaggacggatgagacagtttgatgatctgtttaggggggagaccggcaaggaccgagaaaaaagccattcttggctgagtacagggtggttcaccatggtgattgcggttgagttgtgtgaccatgtccacgtgtacggaatggtgccaccgaattattgttctcagcgtccacggttgcagaggatgccgtatcattactacgagcccaaggggcccgacgagtgtgtcacttacatccagaatgagcatagtcggaaaggcaatcatcatagattcatcaccgaaaagcgtgtgttctcttcatgggctcagctatacggtataactttctcccaccctagttggacctag

SEQ ID NO: 105922 - DNA, 603 bp, Artificial Sequence
  derived and/or modified sequence
atgagcagcaacaaggagcagcggagcgccgtgttcgtgatcctgtttgcattgatcactatccttatactttacagcagcaactctgctaacgaggtcttccactacggctccctgcggggcagatctcgacgccctgtaaatctgaaaaagtggtcaatcacagatggatacgttcctattttgggcaataaaactttaccatcacggtgtcaccagtgtgtcattgtctcgagtagttcccacttgttggggactaagctgggcccagagattgagagggcagaatgcaccattcggatgaatgacgccccgacaaccggatactctgctgatgtggggaataagactacatatagagtggtcgcccatagctctgtatttagagtactgcggcggccacaggaatttgtcaatagaacccccgagactgtgtttattttttgggggccaccaagcaaaatgcaaaagccccagggcagcctggttagagttattcagcgggcggggctcgtgtttcccaatatggaggcatacgccgtctccccgggtcggatgagacagttcgacgacttgtttcgcggtgagaccggaaaggactag

SEQ ID NO: 105923 - DNA, 900 bp, Artificial Sequence
  derived and/or modified sequence
atgtcaagcaataaagaacagcgcagcgcggtattcgtgattcttttcgcgttgattaccattctgatactttatagctctaactctgctaacgaagtcttccactacggctccctccggggtcggtctcgaagaccagtgaacctcaagaagtggagcattacagacggctatgtccccatattgggtaacaaaaccctgccaagccgttgtcaccagtgtgtgatcgtgagctcctcatctcacctgctggggactaagttggggcctgaaattgagagagcagagtgcaccatccgaatgaatgacgccccaactactggctactcagcggatgttggtaacaaaacaacttaccgtgtggtggcacatagtagcgtgtttagggtgctgcggcgaccccaagaatttgtgaacagaacccctgaaactgttttcatattttggggcccaccttcaaaaatgcagaagccacaggggagtctggttcgcgtcatccagagggcgggacttgtgtttcccaacatggaagcatatgcagtatcgcccggtaggatgcgccaatttgacgatctctttcgaggcgaaaccggaaaagatagagagaagtcacattcgtggctgtccactggctggtttacaatggtcatcgcggtggaactctgcgaccatgtgcatgtgtatggaatggtccctccaaactattgctcacagaggccgcgactgcaacggatgccttatcattactatgaacccaagggccctgacgagtgtgttacttatatccagaatgagcattccaggaaaggcaaccaccaccgctttataaccgagaagcgagtgttttcatcgtgggcacaactgtacggtattacgttctcccatccgagctggacatag

SEQ ID NO: 105924 - DNA, 900 bp, Artificial Sequence
  derived and/or modified sequence
atgtctagtaacaaggagcaacgatcggccgtgttcgtgatcttgtttgcactgattaccatcctcattctgtattcatccaacagcgccaatgaagtgttccattacgggtccttacgcggaaggagccggaggccagtaaacctaaagaaatggagcatcactgacggctacgttcccattttgggtaataaaaccctgcctagtagatgccaccagtgcgtgattgtgagcagctctagccacctcctggggacaaagctcgggcctgagattgagcgggcagagtgcaccatacgaatgaacgatgcgccaacaaccggctatagtgccgacgtgggaaataagactacctatcgagttgtggcacattctagtgtcttccgggtactcagacgaccacaggaatttgttaacagaacacccgagacggtctttatcttctggggccctccaagcaagatgcaaaaaccccagggaagtctagtcagggtcattcagagggcaggactggttttcccgaatatggaggcctatgctgtatcacccggacgcatgcggcagttcgacgatctcttccggggagagaccggaaaagatagagaaaaatctcatagctggctctccacgggctggtttacgatggtgatcgcggtggagttatgtgaccatgttcacgtttacggaatggtgcctcctaattactgtagtcagcgaccgaggttacaacgaatgccgtaccattactatgaaccgaagggaccagatgaatgcgtgacctacatccagaacgaacatagccgcaaagggaaccaccatcggttcatcacagagaagagggtattttcgagctgggcccagctgtatggcataacattctctcacccctcgtggacgtag

SEQ ID NO: 105925 - DNA, 603 bp, Artificial Sequence
  derived and/or modified sequence
atgtcttccaacaaggagcagcgaagcgccgtctttgtgattctcttcgccctaatcactatactgatcctgtattcgagtaattcagctaatgaagtcttccactatgggtctctccgtggaagatcacgccgaccagtgaacttaaaaaaatggtccatcacagacggttatgtgcccattctcgggaacaaaactctcccctcgaggtgccaccaatgcgtcattgtcagttcaagctctcacttgctcggaaccaagcttgggccagagattgaaagggctgaatgtaccatccggatgaatgacgcacctactaccggttattcagccgacgtgggtaacaagaccacctatagggtggtcgcacattcttccgtcttcagggtgctccgacggccacaggagttcgtgaatcgaacccccgaaacggtgttcattttctggggaccccctagtaaaatgcagaagccacagggttccctagttagggtgatacagagggcaggactggtgttccccaatatggaagcttacgccgtgagtccaggacgaatgcggcagtttgatgacctgtttcgtggagaaacggggaaagactag

SEQ ID NO: 105926 - protein, 128 aa, Artificial Sequence
  derived and/or modified sequence
MGKSASKQFHNEVLKAHNEYRQKHGVPPLKLCKNLNREAQQYSEALASTRILKHSPESSRGQCGENLAWASYDQTGHFTAMVWKNTKKMGVGKASASDGSSFVVARYFPAGNVVNEGFFEENVLPPKK

SEQ ID NO: 105927 - DNA, 387 bp, Artificial Sequence
  derived and/or modified sequence
atgggaaagtccgcaagtaagcagtttcacaacgaggtgttaaaagcacacaacgagtaccgacagaaacatggtgtcccgcctctcaaactgtgtaaaaacttaaaccgtgaggcgcagcagtacagcgaggcactggcttcaacgcgcatacttaagcactctccagagtcctctaggggccaatgtggcgagaatttggcctgggcttcctacgaccaaacgggacatttcacggccatggtatggaagaacaccaagaagatgggggttggcaaggccagcgctagtgatggctctagttttgtggttgccaggtatttcccagctggaaatgtggtgaatgagggtttcttcgaggaaaatgtactgcccccaaaaaaatag

SEQ ID NO: 105928 - DNA, 387 bp, Artificial Sequence
  derived and/or modified sequence
atgggaaaatctgcttccaaacagtttcacaacgaagtattaaaagcacataatgaatacagacagaaacacggtgtgccacctcttaagctctgcaaaaatctaaatcgcgaggcgcaacaatatagcgaagcactggcgtccacccgaattctcaaacactcccccgagagcagcaggggacagtgcggagagaatctcgcctgggcgtcatacgaccaaacgggacatttcactgctatggtgtggaaaaatacgaagaaaatgggggttggcaaagcatccgcctctgacggcagctccttcgttgttgcaagatattttcctgccggtaacgtggtgaatgagggatttttcgaggagaatgtgctccctccaaaaaaatag

SEQ ID NO: 105929 - DNA, 387 bp, Artificial Sequence
  derived and/or modified sequence
atgggcaagtcggcgtctaaacaattccataacgaagtactgaaagctcataacgagtatagacaaaagcacggggttccacctctgaaactctgtaagaatctgaatagagaagcacagcaatactccgaagcactggctagtaccaggatcctcaagcactcacccgaatccagtcgtggacagtgtggcgagaatctggcatgggcaagttacgaccagacaggccactttacggcaatggtatggaaaaacactaagaaaatgggcgttggaaaagcgagtgcgtcagacggcagttcattcgtcgtcgcgcgctactttccagcagggaacgtcgtgaacgaagggtttttcgaagaaaatgtgttgcctccaaaaaagtag

SEQ ID NO: 105930 - DNA, 387 bp, Artificial Sequence
  derived and/or modified sequence
atgggcaagagcgccagcaagcagttccacaacgaggtgctgaaggcccacaacgagtacagacagaagcacggcgtgccccccctgaagctgtgcaagaacctgaacagagaggcccagcagtacagcgaggccctggccagcaccagaatcctgaagcacagccccgagagcagcagaggccagtgcggcgagaacctggcctgggccagctacgaccagaccggccacttcaccgccatggtgtggaagaacaccaagaagatgggcgtgggcaaggccagcgccagcgacggcagcagcttcgtggtggccagatacttccccgccggcaacgtggtgaacgagggcttcttcgaggagaacgtgctgccccccaagaagtag

SEQ ID NO: 105931 - DNA, 387 bp, Artificial Sequence
  derived and/or modified sequence
atgggcaaatctgcctctaagcaatttcacaacgaagtgttaaaagcccacaacgagtacaggcagaaacacggggtccccccattaaagctctgcaagaacctaaacagagaggcccagcaatatagtgaggccttagcttctacaagaatcctgaaacacagccctgaatcgagcaggggccagtgtggcgagaatcttgcctgggcttcctacgaccagacgggccacttcactgccatggtctggaaaaacactaagaagatgggcgtcgggaaagcatctgccagtgatggttcctcctttgtggttgcaagatacttccctgcaggaaacgtggttaatgaagggttctttgaagaaaatgtccttccccctaagaaatag

SEQ ID NO: 105932 - DNA, 387 bp, Artificial Sequence
  derived and/or modified sequence
atgggcaagagcgccagcaagcagttccacaatgaggtgctgaaggcccacaatgagtaccggcagaagcacggcgtgccccccctgaagctgtgcaagaacctgaaccgggaggcccagcagtacagcgaggccctggccagcacccgcatcctgaagcacagccctgagagcagccggggccagtgtggggagaacctggcctgggccagctatgaccagacaggccacttcaccgccatggtgtggaagaacaccaagaagatgggcgtgggcaaggccagcgccagtgatggcagcagctttgtggtggcccgctacttccctgctggaaatgtggtgaatgaaggcttctttgaagaaaatgtgctgccccccaagaagtag

SEQ ID NO: 105933 - DNA, 812 bp, Artificial Sequence
  derived and/or modified sequence
cgcagccgcggggagcgaggagcgcgcggagccggccatgggcaagtcagcttccaaacagtttcataatgaggtcctgaaggcccacaatgagtaccggcagaagcacggcgtccccccactgaagctctgcaagaacctcaaccgggaggctcaacagtattctgaggccctggccagcacgaggatcctcaagcacagcccggagtccagccgtggccagtgtggggagaaccttgcatgggcatcctatgatcagacaggacacttcacggccatggtatggaagaacaccaagaagatgggcgtggggaaggcgtccgcaagtgacgggtcctcctttgtggtggccagatacttcccagcggggaatgttgtcaatgagggcttcttcgaagaaaacgtcctgccgccgaagaagtaacttgttaaatgtaatgggaaggtggcagacttaagaacgtggatatgaagtgcctagaaccaccacaacctggctgtgcgtctgtccctgtgggtgtatgtgcttgtgtgtgtgatgcatgtgagcgtctctggcacacacacttggacatacagttctgtgtgcgctcattcttattacaggagtgagcaaaggaagcatttaccccgatggttacctagaccacgattatttggattggggggaggggggatccgttttttttttttaattttttgttatttctaagcaaacctcttttgtacttttcttacttctaatatccatccctggactttttgtattccaaatgtttgtgatgctgagaagtgaagttcattttatgtga

SEQ ID NO: 105934 - DNA, 387 bp, Artificial Sequence
  derived and/or modified sequence
atgggcaagagcgccagcaagcagttccacaacgaggtgctgaaggctcacaacgagtatcgacaaaaacacggcgtgccacccctcaagttgtgtaagaacctaaatcgcgaggcccagcaatattccgaggctttggcttcaaccagaatcctgaagcattctcctgaatcatcccgcgggcagtgcggtgaaaatctggcttgggctagctacgatcagacagggcactttaccgctatggtgtggaagaataccaaaaagatgggcgtgggcaaagccagcgctagcgacggctcatcattcgtagtcgctcggtactttcccgcgggaaatgtggtcaatgaggggtttttcgaagaaaacgtcttgcccccaaagaagtag

SEQ ID NO: 105935 - RNA, 387 nt, Artificial Sequence
  derived and/or modified sequence
augggaaaaucugcuuccaaacaguuucacaacgaaguauuaaaagcacauaaugaauacagacagaaacacggugugccaccucuuaagcucugcaaaaaucuaaaucgcgaggcgcaacaauauagcgaagcacuggcguccacccgaauucucaaacacucccccgagagcagcaggggacagugcggagagaaucucgccugggcgucauacgaccaaacgggacauuucacugcuaugguguggaaaaauacgaagaaaauggggguuggcaaagcauccgccucugacggcagcuccuucguuguugcaagauauuuuccugccgguaacguggugaaugagggauuuuucgaggagaaugugcucccuccaaaaaaauag

SEQ ID NO: 105936 - RNA, 387 nt, Artificial Sequence
  derived and/or modified sequence
augggcaagucggcgucuaaacaauuccauaacgaaguacugaaagcucauaacgaguauagacaaaagcacgggguuccaccucugaaacucuguaagaaucugaauagagaagcacagcaauacuccgaagcacuggcuaguaccaggauccucaagcacucacccgaauccagucguggacaguguggcgagaaucuggcaugggcaaguuacgaccagacaggccacuuuacggcaaugguauggaaaaacacuaagaaaaugggcguuggaaaagcgagugcgucagacggcaguucauucgucgucgcgcgcuacuuuccagcagggaacgucgugaacgaaggguuuuucgaagaaaauguguugccuccaaaaaaguag

SEQ ID NO: 105937 - protein, 311 aa, Artificial Sequence
  derived and/or modified sequence
MLARAARGTGALLLRGSLLASGRAPRRASSGLPRNTVVLFVPQQEAWVVERMGRFHRILEPGLNILIPVLDRIRYVQSLKEIVINVPEQSAVTLDNVTLQIDGVLYLRIMDPYKASYGVEDPEYAVTQLAQTTMRSELGKLSLDKVFRVEAERRKRATVLESEGTRESAINVAEGKKQAQILASEAEKAEQINQAAGEASAVLAKAKAKAEAIRILAAALTQHNGDAAASLTVAEQYVSAFSKLAKDSNTILLPSNPGDVTSMVAQAMGVYGALTKAPVPGTPDSLSSGSSRDVQGTDASLDEELDRVKMS

SEQ ID NO: 105938 - DNA, 936 bp, Artificial Sequence
  derived and/or modified sequence
atgctggccagagccgccagaggcaccggcgccctgctgctgagaggcagcctgctggccagcggcagagcccccagaagagccagcagcggcctgcccagaaacaccgtggtgctgttcgtgccccagcaggaggcctgggtggtggagagaatgggcagattccacagaatcctggagcccggcctgaacatcctgatccccgtgctggacagaatcagatacgtgcagagcctgaaggagatcgtgatcaacgtgcccgagcagagcgccgtgaccctggacaacgtgaccctgcagatcgacggcgtgctgtacctgagaatcatggacccctacaaggccagctacggcgtggaggaccccgagtacgccgtgacccagctggcccagaccaccatgagaagcgagctgggcaagctgagcctggacaaggtgttcagagtggaggccgagagaagaaagagagccaccgtgctggagagcgagggcaccagagagagcgccatcaacgtggccgagggcaagaagcaggcccagatcctggccagcgaggccgagaaggccgagcagatcaaccaggccgccggcgaggccagcgccgtgctggccaaggccaaggccaaggccgaggccatcagaatcctggccgccgccctgacccagcacaacggcgacgccgccgccagcctgaccgtggccgagcagtacgtgagcgccttcagcaagctggccaaggacagcaacaccatcctgctgcccagcaaccccggcgacgtgaccagcatggtggcccaggccatgggcgtgtacggcgccctgaccaaggcccccgtgcccggcacccccgacagcctgagcagcggcagcagcagagacgtgcagggcaccgacgccagcctggacgaggagctggacagagtgaagatgagctag

SEQ ID NO: 105939 - DNA, 936 bp, Artificial Sequence
  derived and/or modified sequence
atgttggctagagccgctcggggtaccggtgccttgttgttgcgcggaagtctgctggcatctggtagggcccccaggcgggcctcatcagggctgcctagaaacactgttgtcctgtttgttccacagcaggaagcttgggtcgtcgaaaggatgggtcggtttcatcggatactggagcccggactgaatattctcatccccgtcctggaccgaataagatacgtgcagtctttaaaagaaattgtgattaacgttcccgaacagtccgcagtcacgctcgacaacgtaaccctccagattgatggggttctgtacctgaggataatggacccgtacaaagcttcttatggagtagaagacccagaatacgctgtgacccaattagcccaaacgacaatgcgatcagagctgggtaagctcagcctggataaggtgtttagagtggaggctgaacgcagaaagagggcaacagtactggaaagcgaaggaaccagggaaagtgcaattaacgtggcagagggtaaaaagcaggcccagatactggcgtcggaggccgaaaaggccgaacagatcaaccaggcggccggggaggcttcggcagtgcttgcaaaagctaaagccaaggcggaagcaatcaggattctagctgcagcgttgacccagcataacggcgacgctgcggcgtcattgaccgttgccgagcagtatgtctcagctttcagcaaactggctaaggacagtaatacgatcctgctcccgtcaaaccccggtgatgtgacttccatggtcgcccaggcgatgggggtttacggcgcattaaccaaagccccagtacccggaactccagactccctgtccagtggatcatccagagatgtccagggaactgacgcctcactcgacgaggaattggaccgggttaagatgtcatag

SEQ ID NO: 105940 - DNA, 936 bp, Artificial Sequence
  derived and/or modified sequence
atgctggcccgggccgcccggggcactggagccctgctgctgcggggcagcctgctggccagcggccgggccccccggcgggccagcagcggcctgcccaggaacacagtggtgctgtttgtgccccagcaggaggcctgggtggtggagaggatgggccgcttccaccgcatcctggagcccggcctgaacatcctgatccctgtgctggaccgcatccgctacgtgcagagcctgaaggagatcgtcatcaacgtgcctgagcagagcgctgtgaccctggacaacgtgaccctgcagattgatggagtgctgtacctgcgcatcatggacccctacaaggccagctatggagtggaggaccctgaatatgctgtgacccagctggcccagaccaccatgaggtctgagctgggcaagctgagcctggacaaggtgttccgggtggaggccgagaggaggaagagggccaccgtgctggagagcgagggcacccgggagagcgccatcaacgtggccgagggcaagaagcaggcccagatcctggccagcgaggccgagaaggccgagcagatcaaccaggccgccggggaggccagcgctgtgctggccaaggccaaggccaaggccgaggccatccgcatcctggccgccgccctgacccagcacaatggagatgctgctgccagcctgactgtggccgagcagtatgtgtctgccttcagcaagctggccaaggacagcaacaccatcctgctgcccagcaaccctggagatgtgacctccatggtggcccaggccatgggcgtgtatggagccctgaccaaggcccctgtgcccggcaccccagacagcctgagcagcggcagcagcagagatgtgcagggcacagatgccagcctggatgaggagctggacagagtgaagatgtcctag

SEQ ID NO: 105941 - DNA, 936 bp, Artificial Sequence
  derived and/or modified sequence
atgctggcccgggccgcccggggcaccggcgccctgctgctgcgggggtccttgctagcctcaggtcgagcgccacgccgggctagcagtgggctgcctcgcaacacagtcgtgttgtttgtgcctcagcaggaggcgtgggttgtggagagaatgggcaggttccatagaattttggaaccagggcttaatatcctgattccggttttggatcggattaggtatgtccagagtctgaaagaaatcgtgattaatgtgcctgagcagagcgctgtgacactggataatgttactctacagattgacggcgtcctctacctacgcatcatggacccctataaggcctcctacggggtcgaggatccagagtacgcagttacacagctggcccaaacgaccatgcggagtgaactgggtaaactgtccctcgacaaagtcttccgggtggaagcagagcggagaaagagagccaccgtgctggagtccgaaggcacccgcgagagcgctatcaacgtcgcagaaggaaaaaagcaggcccaaattctcgcctcagaggctgaaaaagctgagcaaatcaaccaggcagctggggaggcctcggccgtgctcgccaaggcaaaagcgaaagcagaggccataagaatactggcagcggcccttacccagcacaacggtgacgccgcagctagtctaacagtggccgagcaatacgtaagcgcgttctccaaactggccaaagacagcaataccatcttactgccgtcgaaccccggcgacgtcacctctatggtggctcaagcgatgggggtttacggagccttaaccaaggctcctgtgccgggcacacccgattctcttagctcggggtcctctcgcgatgtgcaagggacagatgcaagtttagatgaggaactcgacagggtgaagatgtcctag

SEQ ID NO: 105942 - DNA, 936 bp, Artificial Sequence
  derived and/or modified sequence
atgcttgctcgcgctgctagagggacaggagcactacttctgcgcggatctctccttgcatctggaagagcccctcgcagagctagttcaggactgcctcggaacacagtagtgcttttcgtgcctcagcaagaagcttgggttgtcgagaggatgggcaggtttcacaggatcctggaaccgggtctgaacattttgatacccgtactggataggatccggtacgttcagtctctgaaggagatcgtgattaacgtcccggaacagagtgcagtgacacttgataatgttacactgcagatcgacggagtcctgtacctccgcattatggacccttataaagctagttacggcgtcgaggatccagagtacgccgtaacgcaactggcgcagactactatgagatcagagctcggaaaactttcacttgataaggtctttcgagtggaggcagagaggcggaagcgcgcaaccgtgctggaatcagaaggaactagggaatctgctatcaatgtcgccgaaggcaagaagcaggcccagatacttgcaagcgaggccgaaaaagccgaacagattaaccaggccgcaggagaggctagtgcagtcctggcaaaagcaaaagccaaagctgaggctatccgcatcctggcagccgcactaacacaacacaatggcgacgcagctgcctctctgaccgtggctgagcagtacgtttcagcgttttccaagttggccaaagacagtaacaccatcttgctgccatctaacccaggtgacgtcacatccatggttgcacaagctatgggagtgtacggcgctctgaccaaggccccagtgcccggaactccagacagcctgtcttctggtagctcccgtgacgtacagggtactgacgcaagcttagatgaagagttagacagagtgaaaatgagttag

SEQ ID NO: 105943 - DNA, 1049 bp, Artificial Sequence
  derived and/or modified sequence
tcgtctcgttggttccggaggtcgctgcggcggtgggaaatgctggcgcgcgcggcgcggggcactggggcccttttgctgaggggctctctactggcttctggccgcgctccgcgccgcgcctcctctggattgccccgaaacaccgtggtactgttcgtgccgcagcaggaggcctgggtggtggagcgaatgggccgattccaccggatcctggagcctggtttgaacatcctcatccctgtgttagaccggatccgatatgtgcagagtctcaaggaaattgtcatcaacgtgcctgagcagtcggctgtgactctcgacaatgtaactctgcaaatcgatggagtcctttacctgcgcatcatggacccttacaaggcaagctacggtgtggaggaccctgagtatgccgtcacccagctagctcaaacaaccatgagatcagagctcggcaaactctctctggacaaagtcttccgggtggaggcagagcggcggaaacgggccacagttctagagtctgaggggacccgagagtcggccatcaatgtggcagaagggaagaaacaggcccagatcctggcctccgaagcagaaaaggctgaacagataaatcaggcagcaggagaggccagtgcagttctggcgaaggccaaggctaaagctgaagctattcgaatcctggctgcagctctgacacaacataatggagatgcagcagcttcactgactgtggccgagcagtatgtcagcgcgttctccaaactggccaaggactccaacactatcctactgccctccaaccctggcgatgtcaccagcatggtggctcaggccatgggtgtatatggagccctcaccaaagccccagtgccagggactccagactcactctccagtgggagcagcagagatgtccagggtacagatgcaagtcttgatgaggaacttgatcgagtcaagatgagttagtggagctgggcttggccagggagtctgggaacaaggaagcagattttcctgattctggctctagcttccctgcc

SEQ ID NO: 105944 - DNA, 489 bp, Artificial Sequence
  derived and/or modified sequence
atggccgagggcggcggccagaaccaccacgaggtggtgaagttcatggacgtgtaccagcgcagctactgccaccccatcgagaccctggtggacatcttccaggagtaccccgacgagatcgagtacatcttcaagcccagctgcgtgcccctgatgcgctgcggcggctgctgcaacgacgagggcctggagtgcgtgcccaccgaggagagcaacatcaccatgcagatcatgcgcatcaagccccaccagggccagcacatcggcgagatgagcttcctgcagcacaacaagtgcgagtgccgccccaagaaggaccgcgcccgccaggagaacccctgcggcccctgcagcgagcgccgcaagcacctgttcgtgcaggacccccagacctgcaagtgcagctgcaagaacaccgacagccgctgcaaggcccgccagctggagctgaacgagcgcacctgccgctgcgacaagccccgccgc

SEQ ID NO: 105945 - DNA, 492 bp, Artificial Sequence
  derived and/or modified sequence
atggccgagggcggcggccagaaccaccacgaggtggtgaagttcatggacgtgtaccagagaagctactgccaccccatcgagaccctggtggacatcttccaggagtaccccgacgagatcgagtacatcttcaagcccagctgcgtgcccctgatgagatgcggcggctgctgcaacgacgagggcctggagtgcgtgcccaccgaggagagcaacatcaccatgcagatcatgagaatcaagccccaccagggccagcacatcggcgagatgagcttcctgcagcacaacaagtgcgagtgcagacccaagaaggacagagccagacaggagaacccctgcggcccctgcagcgagagaagaaagcacctgttcgtgcaggacccccagacctgcaagtgcagctgcaagaacaccgacagcagatgcaaggccagacagctggagctgaacgagagaacctgcagatgcgacaagcccagaagatag

SEQ ID NO: 105946 - DNA, 492 bp, Artificial Sequence
  derived and/or modified sequence
atggccgaaggaggagggcaaaaccaccacgaggtcgttaagtttatggacgtgtaccagcggtcttactgtcatccaattgaaactctcgtcgacatttttcaagagtaccccgacgaaatcgagtacatatttaaacctagctgtgtccccctgatgcgatgtggcggatgttgtaacgacgagggactggaatgtgtacccacagaggagagtaacataaccatgcagataatgcggatcaagcctcaccagggtcagcacataggagaaatgtcctttcttcaacataacaaatgtgagtgtaggccaaagaaggaccgggccagacaggaaaatccttgtggtccttgctcggagcggcgaaaacatcttttcgtccaagacccacagacctgtaagtgctcttgtaagaacaccgactcccgctgcaaagccagacagctggagctcaacgagcgtacatgccgatgcgacaagcccaggagatag

SEQ ID NO: 105947 - DNA, 492 bp, Artificial Sequence
  derived and/or modified sequence
atggccgagggcggcggccagaaccaccacgaggtggtgaagttcatggatgtgtaccagaggagctactgccaccccatcgagaccctggtggacatcttccaggagtacccagatgaaattgagtacatcttcaagcccagctgtgtgcccctgatgagatgtggcggctgctgcaatgatgagggcctggagtgtgtgcccacagaggagagcaacatcaccatgcagatcatgaggatcaagccccaccagggccagcacatcggggagatgtccttcctgcagcacaacaagtgtgaatgtcggcccaagaaggaccgggcccggcaggagaacccctgtggcccctgcagcgagaggaggaagcacctgtttgtgcaggacccccagacctgcaagtgcagctgcaagaacacagacagccgctgcaaggcccggcagctggagctgaatgaaagaacctgccgctgtgacaagcccaggaggtag

SEQ ID NO: 105948 - DNA, 492 bp, Artificial Sequence
  derived and/or modified sequence
atggccgagggcggcggccagaaccaccacgaggtggtgaagttcatggacgtttatcagcggtcatactgccatccgattgagactttagtcgatatttttcaggagtatcctgatgagatagagtatattttcaaaccatcatgcgtccccctgatgcgatgcggtggctgttgtaacgacgagggcctcgagtgtgtacctactgaagagtcgaacattactatgcagatcatgcgaatcaaaccacaccagggtcagcatatcggcgaaatgtcatttttgcagcacaacaaatgcgagtgccgtcctaagaaggacagagcccggcaggaaaatccttgcgggccatgctctgagaggcgcaaacatttgtttgtgcaggatccccagacatgtaaatgctcctgcaagaacactgactctaggtgcaaggcacgccagttagagcttaatgaacgtacatgcagatgtgacaagccaagacgctag

SEQ ID NO: 105949 - DNA, 492 bp, Artificial Sequence
  derived and/or modified sequence
atggcggaaggcggaggtcaaaaccaccacgaagtggtaaagttcatggatgtttatcagaggtcctattgccaccctatcgagactctcgttgatatattccaggaataccccgacgaaattgagtatatcttcaagccctcttgtgtgccactaatgcggtgcggaggctgttgcaacgacgaaggacttgaatgtgttccgacagaggagtccaatatcacaatgcagatcatgaggattaaaccacaccagggccaacatatcggggaaatgtcttttttgcagcacaataaatgtgagtgtcgtccgaagaaggatcgggctagacaggaaaatccatgtggcccttgctccgaacggaggaagcatttatttgtacaggaccctcaaacttgtaaatgcagctgtaagaacacggactctagatgtaaagctcgacagctggagctgaacgaacgaacatgccgatgtgacaaaccgcgtaggtag

SEQ ID NO: 105950 - DNA, 492 bp, Artificial Sequence
  derived and/or modified sequence
atggccgagggaggggggcaaaaccaccatgaagtggtcaaatttatggacgtttaccagcgtagctactgccaccctatagagacccttgtagatatcttccaggagtatcctgatgagatcgagtatatattcaaaccgagttgcgttccattgatgaggtgcgggggttgttgcaacgacgaaggcctcgagtgcgtgcccaccgaagagtcaaacatcacgatgcagataatgagaattaagccacaccagggtcagcacatcggtgagatgagtttcctgcagcataataagtgtgaatgcagacccaagaaggaccgagcccgacaagagaatccttgtggcccatgtagcgagcgccgtaaacacctttttgttcaggacccacagacttgcaagtgcagctgtaaaaacactgatagcaggtgtaaggccagacaactagagctgaatgagcgcacgtgtagatgtgacaaaccacgacgatag

SEQ ID NO: 105951 - DNA, 492 bp, Artificial Sequence
  derived and/or modified sequence
atggcagagggaggcgggcaaaatcaccacgaggtcgttaagttcatggacgtctatcagcggagctactgtcatcccatcgaaacgctcgttgacatctttcaagagtacccagatgaaatcgagtacatcttcaagcctagctgcgttcctttaatgagatgtgggggatgctgcaacgacgaagggctcgagtgtgtccctacagaagagagcaatattacaatgcagatcatgcgcattaaaccccaccaaggccagcatataggagaaatgagtttcttgcaacataataaatgcgaatgcagacccaagaaggaccgagcccgacaagagaatccttgtggcccatgtagcgagcgccgtaaacacctttttgttcaggacccacagacttgcaagtgcagctgtaaaaacactgatagcaggtgtaaggccagacaactagagctgaatgagcgcacgtgtagatgtgacaaaccacgacgatag

SEQ ID NO: 105952 - DNA, 1584 bp, Artificial Sequence
  derived and/or modified sequence
atgtggggccaggacagcaccctgcaggacacccccccccccgaccccgagatcttcagacagagattcagaagattctgctaccagaacaccttcggccccagagaggccctgagcagactgaaggagctgtgccaccagtggctgagacccgagatcaacaccaaggagcagatcctggagctgctggtgctggagcagttcctgagcatcctgcccaaggagctgcaggtgtggctgcaggagtacagacccgacagcggcgaggaggccgtgaccctgctggaggacctggagctggacctgagcggccagcaggtgcccggccaggtgcacggccccgagatgctggccagaggcatggtgcccctggaccccgtgcaggagagcagcagcttcgacctgcaccacgaggccacccagagccacttcaagcacagcagcagaaagcccagactgctgcagagcagagccctgcccgccgcccacatccccgcccccccccacgagggcagccccagagaccaggccatggccagcgccctgttcaccgccgacagccaggccatggtgaagatcgaggacatggccgtgagcctgatcctggaggagtggggctgccagaacctggccagaagaaacctgagcagagacaacagacaggagaactacggcagcgccttcccccagggcggcgagaacagaaacgagaacgaggagagcaccagcaaggccgagaccagcgaggacagcgccagcagaggcgagaccaccggcagaagccagaaggagttcggcgagaagagagaccaggagggcaagaccggcgagagacagcagaagaaccccgaggagaagaccagaaaggagaagagagacagcggccccgccatcggcaaggacaagaagaccatcaccggcgagagaggccccagagagaagggcaagggcctgggcagaagcttcagcctgagcagcaacttcaccacccccgaggaggtgcccaccggcaccaagagccacagatgcgacgagtgcggcaagtgcttcaccagaagcagcagcctgatcagacacaagatcatccacaccggcgagaagccctacgagtgcagcgagtgcggcaaggccttcagcctgaacagcaacctggtgctgcaccagagaatccacaccggcgagaagccccacgagtgcaacgagtgcggcaaggccttcagccacagcagcaacctgatcctgcaccagagaatccacagcggcgagaagccctacgagtgcaacgagtgcggcaaggccttcagccagagcagcgacctgaccaagcaccagagaatccacaccggcgagaagccctacgagtgcagcgagtgcggcaaggccttcaacagaaacagctacctgatcctgcacagaagaatccacaccagagagaagccctacaagtgcaccaagtgcggcaaggccttcaccagaagcagcaccctgaccctgcaccacagaatccacgccagagagagagccagcgagtacagccccgccagcctggacgccttcggcgccttcctgaagagctgcgtgtag

SEQ ID NO: 105953 - DNA, 1584 bp, Artificial Sequence
  derived and/or modified sequence
atgtgggggcaagatagtaccttacaagatacccctccacctgatcccgagatattcagacagcggtttcggagattctgttaccagaacactttcggcccccgtgaagctctgtccagacttaaggagctctgtcaccagtggctgcggcctgaaatcaatacaaaggaacagatcctcgaactgctggtgctggaacagttcctcagtatccttcccaaggagctgcaggtctggctgcaggaatacaggcctgattcaggcgaggaggctgtgactctgctggaggatcttgaattagacctgagtgggcagcaagtacctgggcaggtgcatggtcccgaaatgctcgccaggggaatggttccattggatcctgttcaagagagcagcagttttgacctccatcacgaagccactcagagccacttcaaacactcttcccggaagccccgtctgctccagtcaagggcgctccccgcggcccatattccagctccaccacatgagggttcccctagagatcaggccatggcctccgccttattcaccgctgactcacaggccatggttaaaatagaagatatggcagtgtcgctgatcttagaagagtgggggtgtcagaatttggccaggagaaacttgagcagggacaacagacaggaaaactacggaagcgcctttcctcagggtggcgagaatcggaatgagaatgaggagtcaacaagcaaggccgagacaagtgaggattctgcatcaaggggtgagactacggggcgaagtcagaaagagtttggggagaagagggaccaagaagggaagacaggggaaaggcagcaaaaaaaccctgaggagaagactagaaaagagaagcgcgattctggcccagcaattgggaaagataaaaaaactataacaggcgaaagaggccccagggagaagggaaagggcctaggccggtctttctcactctcatcaaacttcaccactcccgaggaagtccccaccgggacgaagagccacagatgcgacgaatgcgggaaatgttttacccgcagctccagcttaatccggcacaagattatccacacgggcgaaaaaccctacgagtgttccgaatgtggaaaggctttttcccttaactccaacctggtcttgcaccagagaattcatacaggcgaaaagccccacgagtgcaacgagtgtgggaaagccttttcacattcttccaacctcatcttgcaccagcgcatccattcgggggagaaaccttatgagtgcaatgaatgcggaaaagccttttcgcagtccagtgacctcaccaaacatcaaagaatccatactggggagaagccttatgagtgtagcgagtgcgggaaggccttcaacagaaactcgtatcttatcttacacagaaggatccacacgcgcgagaaaccttacaaatgcacgaaatgtggcaaggctttcactaggtcttcaaccttgaccttacatcatcgcattcacgcaagagagcgagcgtccgagtattcacccgcctccctcgatgcattcggcgcattcctgaagtcctgtgtttag

SEQ ID NO: 105954 - DNA, 1584 bp, Artificial Sequence
  derived and/or modified sequence
atgtggggccaggacagcaccctgcaggacaccccacctccagaccctgagatcttccggcagcgcttccgccgcttctgctaccagaacaccttcggcccccgggaggccctgagccggctgaaggagctgtgccaccagtggctgcggcctgagatcaacaccaaggagcagatcctggagctgctggtgctggagcagttcctgagcatcctgcccaaggagctgcaggtgtggctgcaggagtacagaccagattctggagaggaggccgtgaccctgctggaggacctggagctggacctgagcggccagcaggtgcccggccaggtgcacggccctgagatgctggcccggggcatggtgcccctggaccctgtgcaggagagcagcagctttgacctgcaccacgaggccacccagagccacttcaagcacagcagcaggaagccccggctgctgcagagccgggccctgcctgctgcccacatcccagcccctcctcatgagggcagcccccgggaccaggccatggccagcgccctcttcaccgctgacagccaggccatggtgaagattgaggacatggctgtgtccctcatcctggaggagtggggctgccagaacctggcccggaggaacctgagccgggacaaccggcaggagaactacggcagcgccttcccccagggcggagaaaatagaaatgaaaatgaggagagcaccagcaaggccgagaccagtgaagattctgccagcagaggagagaccaccggccgcagccagaaggagtttggagagaagagggaccaggagggcaagacaggagagcggcagcagaagaaccctgaggagaagaccaggaaggagaagagggacagcggccctgccatcggcaaggacaagaagaccatcaccggggagcggggcccccgggagaagggcaagggcctgggccgctccttcagcctgagcagcaacttcaccaccccagaggaggtgcccaccggcaccaagagccaccgctgtgatgaatgtgggaagtgcttcaccaggagcagcagcctcatccgccacaagatcatccacactggagagaagccctatgagtgcagtgaatgtgggaaggccttcagcctgaacagcaacctggtgctgcaccagaggatccacactggagagaagccccatgagtgcaatgaatgtgggaaggccttcagccacagcagcaacctgatcctgcaccagaggatccacagcggggagaagccctatgagtgcaatgaatgtgggaaggccttcagccagagcagtgacctgaccaagcaccagaggatccacactggagagaagccctatgagtgcagtgaatgtgggaaggccttcaacagaaacagctacctgatcctgcaccggcgcatccacacccgggagaagccctacaagtgcaccaagtgtgggaaggccttcaccaggagcagcaccctgaccctgcaccaccgcatccacgcccgggagcgggccagcgagtacagccctgccagcctggatgcctttggagccttcctgaagagctgtgtgtag

SEQ ID NO: 105955 - DNA, 1584 bp, Artificial Sequence
  derived and/or modified sequence
atgtggggccaggacagcaccctgcaggacacccccccccccgaccccgaaatatttagacagaggttcaggcggttttgctaccagaatacttttggcccgagagaggccctttctcgactgaaagaattatgtcaccagtggctgaggccagaaatcaatacaaaagagcagattctggagctcctggttcttgaacagttcctttcaatcctgccaaaggagctgcaagtgtggttgcaagagtacaggcctgactcgggtgaggaagcagtgacactccttgaagatttagagctagatctgtcggggcagcaggttcccgggcaggtgcacgggccagaaatgcttgccagaggcatggtgcccctggatccggtccaagaatcaagctcgtttgatctgcaccacgaagcgactcagtcacatttcaaacactcaagccgcaaaccgcgactcctgcagtcgcgagctctcccggccgcgcacatccccgcccctcctcatgagggatcacctcgcgaccaggccatggcctcggctttgttcactgctgacagtcaggccatggttaagattgaggatatggccgtctcactcatactggaggagtggggatgtcaaaatctggcacgccgcaatctctcgcgggataatcggcaggagaactatggctcggcattcccacagggaggcgagaaccgcaatgagaatgaggaatcaaccagtaaggccgagacgtctgaggacagtgcctcacgtggcgaaacaaccggccggtcccagaaggagtttggggaaaaacgagaccaggaggggaagacaggcgaaaggcaacagaagaaccccgaagagaagacccgcaaggagaagagggacagtgggcctgcaatcgggaaggacaagaaaactatcacaggcgagagaggaccccgcgagaagggaaaaggcctcggccgctccttttccctgagcagcaattttacgactcccgaggaggtacctacaggcactaagagccatcgttgcgatgaatgcggcaaatgctttacaagatcatccagtctcattcgtcataagatcatccacactggcgagaagccttatgaatgctcagaatgcggtaaggccttctcactgaactcaaacctggtgcttcaccagcgcattcacactggggaaaaaccccacgagtgtaacgaatgtggaaaggcctttagccactcttctaacttaatcttgcatcagcgcattcactccggggagaagccatacgagtgcaatgagtgcggcaaggcgtttagccagagcagcgaccttacaaagcatcagcgcatacataccggtgaaaaaccatacgagtgctcagagtgtggcaaagcgttcaaccgcaacagttacctcattctgcaccgacgtattcacaccagagaaaaaccgtacaaatgtaccaagtgcgggaaagctttcacacgaagtagcaccctaaccttgcaccatcgaattcatgccagggaaagggcatcggagtactcacccgcatcattagatgcatttggggcctttctgaaatcttgtgtgtag

SEQ ID NO: 105956 - DNA, 1584 bp, Artificial Sequence
  derived and/or modified sequence
atgtgggggcaggactccactctgcaggacacaccccctccagatccagagattttcagacagaggtttcgcagattctgctaccaaaacacatttggtccccgagaagccttgagcagactcaaggaactttgccatcagtggctcagacccgagatcaacaccaaagagcagattctcgagcttctggtgctggaacaatttctgtccatcctgcctaaagaactgcaggtttggctgcaggaatacagacctgatagcggggaagaagccgtcactttactcgaggacctggaactcgatttgtcaggacaacaggttcctggacaggttcacggtcctgaaatgcttgctcggggaatggtgccacttgaccctgttcaggagtcttccagcttcgatttgcatcacgaagccactcagtcccactttaagcactcatcacggaagccacgactgcttcagagtagagcattgcccgctgcccacataccagcaccccctcacgagggatcccctcgtgatcaggcaatggcctctgctctctttactgcagattcccaggccatggtgaagattgaagatatggccgttagcttgatcctggaggagtgggggtgccagaacttagccagacgaaatctcagtcgggataaccggcaagagaactatggcagtgcctttcctcaagggggtgaaaatagaaacgagaacgaggagtctacctcgaaagccgagacttcggaggacagcgccagccgcggtgagaccacgggacgaagccaaaaagagttcggcgaaaagcgggatcaagaaggaaaaaccggcgagagacagcaaaagaaccctgaagaaaaaacccgcaaggaaaagagggattctggccctgccattgggaaagataaaaaaaccatcacgggcgaacgaggcccaagggagaagggtaaaggactcggacggagtttcagcttgtcttcgaactttaccacacctgaagaggtgcctaccggtacgaaatctcataggtgcgatgagtgcggcaaatgttttactaggtccagctcacttatacggcacaagatcattcataccggagagaagccatatgaatgttctgagtgcgggaaggctttttccttgaactcaaatctggttttgcaccagcggatccatactggtgaaaagcctcacgagtgtaacgagtgtggaaaagccttcagtcactccagtaatctgatattgcaccagagaatccattcaggggaaaagccctacgagtgcaatgagtgcggcaaagctttctcgcagtcgtctgacttgaccaaacaccaaagaatccacactggggaaaagccttacgagtgttctgagtgcggcaaggctttcaatcgaaactcttatttgatcctgcacaggcgcatccacacacgtgagaagccttataagtgtactaaatgtggtaaagcttttacccgcagctctacgctcacgttgcaccaccgaatccacgcacgcgaacgggcaagtgagtacagccccgcttccctcgatgcctttggtgccttcttaaagtcttgcgtgtag

SEQ ID NO: 105957 - DNA, 3754 bp, Artificial Sequence
  derived and/or modified sequence
attgtgtctgtgtcgaggcgtcgggagggcctaagtccgtgtgcggtgcccttcggccggcctgagccccagagtcagctcccctttctcgcccagcgcccccaggccgctcccggggctcacgctcttcctgctgcccacattcctgcaccccctcatgagggtagtcccagagaccaggcgatggcatctgcactattcacagcggattcccaggcaatggtgaagatcgaggacatggctgtgtccctcattctggaggaatggggatgtcagaatctggctcggaggaatctcagtagggacaacaggcaggagaattatgggagcgcatttccccagggtggtgaaaacaggaatgagaacgaggagtcaacctcaaaggctgaaacctcggaagattcagcatcacgcggggagacaacaggaagatcccagaaagagtttggagagaaacgtgaccaggagggcaaaacaggagaaagacagcagaaaaaccctgaggagaaaaccaggaaagagaaaagagattcagggccagctataggaaaggacaaaaaaaccatcacaggagagagaggtccaagggagaaggggaaaggattgggaagaagcttcagtctgagctccaacttcaccacccctgaagaagttcccacgggaacaaagtctcacagatgtgatgaatgtggtaaatgcttcacgagaagttcaagccttatccgccataaaataatccacactggagaaaagccctatgaatgtagtgagtgtgggaaagccttcagtcttaactccaaccttgtcctgcatcagaggatccacacaggagagaaacctcatgaatgtaacgagtgtggcaaggccttcagccacagttccaatctcatcctccatcagcgcatccactctggagagaaaccttatgaatgtaatgagtgcgggaaggccttcagccagagctcggacctcaccaagcatcagagaattcacacgggggagaaaccctatgaatgtagtgaatgtggaaaagctttcaaccgaaactcatacctgattttgcatcggagaattcacactcgagaaaagccctacaagtgcactaagtgtggcaaggccttcacccgcagctccaccctcactctgcatcacagaatccatgccagagagagagcctctgagtacagcccagcctcccttgatgcatttggcgcgttcctgaaaagttgtgtgtaaaggaagaatttgccatcaagccatttcccccttttgtttctaaaattatttcagagatgtgtgctcctggagggaaaaagaaatacagcctcaacagattaaaaaacaaaagtcacacttaaggatccttctagtcacatcagcagtgttctgcctttatgtagtagttgggcatataatccttccacacagcccctgcagggaaaggctaatcttacggataatccacgtgagatttccacacaagagaaaagcacacgcatagtgaaatgtcagtcttttcagtaatgaggatacctttaaggcactcttggactctcggcaaccacaacataatagttgaaagatcaagattggctccacgaaagtgatacggaggttaggatgctacttgctgcaaacaagccctactttggccaacatcctgcttatttctcaaaaaagagggacagtgaaaacaaaaacgacattgggacatgctgctcaaggtagttatatatacgataagttgtatatatgatcactggtagcctaccaaagctgtagaaatctaggactgtgctaatcagtatcaaaccaaagatttctatctcttcccgaaagagagggtatgtgcaccagtctacagttccaaaggactgcaacaaatgtagatggttctgtcctcatccctgagatcagttctactgaaatggcaacaacaactccaaatacatctctcccttcttgaaatccctaaagcactatcgcactcctaaatgcatttctccacaagttagcacttgattgtatactgtcttttaatccttcattgtttcatgtatgaagtttttaatcaccccctaacccccaaaaaagattcggttgtcaagggatatatttctatccctgccagcacagtgctggacatagtgagtactgaacacctaagaggcactcattcagactgacttctacaggacttctacgtgtgtgataaaagcctgtgaatcgtgagtccctgaaatatggtagcctggcccagcttctaaagaggaccttcgtagccacaaggcatgctaaacctctagggtctgatgctgtttttgttccaaatataaacgaaaggcactagtcagccgcctgcatagactttctaaacagtgagtaaataccatggaatgtcagaaatgactttatcatcgtcatcttgaagaaaaatatgaacactgatgaaggtcattttttttttttgacatctttctgtggcaaagctcttagaattctttgcagttagctgctgaacagtatgatgatttggggattttctgaatcatttgtacttagatactggagttcagaagatgtgatttttgttgcttttcagaaaaaggaacgtggtagggagtgttttttcccacgcttttccagtaactttgcaaaagcattaattgttcactggcaattactaaatgtattttgttgctctgagaaactcagcagtgtactgagatgtggctggctgtgccatcgtcatagtgcacagtgacttttctgtttcttatcactaaagactgaggtgaggttatgaaactttcattggtcccatcgttgtgcgcagggtgcaactggctacctagaagctgatggcaggagactgtttcacacacaggagattgtgagctgtgtaagtagtcatcgccactcaagtaggacaagggtcctacccaaggctaggaccgccctgcggaaacagaaacatagactgagaacaaacctcaagactatcagtgtgacctccccataacaagagaaccccatatatagtttgagactttcccttgagaaacttatactaaaactattactcatcagtcattcactgatcagcagctaaagtccatgagaccaaatggttttatatggaaccaacgaagtgggagctaaaactgcacagtggtcattctttggcctctccttggctttatgacttaaaccaactacaacttccctatagcttctaagcagtttcatcagcattacttgggaaaacgtgttgcaagtcaaccagtcactaggatatttctacccatgcaacggaagaaaaacccattactccagaagagtatatctaagtaactaaaatggaggcagaaaatgttttaaggattttcttcaaagaataagccacagcaatggttttgtagaaaactcctgtgcttttgagcaaggacttttgccctctagaaagcaactgaggccaggtgcggtggctcacgcctgtaatcccagcactttgggaggccgaggtgagcggatcacctgaggtcaggagttttgagaccagcctggccaacatggtaaaatcccgtctctactaaaattataaaaattagccgggcatgatggtgggcacctgtaatcccagctacttgggaggctgaggcaggagaatcacttgaacccaggaggcagaggttgcagtgagccaagattgcacactgcactccagcctgggtgactagcaaaactccatctc

SEQ ID NO: 105958 - DNA, 3505 bp, Artificial Sequence
  derived and/or modified sequence
aggaatgagggatgtcagaatctggctcggaggaatctcagtagggacaacaggcaggagaattatgggagcgcatttccccagggtggtgaaaacaggaatgagaacgaggagtcaacctcaaaggctgaaacctcggaagattcagcatcacgcggggagacaacaggaagatcccagaaagagtttggagagaaacgtgaccaggagggcaaaacaggagaaagacagcagaaaaaccctgaggagaaaaccaggaaagagaaaagagattcagggccagctataggaaaggacaaaaaaaccatcacaggagagagaggtccaagggagaaggggaaaggattgggaagaagcttcagtctgagctccaacttcaccacccctgaagaagttcccacgggaacaaagtctcacagatgtgatgaatgtggtaaatgcttcacgagaagttcaagccttatccgccataaaataatccacactggagaaaagccctatgaatgtagtgagtgtgggaaagccttcagtcttaactccaaccttgtcctgcatcagaggatccacacaggagagaaacctcatgaatgtaacgagtgtggcaaggccttcagccacagttccaatctcatcctccatcagcgcatccactctggagagaaaccttatgaatgtaatgagtgcgggaaggccttcagccagagctcggacctcaccaagcatcagagaattcacacgggggagaaaccctatgaatgtagtgaatgtggaaaagctttcaaccgaaactcatacctgattttgcatcggagaattcacactcgagaaaagccctacaagtgcactaagtgtggcaaggccttcacccgcagctccaccctcactctgcatcacagaatccatgccagagagagagcctctgagtacagcccagcctcccttgatgcatttggcgcgttcctgaaaagttgtgtgtaaaggaagaatttgccatcaagccatttcccccttttgtttctaaaattatttcagagatgtgtgctcctggagggaaaaagaaatacagcctcaacagattaaaaaacaaaagtcacacttaaggatccttctagtcacatcagcagtgttctgcctttatgtagtagttgggcatataatccttccacacagcccctgcagggaaaggctaatcttacggataatccacgtgagatttccacacaagagaaaagcacacgcatagtgaaatgtcagtcttttcagtaatgaggatacctttaaggcactcttggactctcggcaaccacaacataatagttgaaagatcaagattggctccacgaaagtgatacggaggttaggatgctacttgctgcaaacaagccctactttggccaacatcctgcttatttctcaaaaaagagggacagtgaaaacaaaaacgacattgggacatgctgctcaaggtagttatatatacgataagttgtatatatgatcactggtagcctaccaaagctgtagaaatctaggactgtgctaatcagtatcaaaccaaagatttctatctcttcccgaaagagagggtatgtgcaccagtctacagttccaaaggactgcaacaaatgtagatggttctgtcctcatccctgagatcagttctactgaaatggcaacaacaactccaaatacatctctcccttcttgaaatccctaaagcactatcgcactcctaaatgcatttctccacaagttagcacttgattgtatactgtcttttaatccttcattgtttcatgtatgaagtttttaatcaccccctaacccccaaaaaagattcggttgtcaagggatatatttctatccctgccagcacagtgctggacatagtgagtactgaacacctaagaggcactcattcagactgacttctacaggacttctacgtgtgtgataaaagcctgtgaatcgtgagtccctgaaatatggtagcctggcccagcttctaaagaggaccttcgtagccacaaggcatgctaaacctctagggtctgatgctgtttttgttccaaatataaacgaaaggcactagtcagccgcctgcatagactttctaaacagtgagtaaataccatggaatgtcagaaatgactttatcatcgtcatcttgaagaaaaatatgaacactgatgaaggtcatttttttttttttgacatctttctgtggcaaacctcttagaattctttgcagttagctgctgaacagtatgatgatttggggattttctgaatcatttgtacttagatactggagttcagaagatgtgatttttgttgcttttcagaaaaaggaacgtggtagggagtgttttttcccacgcttttccagtaactttgcaaaagcattaattgttcactggcaattactaaatgtattttgttgctctgagaaactcagcagtgtactgagatgtggctggctgtgccatcgtcatagtgcacagtgacttttctgtttcttatcactaaagactgaggtgagggtatgaaactttcattggtcccatcgttgtgcgcagggtgcaactggctacctagaagctgatggcaggagactgttcacacacaggagattgtgagctgtgtaagtagtcatcgccactcaagtaggacaagggtcctacccaaggctaggaccgcctgcggaaacagaaacatagactgagaacaaacctcaagactatcagtgtgacctccccataacaagagaaccccatatatagtttgagactttcccttgagaaacttatactaaaactattactcatcagtcattcactgatcagcagctaaagtccatgagaccaaatggttttatatggaaccaacgaagtgggagctaaaactgcacagtggtcattctttggcctctccttggctttatgacttaaaccaactacaacttccctatagcttctaagcagtttcatcagcattacttgggaaaacgtgttgcaagtcaaccagtcactaggatatttctacccatgcaacggaagaaaaacccattactccagaagagtatatctaagtaactaaaatggaggcagaaaatgttttaaggattttcttcaaagaataagccacagcaatggttttgtagaaaactcctgtgcttttgagcaaggacttttgccctctagaaagcaactgaggccaggtgcggtgtcacgcctgtaatcccagcactttgggaggccgaggtgagcggatcacctgaggtcaggagttttgagaccagcctggccaacatggtaaaatcccgtctctactaaaattataaaaattagccgggcatgatggtgggcacctgtaatcccagctacttgggaggctgaggcaggagaatcacttgaacccaggaggcagaggttgcagtgagccaagattgcacactgcactccagcctgggtgactagcaaaactccatcctttagagcacatc

SEQ ID NO: 105959 - DNA, 1053 bp, Artificial Sequence
  derived and/or modified sequence
atggccagcgccctgttcaccgccgacagccaggccatggtgaagatcgaggacatggccgtgagcctgatcctggaggagtggggctgccagaacctggccagaagaaacctgagcagagacaacagacaggagaactacggcagcgccttcccccagggcggcgagaacagaaacgagaacgaggagagcaccagcaaggccgagaccagcgaggacagcgccagcagaggcgagaccaccggcagaagccagaaggagttcggcgagaagagagaccaggagggcaagaccggcgagagacagcagaagaaccccgaggagaagaccagaaaggagaagagagacagcggccccgccatcggcaaggacaagaagaccatcaccggcgagagaggccccagagagaagggcaagggcctgggcagaagcttcagcctgagcagcaacttcaccacccccgaggaggtgcccaccggcaccaagagccacagatgcgacgagtgcggcaagtgcttcaccagaagcagcagcctgatcagacacaagatcatccacaccggcgagaagccctacgagtgcagcgagtgcggcaaggccttcagcctgaacagcaacctggtgctgcaccagagaatccacaccggcgagaagccccacgagtgcaacgagtgcggcaaggccttcagccacagcagcaacctgatcctgcaccagagaatccacagcggcgagaagccctacgagtgcaacgagtgcggcaaggccttcagccagagcagcgacctgaccaagcaccagagaatccacaccggcgagaagccctacgagtgcagcgagtgcggcaaggccttcaacagaaacagctacctgatcctgcacagaagaatccacaccagagagaagccctacaagtgcaccaagtgcggcaaggccttcaccagaagcagcaccctgaccctgcaccacagaatccacgccagagagagagccagcgagtacagccccgccagcctggacgccttcggcgccttcctgaagagctgcgtgtag

SEQ ID NO: 105960 - DNA, 1053 bp, Artificial Sequence
  derived and/or modified sequence
atggctagtgctctcttcacagccgactcacaggccatggtgaagatcgaagatatggctgtctcccttatacttgaggagtggggatgtcaaaacctcgcacgcagaaatctgtcccgggataaccggcaagaaaactacggatctgccttcccccagggtggcgaaaatagaaatgaaaacgaagagtcaacgtctaaggcagagacaagcgaggattccgcttctcgaggcgagaccaccggaagatcccagaaggagtttggagagaagagggatcaggaaggaaagacgggggaaaggcagcagaaaaatccagaggaaaagacccgcaaggaaaagagagatagcgggcctgccatcggaaaggacaaaaagacaattacaggcgaacggggtcccagagagaaggggaaaggattaggacgctcattctcactttcctctaattttacgacacctgaggaagtgcctacaggtacgaagtcccacagatgcgacgagtgtggaaagtgcttcactagatcctcgtctctgattagacacaaaattatacacacaggagaaaagccatacgagtgctcagagtgtggaaaagctttcagccttaattcaaacttagtgctgcaccagagaattcacaccggagagaaaccccacgaatgcaacgaatgcggaaaagccttctcacactcatccaacttaatcctacaccagcgcatccacagcggggaaaaaccatacgagtgcaatgagtgcggtaaggccttctctcaatcttccgacctcacgaaacaccagcggatccatactggggaaaaaccctatgaatgctcagaatgtggaaaggccttcaacagaaattcttacctgatccttcatagacgtatccatacgagagaaaagccatataagtgcaccaaatgcggcaaagcctttaccagatcatcaacactcacattgcatcaccggatccacgcgagagaacgggccagtgaatactctcctgcatctctggacgcattcggagcattcttgaaatcctgtgtctag

SEQ ID NO: 105961 - DNA, 1053 bp, Artificial Sequence
  derived and/or modified sequence
atggccagcgccctcttcaccgctgacagccaggccatggtgaagattgaggacatggctgtgtccctcatcctggaggagtggggctgccagaacctggcccggaggaacctgagccgggacaaccggcaggagaactacggcagcgccttcccccagggcggggagaacagaaatgaaaatgaggagagcaccagcaaggccgagaccagcgaggacagcgccagcagaggagagaccaccggccgcagccagaaggagtttggagagaagagggaccaggagggcaagacaggagagcggcagcagaagaaccctgaggagaagaccaggaaggagaagagggacagcggccctgccatcggcaaggacaagaagaccatcactggagagcggggcccccgggagaagggcaagggcctgggccgctccttcagcctgagcagcaacttcaccaccccagaggaggtgcccaccggcaccaagagccaccgctgtgatgaatgtgggaagtgcttcaccaggagcagcagcctcatccgccacaagatcatccacactggagagaagccctatgaatgttctgaatgtgggaaggccttcagcctgaacagcaacctggtgctgcaccagaggatccacactggagagaagccccatgaatgtaatgaatgtgggaaggccttcagccacagcagcaacctgatcctgcaccagaggatccacagcggggagaagccctatgaatgtaatgaatgtgggaaggccttcagccagagcagtgacctgaccaagcaccagaggatccacactggagagaagccctatgaatgttctgaatgtgggaaggccttcaacagaaattcctacctgatcctgcaccggcgcatccacacccgggagaagccctacaagtgcaccaagtgtgggaaggccttcaccaggagcagcaccctgaccctgcaccaccgcatccacgcccgggagcgggccagcgagtacagccctgccagcctggatgccttcggggccttcctgaagagctgtgtgtag

SEQ ID NO: 105962 - DNA, 1053 bp, Artificial Sequence
  derived and/or modified sequence
atggccagcgccctgttcaccgccgacagccaggccatggtgaagatagaagacatggccgtctctttaattctggaggagtggggatgtcaaaacctggcccgccggaatctttctagagacaacagacaagagaattatgggtctgcattcccgcagggaggcgaaaacagaaatgagaatgaggaatccacttccaaagccgaaacttcggaggactctgcaagcagaggcgaaacaaccggccgaagtcagaaggaattcggtgagaagcgagaccaggagggtaagaccggggagagacagcagaagaatccagaagagaaaacccgaaaagagaagagggattcaggacccgccattgggaaggataagaagacaattacaggggaacggggcccacgagaaaaggggaaaggactcggacggagcttctcactgagctcaaacttcaccacgcccgaggaggtacccacagggaccaagagccaccgttgtgatgaatgtggcaaatgtttcacgcgttccagttcactgatcaggcacaagatcatccatacaggcgaaaaaccctacgagtgtagtgagtgcggaaaagcatttagcctcaattctaacttggtgctgcaccaaagaattcacaccggggagaagccccacgaatgtaacgagtgtggcaaggcattctcacatagttctaatctcattctccaccagcgtatacatagcggcgaaaaaccttacgagtgcaacgaatgtggcaaagccttttcccagtcatcagatctgactaaacaccagagaattcataccggcgagaaaccctatgaatgctcagagtgcggcaaggcatttaaccgcaatagttatcttatcctgcaccgaaggatccatacacgtgagaagccttacaagtgtaccaagtgcggaaaggcctttacccgctcttctacacttaccctacatcaccgtattcatgcccgggaacgggccagcgaatatagccccgcaagtttagacgcctttggtgcctttctgaaaagctgtgtgtag

SEQ ID NO: 105963 - DNA, 1053 bp, Artificial Sequence
  derived and/or modified sequence
atggcttcagccctctttactgcagattcgcaagcaatggttaagatcgaggacatggccgtgtctctgatcctggaggagtggggctgccagaatcttgcacgacgcaacctgagccgagataaccgtcaggaaaactatggctctgccttcccccaaggcggtgaaaaccggaatgagaatgaagaaagcacatcaaaagccgagacttcggaagatagcgcctctagaggtgagactaccgggcgttcacagaaggagttcggggagaaacgggatcaggaaggcaagactggggaaaggcagcagaagaaccctgaggaaaaaactcggaaggagaagcgcgacagcggccctgctatcggcaaggacaagaagacgatcacgggcgaaagagggccacgcgagaagggtaaaggcctcgggcgatccttttcgctgtcttccaacttcaccactccagaggaggtacctactggcactaagtctcatcgctgtgacgaatgcgggaagtgctttactcggtcttcctctcttatccgacataagatcatccacaccggggaaaagccatatgaatgttctgagtgtggtaaggcctttagtctgaatagcaatctggtgttgcatcaacgcattcacactggagagaaacctcacgaatgcaatgagtgcggtaaagcattttcccactccagcaacttaattctgcaccaaaggatccattctggcgagaagccatacgagtgtaatgagtgtggcaaagcctttagtcagtcctccgaccttacaaagcatcagagaatccacacaggcgagaagccatacgagtgtagcgagtgtgggaaagcttttaaccgcaacagctacctgattcttcaccgtaggattcacacccgcgaaaaaccatacaagtgcactaagtgcggtaaggcctttaccagatctagcacccttactcttcatcacagaattcacgcaagggagagggcatccgaatactctcccgcttctcttgatgcattcggcgcattcctgaaatcttgcgtgtag

SEQ ID NO: 105964 - protein, 1572 aa, Artificial Sequence
  derived and/or modified sequence
MLLHLCSVKNLYQNRFLGLAAMASPSRNSQSRRRCKEPLRYSYNPDQFHNMDLRGGPHDGVTIPRSTSDTDLVTSDSRSTLMVSSSYYSIGHSQDLVIHWDIKEEVDAGDWIGMYLIDEVLSENFLDYKNRGVNGSHRGQIIWKIDASSYFVEPETKICFKYYHGVSGALRATTPSVTVKNSAAPIFKSIGADETVQGQGSRRLISFSLSDFQAMGLKKGMFFNPDPYLKISIQPGKHSIFPALPHHGQERRSKIIGNTVNPIWQAEQFSFVSLPTDVLEIEVKDKFAKSRPIIKRFLGKLSMPVQRLLERHAIGDRVVSYTLGRRLPTDHVSGQLQFRFEITSSIHPDDEEISLSTEPESAQIQDSPMNNLMESGSGEPRSEAPESSESWKPEQLGEGSVPDGPGNQSIELSRPAEEAAVITEAGDQGMVSVGPEGAGELLAQVQKDIQPAPSAEELAEQLDLGEEASALLLEDGEAPASTKEEPLEEEATTQSRAGREEEEKEQEEEGDVSTLEQGEGRLQLRASVKRKSRPCSLPVSELETVIASACGDPETPRTHYIRIHTLLHSMPSAQGGSAAEEEDGAEEESTLKDSSEKDGLSEVDTVAADPSALEEDREEPEGATPGTAHPGHSGGHFPSLANGAAQDGDTHPSTGSESDSSPRQGGDHSCEGCDASCCSPSCYSSSCYSTSCYSSSCYSASCYSPSCYNGNRFASHTRFSSVDSAKISESTVFSSQDDEEEENSAFESVPDSMQSPELDPESTNGAGPWQDELAAPSGHVERSPEGLESPVAGPSNRREDWEARIDSHGRVFYVDHVNRTTTWQRPTAAATPDGMRRSGSIQQMEQLNRRYQNIQRTIATERSEEDSGSQSCEQAPAGGGGGGGSDSEAESSQSSLDLRREGSLSPVNSQKITLLLQSPAVKFITNPEFFTVLHANYSAYRVFTSSTCLKHMILKVRRDARNFERYQHNRDLVNFINMFADTRLELPRGWEIKTDQQGKSFFVDHNSRATTFIDPRIPLQNGRLPNHLTHRQHLQRLRSYSAGEASEVSRNRGASLLARPGHSLVAAIRSQHQHESLPLAYNDKIVAFLRQPNIFEMLQERQPSLARNHTLREKIHYIRTEGNHGLEKLSCDADLVILLSLFEEEIMSYVPLQAAFHPGYSFSPRCSPCSSPQNSPGLQRASARAPSPYRRDFEAKLRNFYRKLEAKGFGQGPGKIKLIIRRDHLLEGTFNQVMAYSRKELQRNKLYVTFVGEEGLDYSGPSREFFFLLSQELFNPYYGLFEYSANDTYTVQISPMSAFVENHLEWFRFSGRILGLALIHQYLLDAFFTRPFYKALLRLPCDLSDLEYLDEEFHQSLQWMKDNNITDILDLTFTVNEEVFGQVTERELKSGGANTQVTEKNKKEYIERMVKWRVERGVVQQTEALVRGFYEVVDSRLVSVFDARELELVIAGTAEIDLNDWRNNTEYRGGYHDGHLVIRWFWAAVERFNNEQRLRLLQFVTGTSSVPYEGFAALRGSNGLRRFCIEKWGKITSLPRAHTCFNRLDLPPYPSYSMLYEKLLTAVEETSTFGLE

SEQ ID NO: 105965 - DNA, 4719 bp, Artificial Sequence
  derived and/or modified sequence
atgctgctgcacctgtgcagcgtgaagaacctgtaccagaacagattcctgggcctggccgccatggccagccccagcagaaacagccagagcagaagaagatgcaaggagcccctgagatacagctacaaccccgaccagttccacaacatggacctgagaggcggcccccacgacggcgtgaccatccccagaagcaccagcgacaccgacctggtgaccagcgacagcagaagcaccctgatggtgagcagcagctactacagcatcggccacagccaggacctggtgatccactgggacatcaaggaggaggtggacgccggcgactggatcggcatgtacctgatcgacgaggtgctgagcgagaacttcctggactacaagaacagaggcgtgaacggcagccacagaggccagatcatctggaagatcgacgccagcagctacttcgtggagcccgagaccaagatctgcttcaagtactaccacggcgtgagcggcgccctgagagccaccacccccagcgtgaccgtgaagaacagcgccgcccccatcttcaagagcatcggcgccgacgagaccgtgcagggccagggcagcagaagactgatcagcttcagcctgagcgacttccaggccatgggcctgaagaagggcatgttcttcaaccccgacccctacctgaagatcagcatccagcccggcaagcacagcatcttccccgccctgccccaccacggccaggagagaagaagcaagatcatcggcaacaccgtgaaccccatctggcaggccgagcagttcagcttcgtgagcctgcccaccgacgtgctggagatcgaggtgaaggacaagttcgccaagagcagacccatcatcaagagattcctgggcaagctgagcatgcccgtgcagagactgctggagagacacgccatcggcgacagagtggtgagctacaccctgggcagaagactgcccaccgaccacgtgagcggccagctgcagttcagattcgagatcaccagcagcatccaccccgacgacgaggagatcagcctgagcaccgagcccgagagcgcccagatccaggacagccccatgaacaacctgatggagagcggcagcggcgagcccagaagcgaggcccccgagagcagcgagagctggaagcccgagcagctgggcgagggcagcgtgcccgacggccccggcaaccagagcatcgagctgagcagacccgccgaggaggccgccgtgatcaccgaggccggcgaccagggcatggtgagcgtgggccccgagggcgccggcgagctgctggcccaggtgcagaaggacatccagcccgcccccagcgccgaggagctggccgagcagctggacctgggcgaggaggccagcgccctgctgctggaggacggcgaggcccccgccagcaccaaggaggagcccctggaggaggaggccaccacccagagcagagccggcagagaggaggaggagaaggagcaggaggaggagggcgacgtgagcaccctggagcagggcgagggcagactgcagctgagagccagcgtgaagagaaagagcagaccctgcagcctgcccgtgagcgagctggagaccgtgatcgccagcgcctgcggcgaccccgagacccccagaacccactacatcagaatccacaccctgctgcacagcatgcccagcgcccagggcggcagcgccgccgaggaggaggacggcgccgaggaggagagcaccctgaaggacagcagcgagaaggacggcctgagcgaggtggacaccgtggccgccgaccccagcgccctggaggaggacagagaggagcccgagggcgccacccccggcaccgcccaccccggccacagcggcggccacttccccagcctggccaacggcgccgcccaggacggcgacacccaccccagcaccggcagcgagagcgacagcagccccagacagggcggcgaccacagctgcgagggctgcgacgccagctgctgcagccccagctgctacagcagcagctgctacagcaccagctgctacagcagcagctgctacagcgccagctgctacagccccagctgctacaacggcaacagattcgccagccacaccagattcagcagcgtggacagcgccaagatcagcgagagcaccgtgttcagcagccaggacgacgaggaggaggagaacagcgccttcgagagcgtgcccgacagcatgcagagccccgagctggaccccgagagcaccaacggcgccggcccctggcaggacgagctggccgcccccagcggccacgtggagagaagccccgagggcctggagagccccgtggccggccccagcaacagaagagaggactgggaggccagaatcgacagccacggcagagtgttctacgtggaccacgtgaacagaaccaccacctggcagagacccaccgccgccgccacccccgacggcatgagaagaagcggcagcatccagcagatggagcagctgaacagaagataccagaacatccagagaaccatcgccaccgagagaagcgaggaggacagcggcagccagagctgcgagcaggcccccgccggcggcggcggcggcggcggcagcgacagcgaggccgagagcagccagagcagcctggacctgagaagagagggcagcctgagccccgtgaacagccagaagatcaccctgctgctgcagagccccgccgtgaagttcatcaccaaccccgagttcttcaccgtgctgcacgccaactacagcgcctacagagtgttcaccagcagcacctgcctgaagcacatgatcctgaaggtgagaagagacgccagaaacttcgagagataccagcacaacagagacctggtgaacttcatcaacatgttcgccgacaccagactggagctgcccagaggctgggagatcaagaccgaccagcagggcaagagcttcttcgtggaccacaacagcagagccaccaccttcatcgaccccagaatccccctgcagaacggcagactgcccaaccacctgacccacagacagcacctgcagagactgagaagctacagcgccggcgaggccagcgaggtgagcagaaacagaggcgccagcctgctggccagacccggccacagcctggtggccgccatcagaagccagcaccagcacgagagcctgcccctggcctacaacgacaagatcgtggccttcctgagacagcccaacatcttcgagatgctgcaggagagacagcccagcctggccagaaaccacaccctgagagagaagatccactacatcagaaccgagggcaaccacggcctggagaagctgagctgcgacgccgacctggtgatcctgctgagcctgttcgaggaggagatcatgagctacgtgcccctgcaggccgccttccaccccggctacagcttcagccccagatgcagcccctgcagcagcccccagaacagccccggcctgcagagagccagcgccagagcccccagcccctacagaagagacttcgaggccaagctgagaaacttctacagaaagctggaggccaagggcttcggccagggccccggcaagatcaagctgatcatcagaagagaccacctgctggagggcaccttcaaccaggtgatggcctacagcagaaaggagctgcagagaaacaagctgtacgtgaccttcgtgggcgaggagggcctggactacagcggccccagcagagagttcttcttcctgctgagccaggagctgttcaacccctactacggcctgttcgagtacagcgccaacgacacctacaccgtgcagatcagccccatgagcgccttcgtggagaaccacctggagtggttcagattcagcggcagaatcctgggcctggccctgatccaccagtacctgctggacgccttcttcaccagacccttctacaaggccctgctgagactgccctgcgacctgagcgacctggagtacctggacgaggagttccaccagagcctgcagtggatgaaggacaacaacatcaccgacatcctggacctgaccttcaccgtgaacgaggaggtgttcggccaggtgaccgagagagagctgaagagcggcggcgccaacacccaggtgaccgagaagaacaagaaggagtacatcgagagaatggtgaagtggagagtggagagaggcgtggtgcagcagaccgaggccctggtgagaggcttctacgaggtggtggacagcagactggtgagcgtgttcgacgccagagagctggagctggtgatcgccggcaccgccgagatcgacctgaacgactggagaaacaacaccgagtacagaggcggctaccacgacggccacctggtgatcagatggttctgggccgccgtggagagattcaacaacgagcagagactgagactgctgcagttcgtgaccggcaccagcagcgtgccctacgagggcttcgccgccctgagaggcagcaacggcctgagaagattctgcatcgagaagtggggcaagatcaccagcctgcccagagcccacacctgcttcaacagactggacctgcccccctaccccagctacagcatgctgtacgagaagctgctgaccgccgtggaggagaccagcaccttcggcctggagtag

SEQ ID NO: 105966 - DNA, 4719 bp, Artificial Sequence
  derived and/or modified sequence
atgttactgcatctgtgcagcgtcaaaaacttataccagaatagatttctcggcctggccgctatggcttccccgtctagaaattctcagtctcgacgccggtgtaaagaaccactccgctactcttacaacccagaccaatttcacaatatggacctccgaggtggaccccatgatggagttacaatcccacggagtacatcagatactgacctggtcacaagcgactcccggagcactctgatggtgtcatccagctactattcaattgggcactctcaggacttggtgatccattgggatattaaagaggaagtggacgcaggggattggatcggaatgtatcttattgacgaggtcctcagtgagaacttcctggactataaaaacaggggtgtaaacggaagtcaccggggccaaatcatttggaagatcgatgcgagcagctattttgttgaacctgagacaaagatatgttttaagtattaccacggcgtgagcggagccctgcgggccacaaccccatcagttaccgttaaaaattctgctgccccaattttcaaatcaatcggggccgacgagacagtgcaaggacaggggtcacgccggctgatctcttttagtctgagtgatttccaggctatgggactaaaaaagggcatgttttttaatccagatccttatcttaagatatctattcaacccggcaagcactccattttccccgcgctccctcaccatgggcaggaacgtagatccaagatcattgggaacaccgttaatcctatatggcaagcggagcagttctccttcgtaagtctacccacggatgtactggagatcgaagtcaaggataagttcgccaagagccgcccaatcataaagaggttcctgggcaaattgtcaatgcccgtgcaacgcttactggaaaggcacgctatcggtgatcgggtggtgtcatatacccttggcaggaggctgccaacagaccatgtctcaggtcagctgcagttccggtttgaaataacctcatctatacatccagacgatgaagagatttcattgtccacagagcccgagagcgctcaaatccaggacagccccatgaacaatttgatggaaagcggtagcggcgagccaagaagtgaggcccccgagtcgtccgaatcctggaagcctgaacagttgggagaaggatccgtccccgatggacccgggaatcagagtatcgagctgtctagacccgctgaggaggctgccgtcatcacagaggctggagaccaaggaatggtttccgtgggacccgagggcgcaggcgagctgcttgcccaggttcagaaagatatccagcccgcaccttctgccgaggaactggctgagcagctggacctgggtgaggaagcctccgcactcctgcttgaggacggagaggctccagccagcaccaaagaggagccacttgaagaagaggccacaacacagtccagagctggacgcgaggaagaggaaaaggaacaggaggaagaaggcgacgtaagcacactggagcaaggggagggtagactccagctccgagccagtgttaagcggaagtctcgcccatgtagtctcccagtcagcgaacttgaaaccgtgatcgcttccgcctgtggggaccccgagacaccacgaacccactacatccgcatccataccctcctgcactccatgcccagcgcccagggtggatcagccgccgaggaagaggatggggcagaggaggagtcaacccttaaagacagctccgagaaggatggactgtcagaagtggataccgttgctgctgatccttctgccctggaggaggacagggaagaaccagagggagccaccccaggcaccgctcaccctggtcacagcggagggcatttccccagtttggcaaacggcgcggcccaggatggcgatacacacccgagcacagggagcgagtccgatagctcaccccgacagggaggtgaccatagttgtgagggctgtgatgcatcctgctgctctccctcgtgttatagtagctcctgctacagtacgtcgtgttattcatccagctgttattctgcctcttgttatagcccgagttgctataacggaaatagattcgcttctcataccagatttagttcagtggattctgcaaagatctcagaatcgaccgtattctctagccaggatgatgaggaagaagaaaattctgctttcgaaagcgtgcctgattctatgcagtcccccgagctagatccggagtctactaatggggcaggcccctggcaggacgagctggctgctccttccggtcacgtggagcgatctcctgaaggtctcgaatcgccggtcgcagggccctccaataggagagaggattgggaagcacggatcgactcccatggcagggtcttttatgtggaccacgtcaaccgcacaaccacatggcagagaccaacagccgccgctacacccgatgggatgagacggtcaggctcaatccagcagatggaacaattaaatagaagataccagaacatacaacgcacgattgcgaccgagcggtccgaggaggattcggggagtcagtcatgtgagcaggcaccagccgggggaggaggaggcggtggcagtgattccgaggccgagagttctcagtcttcattggatttacgcagggaagggtccctgtccccagtgaatagtcagaaaattactcttctgctgcaatcaccagccgtaaaatttatcaccaatccggaattcttcactgttctgcatgccaattactctgcttaccgagtgtttaccagctcgacctgcctcaaacatatgattctcaaagttcgcagggatgccaggaatttcgaacgctaccaacataatcgagacctggtcaacttcattaacatgttcgcggacaccaggcttgagttgccacgaggttgggaaatcaagacagaccagcaaggaaagtccttcttcgtcgaccataatagcagagctaccacctttattgaccctaggatcccacttcagaacggtcgcctgccgaatcatttgactcatcgacaacacctccaacgtctccggtcctactcagctggagaagcctccgaagtgtcacgtaacagaggggcctctctgctggcacggcccggccacagtctggtagctgccatccgttcccaacaccagcacgaatcattgcccctggcttacaatgacaagatcgtcgcgttcctacgccaaccgaacatctttgaaatgctgcaagagcggcagccctcccttgccagaaaccacactctgcgcgaaaagatccactacatccgcaccgaaggcaaccatggcttggaaaaacttagttgtgacgccgacctcgtaatcctgctgtccctgttcgaggaggagattatgagctacgtgccacttcaggctgcatttcaccccgggtactcttttagccccaggtgtagcccgtgtagcagcccccagaactcccccggtttgcagcgtgcttccgcccgggcgccaagcccctatcgcagggacttcgaggcgaaacttcgcaacttctaccgtaagttggaagcaaaaggcttcgggcaaggtcctggcaagattaaacttattatcagacgagatcatctgctggagggcacctttaaccaggtgatggcatactccagaaaggagctccagagaaacaagttgtacgtgacatttgtgggggaggagggccttgactacagcgggccctcacgggagttcttctttctcctgagccaggagctgtttaatccttactacggtctcttcgagtatagtgcaaatgatacctatacggttcagatatcaccaatgtctgccttcgtggaaaaccacctggagtggttccgcttttcaggtagaatactgggactggcgctgatccatcaatacctgcttgatgccttctttactaggccgttctacaaagcactcctacgccttccctgcgacctgtcggacctggaataccttgacgaagagttccaccagagtctccagtggatgaaggataacaatatcactgacattctggatctcacttttactgtcaatgaggaagttttcggacaggtgactgagcgtgagcttaagagcggaggcgctaacacgcaggtaacggagaagaataagaaggagtacatcgaaaggatggtgaagtggcgggtggagcgtggagtggtacagcagaccgaagccctggtaagaggcttctacgaggtagtcgatagcagactggtgtctgtgtttgacgccagggagttggagttggtgatagccggaacggctgaaatcgacttgaatgactggagaaataacaccgaatatagaggagggtaccatgacggacacttggttattcggtggttctgggcagccgtcgagcgattcaataacgaacagaggcttcgactgctgcaattcgtcaccggtacctcctcagttccatatgaaggcttcgctgccctgagaggctccaacggtctgcggagattctgcatagaaaaatgggggaaaatcacttctctgcctagggcgcatacttgtttcaacagactagacctgcccccatatccaagctactctatgttgtacgagaagctgctcacagcagtggaagaaacatctacctttggtcttgagtag

SEQ ID NO: 105967 - DNA, 4719 bp, Artificial Sequence
  derived and/or modified sequence
atgctgctgcacctgtgcagcgtgaagaacctgtaccagaaccgcttcctgggcctggccgccatggccagccccagcaggaacagccagagcagaagacgctgcaaggagcccctgcgctacagctacaacccagaccagttccacaacatggacctgcggggcggcccccatgatggagtgaccatccccaggagcaccagtgacacagacctggtgaccagtgacagccgcagcaccctgatggtgagcagcagctactacagcatcggccacagccaggacctggtgatccactgggacatcaaggaggaggtggatgctggggactggattggcatgtacctgattgatgaggtgctgtctgagaacttcctggactacaagaacagaggagtgaatggcagccaccggggccagatcatctggaagattgatgccagcagctactttgtggagcctgagaccaagatctgcttcaagtactaccacggcgtgtctggggccctgcgggccaccacccccagcgtgacagtgaagaacagcgctgcccccatcttcaagagcatcggggctgatgaaacagtgcagggccagggcagccggcggctcatctccttcagcctgagtgacttccaggccatgggcctgaagaagggcatgttcttcaacccagacccctacctgaagatcagcatccagcccgggaagcacagcatcttccctgccctgccccaccacggccaggagaggaggagcaagatcatcggcaacacagtgaaccccatctggcaggccgagcagttctcctttgtgtccctgcccacagatgtgctggagattgaggtgaaggacaagtttgccaagagccggcccatcatcaagcgcttcctgggcaagctgtccatgcctgtgcagaggctgctggagagacatgccatcggggacagagtggtgtcctacaccctgggccgccgcctgcccacagaccacgtgtctggccagctgcagttccgctttgagatcaccagcagcatccacccagatgatgaggagatcagcctgagcacagagcctgagagcgcccagatccaggacagccccatgaacaacctgatggagagcggcagcggggagcccaggtctgaggcccctgagagcagcgagagctggaagccagagcagctgggggagggctctgtgcctgatggccctggcaaccagagcattgagctgagcaggcctgctgaggaggccgccgtcatcacagaagctggggaccagggcatggtgtctgtgggccctgagggcgctggggagctgctggcccaggtgcagaaggacatccagcctgcccccagcgctgaggagctggccgagcagctggacctgggggaggaggccagcgccctgctgctggaggatggagaggccccagccagcaccaaggaggagcccctggaggaggaggccaccacccagagcagagctggccgggaggaggaggagaaggagcaggaggaggagggagatgtgtccaccctggagcagggcgagggccgcctgcagctgcgggcctctgtgaagaggaagagccggccctgcagcctgcctgtgtctgagctggagaccgtcatcgccagcgcctgtggggaccctgagacccccaggacccactacatccgcatccacaccctgctgcacagcatgcccagcgcccagggcggcagcgctgctgaggaggaggatggagctgaggaggagagcaccctgaaggacagcagcgagaaggatggcctgtctgaggtggacacagtggccgctgaccccagcgccctggaggaggaccgggaggagcctgagggcgccaccccaggcacagcccaccctggccacagcggcggccacttccccagcctggccaacggggccgcccaggatggagacacccaccccagcacaggcagcgagagtgacagcagcccccggcagggcggggaccacagctgtgagggctgtgatgccagctgctgcagccccagctgctacagcagcagctgctacagcaccagctgctacagcagcagctgctacagcgccagctgctacagccccagctgctacaatggaaacagatttgccagccacacccgcttcagctctgtggacagcgccaagatcagcgagagcacagtgttcagcagccaggatgatgaggaggaggagaacagcgcctttgagagcgtgcctgacagcatgcagagccctgagctggaccctgagagcaccaacggggccggcccctggcaggatgagctggccgcccccagcggccacgtggagaggagccctgagggcctggagagccctgtggccggccccagcaacagaagagaggactgggaggccagaattgacagccacggccgggtcttctacgtggaccacgtgaacagaaccaccacctggcagaggcccacagctgctgccaccccagatggcatgaggaggagcggcagcatccagcagatggagcagctgaacagacgctaccagaacatccagaggaccatcgccacagagaggagtgaagaagattctggcagccagagctgtgagcaggccccagctgggggcggcggcggcggcggcagtgacagcgaggccgagagcagccagagcagcctggacctgcggcgggagggcagcctgagccctgtgaacagccagaagatcaccctgctgctgcagagccctgctgtgaagttcatcaccaaccctgagttcttcaccgtgctgcacgccaactacagcgcctacagagtcttcaccagcagcacctgcctgaagcacatgatcctgaaggtgagaagagatgccaggaactttgagcgctaccagcacaacagagacctggtgaacttcatcaacatgtttgctgacacccggctggagctgccccggggctgggagatcaagacagaccagcagggcaagagcttctttgtggaccacaacagccgggccaccaccttcatcgacccccgcatccccctgcagaatggccgcctgcccaaccacctgacccaccggcagcacctgcagaggctgcggagctacagcgctggggaggccagcgaggtgtccaggaacagaggagccagcctgctggcccggcccggccacagcctggtggccgccatccgcagccagcaccagcacgagagcctgcccctggcctacaatgacaagatcgtggccttcctgcggcagcccaacatctttgagatgctgcaggagcggcagcccagcctggccaggaaccacaccctgcgggagaagatccactacatcagaacagagggcaaccacggcctggagaagctgagctgtgatgctgacctggtgatcctgctgagcctgtttgaggaggagatcatgtcctatgtgcccctgcaggccgccttccaccctggctacagcttcagcccccgctgcagcccctgcagcagcccccagaacagccctggcctgcagagggccagcgcccgggcccccagcccctaccgccgggactttgaggccaagctgaggaacttctacaggaagctggaggccaagggcttcggccagggccctgggaagatcaagctgatcatcagaagagaccacctgctggagggcaccttcaaccaggtgatggcctacagcaggaaggagctgcagaggaacaagctgtatgtgacctttgtgggggaggagggcctggactacagcggccccagccgggagttcttcttcctgctgagccaggagctgttcaacccctactacggcctgtttgagtacagcgccaatgacacctacacagtgcagatcagccccatgtctgcctttgtggagaaccacctggagtggttccgcttcagcggccgcatcctgggcctggccctgatccaccagtacctgctggatgccttcttcacccggcccttctacaaggccctgctgcggctgccctgtgacctgagtgacctggagtacctggatgaggagttccaccagagcctgcagtggatgaaggacaacaacatcacagacatcctggacctgaccttcaccgtgaatgaggaggtgtttggccaggtgacagagcgggagctgaagagcggcggggccaacacccaggtgacagagaagaacaagaaggagtacatcgagaggatggtgaagtggagggtggagcggggcgtggtgcagcagacagaggccctggtgcggggcttctatgaggtggtggacagccggctggtgtctgtgtttgatgcccgggagctggagctggtgattgctggaacagctgagattgacctgaatgactggaggaacaacacagagtacagaggaggctaccatgatggccacctggtgatccgctggttctgggccgctgtggagcgcttcaacaatgagcagaggctgcggctgctgcagtttgtgacaggcaccagctctgtgccctatgagggctttgctgccctgcggggcagcaatggcctgcggcgcttctgcatcgagaagtggggcaagatcaccagcctgccccgggcccacacctgcttcaaccggctggacctgcccccctaccccagctacagcatgctgtatgagaagctgctgacagctgtggaggagaccagcaccttcggcctggagtag

SEQ ID NO: 105968 - DNA, 4719 bp, Artificial Sequence
  derived and/or modified sequence
atgctgctgcacctgtgcagcgtgaagaacctgtaccagaaccggttcctggggctggctgcaatggccagcccatctaggaattcccaatccagaaggaggtgcaaggagccgctgcgatactcgtataaccctgatcagttccacaatatggacctgcgagggggcccccatgacggagtgaccattcccagaagcacaagcgacacggacctggtcaccagcgactcacgctccacactcatggttagctcctcttattactccattgggcactcccaggaccttgtgatccactgggatatcaaagaggaggtggacgcaggggattggattggaatgtaccttatagatgaggtgctgagcgagaactttctggactacaaaaacagaggcgtgaacggttcccatcgagggcagatcatctggaagatcgacgcgtcctcgtacttcgtggagcccgagactaagatatgttttaagtactaccatggcgtgagcggcgccctgcgcgcaacaacaccctccgtaactgtcaaaaactccgctgccccaatctttaaatcgataggagcggatgagaccgtccagggccagggaagccgccggctaataagtttcagcctgtctgacttccaggcaatgggcctcaaaaaaggcatgtttttcaacccagatccttatctgaagattagcattcagccaggcaaacactctatatttccagctttaccccatcatggtcaggagaggcgctccaaaataatcggaaacacagtcaaccctatttggcaagcagagcagttctccttcgtgtccctacccacagatgtgttagagattgaagtcaaagataagttcgcaaagagccggcctatcatcaagagatttctggggaagctctccatgcctgtgcaacgccttctagaacggcacgccattggtgacagggtagtgagctatactttaggacggcgattgcccaccgaccatgtctcaggtcaactacagtttcgcttcgagataacatcgtcaattcaccccgacgacgaagagatttctttatccaccgagccagagtccgcacaaattcaagacagccccatgaacaatctcatggaaagcggcagcggggaacctcggtccgaagccccagaaagcagcgagtcctggaaacctgagcagttaggcgaaggcagtgttccggatggccctggaaatcagtccattgagctgagtaggcctgcagaggaagccgcagtcatcactgaggctggggaccagggcatggtctcagtcggacctgaaggggctggagagcttcttgcacaggtccagaaggacatacaacccgcaccatcggctgaggaactggcagaacagctggatctgggtgaggaagcttcagccttgctattggaagatggggaagctcctgcctctacaaaggaggaacccctggaggaggaagccaccacacagagtcgagcaggacgcgaggaagaagagaaggagcaagaggaagagggtgacgtctcaacactggagcagggtgaggggcgccttcaactccgcgcatccgtgaagaggaagagcagaccctgcagtttgcctgtatccgagctggagaccgtaatagcatccgcttgtggcgacccggaaactcctcgaacacattacatcaggattcacaccctcttgcattcaatgccgtccgcccagggcgggagcgcggcagaagaggaagatggagcggaagaggaaagcactctcaaagacagtagcgaaaaggatggccttagcgaagtcgacaccgtcgcagccgacccatccgcattagaagaggatcgagaagagcctgagggcgccacaccaggcaccgcccatcccgggcactcgggggggcattttccttctctggcaaacggagcagcccaagacggggacacacatccgtcgactggtagtgagtcagatagctcacccagacaggggggcgaccactcttgcgaaggatgcgatgccagctgttgttccccgtcctgttactcatcctcatgttatagcacaagctgctattcttcaagttgttatagcgcttcgtgctatagcccatcctgctacaacgggaacagatttgccagtcacacaagattttcttccgtggattcagcaaaaatctccgagtccacggtcttttcctctcaagacgatgaggaagaagagaattccgcgtttgagtccgtgcccgatagtatgcagagccctgagctggacccagagtcgactaatggcgcaggtccatggcaagatgagctagcagcaccaagcggccacgtcgaacgttcacccgaaggcctcgaatcacccgtggctggtccatccaaccgccgggaggactgggaggcgaggatcgattcccacgggcgggtgttttacgtggaccatgtgaatcgaactaccacttggcagcggcccaccgccgctgcaacacccgacgggatgcgcagatctggaagtatccagcagatggagcagcttaataggcgttaccagaatattcagcggaccattgctacagaaagatctgaggaagactctggtagccaatcctgtgaacaggcccccgctggagggggaggcggaggcggtagcgattcagaggcagagagcagtcagagtagcctggacctgcggcgggaggggtcgctcagccccgtgaattcccaaaagataacattactgttgcaatcaccagccgtaaagttcatcacgaatcccgaattcttcaccgtgctccacgcgaattactctgcataccgagtatttaccagctcaacttgtctaaagcacatgattctaaaggtccggagggatgcccgcaacttcgaaagataccaacacaaccgcgatctggttaacttcattaacatgttcgccgacacgcgtttggaactgcccagaggatgggagatcaaaacggatcagcagggaaaaagtttcttcgttgaccacaattcccgcgccactaccttcatagaccctagaatccctcttcagaacgggcgactcccgaatcacctcacccataggcagcaccttcaacgcctaaggagctattccgccggggaggcaagcgaggtcagcaggaaccgcggagcttctttactggcccgtccgggccattctttggtggccgcaatacgatcccaacaccagcacgagtcgttgcccctagcttataacgataagatcgtggctttcctaagacagccaaatatcttcgagatgctgcaggagagacaaccaagtctggcgagaaaccacacgctaagggaaaagatccactacatcaggactgagggaaatcacggtttggaaaaactgtcatgcgatgcggatctggttatactgctgagtctgttcgaagaagagatcatgagctacgtgcccctgcaggcagctttccacccggggtactctttctcaccacgctgcagtccttgctcctcccctcagaattctcccggtcttcagagggcttccgctagggcaccatcaccatatcgccgagactttgaggctaagttaagaaatttctatcgaaaacttgaagctaagggtttcggacagggcccagggaagattaaactcatcatcaggagggaccacctacttgaggggacatttaatcaagtgatggcctatagccgcaaagaactgcagagaaacaagctttacgtgactttcgtaggggaggaaggactggactattccgggccttcaagggaatttttctttcttcttagtcaggaactgtttaacccgtattatgggttattcgagtactccgctaatgacacttacaccgttcaaatctctccgatgtcagcctttgtagagaaccatctggagtggtttcgtttttcgggtagaatccttggcctggcactaattcatcaatacctgcttgacgccttttttacccggccgttctataaggccctgctgcgtctgccctgcgatctgagcgacctcgagtaccttgatgaggagtttcatcagtccctgcagtggatgaaagataacaatattactgacattctcgacctaacgttcaccgtcaacgaagaggtattcggacaggttacggaacgggagctgaaaagtggcggcgcaaatacccaggtcaccgagaagaataagaaagaatatattgagcgcatggtcaaatggagggtggaaagaggagtggtgcagcaaaccgaggccctggtccgagggttttatgaggttgttgatagtcgcctggtctccgtgtttgatgcgcgcgagttggaactggttattgcaggaactgctgagattgatttgaacgattggcgaaataatacagagtatcggggcggctatcacgacgggcacttagtgatacgatggttctgggccgctgtggaaagattcaataatgaacagcgcctcaggttattgcagttcgtgactggcaccagctctgtgccctacgaaggctttgccgctcttagagggtctaacggcctgaggcggttttgcattgagaaatgggggaagatcacaagtctcccacgcgctcacacatgtttcaacaggctggatcttccaccctatcctagttattccatgctgtatgaaaagttgctaactgctgtcgaggaaaccagcacatttgggctggaatag

SEQ ID NO: 105969 - DNA, 4719 bp, Artificial Sequence
  derived and/or modified sequence
atgttgcttcacctgtgtagtgtcaaaaacttgtaccaaaacaggttcctgggtctagctgcaatggcatcaccttccaggaacagtcagtcacgtaggcgctgcaaagaacccctaaggtattcctataatccagaccagttccacaatatggacctccggggaggcccacatgatggcgtcactatccccaggtccacgagcgacacagaccttgtcacgagcgatagtaggagcactcttatggtgtcatcctcttactatagcattggccactctcaggacctggttatccattgggatattaaggaggaagtagacgcaggggattggataggaatgtatctgatcgatgaggtgctctctgaaaacttcttagactacaagaatagaggcgtaaacgggtctcaccgcggacagatcatatggaagatagatgcttcttcttactttgttgaaccagagaccaaaatttgtttcaaatactaccacggagtatcgggcgctctacgggcaactactccctccgtcacagtgaagaattcagctgctccaatctttaagtcgataggtgctgacgaaaccgttcagggtcagggcagccgacgcctgattagttttagtttgagtgacttccaggctatggggctgaaaaaagggatgttcttcaaccccgacccatatctcaagatctccatacagcctgggaagcactcaatattccctgcgctgccacaccacggtcaggagcgccgttccaaaataataggaaatacagttaatccgatttggcaggctgaacaattctcttttgtctctttaccaactgacgtgctcgagatcgaggttaaagacaagttcgccaagtctcgtccaatcattaagcgctttctggggaagctgtctatgcccgtccaacgcctgttagagcgccatgctatcggcgatagagtggtgtcctacaccctcggcaggagactgccaacagaccatgtgagcggccagctgcaatttagattcgaaattacaagttctatacatccggacgatgaagagatatccctgtccactgaacctgaaagcgctcagatccaggactcgcccatgaacaacctcatggagagcggaagtggcgagcctagaagcgaggcccctgaaagcagcgaatcctggaaacccgaacagttgggggaaggtagcgtgccagatggacccggtaatcagtccatcgagctttccagacccgctgaagaagccgctgtgattacggaggctggcgatcaagggatggtgtccgtcggaccggagggagcaggcgagctcctggctcaggtccaaaaagatattcaacccgctccttctgcggaggaactggctgaacagttggacctcggggaggaggcctccgccttactgttagaggatggggaggctccagcctcaactaaagaggaacctctcgaggaagaggctactacccagtccagagccggtcgggaggaagaagaaaaggaacaggaggaagagggggacgtgagcacattggagcagggcgaggggcgattacagttgcgggctagtgtcaagcgcaagagcagaccctgttcccttcccgtatctgagctggagacggtcatcgcgtccgcttgcggtgacccagaaacaccaaggacacattatattagaattcacaccctgctgcacagtatgccttcagcccaaggcggatcagctgccgaggaggaagacggagcagaggaagaatcaactcttaaagactcaagtgagaaggacgggctttcggaggtggacacggtagccgctgatcctagtgccctggaagaggaccgcgaagaaccagagggagctacaccagggactgcgcatcccggacacagtggaggccactttccaagcctggcaaatggagccgctcaggacggagatacacacccttcaaccgggagtgaatccgattcttctcccaggcaaggcggtgaccattcttgtgaggggtgtgacgcgtcgtgttgttccccctcctgctactcctcatcctgctacagcacgagctgctactcctccagctgttatagtgcgtcttgctattcaccttcttgttacaacggaaatagatttgcgtcccacacccgcttctcctccgtggattccgctaagatttccgagtctactgtgttcagtagtcaggacgatgaggaggaggagaactcagccttcgagtctgttcctgattccatgcagtccccagagttggaccctgagtctacaaacggcgctgggccatggcaggacgaactcgctgcaccatcagggcacgtggagagatcaccagaggggttggagtctcccgttgccggacccagcaaccgcagggaagattgggaggctcggattgactctcatggaagagttttctacgtcgatcacgtgaatcgaacaacaacctggcaaagacctacggctgcggctacaccagacggtatgagaaggtcggggtctatccaacagatggaacagctcaatcgcagatatcagaacattcagcgcacaatagcgaccgagaggtcagaagaggattcggggtcacaatcttgtgagcaggccccagcgggtgggggtggcggtggaggctctgactcagaggcagaatcttcgcagtcgtctcttgacctgcgcagggagggatcgctctccccggtcaactcacagaagatcaccctcctgctgcagagtcccgctgtgaagttcattacgaatcctgagttcttcaccgtgcttcacgccaattactccgcctacagggtttttacatccagcacatgcctcaaacatatgatcttgaaggttcgaagagacgcccgaaatttcgagagatatcaacacaaccgggaccttgtgaatttcatcaacatgttcgccgacacgagattagagctgcccaggggttgggagatcaagaccgatcagcagggaaaatctttctttgtggaccacaacagtcgtgccaccacatttatcgatcctcgaatcccattacagaatggcagactcccaaaccacctcacccacaggcagcatctgcaacggctccgctcctattccgccggagaggcgtctgaagtgtcaagaaacagaggagctagtcttctcgcccgacccggtcatagcctggtggcagccattagaagccagcaccagcacgagtcacttcctctggcctataacgacaagatagtggcctttttacgacagcccaacatatttgagatgctgcaggagagacaaccaagcctggccaggaaccacacactcagggagaaaatacattatatccgcacagaagggaaccatggtctggaaaagctcagctgtgacgctgacctggtaatcctgctcagtttgttcgaggaggaaataatgtcgtacgtccccctacaggccgctttccatcctggctacagtttctccccaagatgcagcccctgttcttctcctcaaaattcgccgggactccaacgcgctagtgctagggcgccaagcccttataggcgcgactttgaggccaaacttagaaatttttacaggaaactggaagctaagggttttggccaggggcctggcaagattaaactgattatccgcagagaccacttattggagggcacctttaaccaggttatggcctactctagaaaagaacttcagcgaaataaactttatgtgaccttcgtcggagaggaagggctcgattattcagggccatcgagggaattttttttccttctctcacaggaactattcaacccatattacggtctgtttgaatactctgctaatgacacctacaccgtgcaaatctcccctatgtctgcttttgtcgagaaccacttagaatggtttagattcagcggaaggatcttgggcctggcattgatccatcagtacttattagacgcatttttcacacgacccttttacaaagcccttctgcgattgccctgcgatctgagcgatcttgaatatttggacgaagagtttcatcagagcctccaatggatgaaagataacaatattacagatatcctggatcttacatttaccgtcaatgaggaggtatttggacaagtgacggaacgtgaattaaagagcgggggagcaaatacacaggtgaccgaaaaaaacaagaaagagtatatcgagcgaatggtgaagtggcgggtggagcggggtgtggtgcaacagacggaagctcttgttaggggtttctacgaagtcgtcgattcccggttggtgagcgtctttgacgctcgggagttggaacttgttattgcgggtaccgctgagatcgatctgaatgactggcgtaacaataccgaatacagaggaggttatcatgatggacatctggtcatcagatggttctgggctgcagtggaacgttttaacaatgagcagagattaaggctgctgcagtttgtgactggtaccagctctgttccctacgagggattcgccgctctaagggggtcaaatggacttcggaggttctgcattgagaaatggggtaagattactagcttgcctagggctcatacatgctttaaccggctcgatctaccgccttatccgtcttactcaatgctatacgagaagctgttgaccgccgtggaggagacctccacgttcggcttggagtag

SEQ ID NO: 105970 - DNA, 5169 bp, Artificial Sequence
  derived and/or modified sequence
gcgcatcaggcgctgttgttggagccggaacaccgtgcgactctgaccgaaccggccccctcctcgcgcacacactcgccgagccgcgcgcgcccctccgccgtgacagtggccgtggcctccgctctctcggggcacccggcagccagagcgcagcgagagcgggcggtcgccagggtcccctccccagccagtcccaggcgcccggtgcactatgcggggcacgtgcgccccccagctctaatctgcgcgctgacaggagcatgatctgtgcccaggccagggctgccaaggaattgatgcgcgtacacgtggtgggtcattatgctgctgcacctgtgtagtgtgaagaatctgtaccagaacaggtttttaggcctggccgccatggcgtctccttctagaaactcccagagccgacgccggtgcaaggagccgctccgatacagctacaaccccgaccagttccacaacatggacctcaggggcggcccccacgatggcgtcaccattccccgctccaccagcgacactgacctggtcacctcggacagccgctccacgctcatggtcagcagctcctactattccatcgggcactctcaggacctggtcatccactgggacataaaggaggaagtggacgctggggactggattggcatgtacctcattgatgaggtcttgtccgaaaactttctggactataaaaaccgtggagtcaatggttctcatcggggccagatcatctggaagatcgatgccagctcgtactttgtggaacctgaaactaagatctgcttcaaatactaccatggagtgagtggggccctgcgagcaaccacccccagtgtcacggtcaaaaactcggcagctcctatttttaaaagcattggtgctgatgagaccgtccaaggacaaggaagtcggaggctgatcagcttctctctctcagatttccaagccatggggttgaagaaagggatgtttttcaacccagacccttatctgaagatttccattcagcctgggaaacacagcatcttccccgccctccctcaccatggacaggagaggagatccaagatcataggcaacaccgtgaaccccatctggcaggccgagcaattcagttttgtgtccttgcccactgacgtgctggaaattgaggtgaaggacaagtttgccaagagccgccccatcatcaagcgcttcttgggaaagctgtcgatgcccgttcaaagactcctggagagacacgccataggggatagggtggtcagctacacacttggccgcaggcttccaacagatcatgtgagtggacagctgcaattccgatttgagatcacttcctccatccacccagatgatgaggagatttccctgagtaccgagcctgagtcagcccaaattcaggacagccccatgaacaacctgatggaaagcggcagtggggaacctcggtctgaggcaccagagtcctctgagagctggaagccagagcagctgggtgagggcagtgtccccgatggtccagggaaccaaagcatagagctttccagaccagctgaggaagcagcagtcatcacggaggcaggagaccagggcatggtctctgtgggacctgaaggggctggggagctcctggcccaggtgcaaaaggacatccagcctgcccccagtgcagaagagctggccgagcagctggacctgggtgaggaggcatcagcactgctgctggaagacggtgaagccccagccagcaccaaggaggagcccttggaggaggaagcaacgacccagagccgggctggaagggaagaagaggagaaggagcaggaggaggagggagatgtgtctaccctggagcagggagagggcaggctgcagctgcgggcctcggtgaagagaaaaagcaggccctgctccttgcctgtgtccgagctggagacggtgatcgcgtcagcctgcggggaccccgagaccccgcggacacactacatccgcatccacaccctgctgcacagcatgccctccgcccagggcggcagcgcggcagaggaggaggacggcgcggaggaggagtccaccctcaaggactcctcggagaaggatgggctcagcgaggtggacacggtggccgctgacccgtctgccctggaagaggacagagaagagcccgagggggctactccaggcacggcgcaccctggccactccgggggccacttccccagcctggccaatggcgcggcccaggatggcgacacgcaccccagcaccgggagcgagagcgactccagccccaggcaaggcggggaccacagttgcgagggctgtgacgcgtcctgctgcagcccctcgtgctacagctcctcgtgctacagcacgtcctgctacagcagctcgtgctacagcgcctcgtgctacagcccctcctgctacaacggcaacaggttcgccagccacacgcgcttctcctccgtggacagcgccaagatctccgagagcacggtcttctcctcgcaagacgacgaggaggaggagaacagcgcgttcgagtcggtacccgactccatgcagagccctgagctggacccggagtccacgaacggcgctgggccgtggcaagacgagctggccgcccctagcgggcacgtggaaagaagcccggaaggtctggaatcccccgtggcaggtccaagcaatcggagagaagactgggaagctcgaattgacagccacgggcgggtcttttatgtggaccacgtgaaccgcacaaccacctggcagcgtccgacggcagcagccaccccggatggcatgcggagatcggggtccatccagcagatggagcaactcaacaggcggtatcaaaacattcagcgaaccattgcaacagagaggtccgaagaagattctggcagccaaagctgcgagcaagccccagcaggaggaggcggaggtggagggagtgactcagaagccgaatcttcccagtccagcttagatctaaggagagaagggtcactttctccagtgaactcacaaaaaatcaccttgctgctgcagtccccagcggtcaagttcatcaccaaccccgagttcttcactgtgctacatgccaattatagtgcctaccgagtcttcaccagtagcacctgcttaaagcacatgattctgaaagtccgacgggatgctcgcaattttgaacgctaccagcacaaccgggacttggtgaatttcatcaacatgttcgcagacactcggctggaactgccccggggctgggagatcaaaacggaccagcagggaaagtcttttttcgtggaccacaacagtcgagctaccactttcattgacccccgaatccctcttcagaacggtcgtcttcccaatcatctaactcaccgacagcacctccagaggctccgaagttacagcgctggagaggcctcagaagtttctagaaacagaggagcctctttactggccaggccaggacacagcttagtagctgctattcgaagccaacatcaacatgagtcattgccactggcatataatgacaagattgtggcatttcttcgccagccaaacatttttgaaatgctgcaagagcgtcagccaagcttagcaagaaaccacacactcagggagaaaatccattacattcggactgagggtaatcacgggcttgagaagttgtcctgtgatgcggatctggtcattttgctgagtctctttgaagaagagattatgtcctacgtccccctgcaggctgccttccaccctgggtatagcttctctccccgatgttcaccctgttcttcacctcagaactccccaggtttacagagagccagtgcaagagccccttccccctaccgaagagactttgaggccaagctccgcaatttctacagaaaactggaagccaaaggatttggtcagggtccggggaaaattaagctcattattcgccgggatcatttgttggagggaaccttcaatcaggtgatggcctattcgcggaaagagctccagcgaaacaagctctacgtcacctttgttggagaggagggcctggactacagtggcccctcgcgggagttcttcttccttctgtctcaggagctcttcaacccttactatggactctttgagtactcggcaaatgatacttacacggtgcagatcagccccatgtccgcatttgtagaaaaccatcttgagtggttcaggtttagcggtcgcatcctgggtctggctctgatccatcagtaccttcttgacgctttcttcacgaggcccttctacaaggcactcctgagactgccctgtgatttgagtgacctggaatatttggatgaggaattccaccagagtttgcagtggatgaaggacaacaacatcacagacatcttagacctcactttcactgttaatgaagaggtttttggacaggtcacggaaagggagttgaagtctggaggagccaacacacaggtgacggagaaaaacaagaaggagtacatcgagcgcatggtgaagtggcgggtggagcgcggcgtggtacagcagaccgaggcgctggtgcgcggcttctacgaggttgtagactcgaggctggtgtccgtgtttgatgccagggagctggagctggtgatagctggcaccgcggaaatcgacctaaatgactggcggaataacactgagtaccggggaggttaccacgatgggcatcttgtgatccgctggttctgggctgcggtggagcgcttcaataatgagcagaggctgagattactgcagtttgtcacgggaacatccagcgtgccctacgaaggcttcgcagccctccgtgggagcaatgggcttcggcgcttctgcatagagaaatgggggaaaattacttctctccccagggcacacacatgcttcaaccgactggatcttccaccgtatccctcgtactccatgttgtatgaaaagctgttaacagcagtagaggaaaccagcacctttggacttgagtgaggacatggaacctcgcctgacattttcctggccagtgacatcacccttcctgggatgatccccttttccctttcccttaatcaactctcctttgattttggtattccatgatttttattttcaaac

SEQ ID NO: 105971 - DNA, 1224 bp, Artificial Sequence
  derived and/or modified sequence
atgtcgctaaaatcggaacggagggggatacacgttgaccagtctgacctcctctgtaagaaagggtgtggttactatggaaaccctgcttggcagggattttgcagtaaatgctggagagaggagtatcataaagctcgccagaaacagatccaggaagattgggaattggccgaaaggctgcagagagaagaagaagaggcgttcgcttccagtcagtcaagccagggtgcgcagtctctgacattctccaaatttgaggagaaaaagactaatgagaagacaagaaaggtgacaacggtgaaaaaatttttctccgcatccagtagagtaggctcaaagaagcctccggagagggttgaaaaaattatggaccagatcgagaagtacattatgactcgactatacaaatacgtgttttgtcctgaaaccactgacgacgaaaagaaagacctggccatacagaagcgcatccgggctcttagatgggtcacgccacagatgctttgcgtgccagtcaacgaagatatccccgaggtcagtgatatggtggtgaaggccattaccgacattattgagatggattccaaacgggtacctagagacaagttagcgtgtatcacaaagtgcagcaagcacatcttcaacgctatcaagataacaaagaacgagcctgccagcgcagatgattttctcccgaccttgatctatatcgtattgaagggaaacccccccaggcttcaaagtaacattcagtatatcacgagattttgcaacccatctcgtctaatgacgggtgaggatggttactacttcaccaatttatgctgtgccgtggcttttatcgagaaactagacgcccaatctctgaatctaagccaggaagattttgaccgctatatgagcgggcagacgagccctcgcaaacaggaggcagagtcctggtctcctgatgcctgtcttggcgtgaaacagatgtacaagaatttggatctgctcagccagctcaatgaaagacaggagaggatcatgaacgaggctaaaaagctcgaaaaggacctgattgattggaccgatggcatcgccagggaggtccaggacattgtggagaagtaccctttggagattaagccgccaaaccaacccctagccgcgattgattctgagaatgtcgagaacgacaagctgccccctccccttcaaccacaagtgtacgcagggtag

SEQ ID NO: 105972 - DNA, 1224 bp, Artificial Sequence
  derived and/or modified sequence
atgagcctgaagtcagaaagaagaggcatccacgtggaccagagcgacctgctgtgcaagaagggctgcggctactacggcaacccagcctggcagggcttctgcagcaagtgctggagggaggagtaccacaaggcccggcagaagcagatccaggaggactgggagctggccgagcggctgcagcgggaggaggaggaggcctttgccagcagccagagcagccagggcgcccagagcctgaccttcagcaagtttgaggagaagaagaccaatgagaagaccaggaaggtgaccaccgtgaagaagttcttcagcgccagcagccgggtgggcagcaagaagcccccagagcgggtggagaagatcatggaccagatcgagaagtacatcatgacccggctgtacaagtatgtgttctgcccagagaccacagatgatgagaagaaggacctggccatccagaagaggatccgggccctgcgctgggtgaccccccagatgctgtgtgtgcctgtgaatgaagacatccctgaggtgtctgacatggtggtgaaggccatcacagacatcatcgagatggacagcaagagggtgccccgggacaagctggcctgcatcaccaagtgcagcaagcacatcttcaatgccatcaagatcaccaagaatgaaccagccagcgcagatgacttcctgcccaccctcatctacatcgtgctgaagggcaaccccccccggctgcagagcaacatccagtacatcacccgcttctgcaaccccagccggctgatgactggagaagatggctactacttcaccaacctgtgctgtgctgtggccttcatcgagaagctggatgcccagagcctgaacctgagccaggaggactttgaccgctacatgagcggccagaccagccccaggaagcaggaggccgagagctggagcccagatgcctgcctgggcgtgaagcagatgtacaagaacctggacctgctgagccagctgaatgaaaggcaggagcgcatcatgaatgaggccaagaagctggagaaggacctgattgactggacagatggcatcgcccgggaggtgcaggacatcgtggagaagtaccccctggagatcaagccacccaaccagcccctggccgccatcgacagtgaaaatgtggagaatgacaagctgcccccacccctgcagccccaggtgtatgccggctag

SEQ ID NO: 105973 - DNA, 1224 bp, Artificial Sequence
  derived and/or modified sequence
atgagcctgaagagcgagcggcggggcatccacgtggaccagagcgacctcctgtgcaagaagggatgcgggtactatggtaaccccgcctggcaggggttctgttccaagtgttggagagaggagtaccacaaggcccgacagaagcaaattcaggaggactgggagctcgctgagaggctgcagcgagaagaagaggaagcttttgcatctagtcagtccagccagggcgcgcagtccctcaccttttccaaatttgaagagaagaagaccaacgaaaagacgagaaaggtgacaaccgtcaaaaaatttttctcagcttcctccagggtcgggtccaaaaaacctcccgaacgtgtagaaaagatcatggatcagatagagaagtatattatgaccaggctttataagtatgtgttctgtcctgagaccacggacgatgagaaaaaggacctagctattcagaagaggattagagccctacggtgggttactccacagatgctttgtgtccctgtcaatgaagacatacctgaagtctccgacatggtggtcaaagccattacagatatcattgaaatggatagcaaacgtgtgcctcgcgataagctggcatgcatcactaagtgttccaaacacattttcaacgccatcaagattacaaagaacgagccagcgagcgccgatgactttttgcccacattgatatacattgtgctgaaggggaatcctccaaggctgcagagcaacattcagtatattaccaggttttgcaaccccagccggctgatgacaggggaggatggctattacttcaccaacctttgttgcgctgtggcatttattgagaagttagacgctcagtccttgaacctatcacaagaggactttgaccggtacatgagtggccagacatccccaagaaagcaggaggccgagtcctggtcccccgacgcttgtcttggggttaagcaaatgtataagaatttggaccttctttctcaattaaatgaaaggcaggaacgcataatgaacgaggcaaagaaactggaaaaggatctcatcgactggacagacggcatcgcgcgggaggtgcaagatatagtggagaaataccctctggaaattaagcctccaaaccagccgctcgctgccattgatagcgaaaatgttgagaacgacaaactccctccaccgttacagccccaggtatatgctggctag

SEQ ID NO: 105974 - DNA, 1224 bp, Artificial Sequence
  derived and/or modified sequence
atgagccttaagtctgaacgccgaggaattcatgtggatcaatcggatctcctgtgcaagaaaggatgtggttactacggcaaccctgcctggcagggtttctgctccaagtgctggagggaagagtaccacaaagccaggcagaagcagattcaggaggactgggagctggcggagcgactccagcgggaggaagaagaggcctttgccagcagtcagagcagccaaggggcccaatccctcacattctccaagtttgaagaaaagaaaaccaacgagaagacccgcaaggttaccacagtgaagaaattcttcagtgcatcttccagggtcggatcaaagaagcctccagaaagagtcgagaagataatggatcagattgaaaagtacatcatgactcgtctctataaatatgtattctgtccagaaactactgatgatgagaagaaagatcttgccattcaaaagagaatcagagccctgcgctgggttacgcctcagatgctgtgtgtccctgttaatgaagacatcccagaagtgtctgatatggtggtgaaggcgatcacagatatcattgaaatggattccaagcgtgtgcctcgagacaagctggcctgcatcaccaagtgcagcaagcacatcttcaatgccatcaagatcaccaagaatgagccggcgtcagcggatgacttcctccccaccctcatctacattgttttgaagggcaaccccccacgccttcagtctaatatccagtatatcacgcgcttctgcaatccaagccgactgatgactggagaggatggctactatttcaccaatctgtgctgtgctgtggctttcattgagaagctagacgcccagtctttgaatctaagtcaggaggattttgatcgctacatgtctggccagacctctcccaggaagcaagaagctgagagttggtctcctgatgcttgcttaggcgtcaagcaaatgtataagaacttggatctcttgtctcagttgaatgaacgacaagaaaggatcatgaatgaagccaagaaactggaaaaagacctcatagattggacagatggaattgcaagagaagttcaagacatcgttgagaaatacccactggaaattaagcctccgaatcaaccgttagcagctattgactctgaaaacgttgaaaatgataaacttcctccaccactgcaacctcaagtttatgcaggatga

SEQ ID NO: 105975 - DNA, 1224 bp, Artificial Sequence
  derived and/or modified sequence
atgagcttgaagagtgaacgacgaggaatccacgtggatcagtctgatctgctgtgtaagaaaggctgtggttactacggcaatcctgcgtggcagggcttttgcagcaagtgttggcgcgaagagtaccataaagcccgacagaaacagatacaagaggactgggagctggcagaaaggctgcagcgtgaagaagaggaagcttttgcatcaagccagtcctcccagggagcgcagagtctcacttttagtaagtttgaggagaagaaaacgaacgagaagacacgcaaggtgactactgttaaaaagttcttcagtgcctccagtagagtggggagtaaaaagcccccagaaagagttgaaaagataatggatcagatcgagaaatacattatgacacgactctacaaatatgtgttctgtcccgagaccaccgatgatgaaaagaaagacctggcaatacaaaaacgcatcagagcacttcggtgggtgaccccacaaatgctctgtgtcccggtcaatgaggacattccggaggtctcagacatggtggtcaaggccatcaccgacatcatcgaaatggactcgaagcgcgttccccgtgacaagttagcctgcatcacaaaatgctccaagcacattttcaatgccattaagatcacaaagaacgaacctgcttccgccgatgacttcctcccgacactgatttacatcgttctgaaggggaaccctccaaggttgcagagcaatattcaatatattacaagattctgtaatccttcccggttaatgacgggggaagatggctattatttcaccaacctgtgctgtgccgttgcattcatcgagaagttggacgcacaatcccttaacctaagccaggaggacttcgatcggtatatgtctggtcaaacttctcctcggaagcaagaggccgaaagctggtccccagacgcttgtcttggtgttaagcagatgtacaagaatttagacctcttgtctcaactgaatgagaggcaggagagaatcatgaacgaggcaaagaagttggaaaaagatctgatcgattggaccgatggaatagctcgtgaagtgcaagatatagtggagaagtaccccttggagataaaacctcctaatcaacccttggccgctatagactctgaaaatgtagagaatgacaaactgccaccgccacttcaacctcaggtgtatgcgggatag

SEQ ID NO: 105976 - DNA, 1224 bp, Artificial Sequence
  derived and/or modified sequence
atgagcctgaagagcgagagaagaggcatccacgtggaccagagcgacctgctgtgcaagaagggctgcggctactacggcaaccccgcctggcagggcttctgcagcaagtgctggagagaggagtaccacaaggccagacagaagcagatccaggaggactgggagctggccgagagactgcagagagaggaggaggaggccttcgccagcagccagagcagccagggcgcccagagcctgaccttcagcaagttcgaggagaagaagaccaacgagaagaccagaaaggtgaccaccgtgaagaagttcttcagcgccagcagcagagtgggcagcaagaagccccccgagagagtggagaagatcatggaccagatcgagaagtacatcatgaccagactgtacaagtacgtgttctgccccgagaccaccgacgacgagaagaaggacctggccatccagaagagaatcagagccctgagatgggtgaccccccagatgctgtgcgtgcccgtgaacgaggacatccccgaggtgagcgacatggtggtgaaggccatcaccgacatcatcgagatggacagcaagagagtgcccagagacaagctggcctgcatcaccaagtgcagcaagcacatcttcaacgccatcaagatcaccaagaacgagcccgccagcgccgacgacttcctgcccaccctgatctacatcgtgctgaagggcaacccccccagactgcagagcaacatccagtacatcaccagattctgcaaccccagcagactgatgaccggcgaggacggctactacttcaccaacctgtgctgcgccgtggccttcatcgagaagctggacgcccagagcctgaacctgagccaggaggacttcgacagatacatgagcggccagaccagccccagaaagcaggaggccgagagctggagccccgacgcctgcctgggcgtgaagcagatgtacaagaacctggacctgctgagccagctgaacgagagacaggagagaatcatgaacgaggccaagaagctggagaaggacctgatcgactggaccgacggcatcgccagagaggtgcaggacatcgtggagaagtaccccctggagatcaagccccccaaccagcccctggccgccatcgacagcgagaacgtggagaacgacaagctgcccccccccctgcagccccaggtgtacgccggctag

SEQ ID NO: 105977 - protein, 575 aa, Artificial Sequence
  derived and/or modified sequence
VSRKKMSLKSERRGIHVDQSDLLCKKGCGYYGNPAWQGFCSKCWREEYHKARQKQIQEDWELAERVLLCYPGWSAMVQFQLTATSASWAQVILLLQPPNVLGLQALQREEEEAFASSQSSQGAQSLTFSKFEEKKTNEKTRKVTTVKKFFSASSRVGSKKEIQEAKAPSPSINRQTSIETDRVSKEFIEFLKTFHKTGQEIYKQTKLFLEGMHYKRDLSIEEQSECAQDFYHNVAERMQTRGKERRFHHVGQAGLELLTSGDPPASASQSAGNTGVEPPHPAVPPERVEKIMDQIEKYIMTRLYKYVFCPETTDDEKKDLAIQKRIRALRWVTPQMLCVPVNEDIPEVSDMVVKAITDIIEMDSKRVPRDKLACITKCSKHIFNAIKITKNEPASADDFLPTLIYIVLKGNPPRLQSNIQYITRFCNPSRLMTGEDGYYFTNLCCAVAFIEKLDAQSLNLSQEDFDRYMSGQTSPRKQEAESWSPDACLGVKQMYKNLDLLSQLNERQERIMNEAKKLEKDLIDWTDGIAREVQDIVEKYPLEIKPPNQPLAAIDSENVENDKLPPPLQPQVYAG

SEQ ID NO: 105978 - protein, 531 aa, Artificial Sequence
  derived and/or modified sequence
MSLKSERRGIHVDQSDLLCKKGCGYYGNPAWQGFCSKCWREEYHKARQKQIQEDWELAERVLLCYPGWSAMVQFQLTATSASWAQVILLLQPPNVLGLQALQREEEEAFASSQSSQGAQSLTFSKFEEKKTNEKTRKVTTVKKFFSASSRVGSKKEIQEAKAPSPSINRQTSIETDRVSKEFIEFLKTFHKTGQEIYKQTKLFLEGMHYKRDLSIEEQSECAQDFYHNVAERMQTRGKVPPERVEKIMDQIEKYIMTRLYKYVFCPETTDDEKKDLAIQKRIRALRWVTPQMLCVPVNEDIPEVSDMVVKAITDIIEMDSKRVPRDKLACITKCSKHIFNAIKITKNEPASADDFLPTLIYIVLKGNPPRLQSNIQYITRFCNPSRLMTGEDGYYFTNLCCAVAFIEKLDAQSLNLSQEDFDRYMSGQTSPRKQEAESWSPDACLGVKQMYKNLDLLSQLNERQERIMNEAKKLEKDLIDWTDGIAREVQDIVEKYPLEIKPPNQPLAAIDSENVENDKLPPPLQPQVYAG

SEQ ID NO: 105979 - protein, 491 aa, Artificial Sequence
  derived and/or modified sequence
MSLKSERRGIHVDQSDLLCKKGCGYYGNPAWQGFCSKCWREEYHKARQKQIQEDWELAERLQREEEEAFASSQSSQGAQSLTFSKFEEKKTNEKTRKVTTVKKFFSASSRVGSKKEIQEAKAPSPSINRQTSIETDRVSKEFIEFLKTFHKTGQEIYKQTKLFLEGMHYKRDLSIEEQSECAQDFYHNVAERMQTRGKVPPERVEKIMDQIEKYIMTRLYKYVFCPETTDDEKKDLAIQKRIRALRWVTPQMLCVPVNEDIPEVSDMVVKAITDIIEMDSKRVPRDKLACITKCSKHIFNAIKITKNEPASADDFLPTLIYIVLKGNPPRLQSNIQYITRFCNPSRLMTGEDGYYFTNLCCAVAFIEKLDAQSLNLSQEDFDRYMSGQTSPRKQEAESWSPDACLGVKQMYKNLDLLSQLNERQERIMNEAKKLEKDLIDWTDGIAREVQDIVEKYPLEIKPPNQPLAAIDSENVENDKLPPPLQPQVYAG

SEQ ID NO: 105980 - protein, 407 aa, Artificial Sequence
  derived and/or modified sequence
MSLKSERRGIHVDQSDLLCKKGCGYYGNPAWQGFCSKCWREEYHKARQKQIQEDWELAERLQREEEEAFASSQSSQGAQSLTFSKFEEKKTNEKTRKVTTVKKFFSASSRVGSKKPPERVEKIMDQIEKYIMTRLYKYVFCPETTDDEKKDLAIQKRIRALRWVTPQMLCVPVNEDIPEVSDMVVKAITDIIEMDSKRVPRDKLACITKCSKHIFNAIKITKNEPASADDFLPTLIYIVLKGNPPRLQSNIQYITRFCNPSRLMTGEDGYYFTNLCCAVAFIEKLDAQSLNLSQEDFDRYMSGQTSPRKQEAESWSPDACLGVKQMYKNLDLLSQLNERQERIMNEAKKLEKDLIDWTDGIAREVQDIVEKYPLEIKPPNQPLAAIDSENVENDKLPPPLQPQVYAG

SEQ ID NO: 105981 - protein, 505 aa, Artificial Sequence
  derived and/or modified sequence
MMASSYHEVVSRKKMSLKSERRGIHVDQSDLLCKKGCGYYGNPAWQGFCSKCWREEYHKARQKQIQEDWELAERLQREEEEAFASSQSSQGAQSLTFSKFEEKKTNEKTRKVTTVKKFFSASSRVGSKKEIQEAKAPSPSINRQTSIETDRVSKEFIEFLKTFHKTGQEIYKQTKLFLEGMHYKRDLSIEEQSECAQDFYHNVAERMQTRGKVPPERVEKIMDQIEKYIMTRLYKYVFCPETTDDEKKDLAIQKRIRALRWVTPQMLCVPVNEDIPEVSDMVVKAITDIIEMDSKRVPRDKLACITKCSKHIFNAIKITKNEPASADDFLPTLIYIVLKGNPPRLQSNIQYITRFCNPSRLMTGEDGYYFTNLCCAVAFIEKLDAQSLNLSQEDFDRYMSGQTSPRKQEAESWSPDACLGVKQMYKNLDLLSQLNERQERIMNEAKKLEKDLIDWTDGIAREVQDIVEKYPLEIKPPNQPLAAIDSENVENDKLPPPLQPQVYAG

SEQ ID NO: 105982 - DNA, 1518 bp, Artificial Sequence
  derived and/or modified sequence
atgatggcctcctcctaccacgaagtggtgagcagaaaaaaaatgtcactgaagtccgagaggaggggtatccacgttgatcagtctgacctcctgtgtaagaaagggtgcggatactatggaaatcctgcatggcagggattctgttccaagtgctggagggaggagtatcacaaggccaggcaaaagcagatacaggaagattgggagctcgctgagagattacagcgggaggaggaagaagcctttgccagttcacagtccagtcagggcgcccagtctctcaccttctcaaaatttgaagagaagaaaacaaatgaaaaaacacgcaaagttactacagttaaaaaatttttttctgcatcaagccgagtaggctctaagaaagaaattcaggaagcaaaggctccgagtccttcgattaaccggcagacatctatcgagaccgaccgggtcagcaaggagtttattgaatttctcaagacatttcacaaaacaggacaggaaatctataagcagacaaagctgttcctggaaggtatgcactataaacgcgacctaagcatcgaggagcagtcagagtgtgcgcaggacttttatcataacgtggctgaaaggatgcaaactagagggaaggtgccacctgagcgggtcgagaagatcatggatcagatagaaaagtacatcatgaccagactgtataaatacgtgttctgtcccgaaactaccgacgacgaaaagaaggatcttgccatccaaaaacgaatcagagcactgcgatgggtgaccccccagatgctctgtgtgcctgtgaacgaggacatcccggaggtgtccgatatggtggtcaaagctattacagacataatagagatggactccaaacgggtccccagagataaactggcctgcattacaaagtgttcaaagcacatcttcaacgccatcaagattaccaagaatgagcctgcctccgcggacgactttctgcctacactgatttacattgtgttaaaaggcaatcctccacgtctgcaatccaatattcagtatattactcgcttttgcaacccatctaggctgatgaccggagaggatgggtattacttcactaacctgtgttgcgctgtggccttcatagagaaactggacgctcaaagcctcaacctgtcacaggaggactttgataggtacatgtccggccaaacgtctcctagaaaacaagaggcagagagttggagccctgatgcctgtctcggagtgaagcagatgtacaaaaacctagatctgttatcccagttaaacgaacgtcaggagaggataatgaacgaagcgaagaagctcgagaaagatctgatagattggacagacggtatcgcaagagaggtccaggatatcgtggaaaagtacccattagaaattaagccgccgaaccaaccactggctgcgatcgactccgagaatgtggagaacgataagctgccaccaccattgcagccccaagtgtacgccgggtag

SEQ ID NO: 105983 - DNA, 1518 bp, Artificial Sequence
  derived and/or modified sequence
atgatggccagcagctaccacgaggtggtgtccaggaagaagatgagcctgaagtcagaaagaagaggcatccacgtggaccagagcgacctgctgtgcaagaagggctgcggctactacggcaacccagcctggcagggcttctgcagcaagtgctggagggaggagtaccacaaggcccggcagaagcagatccaggaggactgggagctggccgagcggctgcagcgggaggaggaggaggcctttgccagcagccagagcagccagggcgcccagagcctgaccttcagcaagtttgaggagaagaagaccaatgagaagaccaggaaggtgaccaccgtgaagaagttcttcagcgccagcagccgggtgggcagcaagaaggagatccaggaggccaaggcccccagccccagcatcaaccggcagaccagcattgaaacagacagagtgtccaaggagttcatcgagttcctgaagaccttccacaagacaggccaggagatctacaagcagaccaagctgttcctggagggcatgcactacaagagggacctgagcattgaggagcagagtgaatgtgcccaggacttctaccacaacgtggccgagaggatgcagacccggggcaaggtgcccccagagcgggtggagaagatcatggaccagatcgagaagtacatcatgacccggctgtacaagtatgtgttctgcccagagaccacagatgatgagaagaaggacctggccatccagaagaggatccgggccctgcgctgggtgaccccccagatgctgtgtgtgcctgtgaatgaagacatccctgaggtgtctgacatggtggtgaaggccatcacagacatcatcgagatggacagcaagagggtgccccgggacaagctggcctgcatcaccaagtgcagcaagcacatcttcaatgccatcaagatcaccaagaatgaaccagccagcgcagatgacttcctgcccaccctcatctacatcgtgctgaagggcaaccccccccggctgcagagcaacatccagtacatcacccgcttctgcaaccccagccggctgatgactggagaagatggctactacttcaccaacctgtgctgtgctgtggccttcatcgagaagctggatgcccagagcctgaacctgagccaggaggactttgaccgctacatgagcggccagaccagccccaggaagcaggaggccgagagctggagcccagatgcctgcctgggcgtgaagcagatgtacaagaacctggacctgctgagccagctgaatgaaaggcaggagcgcatcatgaatgaggccaagaagctggagaaggacctgattgactggacagatggcatcgcccgggaggtgcaggacatcgtggagaagtaccccctggagatcaagccacccaaccagcccctggccgccatcgacagtgaaaatgtggagaatgacaagctgcccccacccctgcagccccaggtgtatgccggctag

SEQ ID NO: 105984 - DNA, 1518 bp, Artificial Sequence
  derived and/or modified sequence
atgatggccagcagctaccacgaggtggtgagccggaagaagatgagcctgaagtctgaacggaggggcattcacgtcgaccagtcagacctcctgtgtaagaagggctgcggctactatggcaatccagcctggcagggattttgtagtaagtgctggcgagaagagtaccacaaggcaaggcagaagcagatccaggaagactgggaattagcagagaggctgcagagggaagaggaagaggcctttgcctcttctcagagctcccagggagcccagtctttaacatttagcaaatttgaagaaaaaaaaaccaacgaaaagacaaggaaggtcacaactgtgaagaaatttttctcagccagctcgcgagtcggaagcaagaaggagattcaggaagcaaaagccccaagtccctccatcaatagacaaacttccatagaaacggatcgggtcagtaaggagtttattgagttcctgaaaacctttcacaagactggccaggaaatttataagcaaaccaagttatttctggaaggaatgcattacaagcgtgatttgtctatcgaagaacagagcgagtgtgcccaggatttctatcacaatgttgcagagaggatgcagactaggggcaaagtcccgccggagcgcgtggagaagattatggatcagatagagaaatacataatgactcgcctttataaatacgtgttctgccctgagaccaccgacgatgagaaaaaggatctcgcaattcagaaacggatcagggctctccgatgggtgaccccgcagatgctttgcgttcccgtgaatgaagatattccagaagtaagtgatatggtggtgaaagccatcaccgacatcattgagatggattccaagagagttccgcgggataagctggcttgcatcaccaaatgttctaaacacattttcaatgcaataaaaatcaccaaaaacgagccggccagtgctgatgacttcctgccgactctgatttacatcgtgctgaaaggcaatcctccgcggctccagtcaaatattcagtacataacacggttttgcaatccatccagattgatgactggcgaagacggctactacttcactaacctgtgttgtgctgtggccttcattgaaaagctggacgctcagtcattgaacctcagccaagaagattttgatcgctatatgtcaggtcaaacgtccccgcgaaaacaggaggctgaatcatggagcccggatgcatgcctcggtgtaaagcagatgtacaagaacctcgacctgctgtcccagttgaacgaacggcaggagaggattatgaacgaagccaagaaactggagaaggatctaatcgactggactgatggaattgccagggaagtccaggacattgtcgagaaataccccttagaaattaagccacctaatcaaccgcttgccgcaatcgattccgagaatgtcgagaatgataagctccccccacccctccagcctcaagtgtacgccggctag

SEQ ID NO: 105985 - DNA, 1902 bp, Artificial Sequence
  derived and/or modified sequence
agacctacccgggcgaagcgggcgagcggtggtttggacgccggcggagacgcgggcgagaaaactgtggatttagttactccactctgccatgtctttccaccactgcctgcacatttgagaccaaggatagagattgggaaaaattgatagttctcctgcctcagagtttggctcctgcactctcatttcagccatagctgcagacaaagcacacgattgctgggcactgtggctcaagagaaggaggagatgtggttagcaggaagaagatgagccttaagtctgaacgccgaggaattcatgtggatcaatcggatctcctgtgcaagaaaggatgtggttactacggcaaccctgcctggcagggtttctgctccaagtgctggagggaagagtaccacaaagccaggcagaagcagattcaggaggactgggagctggcggagcgactccagcgggaggaagaagaggcctttgccagcagtcagagcagccaaggggcccaatccctcacattctccaagtttgaagaaaagaaaaccaacgagaagacccgcaaggttaccacagtgaagaaattcttcagtgcatcttccagggtcggatcaaagaaggaaattcaggaagcaaaagctcccagtccttccataaaccggcaaaccagcattgaaacggatagagtgtctaaggagttcatagaatttctcaagaccttccacaagacaggccaagaaatctataaacagaccaagctgtttttggaaggaatgcattacaaaagggatctaagcattgaagaacagtcagagtgtgctcaggatttctaccacaatgtggccgaaaggatgcaaactcgtgggaaagtgcctccagaaagagtcgagaagataatggatcagattgaaaagtacatcatgactcgtctctataaatatgtattctgtccagaaactactgatgatgagaagaaagatcttgccattcaaaagagaatcagagccctgcgctgggttacgcctcagatgctgtgtgtccctgttaatgaagacatcccagaagtgtctgatatggtggtgaaggcgatcacagatatcattgaaatggattccaagcgtgtgcctcgagacaagctggcctgcatcaccaagtgcagcaagcacatcttcaatgccatcaagatcaccaagaatgagccggcgtcagcggatgacttcctccccaccctcatctacattgttttgaagggcaaccccccacgccttcagtctaatatccagtatatcacgcgcttctgcaatccaagccgactgatgactggagaggatggctactatttcaccaatctgtgctgtgctgtggctttcattgagaagctagacgcccagtctttgaatctaagtcaggaggattttgatcgctacatgtctggccagacctctcccaggaagcaagaagctgagagttggtctcctgatgcttgcttaggcgtcaagcaaatgtataagaacttggatctcttgtctcagttgaatgaacgacaagaaaggatcatgaatgaagccaagaaactggaaaaagacctcatagattggacagatggaattgcaagagaagttcaagacatcgttgagaaatacccactggaaattaagcctccgaatcaaccgttagcagctattgactctgaaaacgttgaaaatgataaacttcctccaccactgcaacctcaagtttatgcaggatgatcacaatttagtggagagtatttatttgagcctaaattgtaggtagcccttactacactcaactgattgggatctagaatgtaactaaattgcttataaatgtcagcattttttaaaggtacagtatatggggattgtttcgtttttcctagca

SEQ ID NO: 105986 - DNA, 3805 bp, Artificial Sequence
  derived and/or modified sequence
aacgtgcgttcgctggcggtgccgggggcggggcgagcaggagggtgggtgtgaggcgggagctggccgcggagcccagacctacccgggcgaagcgggcgagcggtggtttggacgccggcggagacgcgggcgagtggttagcaggaagaagatgagccttaagtctgaacgccgaggaattcatgtggatcaatcggatctcctgtgcaagaaaggatgtggttactacggcaaccctgcctggcagggtttctgctccaagtgctggagggaagagtaccacaaagccaggcagaagcagattcaggaggactgggagctggcggagcgactccagcgggaggaagaagaggcctttgccagcagtcagagcagccaaggggcccaatccctcacattctccaagtttgaagaaaagaaaaccaacgagaagacccgcaaggttaccacagtgaagaaattcttcagtgcatcttccagggtcggatcaaagaaggaaattcaggaagcaaaagctcccagtccttccataaaccggcaaaccagcattgaaacggatagagtgtctaaggagttcatagaatttctcaagaccttccacaagacaggccaagaaatctataaacagaccaagctgtttttggaaggaatgcattacaaaagggatctaagcattgaagaacagtcagagtgtgctcaggatttctaccacaatgtggccgaaaggatgcaaactcgtgggaaagtgcctccagaaagagtcgagaagataatggatcagattgaaaagtacatcatgactcgtctctataaatatgtattctgtccagaaactactgatgatgagaagaaagatcttgccattcaaaagagaatcagagccctgcgctgggttacgcctcagatgctgtgtgtccctgttaatgaagacatcccagaagtgtctgatatggtggtgaaggcgatcacagatatcattgaaatggattccaagcgtgtgcctcgagacaagctggcctgcatcaccaagtgcagcaagcacatcttcaatgccatcaagatcaccaagaatgagccggcgtcagcggatgacttcctccccaccctcatctacattgttttgaagggcaaccccccacgccttcagtctaatatccagtatatcacgcgcttctgcaatccaagccgactgatgactggagaggatggctactatttcaccaatctgtgctgtgctgtggctttcattgagaagctagacgcccagtctttgaatctaagtcaggaggattttgatcgctacatgtctggccagacctctcccaggaagcaagaagctgagagttggtctcctgatgcttgcttaggcgtcaagcaaatgtataagaacttggatctcttgtctcagttgaatgaacgacaagaaaggatcatgaatgaagccaagaaactggaaaaagacctcatagattggacagatggaattgcaagagaagttcaagacatcgttgagaaatacccactggaaattaagcctccgaatcaaccgttagcagctattgactctgaaaacgttgaaaatgataaacttcctccaccactgcaacctcaagtttatgcaggatgatcacaatttagtggagagtatttatttgagcctaaattgtaggtagcccttactacactcaactgattgggatctagaatgtaactaaattgcttataaatgtcagcattttttaaaggtacagtatatggggattgtttcgtttttcctagcaggggaaccttagttaataataaaatactacttatttgagttactgatacagattcatttaaggcttgtgtgcaaattttgtctcaatcttttttccctccatgattttcctatgtgcttcctctggcattcactgtggttttggtaaataattgccttttaaaggattaaacaaatgaatgctacaaagtgtatgttcaagaaaattaaatggtaccactcttccacagtttggaataattttataattgtaaagatagaaattatattgataagtaaatatgtaaaattgtaaatatgtaaaaaaaagaatggtgtctgctgtgcatggcattttatatgttaattttttagtttaaaatgaagtatattgaatgtttgcctttagcaccattttatttggtttgtcccactaaaatgactcgagaagtgtttagacaaactccccttaagatgtgcactccatctttaagaacgtgttagccttaactttgaggttctatatagtcagagactatgacaccactaaggttcagaataaagtttaggccacataaaattgctgtttaatgtagtcgatggaagactttaaactatgcttctagcttatttttccctcattcattcagcaaatctctattgagttcttcagtgagaaggagcaggcactgggcctggaatggaaggcgggaatgaatgggcctctgatggtgagaggtgacggggtccctcagctgtgagatgcaaggggcgccttgcagcctccataatatacatttgactttgcaaacgtctagacatgttttctgaacctttttcaggacatttcaacctcgggactattcatattagtggcctgagaggtgtttgttgtggggccaccctgtgcatggtagaatgttcagcagcattcctgccatccatatccattaggtgccagtagcacccccgctagagctgtgaaaaattctctccagacatagtcagatgtctcctggggccatatcacccctccgttaagaaccactgatgtcttttacaaaccaggagttatcctcctggtggttaatatggtgtaaccaaagaatcttgcactcaatgcacagtgtgatgttaactaaaacgagttaaatatttaggaggcttgacagctacctgcattgtagaaccttttcttatctcagtggaaccttctataacctaaatataccattgatgattcttcttccattcagtgacatccacagattatgcagctatacttgtgaaatcgtgcatgaggccccagggcaccgttctagaacaacgtcacttcacacaggcagctgagaaaggttctcttgcttttccagtatcttcctaaggatggagcccaaaattgcagagcagtaactttggaataaaaccagggtgggtataaaacttcttattcttaaatttacatataagatctattaagcttgacacatctgtgtcatcacgcactgaagacaggaagcagttcactgagtcagctggttcccaagctcgcacagaaggtgataagttactatcaaatgccagtgagaatcttcttatagaataacctgggcccaagtgattttagtacaaaacttgcccttctttggtttaattttctatgtgcttttaggtgtgaatccagatatgcggtcttaattcctttggaaatacacagttcgtttagttactgtacactctgtttgttcaataaactgcatatcaacttcccacaaaagctgacttttttgggtctcttacatataaagtaggttattgagttgatttttttggaggtatctcatattggtcgaattcttctggtatggactcttgccttatatagaggcttctatttctcttaagtcagcatcaatacaacggccggagtttctgtttttgcaataagaagatgttggtattttatgtagggtaaatgtgactggaatacacctttggaacggaattctttatcaataaagtttcacaatccgtccctcttcc

SEQ ID NO: 105987 - DNA, 1518 bp, Artificial Sequence
  derived and/or modified sequence
atgatggcttcttcttaccatgaggtggtctcaaggaagaagatgagccttaaaagcgagcgacgcggaatccatgtagatcagtctgacctgctgtgcaaaaaaggctgcgggtactatgggaatcctgcctggcagggattttgctctaagtgctggcgggaggaatatcacaaagccaggcagaaacagatccaggaggactgggagctggccgaacggttgcagcgggaagaagaggaggccttcgccagttcccagagttcccaaggagcccaatccttgaccttctccaaatttgaggagaagaagaccaatgagaagacccggaaggtgacaacggtaaaaaagtttttcagcgcctcctcaagagtaggcagcaagaaggaaatccaggaggctaaggcgccttctccaagtatcaatcgtcagacttccattgagaccgacagggtatcaaaggagtttatagagtttctgaaaacatttcataagacagggcaggaaatctacaaacaaactaagttatttctcgaaggaatgcactataagagggatctctctatagaggagcaatcagaatgtgcgcaggatttttatcataatgtagccgaacgcatgcagacacgtggcaaagtgcctccggaacgtgtggaaaaaattatggaccagattgagaagtacattatgacacgactgtataaatatgttttctgccccgaaactaccgacgacgagaagaaggacctggccatccagaaaaggatcagagcactacgatgggtgacaccacaaatgctgtgcgtgccagtaaatgaagacatccccgaagtgagcgatatggttgttaaagccatcacagacatcatcgaaatggatagtaaacgtgttccgagagacaagcttgcctgtattacaaagtgcagcaaacatatttttaatgccatcaaaatcactaagaatgaacccgcttctgctgacgactttttgccaacactgatatacattgtgctgaaaggcaaccctcccaggttgcagagcaacattcagtatatcacccggttttgcaacccaagcaggctgatgactggcgaagatggatattactttactaatctctgctgtgctgttgctttcatagagaaacttgatgcccagtcacttaacctaagtcaggaggactttgacagatacatgagtggccagacatcacccaggaagcaggaagccgagtcttggagccctgacgcctgcctgggcgttaaacaaatgtacaaaaatcttgacctactgtctcagttgaacgagagacaggagaggatcatgaacgaagcgaagaaactagagaaggacttaattgattggacagatggcatcgctagagaggtgcaggacatcgtggagaagtaccctctggagattaaacccccaaaccagcccctcgcagctattgattccgaaaacgttgaaaatgacaagcttcccccaccgctccagccgcaagtgtatgccggatag

SEQ ID NO: 105988 - DNA, 3705 bp, Artificial Sequence
  derived and/or modified sequence
agacctacccgggcgaagcgggcgagcggtggtttggacgccggcggagacgcgggcgagtggttagcaggaagaagatgagccttaagtctgaacgccgaggaattcatgtggatcaatcggatctcctgtgcaagaaaggatgtggttactacggcaaccctgcctggcagggtttctgctccaagtgctggagggaagagtaccacaaagccaggcagaagcagattcaggaggactgggagctggcggagcgactccagcgggaggaagaagaggcctttgccagcagtcagagcagccaaggggcccaatccctcacattctccaagtttgaagaaaagaaaaccaacgagaagacccgcaaggttaccacagtgaagaaattcttcagtgcatcttccagggtcggatcaaagaaggaaattcaggaagcaaaagctcccagtccttccataaaccggcaaaccagcattgaaacggatagagtgtctaaggagttcatagaatttctcaagaccttccacaagacaggccaagaaatctataaacagaccaagctgtttttggaaggaatgcattacaaaagggatctaagcattgaagaacagtcagagtgtgctcaggatttctaccacaatgtggccgaaaggatgcaaactcgtgggaaagtgcctccagaaagagtcgagaagataatggatcagattgaaaagtacatcatgactcgtctctataaatatgtattctgtccagaaactactgatgatgagaagaaagatcttgccattcaaaagagaatcagagccctgcgctgggttacgcctcagatgctgtgtgtccctgttaatgaagacatcccagaagtgtctgatatggtggtgaaggcgatcacagatatcattgaaatggattccaagcgtgtgcctcgagacaagctggcctgcatcaccaagtgcagcaagcacatcttcaatgccatcaagatcaccaagaatgagccggcgtcagcggatgacttcctccccaccctcatctacattgttttgaagggcaaccccccacgccttcagtctaatatccagtatatcacgcgcttctgcaatccaagccgactgatgactggagaggatggctactatttcaccaatctgtgctgtgctgtggctttcattgagaagctagacgcccagtctttgaatctaagtcaggaggattttgatcgctacatgtctggccagacctctcccaggaagcaagaagctgagagttggtctcctgatgcttgcttaggcgtcaagcaaatgtataagaacttggatctcttgtctcagttgaatgaacgacaagaaaggatcatgaatgaagccaagaaactggaaaaagacctcatagattggacagatggaattgcaagagaagttcaagacatcgttgagaaatacccactggaaattaagcctccgaatcaaccgttagcagctattgactctgaaaacgttgaaaatgataaacttcctccaccactgcaacctcaagtttatgcaggatgatcacaatttagtggagagtatttatttgagcctaaattgtaggtagcccttactacactcaactgattgggatctagaatgtaactaaattgcttataaatgtcagcattttttaaaggtacagtatatggggattgtttcgtttttcctagcaggggaaccttagttaataataaaatactacttatttgagttactgatacagattcatttaaggcttgtgtgcaaattttgtctcaatcttttttccctccatgattttcctatgtgcttcctctggcattcactgtggttttggtaaataattgccttttaaaggattaaacaaatgaatgctacaaagtgtatgttcaagaaaattaaatggtaccactcttccacagtttggaataattttataattgtaaagatagaaattatattgataagtaaatatgtaaaattgtaaatatgtaaaaaaaagaatggtgtctgctgtgcatggcattttatatgttaattttttagtttaaaatgaagtatattgaatgtttgcctttagcaccattttatttggtttgtcccactaaaatgactcgagaagtgtttagacaaactccccttaagatgtgcactccatctttaagaacgtgttagccttaactttgaggttctatatagtcagagactatgacaccactaaggttcagaataaagtttaggccacataaaattgctgtttaatgtagtcgatggaagactttaaactatgcttctagcttatttttccctcattcattcagcaaatctctattgagttcttcagtgagaaggagcaggcactgggcctggaatggaaggcgggaatgaatgggcctctgatggtgagaggtgacggggtccctcagctgtgagatgcaaggggcgccttgcagcctccataatatacatttgactttgcaaacgtctagacatgttttctgaacctttttcaggacatttcaacctcgggactattcatattagtggcctgagaggtgtttgttgtggggccaccctgtgcatggtagaatgttcagcagcattcctgccatccatatccattaggtgccagtagcacccccgctagagctgtgaaaaattctctccagacatagtcagatgtctcctggggccatatcacccctccgttaagaaccactgatgtcttttacaaaccaggagttatcctcctggtggttaatatggtgtaaccaaagaatcttgcactcaatgcacagtgtgatgttaactaaaacgagttaaatatttaggaggcttgacagctacctgcattgtagaaccttttcttatctcagtggaaccttctataacctaaatataccattgatgattcttcttccattcagtgacatccacagattatgcagctatacttgtgaaatcgtgcatgaggccccagggcaccgttctagaacaacgtcacttcacacaggcagctgagaaaggttctcttgcttttccagtatcttcctaaggatggagcccaaaattgcagagcagtaactttggaataaaaccagggtgggtataaaacttcttattcttaaatttacatataagatctattaagcttgacacatctgtgtcatcacgcactgaagacaggaagcagttcactgagtcagctggttcccaagctcgcacagaaggtgataagttactatcaaatgccagtgagaatcttcttatagaataacctgggcccaagtgattttagtacaaaacttgcccttctttggtttaattttctatgtgcttttaggtgtgaatccagatatgcggtcttaattcctttggaaatacacagttcgtttagttactgtacactctgtttgttcaataaactgcatatcaacttcccacaaaagctgacttttttgggtctcttacatataaagtaggttattgagttgatttttttggaggtatctcatattggtcgaattcttctggtatggactcttgccttatatagaggcttctatttctcttaagtcagcatcaatacaacggccggagtttctgtttttgcaataagaagatgttggtattttatgtagggtaaatgtgactggaatacacctttggaacggaattctttatcaataaa

SEQ ID NO: 105989 - DNA, 1966 bp, Artificial Sequence
  derived and/or modified sequence
ccaagctaacgtttggacaaataatgttttgttatatttaacattaaaactctgacattgacattcacattcattttggaagcattatatttaatcatatgaaagttggtgaaccttggattacagattgcaaatgctaataagtcttttattagaatgatggcgtcttcataccatgaagtggttagcaggaagaagatgagccttaagtctgaacgccgaggaattcatgtggatcaatcggatctcctgtgcaagaaaggatgtggttactacggcaaccctgcctggcagggtttctgctccaagtgctggagggaagagtaccacaaagccaggcagaagcagattcaggaggactgggagctggcggagcgactccagcgggaggaagaagaggcctttgccagcagtcagagcagccaaggggcccaatccctcacattctccaagtttgaagaaaagaaaaccaacgagaagacccgcaaggttaccacagtgaagaaattcttcagtgcatcttccagggtcggatcaaagaaggaaattcaggaagcaaaagctcccagtccttccataaaccggcaaaccagcattgaaacggatagagtgtctaaggagttcatagaatttctcaagaccttccacaagacaggccaagaaatctataaacagaccaagctgtttttggaaggaatgcattacaaaagggatctaagcattgaagaacagtcagagtgtgctcaggatttctaccacaatgtggccgaaaggatgcaaactcgtgggaaagtgcctccagaaagagtcgagaagataatggatcagattgaaaagtacatcatgactcgtctctataaatatgtattctgtccagaaactactgatgatgagaagaaagatcttgccattcaaaagagaatcagagccctgcgctgggttacgcctcagatgctgtgtgtccctgttaatgaagacatcccagaagtgtctgatatggtggtgaaggcgatcacagatatcattgaaatggattccaagcgtgtgcctcgagacaagctggcctgcatcaccaagtgcagcaagcacatcttcaatgccatcaagatcaccaagaatgagccggcgtcagcggatgacttcctccccaccctcatctacattgttttgaagggcaaccccccacgccttcagtctaatatccagtatatcacgcgcttctgcaatccaagccgactgatgactggagaggatggctactatttcaccaatctgtgctgtgctgtggctttcattgagaagctagacgcccagtctttgaatctaagtcaggaggattttgatcgctacatgtctggccagacctctcccaggaagcaagaagctgagagttggtctcctgatgcttgcttaggcgtcaagcaaatgtataagaacttggatctcttgtctcagttgaatgaacgacaagaaaggatcatgaatgaagccaagaaactggaaaaagacctcatagattggacagatggaattgcaagagaagttcaagacatcgttgagaaatacccactggaaattaagcctccgaatcaaccgttagcagctattgactctgaaaacgttgaaaatgataaacttcctccaccactgcaacctcaagtttatgcaggatgatcacaatttagtggagagtatttatttgagcctaaattgtaggtagcccttactacactcaactgattgggatctagaatgtaactaaattgcttataaatgtcagcattttttaaaggtacagtatatggggattgtttcgtttttcctagcaggggaaccttagttaataataaaatactacttatttgagttactgatacagattcatttaaggcttgtgtgcaaattttgtctcaatcttttttccctccatgattttcctatgtgcttcctctggcattcactgtgg

SEQ ID NO: 105990 - DNA, 553 bp, Artificial Sequence
  derived and/or modified sequence
agacctacccgggcgaagcgggcgagcggtggtttggacgccggcggagacgcgggcgagaaaactgtggatttagttactccactctgccatgtctttccaccactgcctgcacatttgagaccaaggatagagattgggaaaaattgatagttctcctgcctcagagtttggctcctgcactctcatttcagccatagctgcagacaaagcacacgattgctgggcactgtggctcaagagaaggaggagatgtttgtttatatggagaagaatgaagaccatgtggtttcagtttgaacggaaattgttgcatagcgatttaccatacagctgtgagactgaacaaatgagtttaaatattatacagtagaaaagaaaactgactttggaacttaagtggttagcaggaagaagatgagccttaagtctgaacgccgaggaattcatgtggatcaatcggatctcctgtgcaagaaaggatgtggttactacggcaaccctgcctggcagggtttctgctccaagtgctggagggaagagtaccacaaag

SEQ ID NO: 105991 - DNA, 1518 bp, Artificial Sequence
  derived and/or modified sequence
atgatggccagcagctaccacgaggtggtgagcagaaagaagatgagcctgaagagcgagagaagaggcatccacgtggaccagagcgacctgctgtgcaagaagggctgcggctactacggcaaccccgcctggcagggcttctgcagcaagtgctggagagaggagtaccacaaggccagacagaagcagatccaggaggactgggagctggccgagagactgcagagagaggaggaggaggccttcgccagcagccagagcagccagggcgcccagagcctgaccttcagcaagttcgaggagaagaagaccaacgagaagaccagaaaggtgaccaccgtgaagaagttcttcagcgccagcagcagagtgggcagcaagaaggagatccaggaggccaaggcccccagccccagcatcaacagacagaccagcatcgagaccgacagagtgagcaaggagttcatcgagttcctgaagaccttccacaagaccggccaggagatctacaagcagaccaagctgttcctggagggcatgcactacaagagagacctgagcatcgaggagcagagcgagtgcgcccaggacttctaccacaacgtggccgagagaatgcagaccagaggcaaggtgccccccgagagagtggagaagatcatggaccagatcgagaagtacatcatgaccagactgtacaagtacgtgttctgccccgagaccaccgacgacgagaagaaggacctggccatccagaagagaatcagagccctgagatgggtgaccccccagatgctgtgcgtgcccgtgaacgaggacatccccgaggtgagcgacatggtggtgaaggccatcaccgacatcatcgagatggacagcaagagagtgcccagagacaagctggcctgcatcaccaagtgcagcaagcacatcttcaacgccatcaagatcaccaagaacgagcccgccagcgccgacgacttcctgcccaccctgatctacatcgtgctgaagggcaacccccccagactgcagagcaacatccagtacatcaccagattctgcaaccccagcagactgatgaccggcgaggacggctactacttcaccaacctgtgctgcgccgtggccttcatcgagaagctggacgcccagagcctgaacctgagccaggaggacttcgacagatacatgagcggccagaccagccccagaaagcaggaggccgagagctggagccccgacgcctgcctgggcgtgaagcagatgtacaagaacctggacctgctgagccagctgaacgagagacaggagagaatcatgaacgaggccaagaagctggagaaggacctgatcgactggaccgacggcatcgccagagaggtgcaggacatcgtggagaagtaccccctggagatcaagccccccaaccagcccctggccgccatcgacagcgagaacgtggagaacgacaagctgcccccccccctgcagccccaggtgtacgccggctag

SEQ ID NO: 105992 - protein, 469 aa, Artificial Sequence
  derived and/or modified sequence
MCDLIEPQPAEKIGKMKKLRRTLSESFSRIALKKDDTTFDEICVTKMSTRNCQGMDSVIKPLDTIPEDKKVRVQRTQSTFDPFEKPANQVKRVHSENNACINFKTSSTGKESPKVRRHSSPSSPTSPKFGKADSYEKLEKLGEGSYATVYKGKSKVNGKLVALKVIRLQEEEGTPFTAIREASLLKGLKHANIVLLHDIIHTKETLTLVFEYVHTDLCQYMDKHPGGLHPDNVKLFLFQLLRGLSYIHQRYILHRDLKPQNLLISDTGELKLADFGLARAKSVPSHTYSNEVVTLWYRPPDVLLGSTEYSTCLDMWGVGCIFVEMIQGVAAFPGMKDIQDQLERIFLVLGTPNEDTWPGVHSLPHFKPERFTLYSSKNLRQAWNKLSYVNHAEDLASKLLQCSPKNRLSAQAALSHEYFSDLPPRLWELTDMSSIFTVPNVRLQPEAGESMRAFGKNNSYGKSLSNSKH

SEQ ID NO: 105993 - DNA, 4995 bp, Artificial Sequence
  derived and/or modified sequence
cgtcgcttcccggcccgccgaggaggtggtggaggaggaggcgccgctttccccgcggcgcgcgccctcgccgttgtctgagctgtgcctggaccagtttggggaagttgtcggggctccgcgtcgcccagatgtgtgacctcattgagccgcagccggccgagaagatcggcaagatgaagaagttgcggagaactttgtcggagagtttcagtcgcattgctttgaagaaagatgacaccacctttgatgagatatgtgtcacaaagatgtctacacggaactgccagggaatggactcagtgatcaaacccctggacacaattcctgaggataaaaaagtcagagttcagaggacacagagcacttttgacccatttgagaaaccagctaatcaagtaaagagggtgcattctgagaacaatgcttgcattaactttaagacctcctccactggcaaagagtcacctaaagttaggcggcactccagccccagctcgccaacaagtcccaaatttggaaaagctgactcatatgaaaagctggaaaaactaggggaaggatcttatgctacagtatacaaagggaaaagcaaggtaaatgggaagttggtagctctgaaggtgatcaggctgcaggaagaagaagggacacctttcacagctatcagggaagcttctcttttaaaaggactaaaacatgctaacatagtgctacttcatgacatcatccataccaaggagacgctgacacttgtgtttgaatatgtgcacactgatttatgtcagtacatggacaagcaccctggggggctgcatccagataatgtgaagttgtttttatttcagttgctgcgaggtctgtcttacatccaccagcgttatattttgcacagagacctgaaaccacagaaccttctgatcagtgacacgggggagttaaagctggcagatttcggtcttgcaagagcaaaatccgtccctagccacacatactccaacgaagtggttaccttgtggtacagacctccagatgtccttctaggctcaacagaatattccacctgccttgacatgtggggagtaggttgcatctttgttgaaatgatccaaggagttgctgcttttccaggaatgaaagacattcaggatcaacttgaacgaatatttctggttcttggaacaccaaatgaggacacatggcctggagttcattctttaccacattttaagccagaacgctttaccctgtacagctctaaaaaccttagacaagcatggaataagctcagctatgtgaaccatgcagaggacctggcctccaagctcctacaatgttccccaaagaacagactgtcggcacaggctgccttgagccacgagtattttagtgacctgccgccacggctatgggaactcaccgacatgtcttctatttttactgtcccaaatgtgagattgcaaccagaagctggagaaagcatgcgggcctttgggaaaaacaatagttatggcaaaagtctatcaaacagcaagcactgacaagcagcacattctcaagagcacacaggattaagttgtcatcattctgggaagaaaaaaaaaacattaatgaagaggccaataatatgaagggaatcatggatcagttttctttcgctccctgtggtggatttcacttacaagaaaattgaagctggcaagaccctgttttctctgcaatttatttaaaaccttgcacgcatttggataccttgtgatttccaagaactacgtgaagattaagctttgcttactgatacatggcatgtattcttttcagtcttttgtgtttgattttgtttgatttccctctgcagcacagcgtctctgtaaaggtttttatgctttcaccagccatgtcttaaatacattaagacaacacatttggtgttcacacttcttcagtaatgtctgaacttgaaagccacagagtggcataaaacaatgtgtgttttctttgagagcagtgcacattttgcaaccactaggaaggaaattttctgctaaagcaaacccctgttctctgacttgacaacttggccccggactgtggggccccacctgttgcttaccttttgaggtaattttgcaaatgtggtttttttacttggaaataactgcacatttatatataggatattggactctgcttagcattttcaagccacatagcatgactgttttttgaataggttggaattgaaaaaacaattatcaaacgttaagaacaaagacagggataaattgcttacatttcaacctctggagattgaggtaactttttgtgtctgggtcttgtcaacatctaatttttttccatccattctgttacactttgtattttctaactggagaaaagagtgaggaacagaatgttttaaatctggtgcaaaagaactatatctgctggatgagccttgaaagcagtcttggcctgttagggcttacaaagtaaattacaaagtgatccagttcaaagtttgcttagttacaacaaagcacctttaaaaaaaatacattttaaaaaaacattccaagccaattggaagacatcattgggttcttactttaagacatctcctggaataactgttcaaatgcaggttttagaaacaatgcaggaatcttgctttaaagatgaaaaagggaatgggccagcttcccttactcaaggagttgagggaccttggaggatgaaggcgagtatgtgacactggagaaaagtggaccaggcatgtcttttgctttgatctggagggagggctgcctgatgcaggccggctcccagtggggcaggcctcgctgcagaatgcccagtagtactgcggccaaggggacagttaggagacttcatctaaagcatgaaacctagctcctctacacacaaattcctatggaaatacctttgtgtacagtgtcttacattttcctattagtcagaaagaaggagagaatgagtgagtgcttgaaatgtgtcatactgttttaggatcaagactaggaattaggagccaggttgacaaggactttttctgagagttgggtgagggtaaagcttttctataatcaagctcaatacaccaaggaaactggatccagaattcctaaactttaaaatggtactgtctgcggagtggagtatggatggttatgtcaaagtcatagttcatcctatccagatgtagcattcatggtaaacttttaagtgctaagcaaggaattatttactgattggttttaaagagagcagaaaacacccaagtgtagaatgtctactgtttgctacctagaaatcttttccattcctctttcatacattccaacccactggaagtctttagaggtattttgatttaaagtatacttaaattaggatttcttaaagaaaacatagggagaaaactttacatgcaattaaaaatggactttcctgtgatttgtttttaatcattcatttggagaagaggcatgacctttgtatttcactaagtttaaagcaagagcaactgatgattaaatgttgctttttaataaggtttttaacttgaaaatttgaaaatatttaatgttgaaagacttcaattagggctattagagttatatctccctgtcgtaggcagcttcttcggagaagtgaaatataacattactcagtggacggagaaatctgttttgttacagagacatgcctctcagaaggtcaggaggttttgagtacctatccttgccacccatacaggaaatccaaagtttggtgtctctctctctctgtctctttctttctctttctccccccaaacccctctcactccctccctccctctctccttcccctatttgcaatcatattctccctctgcttcttttctcttctgccctccttgtgggcagtcatgaaaatcaattcagactgtgttgattagcagatttattattctattgagaaagcactggaatgttttgtgagattatttttatatgaaggaatagcctgaactcaaacagatggtaagaatagtacaaacaccttagcacatcactgcacacacagtattctgaaaggagatttgacacttaattcccattttcttaaaataacagttttgttgacttaaaaatatgagatacataggatgtgaaaaaaaatgtttgcagtactcagcaaaaaatagggtacataaagcagggtggctgtccatccactgattctggggtgagaagcgatttctacctcgcaagagtgactagaaagtttctaggagcacctccaggcttgcaaagaaagtgaggcctcttggtatcctttcctcagtgtgtatatgacagccagtataatcaataccctaggttatgcgtctatatgatactcatctgtgaatattattggttttgtaatctttgttatataagaggatgtttaggctgtatatactggggtagattattgcctgccccttatacataggaatatgctgcataattgcgcataacttccatctcccttactggcttgtaggcagaggaaactgtatatgttactgccttgtacttttctcatacaccaaaaacacaccaaaaaaatcaataaaataagcaatcttctattctcattccttttcccacagcagcatattttagaggcacatacaaaacctacattctctagttgggagtggatttttaaagttttccttttatcttttatttttttttgtatgatgcactgagatgtgtactttctaacaggggattggtacctaagaaatgtggtagcattattcagaaaactattatactttcaaatgacacatagtaaggagaatggaataatacatgttgcatatttgttaccagttgtaatttgtctgtattatgaaagatgtaatggtttgtcagctgtcactgttgttttcttgtaacatgatatggaataaagtatagcagaatctccgta

SEQ ID NO: 105994 - DNA, 1410 bp, Artificial Sequence
  derived and/or modified sequence
atgtgcgacctgatcgagccccagcccgccgagaagatcggcaagatgaagaagctgagaagaaccctgagcgagagcttcagcagaatcgccctgaagaaggacgacaccaccttcgacgagatctgcgtgaccaagatgagcaccagaaactgccagggcatggacagcgtgatcaagcccctggacaccatccccgaggacaagaaggtgagagtgcagagaacccagagcaccttcgaccccttcgagaagcccgccaaccaggtgaagagagtgcacagcgagaacaacgcctgcatcaacttcaagaccagcagcaccggcaaggagagccccaaggtgagaagacacagcagccccagcagccccaccagccccaagttcggcaaggccgacagctacgagaagctggagaagctgggcgagggcagctacgccaccgtgtacaagggcaagagcaaggtgaacggcaagctggtggccctgaaggtgatcagactgcaggaggaggagggcacccccttcaccgccatcagagaggccagcctgctgaagggcctgaagcacgccaacatcgtgctgctgcacgacatcatccacaccaaggagaccctgaccctggtgttcgagtacgtgcacaccgacctgtgccagtacatggacaagcaccccggcggcctgcaccccgacaacgtgaagctgttcctgttccagctgctgagaggcctgagctacatccaccagagatacatcctgcacagagacctgaagccccagaacctgctgatcagcgacaccggcgagctgaagctggccgacttcggcctggccagagccaagagcgtgcccagccacacctacagcaacgaggtggtgaccctgtggtacagaccccccgacgtgctgctgggcagcaccgagtacagcacctgcctggacatgtggggcgtgggctgcatcttcgtggagatgatccagggcgtggccgccttccccggcatgaaggacatccaggaccagctggagagaatcttcctggtgctgggcacccccaacgaggacacctggcccggcgtgcacagcctgccccacttcaagcccgagagattcaccctgtacagcagcaagaacctgagacaggcctggaacaagctgagctacgtgaaccacgccgaggacctggccagcaagctgctgcagtgcagccccaagaacagactgagcgcccaggccgccctgagccacgagtacttcagcgacctgccccccagactgtgggagctgaccgacatgagcagcatcttcaccgtgcccaacgtgagactgcagcccgaggccggcgagagcatgagagccttcggcaagaacaacagctacggcaagagcctgagcaacagcaagcactag

SEQ ID NO: 105995 - DNA, 1410 bp, Artificial Sequence
  derived and/or modified sequence
atgtgcgatttgatcgagcctcagcccgcggagaagattgggaagatgaaaaagctgcgtagaacactgtctgaatcctttagcaggatcgctttaaaaaaagacgataccacattcgacgagatatgcgtgactaagatgtccactaggaactgccaggggatggactcagttatcaagcccctcgacacaatcccggaggacaagaaagtcagggtacaacggacccagagtaccttcgacccttttgagaaacctgcgaatcaggtcaagagagtccacagtgagaataatgcctgtatcaatttcaaaacctcctcaaccggcaaggagtcgcccaaggttaggcgccactcctcccccagctcacccacctcgcctaagttcgggaaggcggactcatacgaaaaactagagaagctcggcgaaggatcttatgcaacagtgtataagggtaagtcaaaagtcaatggaaaactggtcgcattgaaggttatcaggctgcaggaagaggaagggacaccctttaccgctatcagggaggcctctctcctgaaagggcttaaacacgcaaatattgtgctcctccacgatattatccatactaaggagaccctgaccctcgtgtttgagtacgtgcataccgatttgtgccagtacatggataagcaccctggcggcctccatcccgacaacgtaaagttatttctctttcagttgctacgggggcttagctatatccatcagagatacatcttgcatagagatttgaaaccccaaaatttattgataagcgacacgggggagttgaagctcgcagacttcggattagcacgggccaaaagtgtgccttctcacacgtacagtaacgaggtggttacactgtggtaccgacctccggacgttctcttagggtctacggagtattctacctgcttggatatgtggggggtggggtgcatctttgtcgaaatgattcagggagtggccgcctttccgggaatgaaggatatccaggaccagttggaaagaatctttttggttctcggtaccccaaacgaggacacatggcccggagtgcactctctgccacacttcaagcctgagcgattcaccctttactcttctaaaaatctaaggcaagcgtggaacaaattgtcctacgtaaatcatgcagaggacctggcttccaaattgctccagtgttcacctaagaatagactgtctgcacaggccgctctgtcccacgagtacttttccgaccttcccccgcggttgtgggagctgaccgatatgtcaagtatatttacagtgcccaacgtcaggttacagcccgaggcgggcgaatcaatgcgagcttttggaaagaataactcttacggaaaatctctctctaattccaaacactag

SEQ ID NO: 105996 - DNA, 1410 bp, Artificial Sequence
  derived and/or modified sequence
atgtgtgacctgattgagccccagcctgctgagaagattggcaagatgaagaagctgcggaggaccctgtctgagagcttcagccgcatcgccctgaagaaggatgacaccacctttgatgagatctgtgtgaccaagatgagcaccaggaactgccagggcatggattctgtcatcaagcccctggacaccatccctgaggacaagaaggtgcgggtgcagaggacccagagcacctttgacccctttgagaagccagccaaccaggtgaagagggtgcacagcgagaacaatgcctgcatcaacttcaagaccagcagcacaggcaaggagagccccaaggtgcggcggcacagcagccccagcagccccaccagccccaagtttgggaaggctgacagctatgagaagctggagaagctgggggagggcagctatgccaccgtgtacaagggcaagagcaaggtgaatggcaagctggtggccctgaaggtgatccggctgcaggaggaggagggcacccccttcaccgccatccgggaggccagcctgctgaagggcctgaagcacgccaacatcgtgctgctgcatgacatcatccacaccaaggagaccctgaccctggtgtttgaatatgtgcacacagacctgtgccagtacatggacaagcaccctgggggcctgcacccagacaacgtgaagctgttcctgttccagctgctgcggggcctgagctacatccaccagcgctacatcctgcaccgggacctgaagccccagaacctgctgatcagtgacacaggagagctgaagctggccgactttggcctggcccgggccaagtctgtgcccagccacacctacagcaatgaggtggtgaccctgtggtacagacctccagatgtgctgctgggcagcacagagtacagcacctgcctggacatgtggggcgtgggctgcatctttgtggagatgatccagggcgtggccgccttccctggcatgaaggacatccaggaccagctggagcgcatcttcctggtgctgggcaccccaaatgaagacacctggccaggagtgcacagcctgccccacttcaagccagagcgcttcaccctgtacagcagcaagaacctgcggcaggcctggaacaagctgtcctatgtgaaccacgccgaggacctggccagcaagctgctgcagtgcagccccaagaaccggctgagcgcccaggccgccctgagccatgagtacttcagtgacctgcccccccggctgtgggagctgacagacatgagcagcatcttcaccgtgcccaacgtgcggctgcagcctgaggccggggagagcatgagggccttcggcaagaacaacagctatggcaagagcctgagcaacagcaagcactag

SEQ ID NO: 105997 - DNA, 1410 bp, Artificial Sequence
  derived and/or modified sequence
atgtgcgacctgatcgagccccagcccgccgagaagatcggcaagatgaaaaaactgcgccgaacactgtctgagtcattctcacggatcgccctgaagaaggatgatacaacctttgacgagatttgcgttacaaagatgtccacgcgcaactgccagggaatggacagcgtcattaagcctttggataccattcctgaggataaaaaggtccgcgtacagaggacacagagcacttttgacccatttgagaaaccagccaaccaagtcaaaagggtgcatagcgaaaacaatgcctgtattaacttcaaaaccagtagcaccgggaaagagtctccgaaggtgcgccgccactcatctcctagtagtccaactagcccgaaatttggaaaagccgatagttacgagaaactggaaaaactgggcgaagggtcctacgctacagtgtataagggcaaaagtaaggtgaatggcaagctcgtggcgctcaaggtcattcgactgcaggaagaggaggggactcctttcactgcaatccgggaggcctctcttctgaaggggttaaagcatgccaatattgtcctactgcacgatatcatacacactaaggagaccctaactctggtattcgaatacgtgcacacagacctgtgccagtacatggacaagcatcctgggggcctgcaccctgacaatgtcaaattgtttctattccagctactgaggggacttagctacatccaccagaggtacatccttcaccgggacttaaagccgcagaatctgctgatttccgatacgggtgaactaaagttggctgactttggcctggcccgcgctaagtctgtgccaagtcacacatattccaatgaggtggttacactatggtaccgacccccagacgtgctgttggggagtaccgaatatagtacctgtttggacatgtggggtgttggctgcatcttcgtcgagatgattcagggtgtggcggccttcccgggaatgaaagacatccaagaccagctcgaacggatattccttgtactgggcaccccaaacgaggacacttggcctggtgtccattcgctgccccatttcaagccggaacgctttactctgtactctagtaagaacctgcgacaagcctggaataaactctcatacgtgaaccatgccgaggatctggcatccaaactgctccagtgtagcccaaagaacaggctgtctgctcaggctgcccttagtcacgaatacttcagtgatctcccccctcggctgtgggagcttacggacatgagttctattttcacagtgccaaacgttcgcctgcagcccgaggctggcgagtctatgagagcattcggcaaaaataatagctacggtaagtccttgtctaattcaaagcattag

SEQ ID NO: 105998 - DNA, 1410 bp, Artificial Sequence
  derived and/or modified sequence
atgtgtgatctgatcgaaccacagcctgcagaaaagatcgggaaaatgaagaagttgcgcaggacactgtctgagtctttctccaggattgcactgaaaaaagacgatacgacttttgatgaaatttgcgtcacaaagatgtcgactcggaattgtcagggcatggactctgtgattaaaccacttgatactataccggaggacaaaaaggtccgggtacagcgaacccagtctacctttgacccatttgagaagcctgccaaccaggttaaaagggtgcactccgagaacaacgcttgtattaactttaagacaagctcaactggcaaagagtcacccaaagtgcggagacatagcagccctagcagccccacatcccccaagtttgggaaggccgacagctatgagaaactggagaagctgggcgaggggtcttacgcgactgtctacaaaggtaaaagcaaagtgaacggaaaacttgtagccttgaaagtgattcggctgcaggaggaggaaggcacaccgtttacggccataagagaagcttccctgctaaagggtctaaaacatgccaatatcgtgctgttacacgacattattcacacgaaagaaactcttacactcgtgtttgagtacgttcacacagatctctgccagtacatggacaagcaccccggaggcctgcaccctgacaacgtgaagttgttcctctttcaactgctcaggggtttgagctacatccaccagcgctacatcttgcacagagatctgaaaccacaaaaccttctgatttcagacaccggagaactgaagctggcggattttggactggcaagagctaaaagcgtgcctagccatacatattctaatgaagtagtaacactctggtaccgtcccccagatgttctgctggggagcacggagtactctacctgtctggatatgtggggcgtggggtgcatcttcgtggagatgattcagggcgttgcagcattccccggaatgaaagatattcaagaccaattggaaaggattttcttggtgctcggcacccccaacgaggacacatggcctggcgtgcacagtcttccccatttcaaaccggaacgattcacgctctactcaagcaaaaatctgagacaagcatggaataagttgtcgtacgtgaaccacgctgaggatctggccagcaaattgctccagtgcagccccaagaaccggctgtctgctcaggctgcattgtcacatgagtatttctccgacctgcccccacggctgtgggaattgacagacatgtcaagcatttttacagtgccgaacgttagattgcaacctgaagctggcgaaagcatgagggctttcggaaaaaacaactcttacggcaaatctttgagcaattcaaagcactag

SEQ ID NO: 105999 - protein, 340 aa, Artificial Sequence
  derived and/or modified sequence
MLALTLRPPPLAKSHLKLGGTPAPARVNGKLVALKVIRLQEEEGTPFTAIREASLLKGLKHANIVLLHDIIHTKETLTLVFEYVHTDLCQYMDKHPGGLHPDNVKLFLFQLLRGLSYIHQRYILHRDLKPQNLLISDTGELKLADFGLARAKSVPSHTYSNEVVTLWYRPPDVLLGSTEYSTCLDMWGVGCIFVEMIQGVAAFPGMKDIQDQLERIFLVLGTPNEDTWPGVHSLPHFKPERFTLYSSKNLRQAWNKLSYVNHAEDLASKLLQCSPKNRLSAQAALSHEYFSDLPPRLWELTDMSSIFTVPNVRLQPEAGESMRAFGKNNSYGKSLSNSKH

SEQ ID NO: 106000 - DNA, 1514 bp, Artificial Sequence
  derived and/or modified sequence
agttgctgtatgagcctggcctggtgcaaacacattgctagagacatgttaaagagttccaggtgaatcaagcctgagggagacaacagcaaaacgatatgtgtcacaaagatgtctacacggaactgccagggaatggactcagtgatcaaacccctggacacaattcctgaggataaaaaagtcagagttcagaggacacagagcacttttgacccatttgagaaaccagctaatcaagtaaagagggtgcattctgagaacaatgcttgcattaactttaagacctcctccactggcaaagagtcacctaaagttaggcggcactccagccccagctcgggtaaatgggaagttggtagctctgaaggtgatcaggctgcaggaagaagaagggacacctttcacagctatcagggaagcttctcttttaaaaggactaaaacatgctaacatagtgctacttcatgacatcatccataccaaggagacgctgacacttgtgtttgaatatgtgcacactgatttatgtcagtacatggacaagcaccctggggggctgcatccagataatgtgaagttgtttttatttcagttgctgcgaggtctgtcttacatccaccagcgttatattttgcacagagacctgaaaccacagaaccttctgatcagtgacacgggggagttaaagctggcagatttcggtcttgcaagagcaaaatccgtccctagccacacatactccaacgaagtggttaccttgtggtacagacctccagatgtccttctaggctcaacagaatattccacctgccttgacatgtggggagtaggttgcatctttgttgaaatgatccaaggagttgctgcttttccaggaatgaaagacattcaggatcaacttgaacgaatatttctggttcttggaacaccaaatgaggacacatggcctggagttcattctttaccacattttaagccagaacgctttaccctgtacagctctaaaaaccttagacaagcatggaataagctcagctatgtgaaccatgcagaggacctggcctccaagctcctacaatgttccccaaagaacagactgtcggcacaggctgccttgagccacgagtattttagtgacctgccgccacggctatgggaactcaccgacatgtcttctatttttactgtcccaaatgtgagattgcaaccagaagctggagaaagcatgcgggcctttgggaaaaacaatagttatggcaaaagtctatcaaacagcaagcactgacaagcagcacattctcaagagcacacaggattaagttgtcatcattctgggaagaaaaaaaaaacattaatgaagaggccaataatatgaagggaatcatggatcagttttctttcgctccctgtggtggatttcacttacaagaaaattgaagctggcaagaccctgttttctctgcaatttatttaaaaccttgcacgcatttggataccttgtgatttccaag

SEQ ID NO: 106001 - DNA, 1023 bp, Artificial Sequence
  derived and/or modified sequence
atgctggccctgaccctgagacccccccccctggccaagagccacctgaagctgggcggcacccccgcccccgccagagtgaacggcaagctggtggccctgaaggtgatcagactgcaggaggaggagggcacccccttcaccgccatcagagaggccagcctgctgaagggcctgaagcacgccaacatcgtgctgctgcacgacatcatccacaccaaggagaccctgaccctggtgttcgagtacgtgcacaccgacctgtgccagtacatggacaagcaccccggcggcctgcaccccgacaacgtgaagctgttcctgttccagctgctgagaggcctgagctacatccaccagagatacatcctgcacagagacctgaagccccagaacctgctgatcagcgacaccggcgagctgaagctggccgacttcggcctggccagagccaagagcgtgcccagccacacctacagcaacgaggtggtgaccctgtggtacagaccccccgacgtgctgctgggcagcaccgagtacagcacctgcctggacatgtggggcgtgggctgcatcttcgtggagatgatccagggcgtggccgccttccccggcatgaaggacatccaggaccagctggagagaatcttcctggtgctgggcacccccaacgaggacacctggcccggcgtgcacagcctgccccacttcaagcccgagagattcaccctgtacagcagcaagaacctgagacaggcctggaacaagctgagctacgtgaaccacgccgaggacctggccagcaagctgctgcagtgcagccccaagaacagactgagcgcccaggccgccctgagccacgagtacttcagcgacctgccccccagactgtgggagctgaccgacatgagcagcatcttcaccgtgcccaacgtgagactgcagcccgaggccggcgagagcatgagagccttcggcaagaacaacagctacggcaagagcctgagcaacagcaagcactag

SEQ ID NO: 106002 - DNA, 1023 bp, Artificial Sequence
  derived and/or modified sequence
atgctggccctgaccttaaggcctccccccctcgctaagtcacatctgaagcttggggggacccctgctcctgcacgcgtgaacgggaagctcgttgccctgaaggtgatcaggctgcaggaagaagagggaactccattcactgctatccgcgaggcttccctgcttaagggtctgaagcacgctaatatcgtacttctgcatgatatcatccacaccaaagagacgctaacacttgtctttgaatatgtgcacacagacctatgccaatacatggacaagcacccgggaggactccaccctgataatgtgaagctgttcttgttccagctgctgcggggcttgagctatattcatcagagatacatccttcatcgggacttaaagccccagaacctactgatttctgatacaggagagttgaaactcgcagacttcgggctagctcgtgctaagtcggtgccctctcatacatattctaatgaggtggtcacattgtggtaccgacctccggacgttctgctggggtctaccgagtactccacctgcctggacatgtggggcgtcggctgcatttttgtggagatgatccagggagtagccgcattcccgggcatgaaggatattcaggaccaattagaacgaatcttcctggttctcggtacgcccaacgaggatacgtggcccggagtgcattccctgccccatttcaaacccgagcggttcactctgtacagttctaaaaatcttcgccaggcttggaataagctgagctacgtcaatcacgccgaagacctcgcctctaagttgctacaatgtagcccaaaaaatcggctgtccgcccaggcagccctctcacacgagtacttctctgacctcccaccacggctctgggaattgacagacatgtcctccatctttaccgtgcccaatgtgcggctccagcccgaagctggagagtccatgcgcgcgtttggaaaaaataatagctacggtaaaagcttgagtaattctaaacattag

SEQ ID NO: 106003 - DNA, 1023 bp, Artificial Sequence
  derived and/or modified sequence
atgctggccctgaccctgcggcccccacccctggccaagagccacctgaagctgggcggcaccccagccccagcccgggtgaatggcaagctggtggccctgaaggtgatccggctgcaggaggaggagggcacccccttcaccgccatccgggaggccagcctgctgaagggcctgaagcacgccaacatcgtgctgctgcatgacatcatccacaccaaggagaccctgaccctggtgtttgaatatgtgcacacagacctgtgccagtacatggacaagcaccctgggggcctgcacccagacaacgtgaagctgttcctgttccagctgctgcggggcctgagctacatccaccagcgctacatcctgcaccgggacctgaagccccagaacctgctgatcagtgacaccggggagctgaagctggccgactttggcctggcccgggccaagtctgtgcccagccacacctacagcaatgaggtggtgaccctgtggtaccggcccccagatgtgctgctgggcagcacagagtacagcacctgcctggacatgtggggcgtgggctgcatctttgtggagatgatccagggcgtggccgccttccctggcatgaaggacatccaggaccagctggagcgcatcttcctggtgctgggcaccccaaatgaagacacctggccaggagtgcacagcctgccccacttcaagccagagcgcttcaccctgtacagcagcaagaacctgcggcaggcctggaacaagctgtcctatgtgaaccacgccgaggacctggccagcaagctgctgcagtgcagccccaagaaccggctgagcgcccaggccgccctgagccatgagtacttcagtgacctgcccccccggctgtgggagctgacagacatgagcagcatcttcaccgtgcccaacgtgcggctgcagcctgaggccggggagagcatgagggccttcggcaagaacaacagctatggcaagagcctgagcaacagcaagcactag

SEQ ID NO: 106004 - DNA, 1023 bp, Artificial Sequence
  derived and/or modified sequence
atgctggccctgaccctgcggcccccccccctggccaagagccaccttaaattaggcggtactcctgctccagctcgagttaacggcaagctggtcgccctcaaggtcattaggttacaagaagaagagggcactccatttacagccattagagaagctagtttgctcaaaggattgaagcacgctaatatcgtcttgttgcacgatatcatacacacaaaggaaacgctcacactagtatttgagtacgttcacactgatctgtgtcaatatatggacaaacatcctggaggccttcaccccgataatgtcaaactgttcctgttccagctgctgcgcgggcttagctatattcaccaaaggtatatccttcacagggatctcaaacctcaaaatttactaatctcagacaccggcgaactgaagctggccgattttggccttgctcgcgcaaaaagtgtaccatctcacacatacagtaacgaggtagtgacactatggtatcgccctcctgacgttctgctgggatccacagaatattcaacatgtttggatatgtggggtgttggctgtatcttcgtagagatgatccagggggtcgcagctttccccggcatgaaggacattcaggaccagcttgagcgtatattccttgtcttagggacccctaacgaggatacttggcctggagtgcattcacttcctcacttcaaacctgagcgattcaccctgtatagtagcaagaacctgcggcaagcctggaacaaactgtcatacgtgaaccacgcagaagacctggcttcaaagctgctacaatgcagtccaaaaaaccgccttagcgcacaggccgcgctcagccatgaatacttctctgacttgcctccgagactttgggagttaactgatatgagctctatcttcacagtacccaacgttcgcctacaaccagaggcgggtgagagtatgcgtgccttcgggaaaaataatagctacggcaagagcctttccaactctaagcattag

SEQ ID NO: 106005 - DNA, 1023 bp, Artificial Sequence
  derived and/or modified sequence
atgctggctttgacattgagaccgccacccctggcgaaatcccatctgaagctgggaggaacccctgctcccgctagggtcaacggaaagctggtggctctgaaggtgattagactccaggaagaggaggggactcccttcacagccatacgggaagcctccctgctgaaaggattgaagcatgcaaatattgtgctgctgcatgatatcattcacaccaaggagacattaaccttagtgtttgagtatgtccacaccgacctatgtcagtacatggacaaacatcctggagggctccaccccgataacgtcaagctattcctctttcagctgcttcgagggcttagttatatccatcagcggtacatcttacatagagacttgaagccccaaaacctgctcatcagcgacacaggggagcttaagttggctgatttcgggctggcgagggcaaaaagtgtgcccagtcacacctattcaaatgaggtcgtgacactctggtatagaccacccgacgtactactgggaagcacggaatattccacttgcctcgatatgtggggggtcgggtgtatctttgtggaaatgatacagggcgtcgctgcgttcccaggaatgaaggatatccaggatcagcttgaaaggatcttcctggtgttggggacccctaacgaagacacatggcctggagtccattcactccctcactttaagcccgagcgcttcaccctttatagttctaagaatctgagacaggcttggaacaagctcagctacgttaatcacgcagaggacttagcaagtaaattactccagtgctcacccaagaataggttaagtgcacaggctgcactgagccatgaatacttctccgacctgcccccaaggttgtgggaactgaccgatatgtcatccatatttactgtgcccaacgtgcgactgcagcccgaggccggtgagtctatgcgagctttcgggaaaaacaacagttatggaaagtccctgtccaatagcaaacactag

SEQ ID NO: 106006 - protein, 151 aa, Artificial Sequence
  derived and/or modified sequence
MDCREMDLYEDYQSPFDFDAGVNKSYLYLSPSGNSSPPGSPTLQKFGLLRTDPVPEEGEDVAATISATETLSEEEQEELRRELAKVEEEIQTLSQVLAAKEKHLAEIKRKLGINSLQELKQNIAKGWQDVTATSARSKLLAAETELLCLLY

SEQ ID NO: 106007 - DNA, 2704 bp, Artificial Sequence
  derived and/or modified sequence
gcctgaactgtttgtacctctgggccatattgcagaaccctgcccttctttgttgactgaggaaagctcgctccctgcccaggtttttcattgttgatcgaaattaacaccaggtggtgaatagagcccctcctaaggttgctcaggataaatcatttattaaataggtctgcttatcaggaggggcgtgaaggctcccaaaaggaaatgctggcacctgggcccagaagccagggcctctaactcctggggttgatttcttcagtgaagttgcaccctacaaagggaatatggccaaagcggcactcaactgaaggctgatatcaggcgattagacagccatgcattctgcgtttgtctggaatggattgtagagagatggacttatatgaggactaccagtccccgtttgattttgatgcaggagtgaacaaaagctatctctacttgtctcctagtggaaattcatctccacccggatcacctactcttcagaaatttggtctgctgagaacagacccagtccctgaggaaggagaagatgttgctgccacgatcagtgccacagagaccctctcggaagaggagcaggaagagctaagaagagaacttgcaaaggtagaagaagaaatccagactctgtctcaagtgttagcagcaaaagagaagcatctagcagagatcaagcggaaacttggaatcaattctctacaggaactaaaacagaacattgccaaagggtggcaagacgtgacagcaacatctgcgaggagcaagcttctagcagcagaaaccgaactgctctgtcttctgtattgagagccatctgcagagctgttacaagaagacatctgaaaccttatcccaggctggacagaaggcctcagctgctttttcgtctgttggctcagtcatcaccaaaaagctggaagatgtaaaattgcaagccttttcacattcctttagtatacgttccattcagcattcaattagcatgcctgctatgagaaactccccaacttttaaatcatttgaagaaaaggtcgaaaacttaaagtctaaagtagggggaaccaagcctgctggtggtgattttggagaagtcttgaattcggctgcaaatgctagtgccaccaccacggagcctcttccagaaaagacacaggagagcctgtgagattcctacctttgttctgctacccactgccagatgctgcaagcgaggtccaagcacatcttgtcaacatgcattgccatgaatttctaccagatgtgcttttatttagctttacatattcctttgaccaaatagtttgtgggttaaacaaaatgaaaatatcttcacctctattcttgggaaacaccctttagtgtacatttatgttcctttatttaggaaacaccattataaaaacacttatagtaaatggggacattcactataatgatctaagaagctacagattgtcatagttgttttcctgctttacaaaattgctccagatctggaatgccagtttgacctttgtcttctataatatttcctttttttcccctctttgaatctctgtatatttgattcttaactaaaattgttctcttaaatattctgaatcctggtaattaaaagtttgggtgtattttctttacctccaaggaaagaactactagctacaaaaaatattttggaataagcattgttttggtataaggtacatattttggttgaagacaccagactgaagtaaacagctgtgcatccaatttattatagttttgtaagtaacaatatgtaatcaaacttctaggtgacttgagagtggaacctcctatatcattatttagcaccgtttgtgacagtaaccatttcagtgtattgtttattataccacttatatcaacttatttttcaccaggttaaaattttaatttctacaaaataacattctgaatcaagcacactgtatgttcagtaggttgaactatgaacactgtcatcaatgttcagttcaaaagcctgaaagtttagatctagaagctggtaaaaatgacaatatcaatcacattaggggaaccattgttgtcttcacttaatccatttagcactatttaaaataagcacaccaagttatatgactaatataacttgaaaattttttatactgaggggttggtgataactcttgaggatgtaatgcattaataaaaatcaactcatcattttctacttgttttcaatgtgttggaaactgtaaaatgatactgtagaacctgtctcctactttgaaaactgaatgtcagggctgagtgaatcaaagtgtctagacatatttgcatagaggccaaggtattctattctaataactgcttactcaacactaccaccttttccttatactgtatatgattatggcctacaatgttgtatttgttatttattaaattgtgattgttttattattgtttatgccaaatgttaactgccaagcttggagtgacctaaagcattttttaaaagcatggctagatttacttcagtataaattatcttatgaaaaccaaattttaaaagccacaggtgttgattgttataaaataacatgctgccattcttgattgctagagtttttgttagtactttggatgcaattaaaactatgtgctatcacatgtgaaaagcttaataaattccatctatcagtag

SEQ ID NO: 106008 - protein, 238 aa, Artificial Sequence
  derived and/or modified sequence
MDCREMDLYEDYQSPFDFDAGVNKSYLYLSPSGNSSPPGSPTLQKFGLLRTDPVPEEGEDVAATISATETLSEEEQEELRRELAKVEEEIQTLSQVLAAKEKHLAEIKRKLGINSLQELKQNIAKGWQDVTATSAYKKTSETLSQAGQKASAAFSSVGSVITKKLEDVNIRSIQHSISMPAMRNSPTFKSFEEKVENLKSKVGGTKPAGGDFGEVLNSAANASATTTEPLPEKTQESL

SEQ ID NO: 106009 - DNA, 717 bp, Artificial Sequence
  derived and/or modified sequence
atggactgcagagagatggacctgtacgaggactaccagagccccttcgacttcgacgccggcgtgaacaagagctacctgtacctgagccccagcggcaacagcagcccccccggcagccccaccctgcagaagttcggcctgctgagaaccgaccccgtgcccgaggagggcgaggacgtggccgccaccatcagcgccaccgagaccctgagcgaggaggagcaggaggagctgagaagagagctggccaaggtggaggaggagatccagaccctgagccaggtgctggccgccaaggagaagcacctggccgagatcaagagaaagctgggcatcaacagcctgcaggagctgaagcagaacatcgccaagggctggcaggacgtgaccgccaccagcgcctacaagaagaccagcgagaccctgagccaggccggccagaaggccagcgccgccttcagcagcgtgggcagcgtgatcaccaagaagctggaggacgtgaacatcagaagcatccagcacagcatcagcatgcccgccatgagaaacagccccaccttcaagagcttcgaggagaaggtggagaacctgaagagcaaggtgggcggcaccaagcccgccggcggcgacttcggcgaggtgctgaacagcgccgccaacgccagcgccaccaccaccgagcccctgcccgagaagacccaggagagcctgtag

SEQ ID NO: 106010 - DNA, 717 bp, Artificial Sequence
  derived and/or modified sequence
atggactgtcgcgaaatggatctgtatgaagattatcagtcacctttcgacttcgacgctggtgtcaataaaagctatctatacttatcgcctagtggtaacagcagcccacccgggtctccaaccctgcaaaaatttggcctgctgcgcacagaccctgtgccagaagagggcgaagacgtcgctgcaacgatctccgctaccgagaccttgagcgaggaggagcaggaggagctgcggagggagttagctaaagttgaggaggagatccaaaccctgtcacaagtcctcgccgccaaagagaagcacctcgcagaaatcaaacggaaactcggcatcaattccctccaggaactgaagcaaaacattgccaaagggtggcaggatgtgaccgccacctccgcctataagaagacctctgagactctgtcccaggccggacaaaaagcctctgcagccttctccagtgtcggatctgtgattaccaaaaaattggaggacgttaacataagatctatccagcactcgatatccatgcccgcgatgcggaacagtccaacattcaaatcttttgaagaaaaagtcgagaatttgaaaagtaaagtcggaggcacgaaacctgccggaggagacttcggggaggtgctgaactccgccgccaacgccagcgctactactaccgagccccttccagaaaagacccaggaaagcctgtag

SEQ ID NO: 106011 - DNA, 717 bp, Artificial Sequence
  derived and/or modified sequence
atggactgccgggagatggacctgtatgaggactaccagagcccctttgattttgatgctggggtgaacaagagctacctgtacctgagccccagcggcaacagcagccccccaggcagccccaccctgcagaagtttggcctgctgaggacagatcctgtgcctgaggagggagaagatgtggccgccaccatcagcgccacagagaccctgtctgaggaggagcaggaggagctgcggcgggagctggccaaggtggaggaggagatccagaccctgagccaggtgctggccgccaaggagaagcacctggccgagatcaagaggaagctgggcatcaacagcctgcaggagctgaagcagaacatcgccaagggctggcaggatgtgacagccaccagcgcctacaagaagaccagcgagaccctgagccaggccggccagaaggccagcgctgccttcagctctgtgggcagcgtcatcaccaagaagctggaggatgtgaacatccgcagcatccagcacagcatctccatgcctgccatgaggaacagccccaccttcaagagctttgaggagaaggtggagaacctgaagagcaaggtgggcggcaccaagccagctggaggagactttggagaggtgctgaacagcgctgccaatgccagcgccaccaccacagagcccctgcctgagaagacccaggagagcctgtag

SEQ ID NO: 106012 - DNA, 717 bp, Artificial Sequence
  derived and/or modified sequence
atggactgccgggagatggacctgtacgaggactaccagagccccttcgactttgatgccggtgttaacaagagttatttgtaccttagtccctctggtaattcgagtcccccagggtctccaaccctccagaagtttggattacttcggactgacccagtgcctgaggagggcgaggatgtcgctgccacaatcagtgctaccgaaactctgtccgaagaagaacaggaagagctacggcgagaactggctaaggttgaagaagaaatccagacgctctcacaggttctggccgcgaaagaaaagcacctcgccgagattaagcgcaagctgggcattaattctttacaggagttgaaacagaatatagccaagggatggcaggacgtcaccgctacctctgcttacaagaagacaagcgagactctgtcccaggctggtcagaaggccagtgcggccttctcctctgtaggatcagtcatcacaaagaaattggaggacgttaacattagatctattcagcattccatttccatgccggcaatgagaaactcgcccacttttaaaagcttcgaagagaaggtcgagaacctgaagtccaaagtgggcggtaccaagccagccgggggcgatttcggtgaggtgctaaattctgccgccaatgcttctgctaccactactgagccattacctgagaagacacaagagtcactgtag

SEQ ID NO: 106013 - DNA, 717 bp, Artificial Sequence
  derived and/or modified sequence
atggattgtagagagatggacctctatgaagattatcagtcaccttttgactttgacgcaggagttaataaatcctacctgtatctgtcacccagcggaaattcgagtccacctggttctccaactctccagaagttcggcctcttgcggactgaccccgtcccagaagaaggggaggacgtggcagccactataagtgccactgagaccctgtcggaggaggagcaagaagaactgagacgggaactagctaaggtcgaggaggagatccagactctaagccaagtgcttgctgcgaaggagaaacacctagcagaaataaaaaggaagttgggtattaattcactccaggagctgaaacagaatattgccaaagggtggcaggatgtgacagctacctcagcttataagaaaacaagcgaaaccctgagccaggcgggtcagaaggcttccgccgcattctcatcagtgggctctgtgattacaaaaaagctggaggacgtgaatatcaggagcatccagcatagcattagcatgccagctatgcggaattcacctacttttaagtccttcgaggagaaagtggaaaatctgaagtctaaggtcggtggaactaagcccgcagggggtgacttcggagaggttttaaacagtgcagccaatgctagtgctacaactactgaacccttacctgagaaaacacaagagtcactctag

SEQ ID NO: 106014 - DNA, 2607 bp, Artificial Sequence
  derived and/or modified sequence
gcctgaactgtttgtacctctgggccatattgcagaaccctgcccttctttgttgactgaggaaagctcgctccctgcccaggtttttcattgttgatcgaaattaacaccaggtggtgaatagagcccctcctaaggttgctcaggataaatcatttattaaataggtctgcttatcaggaggggcgtgaaggctcccaaaaggaaatgctggcacctgggcccagaagccagggcctctaactcctggggttgatttcttcagtgaagttgcaccctacaaagggaatatggccaaagcggcactcaactgaaggctgatatcaggcgattagacagccatgcattctgcgtttgtctggaatggattgtagagagatggacttatatgaggactaccagtccccgtttgattttgatgcaggagtgaacaaaagctatctctacttgtctcctagtggaaattcatctccacccggatcacctactcttcagaaatttggtctgctgagaacagacccagtccctgaggaaggagaagatgttgctgccacgatcagtgccacagagaccctctcggaagaggagcaggaagagctaagaagagaacttgcaaaggtagaagaagaaatccagactctgtctcaagtgttagcagcaaaagagaagcatctagcagagatcaagcggaaacttggaatcaattctctacaggaactaaaacagaacattgccaaagggtggcaagacgtgacagcaacatctgcttacaagaagacatctgaaaccttatcccaggctggacagaaggcctcagctgctttttcgtctgttggctcagtcatcaccaaaaagctggaagatgtaaatatacgttccattcagcattcaattagcatgcctgctatgagaaactccccaacttttaaatcatttgaagaaaaggtcgaaaacttaaagtctaaagtagggggaaccaagcctgctggtggtgattttggagaagtcttgaattcggctgcaaatgctagtgccaccaccacggagcctcttccagaaaagacacaggagagcctgtgagattcctacctttgttctgctacccactgccagatgctgcaagcgaggtccaagcacatcttgtcaacatgcattgccatgaatttctaccagatgtgcttttatttagctttacatattcctttgaccaaatagtttgtgggttaaacaaaatgaaaatatcttcacctctattcttgggaaacaccctttagtgtacatttatgttcctttatttaggaaacaccattataaaaacacttatagtaaatggggacattcactataatgatctaagaagctacagattgtcatagttgttttcctgctttacaaaattgctccagatctggaatgccagtttgacctttgtcttctataatatttcctttttttcccctctttgaatctctgtatatttgattcttaactaaaattgttctcttaaatattctgaatcctggtaattaaaagtttgggtgtattttctttacctccaaggaaagaactactagctacaaaaaatattttggaataagcattgttttggtataaggtacatattttggttgaagacaccagactgaagtaaacagctgtgcatccaatttattatagttttgtaagtaacaatatgtaatcaaacttctaggtgacttgagagtggaacctcctatatcattatttagcaccgtttgtgacagtaaccatttcagtgtattgtttattataccacttatatcaacttatttttcaccaggttaaaattttaatttctacaaaataacattctgaatcaagcacactgtatgttcagtaggttgaactatgaacactgtcatcaatgttcagttcaaaagcctgaaagtttagatctagaagctggtaaaaatgacaatatcaatcacattaggggaaccattgttgtcttcacttaatccatttagcactatttaaaataagcacaccaagttatatgactaatataacttgaaaattttttatactgaggggttggtgataactcttgaggatgtaatgcattaataaaaatcaactcatcattttctacttgttttcaatgtgttggaaactgtaaaatgatactgtagaacctgtctcctactttgaaaactgaatgtcagggctgagtgaatcaaagtgtctagacatatttgcatagaggccaaggtattctattctaataactgcttactcaacactaccaccttttccttatactgtatatgattatggcctacaatgttgtatttgttatttattaaattgtgattgttttattattgtttatgccaaatgttaactgccaagcttggagtgacctaaagcattttttaaaagcatggctagatttacttcagtataaattatcttatgaaaaccaaattttaaaagccacaggtgttgattgttataaaataacatgctgccattcttgattgctagagtttttgttagtactttggatgcaattaaaactatgtgctatcacatgtgaaaagcttaataaattccatctatcagtag

SEQ ID NO: 106015 - protein, 281 aa, Artificial Sequence
  derived and/or modified sequence
MGVATTLQPPTTSKTLQKQHLEAVGAYQYVLTFLFMGPFFSLLVFVLLFTSLWPFSVFYLVWLYVDWDTPNQGGRRSEWIRNRAIWRQLRDYYPVKLVKTAELPPDRNYVLGAHPHGIMCTGFLCNFSTESNGFSQLFPGLRPWLAVLAGLFYLPVYRDYIMSFGLCPVSRQSLDFILSQPQLGQAVVIMVGGAHEALYSVPGEHCLTLQKRKGFVRLALRHGGPPHPRPPAPPPHRGGSQSLSRPLHDGPGAALRGAQGKLWGPRFHLPHLHLGLAAAFR

SEQ ID NO: 106016 - DNA, 846 bp, Artificial Sequence
  derived and/or modified sequence
atgggcgtggccaccaccctgcagccccccaccaccagcaagaccctgcagaagcagcacctggaggccgtgggcgcctaccagtacgtgctgaccttcctgttcatgggccccttcttcagcctgctggtgttcgtgctgctgttcaccagcctgtggcccttcagcgtgttctacctggtgtggctgtacgtggactgggacacccccaaccagggcggcagaagaagcgagtggatcagaaacagagccatctggagacagctgagagactactaccccgtgaagctggtgaagaccgccgagctgccccccgacagaaactacgtgctgggcgcccacccccacggcatcatgtgcaccggcttcctgtgcaacttcagcaccgagagcaacggcttcagccagctgttccccggcctgagaccctggctggccgtgctggccggcctgttctacctgcccgtgtacagagactacatcatgagcttcggcctgtgccccgtgagcagacagagcctggacttcatcctgagccagccccagctgggccaggccgtggtgatcatggtgggcggcgcccacgaggccctgtacagcgtgcccggcgagcactgcctgaccctgcagaagagaaagggcttcgtgagactggccctgagacacggcggccccccccaccccagaccccccgccccccccccccacagaggcggcagccagagcctgagcagacccctgcacgacggccccggcgccgccctgagaggcgcccagggcaagctgtggggccccagattccacctgccccacctgcacctgggcctggccgccgccttcagatag

SEQ ID NO: 106017 - DNA, 846 bp, Artificial Sequence
  derived and/or modified sequence
atgggcgtcgcaaccaccctgcagcctccaactaccagcaagacacttcaaaagcagcacctggaggctgtgggcgcatatcagtacgtgctcacctttcttttcatggggccctttttttccctcctcgtgttcgtcctattatttacaagcctctggccattttcagttttctatctggtgtggctgtacgtggactgggacactccaaatcaaggcggtagacggagcgaatggatcagaaatagggccatctggcgacagcttagggactactaccccgtaaagcttgtcaagacagctgagctgcccccagatcgcaattatgtcttaggggctcatcctcacggcattatgtgcacaggtttcctgtgcaacttctctacagagtccaatggcttcagccagcttttccctgggctgagaccctggctagcggtgctggccgggcttttttatcttcctgtgtatcgtgattacatcatgagtttcgggctctgtcccgtgtctcggcagagtctggatttcatcttgtcacagccacagctgggccaggctgtcgtcatcatggtcggtggcgcgcacgaggccctttacagtgtccccggagaacactgtctgaccctccagaaaaggaaggggttcgtcaggcttgctctccgccatggggggccaccacacccccggcctcctgccccacccccacatcggggcggaagccaatccctatcacgtcccctgcacgatggcccaggggctgctctccgaggggcccagggtaaactatggggaccacgctttcatctgccccaccttcatctgggcctggcagccgcctttagatag

SEQ ID NO: 106018 - DNA, 846 bp, Artificial Sequence
  derived and/or modified sequence
atgggcgtggccaccaccctgcagccccccaccaccagcaagaccctgcagaagcagcacctggaggccgtgggcgcctaccagtatgtgctgaccttcctgttcatgggccccttcttcagcctgctggtgtttgtgctgctcttcaccagcctgtggcccttcagcgtcttctacctggtgtggctgtatgtggactgggacacccccaaccagggcggcagaagaagtgagtggatccggaacagagccatctggaggcagctgcgggactactaccctgtgaagctggtgaagacagctgagctgcccccagacagaaattatgtgctgggcgcccacccccacggcatcatgtgcaccggcttcctgtgcaacttcagcacagagagcaatggcttcagccagctgtttcctggcctgcggccctggctggccgtgctggccggcctcttctacctgcctgtgtacagagactacatcatgagctttggcctgtgccctgtgtcccggcagagcctggacttcatcctgagccagccccagctgggccaggccgtggtgatcatggtgggcggggcccacgaggccctgtacagcgtgcctggagagcactgcctgaccctgcagaagaggaaaggatttgtgcggctggccctgcggcacggcggccccccccacccccggcccccagcccccccaccccaccggggcggcagccagagcctgagccggcccctgcatgatggccctggagctgccctgcggggggcccagggcaagctgtggggcccccgcttccacctgccccacctgcacctgggcctggccgccgccttcagatag

SEQ ID NO: 106019 - DNA, 933 bp, Artificial Sequence
  derived and/or modified sequence
caagccttcatcgtttgtcctccgggttctgggatcctgctggaagaggggagcttctgcaatgggagttgccacaaccctgcagcccccaaccacttccaaaaccttgcagaagcagcatctagaagcagtgggcgcctaccaatatgtgctcactttcctcttcatgggccctttcttctcccttcttgtctttgtcctcctcttcacgtcactctggcccttctctgttttttacttggtgtggctctatgtggactgggacacacccaaccaaggtggaaggcgttcggagtggataaggaaccgggcaatttggagacaactaagggattattatcctgtcaagctggtgaaaacagcagagctgcccccggatcggaactacgtgctgggcgcccaccctcatgggatcatgtgtacaggcttcctctgtaatttctccaccgagagcaatggcttctcccagctcttcccggggctccggccctggttagccgtgctggctggcctcttctacctcccggtctatcgcgactacatcatgtcctttggactctgtccggtgagccgccagagcctggacttcatcctgtcccagccccagctcgggcaggccgtggtcatcatggtggggggtgcgcacgaggccctgtattcagtccccggggagcactgccttacgctccagaagcgcaaaggcttcgtgcgcctggcgctgaggcacggtgggccgccccatccccgtcccccagcgcctccaccccaccgaggaggaagtcaatcactatcacgccctctacatgacggccctggagcagctcttcgaggagcacaaggaaagctgtggggtccccgcttccacctgcctcaccttcatctaggcctggccgcggcctttcgctgagcccctgagcccaaggcactgagacc

SEQ ID NO: 106020 - DNA, 846 bp, Artificial Sequence
  derived and/or modified sequence
atgggcgtggccaccaccctgcagccccccaccaccagcaagaccctgcaaaagcagcacctcgaagcggtgggcgcctaccagtatgtgctgactttccttttcatgggtccatttttttcactgctggtcttcgtgctcctgttcacctctctgtggccattcagtgtcttctacctggtctggttgtatgtggattgggatactccgaatcagggcggacggcgttctgagtggatccgcaaccgggccatctggaggcaattacgggattattaccccgtgaagctcgttaaaaccgcagagctgcctcccgataggaattatgtccttggcgcacacccacatggaattatgtgtacaggttttttgtgcaacttcagcactgaatccaacgggttctcacagctgttccctggcctgagaccgtggctagcagttttggcagggctgttctacctgcccgtgtatagggactacatcatgtcttttggcctctgtcctgtttcccgccagtccctggacttcatactcagtcagccacagctaggccaggccgtcgttatcatggtaggtggggcccacgaggccctttatagtgtccccggtgagcactgcctcaccctgcaaaaaaggaaaggctttgtacggctggcacttcggcacggcggaccaccgcatccgaggccaccagccccacctccccataggggaggcagccagagtctaagccgccccctgcatgatgggcccggagccgctttgcgaggtgcacaaggtaaactctggggccctagatttcatttaccacaccttcacctgggtctagcagccgcttttcgctag

SEQ ID NO: 106021 - DNA, 846 bp, Artificial Sequence
  derived and/or modified sequence
atgggagtcgccacaacactgcagccacctacgacttcgaagaccctgcaaaagcagcacttggaggctgtgggagcctatcagtacgtactcactttcctttttatggggccattttttagcctgctcgtctttgtcctgctttttacttcactgtggccattttccgtgttttatttggtgtggctgtacgtggactgggatacgcctaaccaggggggtaggcggtccgagtggattcgcaatagagccatatggcgtcagctgagagattactatcccgttaagctggtcaagaccgccgaacttccaccggaccgtaattacgtgctaggagcgcacccacatggaatcatgtgcacaggttttctctgcaatttttccaccgagagcaatggattttcccagttgttccctggattgaggccttggctggcagtattagcaggattattctatctgcccgtttaccgcgactatataatgtccttcggtctctgtccagtctcaagacagagcttggactttatcttaagccagcctcagctagggcaggcggtcgtaatcatggtgggaggggctcacgaagcactctactccgtgccaggcgagcattgcctgaccctgcagaagcgcaaaggcttcgtccgcctggcccttcgtcatggtggccctccacacccccgacctcccgcaccaccccctcaccgtggaggttcccaatctctgtccaggccactgcatgacggcccaggcgcagcgcttagaggagcacagggcaaactgtgggggccacggtttcacttgccacacttgcatcttggactggcagcggcattcagatag

SEQ ID NO: 106022 - protein, 1582 aa, Artificial Sequence
  derived and/or modified sequence
MPLAFCGSENHSAAYRVDQGVLNNGCFVDALNVVPHVFLLFITFPILFIGWGSQSSKVHIHHSTWLHFPGHNLRWILTFMLLFVLVCEIAEGILSDGVTESHHLHLYMPAGMAFMAAVTSVVYYHNIETSNFPKLLIALLVYWTLAFITKTIKFVKFLDHAIGFSQLRFCLTGLLVILYGMLLLVEVNVIRVRRYIFFKTPREVKPPEDLQDLGVRFLQPFVNLLSKGTYWWMNAFIKTAHKKPIDLRAIGKLPIAMRALTNYQRLCEAFDAQVRKDIQGTQGARAIWQALSHAFGRRLVLSSTFRILADLLGFAGPLCIFGIVDHLGKENDVFQPKTQFLGVYFVSSQEFLANAYVLAVLLFLALLLQRTFLQASYYVAIETGINLRGAIQTKIYNKIMHLSTSNLSMGEMTAGQICNLVAIDTNQLMWFFFLCPNLWAMPVQIIVGVILLYYILGVSALIGAAVIILLAPVQYFVATKLSQAQRSTLEYSNERLKQTNEMLRGIKLLKLYAWENIFRTRVETTRRKEMTSLRAFAIYTSISIFMNTAIPIAAVLITFVGHVSFFKEADFSPSVAFASLSLFHILVTPLFLLSSVVRSTVKALVSVQKLSEFLSSAEIREEQCAPHEPTPQGPASKYQAVPLRVVNRKRPAREDCRGLTGPLQSLVPSADGDADNCCVQIMGGYFTWTPDGIPTLSNITIRIPRGQLTMIVGQVGCGKSSLLLAALGEMQKVSGAVFWSSSLPDSEIGEDPSPERETATDLDIRKRGPVAYASQKPWLLNATVEENIIFESPFNKQRYKMVIEACSLQPDIDILPHGDQTQIGERGINLSGGQRQRISVARALYQHANVVFLDDPFSALDIHLSDHLMQAGILELLRDDKRTVVLVTHKLQYLPHADWIIAMKDGTIQREGTLKDFQRSECQLFEHWKTLMNRQDQELEKETVTERKATEPPQGLSRAMSSRDGLLQDEEEEEEEAAESEEDDNLSSMLHQRAEIPWRACAKYLSSAGILLLSLLVFSQLLKHMVLVAIDYWLAKWTDSALTLTPAARNCSLSQECTLDQTVYAMVFTVLCSLGIVLCLVTSVTVEWTGLKVAKRLHRSLLNRIILAPMRFFETTPLGSILNRFSSDCNTIDQHIPSTLECLSRSTLLCVSALAVISYVTPVFLVALLPLAIVCYFIQKYFRVASRDLQQLDDTTQLPLLSHFAETVEGLTTIRAFRYEARFQQKLLEYTDSNNIASLFLTAANRWLEVRMEYIGACVVLIAAVTSISNSLHRELSAGLVGLGLTYALMVSNYLNWMVRNLADMELQLGAVKRIHGLLKTEAESYEGLLAPSLIPKNWPDQGKIQIQNLSVRYDSSLKPVLKHVNALIAPGQKIGICGRTGSGKSSFSLAFFRMVDTFEGHIIIDGIDIAKLPLHTLRSRLSIILQDPVLFSGTIRFNLDPERKCSDSTLWEALEIAQLKLVVKALPGGLDAIITEGGENFSQGQRQLFCLARAFVRKTSIFIMDEATASIDMATENILQKVVMTAFADRTVVTIAHRVHTILSADLVIVLKRGAILEFDKPEKLLSRKDSVFASFVRADK

SEQ ID NO: 106023 - DNA, 4749 bp, Artificial Sequence
  derived and/or modified sequence
atgcccctggccttctgcggcagcgagaaccacagcgccgcctacagagtggaccagggcgtgctgaacaacggctgcttcgtggacgccctgaacgtggtgccccacgtgttcctgctgttcatcaccttccccatcctgttcatcggctggggcagccagagcagcaaggtgcacatccaccacagcacctggctgcacttccccggccacaacctgagatggatcctgaccttcatgctgctgttcgtgctggtgtgcgagatcgccgagggcatcctgagcgacggcgtgaccgagagccaccacctgcacctgtacatgcccgccggcatggccttcatggccgccgtgaccagcgtggtgtactaccacaacatcgagaccagcaacttccccaagctgctgatcgccctgctggtgtactggaccctggccttcatcaccaagaccatcaagttcgtgaagttcctggaccacgccatcggcttcagccagctgagattctgcctgaccggcctgctggtgatcctgtacggcatgctgctgctggtggaggtgaacgtgatcagagtgagaagatacatcttcttcaagacccccagagaggtgaagccccccgaggacctgcaggacctgggcgtgagattcctgcagcccttcgtgaacctgctgagcaagggcacctactggtggatgaacgccttcatcaagaccgcccacaagaagcccatcgacctgagagccatcggcaagctgcccatcgccatgagagccctgaccaactaccagagactgtgcgaggccttcgacgcccaggtgagaaaggacatccagggcacccagggcgccagagccatctggcaggccctgagccacgccttcggcagaagactggtgctgagcagcaccttcagaatcctggccgacctgctgggcttcgccggccccctgtgcatcttcggcatcgtggaccacctgggcaaggagaacgacgtgttccagcccaagacccagttcctgggcgtgtacttcgtgagcagccaggagttcctggccaacgcctacgtgctggccgtgctgctgttcctggccctgctgctgcagagaaccttcctgcaggccagctactacgtggccatcgagaccggcatcaacctgagaggcgccatccagaccaagatctacaacaagatcatgcacctgagcaccagcaacctgagcatgggcgagatgaccgccggccagatctgcaacctggtggccatcgacaccaaccagctgatgtggttcttcttcctgtgccccaacctgtgggccatgcccgtgcagatcatcgtgggcgtgatcctgctgtactacatcctgggcgtgagcgccctgatcggcgccgccgtgatcatcctgctggcccccgtgcagtacttcgtggccaccaagctgagccaggcccagagaagcaccctggagtacagcaacgagagactgaagcagaccaacgagatgctgagaggcatcaagctgctgaagctgtacgcctgggagaacatcttcagaaccagagtggagaccaccagaagaaaggagatgaccagcctgagagccttcgccatctacaccagcatcagcatcttcatgaacaccgccatccccatcgccgccgtgctgatcaccttcgtgggccacgtgagcttcttcaaggaggccgacttcagccccagcgtggccttcgccagcctgagcctgttccacatcctggtgacccccctgttcctgctgagcagcgtggtgagaagcaccgtgaaggccctggtgagcgtgcagaagctgagcgagttcctgagcagcgccgagatcagagaggagcagtgcgccccccacgagcccaccccccagggccccgccagcaagtaccaggccgtgcccctgagagtggtgaacagaaagagacccgccagagaggactgcagaggcctgaccggccccctgcagagcctggtgcccagcgccgacggcgacgccgacaactgctgcgtgcagatcatgggcggctacttcacctggacccccgacggcatccccaccctgagcaacatcaccatcagaatccccagaggccagctgaccatgatcgtgggccaggtgggctgcggcaagagcagcctgctgctggccgccctgggcgagatgcagaaggtgagcggcgccgtgttctggagcagcagcctgcccgacagcgagatcggcgaggaccccagccccgagagagagaccgccaccgacctggacatcagaaagagaggccccgtggcctacgccagccagaagccctggctgctgaacgccaccgtggaggagaacatcatcttcgagagccccttcaacaagcagagatacaagatggtgatcgaggcctgcagcctgcagcccgacatcgacatcctgccccacggcgaccagacccagatcggcgagagaggcatcaacctgagcggcggccagagacagagaatcagcgtggccagagccctgtaccagcacgccaacgtggtgttcctggacgaccccttcagcgccctggacatccacctgagcgaccacctgatgcaggccggcatcctggagctgctgagagacgacaagagaaccgtggtgctggtgacccacaagctgcagtacctgccccacgccgactggatcatcgccatgaaggacggcaccatccagagagagggcaccctgaaggacttccagagaagcgagtgccagctgttcgagcactggaagaccctgatgaacagacaggaccaggagctggagaaggagaccgtgaccgagagaaaggccaccgagcccccccagggcctgagcagagccatgagcagcagagacggcctgctgcaggacgaggaggaggaggaggaggaggccgccgagagcgaggaggacgacaacctgagcagcatgctgcaccagagagccgagatcccctggagagcctgcgccaagtacctgagcagcgccggcatcctgctgctgagcctgctggtgttcagccagctgctgaagcacatggtgctggtggccatcgactactggctggccaagtggaccgacagcgccctgaccctgacccccgccgccagaaactgcagcctgagccaggagtgcaccctggaccagaccgtgtacgccatggtgttcaccgtgctgtgcagcctgggcatcgtgctgtgcctggtgaccagcgtgaccgtggagtggaccggcctgaaggtggccaagagactgcacagaagcctgctgaacagaatcatcctggcccccatgagattcttcgagaccacccccctgggcagcatcctgaacagattcagcagcgactgcaacaccatcgaccagcacatccccagcaccctggagtgcctgagcagaagcaccctgctgtgcgtgagcgccctggccgtgatcagctacgtgacccccgtgttcctggtggccctgctgcccctggccatcgtgtgctacttcatccagaagtacttcagagtggccagcagagacctgcagcagctggacgacaccacccagctgcccctgctgagccacttcgccgagaccgtggagggcctgaccaccatcagagccttcagatacgaggccagattccagcagaagctgctggagtacaccgacagcaacaacatcgccagcctgttcctgaccgccgccaacagatggctggaggtgagaatggagtacatcggcgcctgcgtggtgctgatcgccgccgtgaccagcatcagcaacagcctgcacagagagctgagcgccggcctggtgggcctgggcctgacctacgccctgatggtgagcaactacctgaactggatggtgagaaacctggccgacatggagctgcagctgggcgccgtgaagagaatccacggcctgctgaagaccgaggccgagagctacgagggcctgctggcccccagcctgatccccaagaactggcccgaccagggcaagatccagatccagaacctgagcgtgagatacgacagcagcctgaagcccgtgctgaagcacgtgaacgccctgatcgcccccggccagaagatcggcatctgcggcagaaccggcagcggcaagagcagcttcagcctggccttcttcagaatggtggacaccttcgagggccacatcatcatcgacggcatcgacatcgccaagctgcccctgcacaccctgagaagcagactgagcatcatcctgcaggaccccgtgctgttcagcggcaccatcagattcaacctggaccccgagagaaagtgcagcgacagcaccctgtgggaggccctggagatcgcccagctgaagctggtggtgaaggccctgcccggcggcctggacgccatcatcaccgagggcggcgagaacttcagccagggccagagacagctgttctgcctggccagagccttcgtgagaaagaccagcatcttcatcatggacgaggccaccgccagcatcgacatggccaccgagaacatcctgcagaaggtggtgatgaccgccttcgccgacagaaccgtggtgaccatcgcccacagagtgcacaccatcctgagcgccgacctggtgatcgtgctgaagagaggcgccatcctggagttcgacaagcccgagaagctgctgagcagaaaggacagcgtgttcgccagcttcgtgagagccgacaagtag

SEQ ID NO: 106024 - DNA, 4749 bp, Artificial Sequence
  derived and/or modified sequence
atgcctcttgccttctgtggctctgagaatcactcggctgcctaccgcgtagaccagggcgtgctgaacaacgggtgtttcgtagacgcgctcaatgtagtgccacatgtgttcctgttgttcattacctttcctatactcttcatcgggtggggaagccagtcttctaaagtgcacatacatcacagtacctggctgcatttccccggtcataatctgcgctggattctgacatttatgctactgttcgtactcgtctgtgagatcgctgagggtatcctctccgatggcgtgacggagagtcaccacctgcatctctatatgcctgctggcatggcatttatggccgccgtaacatccgtagtgtattatcacaatatagaaacctcaaattttccgaaactcttgatcgcgttgctagtgtactggactctagccttcataaccaaaactattaaattcgtcaagttcctggaccatgcgataggctttagccaactgcgtttctgcctgactggcctacttgtcatcctgtacggaatgcttctgctggttgaagtgaacgtcatccgggtccgacgatatattttcttcaaaacaccacgggaggttaagcctccagaagacttacaggacctcggtgtccggtttctgcagcccttcgtgaacctattgtcaaaagggacctactggtggatgaacgccttcattaaaacagcgcacaaaaaaccgattgatctgcgcgcaattggaaagctgccaattgctatgagggctttgaccaattaccagaggctgtgcgaagcctttgatgcgcaggtgaggaaggacatccaagggacccagggcgccagggcgatctggcaggcgttgtctcacgcgtttggacgccgtctggtgctcagtagtacgtttcgaatcctggccgatcttctggggttcgcaggacccctgtgcatctttggaattgtggaccatctggggaaggagaatgatgtgttccaaccaaagacacagtttttaggcgtgtattttgtaagcagtcaagaattcctagctaacgcttatgttctggcggttctgctttttctcgccctgctgttgcaacgaacattcttacaggctagctattacgtggcgatcgaaaccggaatcaatctgcgcggcgccatccaaactaagatttacaataaaatcatgcacctctcaacatcaaacttgtcaatgggagagatgactgcggggcagatctgtaacctggtggctatcgataccaatcagctaatgtggttttttttcttatgtccaaacctttgggctatgcccgtccagataattgtgggggtgattctcctgtactatatcctgggtgtgagcgctttgatcggtgccgctgtgattatattgctggcccctgtgcagtacttcgtggccaccaagctgagtcaggcccaacgtagcaccttggagtatagcaacgaaaggctcaagcagacgaacgagatgctgcgcggtattaaacttctaaaactctacgcctgggagaacatcttcagaaccagagtagaaacaacccgcaggaaagagatgaccagcctcagggcattcgctatctacacaagcattagtatttttatgaacaccgcaatccccatcgccgctgtgctgatcacattcgtcggtcatgtctcatttttcaaagaggcagacttcagcccctccgtggctttcgcaagtctctccttgttccatatattggtcactcctctcttcctactatcctctgtagtcagatccaccgtgaaggcactggtgtcagtgcagaagctctctgagttcttatcctcggccgagattagagaagaacagtgtgctccacatgagcccaccccacaagggccagcatcaaagtatcaggctgtcccgctgagggtggtgaacagaaaaaggcccgctcgagaggattgccgtggactgaccggtccccttcagtctctggtgcctagtgctgatggcgacgctgataactgttgcgtgcaaatcatgggaggttattttacctggacccccgacggtataccgactttgagtaatataacaatccggatcccccgaggccagctgactatgatagtcgggcaagtcggctgtggaaagtcttccctattgctcgccgcactgggtgagatgcagaaggtttctggagctgttttttggtcctcaagtctcccagactccgaaataggcgaagatccctcgcccgagcgtgagacagcaacagacctcgatataaggaaaagaggcccggtagcttacgcgagccaaaagccctggctgctcaacgcaactgtggaggagaatatcatatttgagtctcccttcaataagcagcgatataagatggtgattgaggcttgctccctgcagccagacatcgacatcctgccccatggagaccagacacagatcggtgaaaggggcattaatttgagcggtggccagaggcaaaggatcagcgtggccagggctctgtatcagcacgcaaacgtggtcttcctcgatgaccccttcagcgccttagacattcatctgtctgatcacctgatgcaggcagggatcttagagctcctgagagatgacaaaagaaccgttgtgctggtgacgcacaaactgcagtacctgccccatgctgattggattattgccatgaaggatgggactatccagagagagggcacgctaaaagacttccaacgaagtgaatgtcagctgtttgagcactggaagactttaatgaatcggcaggatcaagaactcgagaaagagacagtgacagagagaaaggccaccgaacctccacagggtctttcccgcgcaatgagtagtcgcgacggcttactgcaggacgaggaagaggaggaggaggaagccgccgaatctgaggaagacgataacctttcctccatgctccaccagcgcgcggagataccatggcgagcttgtgctaagtacctgtcttctgcaggaatcctgttgctaagccttttagtcttttcgcagctcttgaaacatatggttttagtggccattgattattggctcgcaaaatggaccgactcagccttgacactcacccccgccgccaggaattgctcccttagtcaggagtgtacgctggaccagacggtgtatgctatggtattcaccgtgctatgcagcctcggtatagtcctgtgcctggttacgtcagtcacagtggagtggaccggattaaaggttgccaagcgcctacacagatcgttactgaacagaattatcctcgcccccatgcgctttttcgagaccaccccgttggggtcaattcttaaccgattctcttcagactgcaacactattgaccagcacatcccatcaacgcttgagtgcctatcaagatcaaccctgctgtgcgtgtccgcactggccgtgatctcctacgttactccggtgttcctggtggccctactcccactagccatcgtgtgctacttcatccagaagtattttcgtgtcgcgtcaagggacctccagcagctggatgataccacccaactgccactgctgtcccacttcgccgagaccgtggagggactcactacgataagggccttccgatacgaagctaggttccagcagaagcttttggagtacacagattccaataatatagcaagtctctttctgacagcggctaacaggtggctggaagttcgcatggagtatatcggagcttgcgtagttctgatagcggcagtcacgtcaatcagcaacagtttgcacagagagctgtctgctgggctggtcggcctaggcttgacctacgcactgatggtcagcaattatttaaattggatggttaggaacctggcagacatggaactgcagttgggcgctgtgaagcggatccatggactcctcaagactgaagcagagtcctacgagggtcttctcgctcccagcctcattcccaagaattggccagatcaggggaaaatccagatacagaatctgagcgtccgctacgattctagcttaaagcccgtcctgaagcacgttaatgccctaattgctcccggccagaagataggcatctgcggacgcaccggctctggcaaaagttcttttagccttgcctttttccggatggtcgacacttttgagggccacataattatcgacggcattgacatcgcaaaattgccactgcatacactgcgctcaaggctcagcattatcctccaggaccccgtcctgttttccgggactatcagatttaatttagatccagaaaggaagtgctctgattccaccctctgggaggcactcgaaattgcccaactgaagctcgtcgtcaaggctttacccggcggccttgatgctatcatcactgaaggaggggaaaatttttcccagggacagagacagctattttgtcttgccagggcattcgttcgcaaaacctcaatcttcatcatggacgaggccactgccagcatcgatatggccaccgaaaatatattgcagaaggtcgtgatgacagcttttgccgaccgaacagtggtaaccatagcccatcgcgtgcacactatcctgtctgccgacttagtcatagtgttaaagagaggcgctatcttggagttcgacaaaccggagaagcttctgtctcgaaaggatagcgtgtttgcaagtttcgtgagggccgacaagtag

SEQ ID NO: 106025 - DNA, 4749 bp, Artificial Sequence
  derived and/or modified sequence
atgcccctggccttctgtggcagcgagaaccacagcgctgcctacagagtggaccagggcgtgctgaacaacggctgctttgtggatgccctgaatgtggtgccccacgtgttcctgctcttcatcaccttccccatcctcttcatcggctggggcagccagagcagcaaggtgcacatccaccacagcacctggctgcacttccctggccacaacctgcgctggatcctgaccttcatgctgctgtttgtgctggtgtgtgaaattgctgagggcatcctgagtgatggagtgacagagagccaccacctgcacctgtacatgcctgctggcatggccttcatggctgctgtgacctctgtggtgtactaccacaacatcgagaccagcaacttccccaagctgctgattgccctgctggtgtactggaccctggccttcatcaccaagaccatcaagtttgtgaagttcctggaccacgccatcggcttcagccagctgcgcttctgcctgaccggcctgctggtgatcctgtatggcatgctgctgctggtggaggtgaatgtcatccgggtgcggcgctacatcttcttcaagaccccccgggaggtgaagcccccagaggacctgcaggacctgggcgtgcgcttcctgcagccctttgtgaacctgctgagcaagggcacctactggtggatgaatgccttcatcaagacagcccacaagaagcccatcgacctgcgggccatcggcaagctgcccatcgccatgagggccctgaccaactaccagaggctgtgtgaggcctttgatgcccaggtgaggaaggacatccagggcacccagggcgcccgggccatctggcaggccctgagccacgcctttggaagaaggctggtgctgagcagcaccttccgcatcctggccgacctgctgggctttgctggccccctgtgcatctttggaattgtggaccacctgggcaaggaaaatgatgtgttccagcccaagacccagttcctgggcgtgtactttgtgagcagccaggagttcctggccaatgcctacgtgctggccgtgctgctcttcctggccctgctgctgcagaggaccttcctgcaggccagctactacgtggccattgaaacaggcatcaacctgcggggggccatccagaccaagatctacaacaagatcatgcacctgagcaccagcaacctgtccatgggagagatgacagctggccagatctgcaacctggtggccatcgacaccaaccagctgatgtggttcttcttcctgtgccccaacctgtgggccatgcctgtgcagatcatcgtgggcgtcatcctgctgtactacatcctgggcgtgtctgccctgattggagctgctgtgatcatcctgctggcccctgtgcagtactttgtggccaccaagctgagccaggcccagaggagcaccctggagtacagcaatgaaaggctgaagcagaccaatgagatgctgcggggcatcaagctgctgaagctgtatgcctgggagaacatcttccgcaccagggtggagaccaccaggaggaaggagatgaccagcctgcgggcctttgccatctacaccagcatcagcatcttcatgaacacagccatccccatcgctgctgtgctgatcacctttgtgggccacgtgtccttcttcaaggaggccgacttcagccccagcgtggcctttgccagcctgagcctcttccacatcctggtgacccccctcttcctgctgagctctgtggtgcgcagcacagtgaaggccctggtgtctgtgcagaagctgtctgagttcctgagcagcgctgagatccgggaggagcagtgtgcccctcatgagcccaccccccagggccctgccagcaagtaccaggccgtgcccctgcgggtggtgaacaggaagaggcctgcccgggaggactgccggggcctgaccggccccctgcagagcctggtgcccagcgcagatggagatgctgacaactgctgcgtgcagatcatgggcggctacttcacctggaccccagatggcatccccaccctgagcaacatcaccatccgcatcccccggggccagctgaccatgattgtgggccaggtgggctgcggcaagagcagcctgctgctggccgccctgggggagatgcagaaggtgtctggagctgtgttctggagcagcagcctgcctgacagcgagatcggggaggaccccagccctgagcgggagacagccacagacctggacatcaggaagaggggccctgtggcctatgccagccagaagccctggctgctgaatgccaccgtggaggagaacatcatctttgagagccccttcaacaagcagcgctacaagatggtgattgaggcctgcagcctgcagcctgacatcgacatcctgccccatggagaccagacccagattggagagcggggcatcaacctgagcggcggccagaggcagaggatctctgtggcccgggccctgtaccagcacgccaacgtggtgttcctggatgaccccttcagcgccctggacatccacctgagtgaccacctgatgcaggccggcatcctggagctgctgagagatgacaagaggacagtggtgctggtgacccacaagctgcagtacctgccccatgctgactggatcatcgccatgaaggatggcaccatccagcgggagggcaccctgaaggacttccagaggtctgagtgccagctgtttgagcactggaagaccctgatgaaccggcaggaccaggagctggagaaggagaccgtgacagagaggaaggccacagagcccccccagggcctgagccgggccatgagcagcagagatggcctgctgcaggatgaggaggaggaggaggaggaggccgctgagagcgaggaggatgacaacctgagctccatgctgcaccagagagctgagatcccctggagggcctgtgccaagtacctgagcagcgctggcatcctgctgctgagcctgctggtgttcagccagctgctgaagcacatggtgctggtggccatcgactactggctggccaagtggacagacagcgccctgaccctgaccccagctgccaggaactgcagcctgagccaggagtgcaccctggaccagacagtgtatgccatggtgttcaccgtgctgtgcagcctgggcatcgtgctgtgcctggtgacctctgtgacagtggagtggacaggcctgaaggtggccaagaggctgcacaggagcctgctgaaccgcatcatcctggcccccatgaggttctttgagaccacccccctgggcagcatcctgaaccgcttcagcagtgactgcaacaccatcgaccagcacatccccagcaccctggagtgcctgagccgcagcaccctgctgtgtgtgtctgccctggccgtcatctcctatgtgacccctgtgttcctggtggccctgctgcccctggccatcgtgtgctacttcatccagaagtacttccgggtggccagccgggacctgcagcagctggatgacaccacccagctgcccctgctgagccactttgctgagaccgtggagggcctgaccaccatccgggccttccgctatgaggcccgcttccagcagaagctgctggagtacacagacagcaacaacatcgccagcctcttcctgacagctgccaaccgctggctggaggtgaggatggagtacatcggggcctgtgtggtgctgattgctgctgtgaccagcatcagcaacagcctgcaccgggagctgtctgctggcctggtgggcctgggcctgacctacgccctgatggtgagcaactacctgaactggatggtgaggaacctggccgacatggagctgcagctgggcgctgtgaagaggatccacggcctgctgaagacagaagctgagagctatgagggcctgctggcccccagcctcatccccaagaactggccagaccagggcaagatccagatccagaacctgtctgtgcgctatgacagcagcctgaagcctgtgctgaagcacgtgaatgccctgattgcccctggccagaagattggcatctgtggccgcactggaagtggcaagagcagcttcagcctggccttcttcaggatggtggacacctttgagggccacatcatcattgatggcatcgacatcgccaagctgcccctgcacaccctgcggagccggctgagcatcatcctgcaggaccctgtgctcttcagcggcaccatccgcttcaacctggaccctgagaggaaatgtagtgacagcaccctgtgggaggccctggagatcgcccagctgaagctggtggtgaaggccctgcccggcggcctggatgccatcatcacagagggcggggagaacttcagccagggccagaggcagctgttctgcctggcccgggcctttgtgaggaagaccagcatcttcatcatggatgaggccacagccagcattgacatggccacagagaacatcctgcagaaggtggtgatgacagcctttgctgacagaacagtggtgaccatcgcccaccgggtgcacaccatcctgtctgctgacctggtgattgtgctgaagagaggagccatcctggagtttgacaagccagagaagctgctgagcaggaaggacagcgtgtttgccagctttgtgcgggctgacaagtag

SEQ ID NO: 106026 - DNA, 4749 bp, Artificial Sequence
  derived and/or modified sequence
atgcccctggccttctgcggcagcgagaaccacagcgccgcctaccgggttgatcagggggtgctaaataatgggtgtttcgtagatgctctgaatgtcgtcccacacgtctttttgctatttattacatttcctatcctgttcattgggtggggctcacagagctctaaagtgcatatccaccactctacatggttgcacttccctggtcacaacctgcgctggatattaactttcatgctcctttttgtgctggtgtgcgaaattgctgaggggattttgagtgatggcgtcaccgaatctcatcaccttcacctgtacatgcctgccgggatggcctttatggccgccgttacttccgtagtgtattatcacaatattgaaacatctaattttcctaagctgctgatcgccttgcttgtgtattggaccttggcatttattaccaagaccataaagttcgttaagtttctggaccacgccatcgggttctctcaactgaggttttgtctgactggactgctcgtgatcctgtacggcatgcttctcctggtggaggtgaacgttattcgggtgcgccgttatatcttcttcaagacccctagagaggtgaagccgcccgaggatttacaggacttgggtgtacggtttctccagcccttcgttaatctcttgagcaaaggcacttactggtggatgaacgctttcatcaaaacggcccacaagaaaccgatcgatctccgggctataggaaaactgccaattgccatgagagccttgactaactatcagcgcttatgcgaggcattcgacgcccaggtgcgaaaggacatccaaggcacacagggcgccagagccatttggcaggccctctcccatgcttttggacgaaggctggtgctctcttccaccttcagaatactggcagacctgctgggcttcgcgggacccttgtgcatcttcgggattgtcgaccacctgggtaaagaaaatgacgttttccagccaaagactcagttcctgggggtttatttcgtgtcttcccaggagttcctggcaaatgcttatgttcttgcagtacttctgttcttggccttgcttctccaacgcacatttctccaagcaagctattacgtggcaatcgaaacggggatcaatctgcgtggggccattcagacaaagatctacaataagatcatgcatctgtcaacgagcaacctgagcatgggcgagatgacagcaggacagatttgcaacctggtcgccatcgacaccaaccaacttatgtggtttttcttcttgtgccctaacctctgggcgatgcccgtccagattatcgttggtgtgatcctgctttactatattctcggcgttagtgctctgattggggccgccgtgataatactgctcgcccccgtccagtattttgtcgcaacgaaactctcccaggcacaacgcagcactctggagtactccaacgagcgattaaagcagacgaacgagatgctgcgcgggatcaaattgctcaagctgtacgcatgggagaacatttttaggactcgggtggaaaccacacggcgaaaagaaatgacatcacttagagcattcgccatttatacaagtatttcgatctttatgaatactgccatcccgatagcagcggtgctcattacctttgttgggcatgtaagtttttttaaggaagcggacttttccccatccgtggccttcgcaagtctgtcgctgtttcacatcctggtcacacctcttttcctcctctccagtgtcgtccggagcacagtcaaggcactcgtgtctgtacagaagttgagcgagtttctctccagcgctgagattagggaggagcagtgtgcacctcatgagccaacgccacagggcccggccagtaagtaccaggccgtcccactcagagtagtgaatcggaagcgccctgccagagaggactgcagggggctgaccgggccgctgcaaagccttgttccatcggcagatggcgatgccgataattgttgtgtgcagataatgggcgggtatttcacatggaccccagatggcatccccacactttcaaatatcaccattcgcatcccccggggtcagctgaccatgatcgtgggccaggtgggatgcggcaagtcttctcttctgctcgctgctttaggggaaatgcagaaggtatctggagctgttttttggtcatcatccctcccggatagcgagattggcgaagaccctagccctgagcgggagaccgcgactgacctggacattcgtaagagaggtccggtagcttatgcgtcccaaaaaccgtggctcctcaacgccaccgtcgaggagaatattatattcgagtctcccttcaacaagcagcgatataaaatggtgattgaggcctgttccctccagccggacatcgacattctgcctcacggagatcagacccaaattggcgagagggggatcaacttaagcggtggccaaaggcagcggatctccgttgctagagctctctatcaacatgccaatgtcgtttttctggacgatcccttctcggctctggacattcacctcagtgaccacttgatgcaagctgggattctggagctccttcgagatgataaaaggaccgttgtgctggtgactcataaacttcagtacttgccgcatgccgattggataatagctatgaaggatggaacaatccaacgggagggcacgctcaaagacttccagcggtctgagtgtcaactgtttgagcactggaagacgctcatgaatcgacaggaccaagagttagagaaagagaccgtgaccgaaagaaaagccaccgaacccccacagggcctgtctcgcgctatgtcctctcgcgacggcctgcttcaagatgaagaggaagaagaggaagaggcagcagaaagcgaggaggacgacaatctttcatctatgctgcaccaaagggcagagatcccgtggagagcttgtgccaagtatctgtctagtgcaggaatcttacttctgagcttactggttttcagccagttgctcaaacacatggtgctggtggccatcgactattggctggctaagtggacagacagcgccctgacattaactcccgctgcaaggaattgctcgctgagccaggaatgtactctagaccagaccgtatacgccatggtgtttacagttctgtgcagcctgggcatcgtgctgtgtttagtgactagcgtgaccgtagagtggacaggactgaaagtggcaaaaagactccaccgttcattgctgaaccgaatcattctggcccctatgaggttcttcgaaacgactcctctaggttccatccttaatcgtttttcttcagattgtaataccattgatcagcacatcccatcaacattagaatgcctcagtcgatcaacgctgctctgcgtaagtgccctcgctgttatctcatacgtgacccccgtgttcctcgtagctctgctgccactagcgattgtgtgttattttatccaaaagtactttcgggttgcaagtagggacctccagcaactggatgataccactcaactcccactgttgtctcactttgcggaaacggtcgagggactgacaacgatccgggcctttcgttacgaagccagattccagcagaaactgctggaatacactgattcaaacaatatcgcctcactgtttctcacagcggcgaacagatggctggaggtccggatggagtacattggcgcctgcgtcgtgctaattgctgcagtgacttctattagcaatagcttgcaccgagagctgtccgccggacttgtgggtcttggtctgacttatgccttaatggtcagcaattacttgaattggatggtccgcaatttggccgatatggagctccagctgggcgccgtcaagaggatccatggcctactcaaaactgaagccgaatcctacgagggcctcctggccccgagcttgattccgaaaaactggcctgaccaggggaagatccaaattcagaatctgtctgtgagatatgattccagcctgaaacctgtgttgaaacatgtgaacgcccttatcgctccgggccaaaaaattggcatttgtggaagaaccggatcaggtaagtcaagcttttcattagctttttttcgcatggttgacactttcgagggtcacattataatcgatggaattgacatcgcgaaactccccctacatacactgcggagtcggctgtctataatcttgcaggaccctgtattattcagcggaacaatacgctttaacctcgatcctgaacgcaaatgctctgacagtaccctgtgggaggctctagagattgctcagctcaagttagtcgtgaaagccctgcctggagggctggacgctatcatcacagaagggggtgagaatttttcccagggccagcgccaactattttgtttggcgagagctttcgttcgcaaaactagcatttttataatggatgaggcgactgcaagcattgatatggccaccgaaaatatactgcagaaggttgtaatgacagccttcgcagacagaaccgtggtgaccatcgcacacagggtacatactatcctgtctgcggacctggttattgtcctaaagaggggcgctattctcgaattcgacaagccagaaaagctcctaagccgtaaggacagtgtattcgctagcttcgtgagagcagataagtag

SEQ ID NO: 106027 - DNA, 4749 bp, Artificial Sequence
  derived and/or modified sequence
atgcccctggcgttttgtggttccgagaaccattcggccgcataccgcgtagatcaaggcgtattgaacaatggctgcttcgtggacgcactcaatgtagttcctcacgtgttcctgctcttcattactttcccgatcctgtttattgggtggggcagccagtccagcaaggtgcatatccaccacagcacctggcttcacttccctgggcacaacctgcgctggatcctgactttcatgcttctgtttgtgctggtctgtgagattgccgaggggattttgtcagatggcgtaaccgaatcccatcacctgcatctttacatgcctgctgggatggcattcatggcagccgtcacctctgtggtctattaccacaatattgagacctctaactttccaaagcttctaattgcacttctggtgtattggacacttgcctttattactaagaccattaagtttgtgaagttcctggaccacgctattggatttagtcagttaagattctgtcttactggattgctcgtcatcttatatggcatgctcctcttagttgaggtgaacgtcatacgggtacgcagatacatatttttcaagacccctcgcgaagtgaaaccacctgaagacttacaggacttgggggtgagatttctccagccatttgtcaacctgctgtctaagggcacttactggtggatgaatgccttcattaaaaccgcccacaaaaaacccatcgaccttcgcgcaatcggtaagcttcctattgctatgcgcgcattgactaattaccagagattgtgcgaagccttcgatgctcaggtgaggaaggatattcaaggcacacaaggagctcgtgcgatctggcaggcgctgtcacacgcttttggccgtcgccttgtgctgtcctccactttcaggatcctcgccgatctactaggatttgccggaccactgtgtatcttcggcatcgtggaccacctggggaaagaaaatgacgttttccaacccaagactcagttcctgggagtgtatttcgtgtcatctcaagaatttcttgcaaatgcctatgtcctggctgtgctgctgtttctggctctgttgctgcagagaacattcctacaagcctcttattacgtggcaatcgagacggggatcaacctgcggggagctatccagacgaagatatacaacaagatcatgcacttgtcgacctccaaccttagtatgggagagatgactgcaggtcaaatttgcaacctggttgcaattgacacaaaccagctgatgtggtttttctttctctgccccaacttgtgggcaatgccagtgcaaatcatagtaggtgtaatcctgctctattatatcctgggagtctctgccctgatcggagcagctgtgatcatccttctcgctccagtacagtattttgttgctaccaagctctctcaggcccagagaagtacactcgaatactccaacgagagactgaagcagaccaatgaaatgctccggggaattaagttgctcaagctctacgcatgggaaaatatttttcggactagagtcgagaccactagacggaaggagatgactagcctgcgtgcttttgcaatctacacctccattagtatcttcatgaataccgctattcccattgcagcggtgctgatcacctttgtagggcacgtcagtttttttaaagaggccgacttttctccatcagtggcattcgcaagcctgtctctcttccatatcctagtgacacctctgttcctcctgagtagcgtcgtgcggagcacagtgaaagccctggtgagcgtccagaagctatctgagtttctttcttctgccgaaattagggaagaacaatgtgccccacacgagcccacacctcagggtcccgcatctaagtaccaggctgtgcctctccgcgtcgtcaataggaagcgtcccgctcgggaggactgccgaggcctcactggcccactccaatcattggtaccctccgcagatggagacgccgacaactgctgcgtgcaaataatggggggatatttcacgtggacacctgacggcattcctacactgagcaacatcacaataaggatcccacgcggacagctgaccatgatcgttgggcaagtcggctgtgggaagagcagtctccttctcgccgcacttggcgaaatgcagaaagtcagcggtgctgtgttctggagcagcagcctgcctgattcagagataggtgaagatccgtcacctgaacgggaaactgccaccgatctggacatcaggaaacgcggaccagttgcctacgcctcacagaagccttggctgctcaacgcgaccgttgaggaaaacattatatttgagagccccttcaataagcagcggtataaaatggtgatcgaggcctgcagcctacagccagacatcgatatcctcccgcacggcgaccagacccagatcggcgagcgaggaatcaacctttccgggggtcagaggcagaggatcagtgtggcaagagccctgtaccagcatgctaatgtggtattccttgacgacccttttagcgcccttgatattcatctgagcgatcacctcatgcaggctggcatattggagttactcagagacgataaaaggacagtggtgctggtcacccacaagctgcagtatctgccacatgcagattggatcatcgctatgaaagatggcaccatccaaagggaaggaacactaaaggatttccagcgtagtgaatgccaattatttgagcattggaagactctgatgaatcgacaggatcaagagctcgagaaggaaacggtgacggagagaaaggcgactgagcctccacagggtctttcccgcgctatgtctagccgcgatggactcctgcaggacgaggaggaagaggaggaggaggccgctgagtccgaggaagatgataacctctcttccatgctgcaccagagggccgagattccttggagagcctgtgctaaatacctgtcgtccgctggaatcttgctcctgagccttctagtcttcagccagctgctgaaacatatggttcttgtcgctatagattactggctggcgaaatggacagattctgccctgacacttacacccgctgccaggaattgcagcctgagccaggagtgcactctggaccagaccgtttacgccatggtgttcacggtgctgtgtagcctaggcattgttctctgcctcgtgaccagtgtcacggttgagtggaccggcctgaaggtggccaagagattacaccgctccctgctcaatcggataatattggctccgatgcggtttttcgaaacaacccctttagggagcattctgaaccgcttcagttcagattgtaatactatcgatcagcacattccttctacactggagtgtttgtcccgcagtaccttactatgtgtctctgcactggctgtgatctcgtatgtgaccccagtgtttctggtcgcccttctgccgcttgcaattgtttgctactttatccagaagtattttcgggttgcttctcgagaccttcagcagttagacgacaccacacaattgcccctgctttcccattttgccgaaaccgtggaagggctcactaccattagagcctttcgctatgaggcccgtttccagcagaagttgctcgagtataccgacagcaataatattgcaagccttttcctgaccgccgctaataggtggcttgaggtaaggatggagtacattggcgcttgcgtggttctgatcgccgcagttacgtccatatcgaattctctccatcgggaattgtctgcaggattggtgggacttggccttacttatgcactcatggtgagtaattacctgaactggatggtgagaaacctggcagacatggagctgcagttaggcgctgttaagcgcattcacggcctgctcaagactgaggccgaatcgtatgagggcctcctcgccccttcgctcatcccgaagaattggcccgaccagggaaaaatccagattcagaacctgagcgttcggtatgattcttcactgaagcccgttcttaaacatgtcaacgctctgattgcccctggccaaaaaatagggatctgtgggcgaaccggtagcgggaaatcttccttcagtttggcatttttccggatggtcgacacttttgaggggcacatcattattgacggcattgatattgccaagttgccactacacaccctccgctctcggcttagtattatattgcaggatccggtgcttttctccggaacaatccggtttaacctggacccggaaagaaaatgctccgatagcaccttatgggaggccctcgaaatcgctcagctcaagctcgtcgtaaaagccctgcccggagggctcgacgcaatcattaccgagggcggagagaacttctctcagggccaacgtcagctattttgcctggccagagccttcgtgagaaaaacatcaatcttcatcatggatgaggctactgccagtatcgacatggcgactgagaacatcctccagaaagtggtgatgaccgcattcgctgatcgaaccgtggtcacaattgcacatagagtgcacaccatattgtctgccgacctggtgatcgttttgaagcgcggagctattctcgagttcgacaaacctgaaaagctgttatcaagaaaggacagcgtgttcgcaagctttgtgcgggcagataagtag

SEQ ID NO: 106028 - DNA, 4981 bp, Artificial Sequence
  derived and/or modified sequence
cggggcccggggggcgggggcctgacggccgggccgggcggcggagctgcaagggacagaggcgcggcaggcgcgcggagccagcggagccagctgagcccgagcccagcccgcgcccgcgccgccatgcccctggccttctgcggcagcgagaaccactcggccgcctaccgggtggaccagggggtcctcaacaacggctgctttgtggacgcgctcaacgtggtgccgcacgtcttcctactcttcatcaccttccccatcctcttcattggatggggaagtcagagctccaaggtgcacatccaccacagcacatggcttcatttccctgggcacaacctgcggtggatcctgaccttcatgctgctcttcgtcctggtgtgtgagattgcagagggcatcctgtctgatggggtgaccgaatcccaccatctgcacctgtacatgccagccgggatggcgttcatggctgctgtcacctccgtggtctactatcacaacatcgagacttccaacttccccaagctgctaattgccctgctggtgtattggaccctggccttcatcaccaagaccatcaagtttgtcaagttcttggaccacgccatcggcttctcgcagctacgcttctgcctcacagggctgctggtgatcctctatgggatgctgctcctcgtggaggtcaatgtcatcagggtgaggagatacatcttcttcaagacaccgagggaggtgaagcctcccgaggacctgcaagacctgggggtacgcttcctgcagcccttcgtgaatctgctgtccaaaggcacctactggtggatgaacgccttcatcaagactgcccacaagaagcccatcgacttgcgagccatcgggaagctgcccatcgccatgagggccctcaccaactaccaacggctctgcgaggcctttgacgcccaggtgcggaaggacattcagggcactcaaggtgcccgggccatctggcaggcactcagccatgccttcgggaggcgcctggtcctcagcagcactttccgcatcttggccgacctgctgggcttcgccgggccactgtgcatctttgggatcgtggaccaccttgggaaggagaacgacgtcttccagcccaagacacaatttctcggggtttactttgtctcatcccaagagttccttgccaatgcctacgtcttagctgtgcttctgttccttgccctcctactgcaaaggacatttctgcaagcatcctactatgtggccattgaaactggaattaacttgagaggagcaatacagaccaagatttacaataaaattatgcacctgtccacctccaacctgtccatgggagaaatgactgctggacagatctgtaatctggttgccatcgacaccaatcagctcatgtggtttttcttcttgtgcccaaacctctgggctatgccagtacagatcattgtgggtgtgattctcctctactacatactcggagtcagtgccttaattggagcagctgtcatcattctactggctcctgtccagtacttcgtggccaccaagctgtctcaggcccagcggagcacactggagtattccaatgagcggctgaagcagaccaacgagatgctccgcggcatcaagctgctgaagctgtacgcctgggagaacatcttccgcacgcgggtggagacgacccgcaggaaggagatgaccagcctcagggcctttgccatctatacctccatctccattttcatgaacacggccatccccattgcagctgtcctcataactttcgtgggccacgtcagcttcttcaaagaggccgacttctcgccctccgtggcctttgcctccctctccctcttccatatcttggtcacaccgctgttcctgctgtccagtgtggtccgatctaccgtcaaagctctagtgagcgtgcaaaagctaagcgagttcctgtccagtgcagagatccgtgaggagcagtgtgccccccatgagcccacacctcagggcccagccagcaagtaccaggcggtgcccctcagggttgtgaaccgcaagcgtccagcccgggaggattgtcggggcctcaccggcccactgcagagcctggtccccagtgcagatggcgatgctgacaactgctgtgtccagatcatgggaggctacttcacgtggaccccagatggaatccccacactgtccaacatcaccattcgtatcccccgaggccagctgactatgatcgtggggcaggtgggctgcggcaagtcctcgctccttctagccgcactgggggagatgcagaaggtctcaggggctgtcttctggagcagcagccttcctgacagcgagataggagaggaccccagcccagagcgggagacagcgaccgacttggatatcaggaagagaggccccgtggcctatgcttcgcagaaaccatggctgctaaatgccactgtggaggagaacatcatctttgagagtcccttcaacaaacaacggtacaagatggtcattgaagcctgctctctgcagccagacatcgacatcctgccccatggagaccagacccagattggggaacggggcatcaacctgtctggtggtcaacgccagcgaatcagtgtggcccgagccctctaccagcacgccaacgttgtcttcttggatgaccccttctcagctctggatatccatctgagtgaccacttaatgcaggccggcatccttgagctgctccgggacgacaagaggacagtggtcttagtgacccacaagctacagtacctgccccatgcagactggatcattgccatgaaggatggcaccatccagagggagggtaccctcaaggacttccagaggtctgaatgccagctctttgagcactggaagaccctcatgaaccgacaggaccaagagctggagaaggagactgtcacagagagaaaagccacagagccaccccagggcctatctcgtgccatgtcctcgagggatggccttctgcaggatgaggaagaggaggaagaggaggcagctgagagcgaggaggatgacaacctgtcgtccatgctgcaccagcgtgctgagatcccatggcgagcctgcgccaagtacctgtcctccgccggcatcctgctcctgtcgttgctggtcttctcacagctgctcaagcacatggtcctggtggccatcgactactggctggccaagtggaccgacagcgccctgaccctgacccctgcagccaggaactgctccctcagccaggagtgcaccctcgaccagactgtctatgccatggtgttcacggtgctctgcagcctgggcattgtgctgtgcctcgtcacgtctgtcactgtggagtggacagggctgaaggtggccaagagactgcaccgcagcctgctaaaccggatcatcctagcccccatgaggttttttgagaccacgccccttgggagcatcctgaacagattttcatctgactgtaacaccatcgaccagcacatcccatccacgctggagtgcctgagccgctccaccctgctctgtgtctcagccctggccgtcatctcctatgtcacacctgtgttcctcgtggccctcttgcccctggccatcgtgtgctacttcatccagaagtacttccgggtggcgtccagggacctgcagcagctggatgacaccacccagcttccacttctctcacactttgccgaaaccgtagaaggactcaccaccatccgggccttcaggtatgaggcccggttccagcagaagcttctcgaatacacagactccaacaacattgcttccctcttcctcacagctgccaacagatggctggaagtccgaatggagtacatcggtgcatgtgtggtgctcatcgcagcggtgacctccatctccaactccctgcacagggagctctctgctggcctggtgggcctgggccttacctacgccctaatggtctccaactacctcaactggatggtgaggaacctggcagacatggagctccagctgggggctgtgaagcgcatccatgggctcctgaaaaccgaggcagagagctacgaggggctcctggcaccatcgctgatcccaaagaactggccagaccaagggaagatccagatccagaacctgagcgtgcgctacgacagctccctgaagccggtgctgaagcacgtcaatgccctcatcgcccctggacagaagatcgggatctgcggccgcaccggcagtgggaagtcctccttctctcttgccttcttccgcatggtggacacgttcgaagggcacatcatcattgatggcattgacatcgccaaactgccgctgcacaccctgcgctcacgcctctccatcatcctgcaggaccccgtcctcttcagcggcaccatccgatttaacctggaccctgagaggaagtgctcagatagcacactgtgggaggccctggaaatcgcccagctgaagctggtggtgaaggcactgccaggaggcctcgatgccatcatcacagaaggcggggagaatttcagccagggacagaggcagctgttctgcctggcccgggccttcgtgaggaagaccagcatcttcatcatggacgaggccacggcttccattgacatggccacggaaaacatcctccaaaaggtggtgatgacagccttcgcagaccgcactgtggtcaccatcgcgcatcgagtgcacaccatcctgagtgcagacctggtgatcgtcctgaagcggggtgccatccttgagttcgataagccagagaagctgctcagccggaaggacagcgtcttcgcctccttcgtccgtgcagacaagtgacctgccagagcccaagtgccatcccacattcggaccctgcccatacccctgcctgggttttctaactgtaaatcacttgtaaataaatagatttgattatttccta

SEQ ID NO: 106029 - DNA, 927 bp, Artificial Sequence
  derived and/or modified sequence
atgatgactttcgactcagaagtggagctgatgaaagtggctagggcccatccgaaggccaagttagtcctgcgcattgccaccgatgactcgaaggcagtgtgccggctctccgtgaaatttggggcaactctgaggacttcaagattactgctggaaagagcaaaggagttaaacatcgatgtggtgggagtgtcttttcatgtagggtccggttgcactgatcctgagacttttgtgcaggctatttccgacgcaaggtgcgttttcgacatgggcgcagaggtcgggttctccatgtacttgttagacattgggggcgggtttcctggctccgaggacgtgaagctaaagttcgaggagattacaggagtgattaaccccgcactggacaagtatttcccctccgattcgggtgtacggatcatagccgagcccgggaggtattacgtcgcctccgcctttactctggctgtgaatatcatcgcaaagaagatcgttctcaaggagcagacaggctcggatgacgaggacgagagtagcgagcagactttcatgtattatgtcaatgatggcgtgtacggatccttcaattgcatactgtacgaccacgcccatgtaaagccactgctccagaagcgaccaaaacccgatgagaagtattacagcagtagtatatggggccctacctgtgacggtctggacaggatagttgaaaggtgtgacctgccggagatgcatgtcggggattggatgttgtttgagaatatgggcgcatacacagtggctgccgcgtctactttcaatggctttcaacggcccacgatatattacgtaatgagtggccctgcatggcagcttatgcagcagtttcagaatcccgatttccctccctgtctgtgtttagtgcctggccgggtcggctag

SEQ ID NO: 106030 - DNA, 927 bp, Artificial Sequence
  derived and/or modified sequence
atgatgacctttgacagcgaggtggagctgatgaaggtggcccgggcccaccccaaggccaagctggtgctgcgcatcgccacagatgacagcaaggctgtgtgccgcctgtctgtgaagtttggagccaccctgcggaccagccggctgctgctggagcgggccaaggagctgaacattgatgtggtgggcgtgtccttccacgtgggcagcggctgcacagatcctgagacctttgtgcaggccatcagtgatgcccgctgtgtgtttgacatgggcgctgaggtgggcttctccatgtacctgctggacattggaggcggcttccctggctctgaagatgtgaagctgaagtttgaggagatcactggagtcatcaacccagccctggacaagtacttccccagcgacagcggcgtgcgcatcatcgccgagcccggccgctactacgtggccagcgccttcaccctggccgtgaacatcatcgccaagaagatcgtgctgaaggagcagacaggcagtgatgatgaagatgagagcagcgagcagaccttcatgtactacgtgaatgatggagtgtatggcagcttcaactgcatcctgtatgaccacgcccacgtgaagcccctgctgcagaagaggcccaagccagatgagaagtactacagcagcagcatctggggccccacctgtgatggcctggacagaattgtggagcgctgtgacctgcctgagatgcacgtgggggactggatgctgtttgagaacatgggcgcctacacagtggccgccgccagcaccttcaacggcttccagaggcccaccatctactacgtgatgagcggccctgcctggcagctgatgcagcagttccagaacccagacttccccccctgcctgtgcctggtgcccggccgggtgggctag

SEQ ID NO: 106031 - DNA, 927 bp, Artificial Sequence
  derived and/or modified sequence
atgatgaccttcgacagcgaggtggagctgatgaaggtggcccgggcgcaccctaaagccaagttagtgctgagaattgcaacagacgattccaaggccgtttgcagactgtcggtgaaatttggagctactcttcggacttccaggctccttcttgagagagctaaggaattgaacattgacgttgtgggagtgagtttccacgtgggctctggttgcacagatcctgagacttttgtacaggctatttcagatgccaggtgcgtttttgatatgggagccgaggttggcttctctatgtacctgttggatattgggggcggatttcccgggtccgaggatgtgaagctgaagtttgaggaaatcacgggagtaattaatcctgcccttgacaagtacttcccttccgactcaggcgttcggattatcgccgagccgggacgctactacgtggcttccgcattcacacttgctgtaaacatcattgctaaaaaaattgtcctaaaagagcagaccggtagtgacgatgaggatgagtccagcgagcagacattcatgtactatgttaacgacggagtatacggatccttcaattgcatcctttacgaccacgctcatgtcaaaccgcttttgcagaaaagacctaagcccgatgagaagtattattcttcaagcatttggggccccacctgtgacgggttagacaggatcgtggagcgatgcgatctgcccgagatgcatgttggcgactggatgttattcgagaatatgggcgcttatacagtggcggcagcaagtacatttaacggatttcagaggcccactatatattatgtgatgtctggccctgcctggcagctgatgcagcagttccaaaaccccgactttcctccctgtttgtgccttgtgccgggtcgcgtggggtag

SEQ ID NO: 106032 - DNA, 927 bp, Artificial Sequence
  derived and/or modified sequence
atgatgacttttgattctgaagtggagctgatgaaagtcgccagagctcaccctaaggccaagctcgtcctcagaattgccacggatgactccaaggctgtgtgtagattgagcgtcaagtttggtgccacactgcggacatccaggctgcttctcgagagagccaaagagttaaacattgacgtagtgggcgttagcttccacgtcggctctggttgtaccgacccagagacattcgtgcaggccatttccgacgcacgctgtgtgttcgacatgggtgccgaggttggctttagtatgtatctactcgatataggtggtgggttccccggtagtgaggacgtcaaactgaaattcgaggaaatcacaggagtgataaacccagccctggacaaatactttccttcagatagtggcgtgagaataattgctgaaccagggagatactacgtggcctccgccttcacgcttgcagttaacataatcgccaaaaagatcgttctgaaggagcaaaccggcagcgacgacgaggatgagtcaagcgagcagacctttatgtactatgttaacgacggtgtgtacggatcattcaattgcatcttgtacgaccatgcacacgtgaaacccttactgcagaaaaggccaaaacctgacgagaagtactattccagctccatatggggaccaacatgcgacgggctggatcgcatagtggaacgttgtgaccttcctgagatgcacgtaggcgactggatgctgtttgagaacatgggcgcttatactgtggcagccgcatctacctttaatggttttcaacggccaacaatctattacgtcatgagcgggccagcctggcagttaatgcagcagttccagaacccagattttccaccctgcttgtgtctcgtccctggcagagtcggctag

SEQ ID NO: 106033 - DNA, 927 bp, Artificial Sequence
  derived and/or modified sequence
atgatgaccttcgacagcgaggtggagctgatgaaggtggccagagcccaccccaaggccaagctggtgctgagaatcgccaccgacgacagcaaggccgtgtgcagactgagcgtgaagttcggcgccaccctgagaaccagcagactgctgctggagagagccaaggagctgaacatcgacgtggtgggcgtgagcttccacgtgggcagcggctgcaccgaccccgagaccttcgtgcaggccatcagcgacgccagatgcgtgttcgacatgggcgccgaggtgggcttcagcatgtacctgctggacatcggcggcggcttccccggcagcgaggacgtgaagctgaagttcgaggagatcaccggcgtgatcaaccccgccctggacaagtacttccccagcgacagcggcgtgagaatcatcgccgagcccggcagatactacgtggccagcgccttcaccctggccgtgaacatcatcgccaagaagatcgtgctgaaggagcagaccggcagcgacgacgaggacgagagcagcgagcagaccttcatgtactacgtgaacgacggcgtgtacggcagcttcaactgcatcctgtacgaccacgcccacgtgaagcccctgctgcagaagagacccaagcccgacgagaagtactacagcagcagcatctggggccccacctgcgacggcctggacagaatcgtggagagatgcgacctgcccgagatgcacgtgggcgactggatgctgttcgagaacatgggcgcctacaccgtggccgccgccagcaccttcaacggcttccagagacccaccatctactacgtgatgagcggccccgcctggcagctgatgcagcagttccagaaccccgacttccccccctgcctgtgcctggtgcccggcagagtgggctag

SEQ ID NO: 106034 - protein, 461 aa, Artificial Sequence
  derived and/or modified sequence
MNNFGNEEFDCHFLDEGFTAKDILDQKINEVSSSDDKDAFYVADLGDILKKHLRWLKALPRVTPFYAVKCNDSKAIVKTLAATGTGFDCASKTEIQLVQSLGVPPERIIYANPCKQVSQIKYAANNGVQMMTFDSEVELMKVARAHPKAKLVLRIATDDSKAVCRLSVKFGATLRTSRLLLERAKELNIDVVGVSFHVGSGCTDPETFVQAISDARCVFDMGAEVGFSMYLLDIGGGFPGSEDVKLKFEEITGVINPALDKYFPSDSGVRIIAEPGRYYVASAFTLAVNIIAKKIVLKEQTGSDDEDESSEQTFMYYVNDGVYGSFNCILYDHAHVKPLLQKRPKPDEKYYSSSIWGPTCDGLDRIVERCDLPEMHVGDWMLFENMGAYTVAAASTFNGFQRPTIYYVMSGPAWQLMQQFQNPDFPPEVEEQDASTLPVSCAWESGMKRHRAACASASINV

SEQ ID NO: 106035 - protein, 68 aa, Artificial Sequence
  derived and/or modified sequence
MNNFGNEEFDCHFLDEGFTAKDILDQKINEVSSSDDKDAFYVADLGDILKKHLRWLKALPRVTPFYAV

SEQ ID NO: 106036 - protein, 308 aa, Artificial Sequence
  derived and/or modified sequence
MMTFDSEVELMKVARAHPKAKLVLRIATDDSKAVCRLSVKFGATLRTSRLLLERAKELNIDVVGVSFHVGSGCTDPETFVQAISDARCVFDMGAEVGFSMYLLDIGGGFPGSEDVKLKFEEITGVINPALDKYFPSDSGVRIIAEPGRYYVASAFTLAVNIIAKKIVLKEQTGSDDEDESSEQTFMYYVNDGVYGSFNCILYDHAHVKPLLQKRPKPDEKYYSSSIWGPTCDGLDRIVERCDLPEMHVGDWMLFENMGAYTVAAASTFNGFQRPTIYYVMSGPAWQLMQQFQNPDFPPCLCLVPGRVG

SEQ ID NO: 106037 - DNA, 1386 bp, Artificial Sequence
  derived and/or modified sequence
atgaacaacttcggcaacgaggagttcgactgccacttcctggacgagggcttcaccgccaaggacatcctggaccagaagatcaacgaggtgagcagcagcgacgacaaggacgccttctacgtggccgacctgggcgacatcctgaagaagcacctgagatggctgaaggccctgcccagagtgacccccttctacgccgtgaagtgcaacgacagcaaggccatcgtgaagaccctggccgccaccggcaccggcttcgactgcgccagcaagaccgagatccagctggtgcagagcctgggcgtgccccccgagagaatcatctacgccaacccctgcaagcaggtgagccagatcaagtacgccgccaacaacggcgtgcagatgatgaccttcgacagcgaggtggagctgatgaaggtggccagagcccaccccaaggccaagctggtgctgagaatcgccaccgacgacagcaaggccgtgtgcagactgagcgtgaagttcggcgccaccctgagaaccagcagactgctgctggagagagccaaggagctgaacatcgacgtggtgggcgtgagcttccacgtgggcagcggctgcaccgaccccgagaccttcgtgcaggccatcagcgacgccagatgcgtgttcgacatgggcgccgaggtgggcttcagcatgtacctgctggacatcggcggcggcttccccggcagcgaggacgtgaagctgaagttcgaggagatcaccggcgtgatcaaccccgccctggacaagtacttccccagcgacagcggcgtgagaatcatcgccgagcccggcagatactacgtggccagcgccttcaccctggccgtgaacatcatcgccaagaagatcgtgctgaaggagcagaccggcagcgacgacgaggacgagagcagcgagcagaccttcatgtactacgtgaacgacggcgtgtacggcagcttcaactgcatcctgtacgaccacgcccacgtgaagcccctgctgcagaagagacccaagcccgacgagaagtactacagcagcagcatctggggccccacctgcgacggcctggacagaatcgtggagagatgcgacctgcccgagatgcacgtgggcgactggatgctgttcgagaacatgggcgcctacaccgtggccgccgccagcaccttcaacggcttccagagacccaccatctactacgtgatgagcggccccgcctggcagctgatgcagcagttccagaaccccgacttcccccccgaggtggaggagcaggacgccagcaccctgcccgtgagctgcgcctgggagagcggcatgaagagacacagagccgcctgcgccagcgccagcatcaacgtgtag

SEQ ID NO: 106038 - DNA, 1386 bp, Artificial Sequence
  derived and/or modified sequence
atgaataattttggtaatgaggaatttgattgccacttcctagatgaggggttcaccgccaaggatatcctcgaccagaagataaatgaagtcagcagtagcgatgataaggacgcattttatgtcgccgacctaggagacattctgaagaagcacttgaggtggctgaaagctcttcccagagtgacccctttttatgcagtgaaatgtaacgactctaaggctatcgttaaaaccctcgcagcaaccggcactggattcgactgtgcgtctaaaaccgaaatccagctggtacaatcccttggagttcccccagaaaggattatctacgcgaacccttgtaaacaagtttctcagatcaaatatgccgccaataacggcgtgcaaatgatgactttcgattcagaggtggaactcatgaaggttgcccgggcacacccaaaggctaaactcgtccttcgcatcgcaacagacgatagcaaggctgtttgcagactgagcgtcaagtttggcgctactctccggacttctcgccttctgctggagcgcgctaaggagctcaacattgacgtggtcggagtgtccttccatgttgggtctggatgtacggacccagaaactttcgtccaggctatttccgacgcccgatgcgtgtttgacatgggggctgaagtaggctttagtatgtatttacttgacattggtggtggttttcctggcagtgaggacgtgaaactgaaatttgaggagattacgggggtgatcaaccccgccttggataagtacttcccatcggactcaggcgtgcgcatcattgctgagccaggtcggtactacgtggcatccgccttcacccttgcagtgaatataatcgcgaaaaaaatcgtactgaaagaacagacaggatcagacgatgaggacgagtctagcgaacagacctttatgtattacgtcaatgacggagtatacggcagctttaattgtatcctctatgatcatgctcatgttaagcccctattacagaagagaccaaaaccagacgagaagtactactccagctcaatctggggcccaacttgcgatggcctcgatcgtattgtagagcgttgcgaccttcctgaaatgcacgtcggtgactggatgctgttcgaaaacatgggggcctacaccgtggccgccgcaagcaccttcaacggatttcaacgtcccaccatttactacgtcatgtcaggtcctgcttggcagctgatgcaacaattccagaaccctgacttcccacctgaggtagaggagcaggacgcgtcaacactccccgtcagctgcgcctgggagtccggtatgaaaaggcatcgggctgcttgtgcctctgctagcataaacgtctag

SEQ ID NO: 106039 - DNA, 1386 bp, Artificial Sequence
  derived and/or modified sequence
atgaacaactttggaaatgaggagtttgactgccacttcctggatgagggcttcaccgccaaggacatcctggaccagaagatcaatgaggtgagcagcagtgatgacaaggatgccttctacgtggccgacctgggggacatcctgaagaagcacctgcgctggctgaaggccctgccccgggtgacccccttctatgctgtgaagtgcaatgacagcaaggccatcgtgaagaccctggccgccactggaactggatttgactgtgccagcaagacagagatccagctggtgcagagcctgggcgtgcccccagagcgcatcatctatgccaacccctgcaagcaggtgtcccagatcaagtatgctgccaacaacggggtgcagatgatgacctttgattctgaggtggagctgatgaaggtggcccgggcccaccccaaggccaagctggtgctgagaattgccacagatgacagcaaggctgtgtgccgcctgtctgtgaagtttggagccaccctgcggaccagccggctgctgctggagcgggccaaggagctgaacattgatgtggtgggcgtgtccttccacgtgggcagcggctgcacagatcctgagacctttgtgcaggccatcagtgatgcccgctgtgtgtttgacatgggcgctgaggtgggcttctccatgtacctgctggacatcggcggcggcttccctggctctgaagatgtgaagctgaagtttgaggagatcaccggggtcatcaacccagccctggacaagtacttccccagcgacagcggcgtgcgcatcatcgccgagcccggccgctactacgtggccagcgccttcaccctggccgtgaacatcatcgccaagaagatcgtgctgaaggagcagacaggcagtgatgatgaagatgagagcagcgagcagaccttcatgtactacgtgaatgatggagtgtatggcagcttcaactgcatcctgtatgaccacgcccacgtgaagcccctgctgcagaagaggcccaagccagatgagaagtactacagcagcagcatctggggccccacctgtgatggcctggaccgcatcgtggagcgctgtgacctgcctgagatgcacgtgggggactggatgctgtttgagaacatgggcgcctacacagtggccgccgccagcaccttcaacggcttccagaggcccaccatctactacgtgatgagcggccctgcctggcagctgatgcagcagttccagaacccagacttccccccagaggtggaggagcaggatgccagcaccctgcctgtgtcctgtgcctgggagagcggcatgaagaggcaccgggccgcctgtgccagcgccagcatcaacgtgtag

SEQ ID NO: 106040 - DNA, 1386 bp, Artificial Sequence
  derived and/or modified sequence
atgaacaacttcggcaacgaggagttcgactgccacttcctggacgaaggcttcacggcaaaagacatcctcgaccagaaaattaatgaggtgtcatccagcgacgacaaggacgctttctacgttgccgatctgggcgacattctgaagaagcatcttcggtggctgaaggctctaccacgggtcaccccattctatgcagtgaagtgtaacgattctaaggccattgtgaaaaccctggcagctaccggtacaggcttcgactgcgcgtctaaaacagagattcagctcgtacagtctctcggagtgcctccagagagaattatctatgccaatccatgcaaacaggtgtcacaaatcaagtacgccgcaaacaatggagtgcaaatgatgaccttcgactccgaggtggaactcatgaaggtggcacgcgcacaccccaaagccaaactcgtgctgcggatcgcgaccgatgattccaaagctgtctgccggctcagcgtcaagtttggtgcgaccctgcggaccagccgactgctgctcgaacgggcaaaggaacttaacattgatgtggtaggagtatcatttcacgttggaagtggctgtactgatcctgaaacatttgttcaggcaatcagcgacgctcggtgcgtgttcgatatgggggctgaagtgggcttttccatgtacctgttggatataggaggaggtttccccggatctgaagacgtcaaactcaagtttgaggaaatcaccggggtcataaaccccgctctcgacaagtacttcccctcagactccggcgttcggattatcgcagaacccggtcggtattatgtggcctccgctttcactttggctgttaatataatagcgaagaaaatcgtactgaaagagcagactggttcagacgatgaggacgagagttcagagcagacttttatgtattatgtaaatgatggagtatacgggagcttcaattgcattctgtatgaccatgctcacgtcaaacctcttctacagaagcgaccgaaacctgatgaaaagtactacagctcaagtatctggggccccacttgtgatggcctcgatcggatcgtggagcgctgcgacctgccagagatgcatgtgggcgactggatgctgtttgaaaacatgggggcttacacagtagcagcggcttccaccttcaacggattccagcgccccacgatctattatgtcatgagcggaccagcctggcagctgatgcagcagttccagaacccggactttccccctgaagtggaggagcaagatgccagcaccctgcctgtgtcgtgtgcctgggagtcaggtatgaaaagacatagggctgcttgtgcgtcagcctcaatcaatgtctag

SEQ ID NO: 106041 - DNA, 1386 bp, Artificial Sequence
  derived and/or modified sequence
atgaataatttcggaaacgaggaattcgattgccatttccttgatgagggctttacagctaaagatatcctcgatcagaaaataaatgaggtgtcttctagtgacgacaaggatgctttctacgttgctgatctcggggatatcctgaagaagcacttaaggtggctgaaggcactccctagagtaactccattttacgcggtgaaatgtaatgattctaaggctatcgtaaaaaccttagccgcaactggaaccggtttcgactgcgcctccaaaaccgaaatccaactggtccagagcctgggcgtcccaccagagagaataatctatgccaacccatgcaaacaggtctcccagatcaagtacgccgcaaacaacggagtccagatgatgacgtttgattctgaggtggaactgatgaaagtggcccgagcacaccctaaggcaaaactggttctgcgcatcgccaccgatgactcaaaggccgtgtgtaggttgtccgtgaaatttggagccacccttagaaccagtcgcctgctcctggagagagccaaagaactcaacatagacgtggtgggcgtaagtttccatgtgggaagtggctgcacagatcctgagacctttgtgcaggcaatctctgacgccaggtgcgttttcgatatgggcgcagaggtgggtttttcaatgtacctgttggacataggaggagggttcccgggttcagaagacgtaaaactgaaatttgaggaaatcacaggggtgattaatcccgctcttgacaagtacttcccaagtgactcaggcgtccggatcatcgccgagcccggaaggtattacgtcgcgagcgcctttaccttggcagtgaacattatcgcaaaaaaaatcgtcttaaaagaacagaccggatccgacgatgaagatgagagcagtgagcagacatttatgtattacgtgaatgacggtgtctacggtagctttaactgcatattgtacgaccatgcacatgtgaaaccgcttctacaaaagcgcccaaagcccgacgagaagtactactcctcttccatctggggtccaacgtgcgacggccttgatcgaatcgtcgaaaggtgtgacctcccagaaatgcatgttggcgattggatgctgtttgagaatatgggagcatacactgtagccgctgcatcaacttttaacggatttcagcggccaacaatctactacgtcatgtccggccctgcctggcagcttatgcagcagttccagaacccagactttccgccagaggtcgaagaacaggacgcctctaccctaccggtcagctgtgcatgggagtccgggatgaagcgtcacagagcagcctgcgcctcagcgtctatcaacgtttag

SEQ ID NO: 106042 - DNA, 1386 bp, Artificial Sequence
  derived and/or modified sequence
atgaataattttgggaatgaagagtttgattgtcacttcctggatgaagggtttacggccaaagacattcttgatcagaagatcaacgaagtttccagcagcgacgataaggatgctttctacgtggctgacttaggagacatccttaaaaaacatcttaggtggctgaaagcactcccccgagtgacacccttctacgccgtcaagtgcaatgactccaaagcaatcgtcaagacgctcgccgctactggaactggcttcgactgcgctagcaagaccgagatccagttggtgcagagcctcggagtccctccggaaagaattatctatgcgaacccctgcaagcaggtgagccagatcaagtacgcagccaacaacggagtgcaaatgatgactttcgacagcgaagtcgagctcatgaaggtcgcccgggcccatccaaaagctaagctggttctgagaatcgctacagacgattccaaggctgtctgtcgcctaagcgtaaaattcggcgccactttacggacatcccggctgctgctcgagagggcaaaagagctcaatatcgacgtggtgggcgtttcatttcacgtaggctcaggctgcactgatcccgagaccttcgtgcaggccattagcgatgcacggtgcgtttttgacatgggtgccgaagtgggctttagcatgtacctgctggacataggcggcgggtttcccggaagcgaggacgtcaaactcaaatttgaagaaataactggtgtaatcaatcctgcactcgacaaatattttccttctgattccggtgtgcggattatcgccgagccaggcagatactacgtggcttccgccttcaccctggcagtcaatataatcgcgaaaaagatagtgctcaaggagcagactgggagcgacgatgaagacgagtctagcgaacagacatttatgtattacgtcaacgacggggtttacggtagcttcaattgcatactgtacgaccacgcccacgtcaagcccctattacagaagaggcccaagcccgacgaaaagtattattcttccagcatatggggacctacgtgcgatggcctggacaggatcgtagagcgatgcgacctgcctgagatgcacgttggagactggatgctgtttgagaacatgggagcctacacagtggccgccgcatcgaccttcaacggcttccagagaccaacgatctattacgttatgtcagggcccgcctggcagctcatgcagcaatttcagaaccctgatttcccccctgaggttgaggagcaggatgcatctactttgcccgtgtcctgcgcatgggaaagtggaatgaagagacacagagccgcatgcgcatctgccagcatcaatgtttag

SEQ ID NO: 106043 - DNA, 207 bp, Artificial Sequence
  derived and/or modified sequence
atgaataattttggcaacgaggagtttgattgtcactttttggacgaaggctttactgcaaaggacatactggaccagaagatcaacgaagtgagctcatctgatgataaggatgccttctatgtcgccgacctgggcgatatcctcaaaaaacatctgagatggttgaaggccctgcccagggttacccctttttacgctgtctag

SEQ ID NO: 106044 - DNA, 207 bp, Artificial Sequence
  derived and/or modified sequence
atgaacaactttggaaatgaggagtttgactgccacttcctggatgagggcttcaccgccaaggacatcctggaccagaagatcaatgaggtgagcagcagtgatgacaaggatgccttctacgtggccgacctgggggacatcctgaagaagcacctgcgctggctgaaggccctgccccgggtgacccccttctatgctgtgtag

SEQ ID NO: 106045 - DNA, 1386 bp, Artificial Sequence
  derived and/or modified sequence
atgaacaacttcggcaacgaggagttcgactgccacttcctggacgaggggttcacggctaaggacatcctggaccagaaaatcaacgaagtgagttccagcgatgataaggacgctttttacgtggctgaccttggcgacattttaaaaaaacacttacgatggctgaaagcgctcccacgggtgaccccgttctatgccgtgaaatgtaatgacagtaaggctatcgtaaagacgcttgcagcaaccggcaccgggtttgactgcgctagcaagactgaaatccagcttgttcagagcctgggagtccctcctgagagaatcatttacgccaacccatgcaaacaggtgagtcagatcaaatatgcagcgaacaacggggtacagatgatgacttttgactccgaagtggagctgatgaaggtggcaagggcccacccaaaagccaaactggtcctcagaatagcgactgacgatagcaaggcagtgtgcagattgagtgtcaagtttggagccaccctgagaacaagtcgtttgctactcgagagggctaaagagcttaatatcgatgtggtgggggttagttttcacgtgggaagcggatgcacagaccccgagacattcgtacaggccatttccgatgcaaggtgtgtgttcgacatgggggcagaagtgggcttcagtatgtatctgcttgacatcggcggaggatttcccggctccgaagatgttaaattgaagttcgaagaaatcactggggtaatcaatcctgcgctcgacaagtacttcccgtctgatagtggcgtccggatcatcgcagagcccggcagatattatgtagcgtcggcctttacccttgcggtgaatatcatcgcaaaaaaaatcgttcttaaagaacagacaggatcggacgacgaggacgagtccagcgagcagacctttatgtactacgtgaacgacggcgtgtatggctctttcaattgtatcctgtacgatcacgcccacgtcaaacccctgctgcaaaaaagacctaagccggacgagaaatactattcaagctctatttgggggcccacctgcgacgggctcgacaggatagtggaaagatgcgacctaccagagatgcacgtaggggactggatgctgttcgagaacatgggagcttacacagtcgcggccgcgagcactttcaacggctttcaacgcccaacaatctattatgtgatgtccgggcccgcctggcagctgatgcagcagtttcagaatcccgactttccaccggaggtagaggaacaggacgcttcaaccttgccagtatcctgtgcctgggaaagcggcatgaagagacatcgcgctgcgtgtgcatctgccagcattaacgtatag

SEQ ID NO: 106046 - DNA, 207 bp, Artificial Sequence
  derived and/or modified sequence
atgaacaacttcggcaacgaggagttcgactgccacttcctggacgaaggatttacagccaaggatatcctggatcagaaaatcaatgaggtatcgtcctccgatgataaagatgcattctacgtcgctgacctaggggacatcctgaagaagcatctgaggtggctgaaggccctccctagggttacgcccttctatgctgtttag

SEQ ID NO: 106047 - DNA, 2653 bp, Artificial Sequence
  derived and/or modified sequence
gacgtcggcccgccggcgccccaccagctccgcgcgggcccgggttggccaccgccgggcccccgcccctcccccggcggtgtcccggccggaaccgatcgtggctggtttgagctggtgcgtctccatggcgacccgccggtgctataagtagggagcggcgtgccgtggggctttgtcagtccctcctgtagccgccgccgccgccgcccgccgcccctctgccagcagctccggcgccacctcgggccggcgtctccggcgggcgggagccaggcgctgacgggcgcggcgggggcggccgagcgctcctgcggctgcgactcaggctccggcgtctgcgcttccccatggggctggcctgcggcgcctgggcgctctgagattgtcactgctgttccaagggcacacgcagagggatttggaattcctggagagttgcctttgtgagaagctggaaatatttctttcaattccatctcttagttttccataggaacatcaagaaatcatgaacaactttggtaatgaagagtttgactgccacttcctcgatgaaggttttactgccaaggacattctggaccagaaaattaatgaagtttcttcttctgatgataaggatgccttctatgtggcagacctgggagacattctaaagaaacatctgaggtggttaaaagctctccctcgtgtcacccccttttatgcagtcaaatgtaatgatagcaaagccatcgtgaagacccttgctgctaccgggacaggatttgactgtgctagcaagactgaaatacagttggtgcagagtctgggggtgcctccagagaggattatctatgcaaatccttgtaaacaagtatctcaaattaagtatgctgctaataatggagtccagatgatgacttttgatagtgaagttgagttgatgaaagttgccagagcacatcccaaagcaaagttggttttgcggattgccactgatgattccaaagcagtctgtcgtctcagtgtgaaattcggtgccacgctcagaaccagcaggctccttttggaacgggcgaaagagctaaatatcgatgttgttggtgtcagcttccatgtaggaagcggctgtaccgatcctgagaccttcgtgcaggcaatctctgatgcccgctgtgtttttgacatgggggctgaggttggtttcagcatgtatctgcttgatattggcggtggctttcctggatctgaggatgtgaaacttaaatttgaagagatcaccggcgtaatcaacccagcgttggacaaatactttccgtcagactctggagtgagaatcatagctgagcccggcagatactatgttgcatcagctttcacgcttgcagttaatatcattgccaagaaaattgtattaaaggaacagacgggctctgatgacgaagatgagtcgagtgagcagacctttatgtattatgtgaatgatggcgtctatggatcatttaattgcatactctatgaccacgcacatgtaaagccccttctgcaaaagagacctaaaccagatgagaagtattattcatccagcatatggggaccaacatgtgatggcctcgatcggattgttgagcgctgtgacctgcctgaaatgcatgtgggtgattggatgctctttgaaaacatgggcgcttacactgttgctgctgcctctacgttcaatggcttccagaggccgacgatctactatgtgatgtcagggcctgcgtggcaactcatgcagcaattccagaaccccgacttcccacccgaagtagaggaacaggatgccagcaccctgcctgtgtcttgtgcctgggagagtgggatgaaacgccacagagcagcctgtgcttcggctagtattaatgtgtagatagcactctggtagctgttaactgcaagtttagcttgaattaagggatttggggggaccatgtaacttaattactgctagttttgaaatgtctttgtaagagtagggtcgccatgatgcagccatatggaagactaggatatgggtcacacttatctgtgttcctatggaaactatttgaatatttgttttatatggatttttattcactcttcagacacgctactcaagagtgcccctcagctgctgaacaagcatttgtagcttgtacaatggcagaatgggccaaaagcttagtgttgtgacctgtttttaaaataaagtatcttgaaataattaggcattgggacgtttttatggtgtgttcattccagacagttcacgaatcccgtatagctcgctctgattctcagagaacaatgagtgggtccacccacacacaggtaggaggacaggtgagacggaagccccatcctcccatgtggacggtgcacatctgctcagcccaccccacatgtccagagttggctgcaaactccttgtccagagcctctggtggtgggacctacttaagtctgacggacctgtcctgtccaggccagtgcccagggaaggtgtgggaggccctttgagcctggcctgcagagaccatccgtgtcccctcccaccttcatgcctgtgagaagttaggaatgtatacggtaccacatttggcagtcagcttattttaataaattcagcaacagcaagtcccta

SEQ ID NO: 106048 - DNA, 1943 bp, Artificial Sequence
  derived and/or modified sequence
cctggcggccgcgcagcaggtgcaggggcgcagagcccgggctcgccttggtacagacgagcgggccccggccttggcgccttcagtttccttccagtttttattttcgctgtgtctacagagcagatgacaccaatttggaaacccgcgagagtgggtagagctaagatagtcttgctgtagtagctgtgatattagatgctcggccatgacttagaggtgtttatttaaggactgtgaatgactcggtgatttcggaaaagcttggcttagatgaacggacatacacaggggagacagccctaagattgtcactgctgttccaagggcacacgcagagggatttggaattcctggagagttgcctttgtgagaagctggaaatatttctttcaattccatctcttagttttccataggaacatcaagaaatcatgaacaactttggtaatgaagagtttgactgccacttcctcgatgaaggttttactgccaaggacattctggaccagaaaattaatgaagtttcttcttctgatgataaggatgccttctatgtggcagacctgggagacattctaaagaaacatctgaggtggttaaaagctctccctcgtgtcacccccttttatgcagtcaaatgtaatgatagcaaagccatcgtgaagacccttgctgctaccgggacaggatttgactgtgctagcaagactgaaatacagttggtgcagagtctgggggtgcctccagagaggattatctatgcaaatccttgtaaacaagtatctcaaattaagtatgctgctaataatggagtccagatgatgacttttgatagtgaagttgagttgatgaaagttgccagagcacatcccaaagcaaagttggttttgcggattgccactgatgattccaaagcagtctgtcgtctcagtgtgaaattcggtgccacgctcagaaccagcaggctccttttggaacgggcgaaagagctaaatatcgatgttgttggtgtcagcttccatgtaggaagcggctgtaccgatcctgagaccttcgtgcaggcaatctctgatgcccgctgtgtttttgacatgggggctgaggttggtttcagcatgtatctgcttgatattggcggtggctttcctggatctgaggatgtgaaacttaaatttgaagagatcaccggcgtaatcaacccagcgttggacaaatactttccgtcagactctggagtgagaatcatagctgagcccggcagatactatgttgcatcagctttcacgcttgcagttaatatcattgccaagaaaattgtattaaaggaacagacgggctctgatgacgaagatgagtcgagtgagcagacctttatgtattatgtgaatgatggcgtctatggatcatttaattgcatactctatgaccacgcacatgtaaagccccttctgcaaaagagacctaaaccagatgagaagtattattcatccagcatatggggaccaacatgtgatggcctcgatcggattgttgagcgctgtgacctgcctgaaatgcatgtgggtgattggatgctctttgaaaacatgggcgcttacactgttgctgctgcctctacgttcaatggcttccagaggccgacgatctactatgtgatgtcagggcctgcgtggcaactcatgcagcaattccagaaccccgacttcccacccgaagtagaggaacaggatgccagcaccctgcctgtgtcttgtgcctgggagagtgggatgaaacgccacagagcagcctgtgcttcggctagtattaatgtgtagatagcactctggtagctgttaactgcaagtttagcttgaattaagggatttggggggaccatgtaacttaattactgctagttttgaaatgtctttgtaagagtagggtcgccatgatgcagc

SEQ ID NO: 106049 - DNA, 494 bp, Artificial Sequence
  derived and/or modified sequence
ggggaggccctggcggccgcgcagcaggtgcaggggcgcagagcccgggctcgccttggtacagacgagcgggccccggccttggcgccttcagtttccttccagtttttattttcgctgtgtctacagagcagatgacaccaatttggaaacccgcgagaattgtcactgctgttccaagggcacacgcagagggatttggaattcctggagagttgcctttgtgagaagctggaaatatttctttcaattccatctcttagttttccataggaacatcaagaaatcatgaacaactttggtaatgaagagtttgactgccacttcctcgatgaaggttttactgccaaggacattctggaccagaaaattaatgaagtttcttcttctgatgataaggatgccttctatgtggcagacctgggagacattctaaagaaacatctgaggtggttaaaagctctccctcgtgtcacccccttttatgcagtcaa

SEQ ID NO: 106050 - DNA, 1548 bp, Artificial Sequence
  derived and/or modified sequence
gtcagtccctcctgtagccgccgccgccgccgcccgccgcccctctgccagcagctccggcgccacctcgggccggcgtctccggcgggcgggagccaggcgctgacgggcgcggcgggggcggccgagcgctcctgcggctgcgactcaggctccggcgtctgcgcttccccatggggctggcctgcggcgcctgggcgctctgagattgtcactgctgttccaagggcacacgcagagggatttggaattcctggagagttgcctttgtgagaagctggaaatatttctttcaattccatctcttagttttccataggaacatcaagaaatcatgaacaactttggtaatgaagagtttgactgccacttcctcgatgaaggttttactgccaaggacattctggaccagaaaattaatgaagtttcttcttcttcaaatgtaatgatagcaaagccatcgtgaagacccttgctgctaccgggacaggatttgactgtgctagcaagactgaaatacagttggtgcagagtctgggggtgcctccagagaggattatctatgcaaatccttgtaaacaagtatctcaaattaagtatgctgctaataatggagtccagatgatgacttttgatagtgaagttgagttgatgaaagttgccagagcacatcccaaagcaaagttggttttgcggattgccactgatgattccaaagcagtctgtcgtctcagtgtgaaattcggtgccacgctcagaaccagcaggctccttttggaacgggcgaaagagctaaatatcgatgttgttggtgtcagcttccatgtaggaagcggctgtaccgatcctgagaccttcgtgcaggcaatctctgatgcccgctgtgtttttgacatgggggctgaggttggtttcagcatgtatctgcttgatattggcggtggctttcctggatctgaggatgtgaaacttaaatttgaagagatcaccggcgtaatcaacccagcgttggacaaatactttccgtcagactctggagtgagaatcatagctgagcccggcagatactatgttgcatcagctttcacgcttgcagttaatatcattgccaagaaaattgtattaaaggaacagacgggctctgatgacgaagatgagtcgagtgagcagacctttatgtattatgtgaatgatggcgtctatggatcatttaattgcatactctatgaccacgcacatgtaaagccccttctgcaaaagagacctaaaccagatgagaagtattattcatccagcatatggggaccaacatgtgatggcctcgatcggattgttgagcgctgtgacctgcctgaaatgcatgtgggtgattggatgctctttgaaaacatgggcgcttacactgttgctgctgcctctacgttcaatggcttccagaggccgacgatctactatgtgatgtcagggcctgcgtggcaactcatgcagcaattccagaaccccgacttcccaccctgcctgtgtcttgtgcctgggagagtgggatga

SEQ ID NO: 106051 - DNA, 1386 bp, Artificial Sequence
  derived and/or modified sequence
atgaataattttgggaatgaggaatttgactgtcacttcttagatgagggattcacggcgaaagatatcctggatcaaaagataaatgaggtgtccagtagtgacgataaggacgcgttttatgtcgctgatctaggagacatcctgaagaaacacctgcgctggctgaaggctctgcctagggtcacaccattctatgcggttaagtgtaatgacagcaaggccattgtgaagactttggccgctaccgggactgggtttgattgcgcttccaaaacagaaatccagctggtccagagcttgggagttcccccagaaaggattatctatgcgaacccttgcaagcaagtatctcagattaagtatgctgccaacaacggagtgcagatgatgacctttgacagcgaggtggagctgatgaaagtggcacgggctcatccaaaggctaagctggtccttagaatcgccactgatgactcgaaggctgtatgcaggctctcagttaaatttggcgcaacattgcggacttcacggctgttgctggaaagagctaaagaattgaacattgatgtcgtcggcgtatcatttcacgtgggctctggatgcactgatcccgaaacctttgtccaagccatatccgacgcgcgatgcgttttcgatatgggagctgaggtgggattttcgatgtaccttcttgatatcggtggaggcttcccgggttccgaagatgtgaagctaaagtttgaggagattaccggtgtgattaatccagccctggacaaatactttcctagcgacagcggtgtcagaattatagccgagcccggacgctattacgtggccagcgctttcacactcgcggtgaacatcatcgcaaaaaagatcgtactgaaagagcaaacaggaagtgatgatgaagatgagtccagcgagcagacattcatgtattacgtgaatgacggggtgtacggtagcttcaattgcatcctgtatgaccatgctcacgtaaagcccctgctgcagaaacggccaaagcctgatgagaagtactatagctcaagcatatggggccctacttgcgacgggctcgatcggattgtggagcgctgcgaccttcccgagatgcacgtgggggactggatgctctttgagaacatgggcgcttacactgtggcagcagctagcacctttaatggctttcagcgtcctacaatctattacgtcatgtccggcccagcctggcagttaatgcagcagttccaaaatcccgactttccaccggaagtggaggaacaggacgcaagcactctgcctgtctcatgtgcttgggagtctggcatgaagcgacacagggcagcttgcgcaagtgcaagtataaacgtatag

SEQ ID NO: 106052 - DNA, 207 bp, Artificial Sequence
  derived and/or modified sequence
atgaacaatttcggtaacgaggagttcgactgccattttcttgatgaagggttcacggccaaggacattctggaccaaaagatcaatgaggtttcctcgtccgacgacaaggatgccttctacgtggctgacttgggtgatatcctcaaaaagcacttaagatggcttaaagctttgccacgggtcaccccattctatgccgtctag

SEQ ID NO: 106053 - DNA, 207 bp, Artificial Sequence
  derived and/or modified sequence
atgaacaacttcggcaacgaggagttcgactgccacttcctggacgagggcttcaccgccaaggacatcctggaccagaagatcaacgaggtgagcagcagcgacgacaaggacgccttctacgtggccgacctgggcgacatcctgaagaagcacctgagatggctgaaggccctgcccagagtgacccccttctacgccgtgtag

SEQ ID NO: 106054 - protein, 383 aa, Artificial Sequence
  derived and/or modified sequence
MASAFRLSLKPKVSDNMTHLMVDFSQERQMLQTLKFLPVPKAPEIDPVECLVADNSVTVAWRMPEEDNKIDHFILEHRKTNFDGLPRVKDERCWEIIDNIKGTEYTLSGLKFDSKYMNFRVRACNKAVAGEYSDPVTLETKALNFNLDNSSSHLNLKVEDTCVEWDPTGGKGQESKIKGKENKGSVHVTSLKKHTSGTPSPKRTSVGSRPPAVRGSRDRFTGESYTVLGDTAIESGQHYWEVKAQKDCKSYSVGVAYKTLGKFDQLGKTNTSWCIHVNNWLQNTFAAKHNNKVKALDVTVPEKIGVFCDFDGGQLSFYDANSKQLLYSFKTKFTQPVLPGFMVWCGGLSLSTGMQVPSAVRTLQKSENGMTGSASSLNNVVTQ

SEQ ID NO: 106055 - DNA, 1944 bp, Artificial Sequence
  derived and/or modified sequence
agtgcagtgagtagcggtcttggggtgtgcgatctcgctgagcctcctcacacggttcgtcgtctcgggttcgagcccagtgggcttagccactcgccatggactcccagaaagaagctctacagaggatcatttcaactctggcaaataaaaatgatgaaattcagaactttattgatacactacatcatacactaaaaggagttcaggaaaattcgtccaacatactctcagagttagatgaagaatttgatagtttatactctatactggatgaagtaaaagaaagtatgattaactgtatcaagcaggaacaagctcgtaaatcccaagagttacagagtcagattagtcaatgtaataatgccctggagaactctgaagaactattagaatttgcaacaaggtcattagatataaaggaacctgaagaattttcaaaggctgccagacagatcaaggatagagtcacaatggcttcagcctttcgcctttctttgaaaccaaaggtcagtgacaacatgactcatttaatggtggatttctcacaggaaagacagatgctgcaaactttgaagtttttgccagtccccaaagctccagagatagatccagtagagtgtttggtggcagataactctgtaacagtggcttggagaatgccagaagaagataataagattgaccattttatactggaacataggaagactaattttgatggacttccacgtgtaaaggatgagcgatgctgggagataattgataatattaagggtactgaatatacactatcaggcttaaaatttgattcaaagtatatgaatttcagagtgcgagcttgtaacaaggctgtggctggagagtattctgatccagtgactctagagaccaaagcacttaacttcaatttggataactcctcatcccatttgaacctgaaagttgaagatacatgtgtagagtgggatcctactggaggaaaaggtcaagaaagtaaaattaaaggaaaagagaacaagggcagtgtccatgttacttcactgaagaaacatacaagtggtacaccatccccaaaacgaacatctgtaggctccaggccaccagcagtaagaggcagtagagatcgttttactggagaatcatacacagtgctgggagacactgctattgaaagtggacaacattattgggaggtcaaggcccagaaggattgtaaatcctacagtgtgggagtagcatacaaaacgttggggaaatttgaccaattgggaaagacaaacactagttggtgtatccatgtcaacaactggctacaaaacacatttgcagcaaagcataataataaagtcaaagctttggatgttactgttcctgaaaaaataggtgtattttgtgattttgatgggggtcaactttcattctatgatgcaaattctaaacagttgctatattcctttaagacaaaatttactcagccagtactacctggtttcatggtatggtgtggtggactttctttgagtactgggatgcaggttccaagtgctgtgagaacacttcagaaaagtgaaaatggaatgactggttcagctagcagcctgaacaatgttgttactcaatagtgtctactcagaatacgtttaccctccgtcttgattaggtggccttttctgtgcagttactaatcacaggaatttggtagtagtgaaaatcaggtttgctgtgttctgctttgaggcctggaatcttttatcattaaacacctagtacgaagcatttgcaggaacctactgtgcagtatcatagaagcaagcagataccaagcaaaaaactgatgattgaagagtaaatgggggaaaaggcagtgtttaattaacataaaaactcatttttgtatttcttggattactttgactattctaatgtttaattacatatggt

SEQ ID NO: 106056 - protein, 498 aa, Artificial Sequence
  derived and/or modified sequence
MDSQKEALQRIISTLANKNDEIQNFIDTLHHTLKGVQENSSNILSELDEEFDSLYSILDEVKESMINCIKQEQARKSQELQSQISQCNNALENSEELLEFATRSLDIKEPEEFSKAARQIKDRVTMASAFRLSLKPKVSDNMTHLMVDFSQERQMLQTLKFLPVPKAPEIDPVECLVADNSVTVAWRMPEEDNKIDHFILEHRKTNFDGLPRVKDERCWEIIDNIKGTEYTLSGLKFDSKYMNFRVRACNKAVAGEYSDPVTLETKALNFNLDNSSSHLNLKVEDTCVEWDPTGGKGQESKIKGKENKGRSGTPSPKRTSVGSRPPAVRGSRDRFTGESYTVLGDTAIESGQHYWEVKAQKDCKSYSVGVAYKTLGKFDQLGKTNTSWCIHVNNWLQNTFAAKHNNKVKALDVTVPEKIGVFCDFDGGQLSFYDANSKQLLYSFKTKFTQPVLPGFMVWCGGLSLSTGMQVPSAVRTLQKSENGMTGSASSLNNVVTQ

SEQ ID NO: 106057 - DNA, 1497 bp, Artificial Sequence
  derived and/or modified sequence
atggactcccaaaaggaggcacttcagagaatcattagcactttggcaaataaaaatgacgaaatccagaactttatcgatacactgcaccacactcttaagggcgtgcaggaaaattcttccaatatcctatctgaattggacgaggagtttgacagcctgtactccattctcgacgaagtcaaggaatccatgattaactgtatcaagcaggaacaggccaggaaatcccaggagctgcaaagccaaatcagtcagtgcaataacgcactggaaaactctgaggagctactggaattcgccacccgcagtttggatatcaaggagcctgaggagttctccaaggccgcccgacagattaaggaccgggtgacgatggcctctgccttcagactgtctcttaagccgaaagtgtctgataatatgactcacctgatggtggacttctcccaggagagacagatgctacagaccctgaagttccttccagtaccgaaggctcctgagattgatcctgtggagtgtctggtggccgataatagtgtgaccgtggcgtggcgaatgcctgaagaagacaacaaaattgaccattttatccttgagcatagaaagacaaatttcgatggcttaccgcgcgttaaagacgagcgctgttgggaaatcatcgataatatcaaaggcaccgagtatacgctgagcggcttaaagttcgacagcaaatatatgaattttagagtgcgggcctgtaacaaagctgtggccggggaatacagcgaccccgttaccttagagacaaaggcactgaacttcaatctcgataatagtagctctcatctgaatctaaaagtcgaagacacctgcgtagaatgggatcctactggtggcaaaggacaggaaagtaagatcaaagggaaggagaataagggcagatcaggaacaccttcaccaaagcggacttcagtgggttctcgcccccccgccgtgcgcggatcaagagatcggttcaccggagagagctatacagtgctcggtgatactgctattgaaagcgggcagcactactgggaagtaaaggcacagaaggactgtaagagttactccgtgggagtcgcctacaagacgctgggaaaatttgatcaactgggtaagactaacacttcatggtgcatacacgtgaataattggctccagaatacattcgcagcaaagcacaataacaaagtgaaagcactagacgtgactgtccccgagaaaatcggggtattctgtgatttcgatggaggacaactctctttctatgatgccaattctaagcagctcctctatagtttcaagactaagttcacacagcctgtccttccggggtttatggtgtggtgcggcggcctcagtctgtccaccggaatgcaggtgccatctgcggtgcggaccctccagaagtctgagaacggcatgacagggagcgcctcctctctaaacaatgtcgtcacccagtag

SEQ ID NO: 106058 - DNA, 1497 bp, Artificial Sequence
  derived and/or modified sequence
atggacagccagaaggaggccctgcagaggatcatcagcaccctggccaacaagaatgatgagatccagaacttcatcgacaccctgcaccacaccctgaagggcgtgcaggagaacagcagcaacatcctgtctgagctggatgaggagtttgacagcctgtacagcatcctggatgaggtgaaggagagcatgatcaactgcatcaagcaggagcaggccaggaagagccaggagctgcagagccagatcagccagtgcaacaatgccctggagaacagcgaggagctgctggagtttgccaccaggagcctggacatcaaggagcctgaggagttcagcaaggccgcccggcagatcaaggacagagtgaccatggccagcgccttccggctgagcctgaagcccaaggtgtctgacaacatgacccacctgatggtggacttcagccaggagcggcagatgctgcagaccctgaagttcctgcctgtgcccaaggcccctgagattgatcctgtggagtgcctggtggccgacaacagcgtgacagtggcctggaggatgcctgaggaggacaacaagattgaccacttcatcctggagcacaggaagaccaactttgatggcctgccccgggtgaaggatgagcgctgctgggagatcatcgacaacatcaagggcacagagtacaccctgagcggcctgaagtttgacagcaagtacatgaacttccgggtgcgggcctgcaacaaggctgtggccggggagtacagcgaccctgtgaccctggagaccaaggccctgaacttcaacctggacaacagcagcagccacctgaacctgaaggtggaggacacctgtgtggagtgggaccccactggaggcaagggccaggagagcaagatcaagggcaaggagaacaagggccgcagcggcacccccagccccaagaggacctctgtgggcagcaggcctcctgctgtgcggggcagccgggaccgcttcaccggggagagctacacagtgctgggggacacagccatcgagagcggccagcactactgggaggtgaaggcccagaaggactgcaagagctacagcgtgggcgtggcctacaagaccctgggcaagtttgaccagctgggcaagaccaacacctcctggtgcatccacgtgaacaactggctgcagaacacctttgctgccaagcacaacaacaaggtgaaggccctggatgtgacagtgcctgagaagattggagtcttctgtgactttgatggcggccagctgtccttctatgatgccaacagcaagcagctgctgtacagcttcaagaccaagttcacccagcctgtgctgcccggcttcatggtgtggtgtggcggcctgagcctgagcacaggcatgcaggtgcccagcgctgtgaggaccctgcagaagtcagaaaatggcatgacaggcagcgccagcagcctgaacaacgtggtgacccagtag

SEQ ID NO: 106059 - DNA, 1497 bp, Artificial Sequence
  derived and/or modified sequence
atggacagccagaaggaggccctgcagcggatcatcagcaccctggcaaataagaacgatgaaatccagaactttatagatacccttcatcacaccctcaaaggtgtccaggagaatagttctaatatcctgagcgagctggatgaggagttcgatagcctctacagcatcttagacgaggtcaaggagtcaatgattaattgcattaaacaggaacaagcccgtaaatcgcaggaactgcagtctcaaatttcccaatgtaataatgctttggaaaatagcgaggagcttctagagtttgcgacccgatcgctcgacataaaagagcccgaagaatttagcaaagcagcccgccaaatcaaagatcgagtgacaatggcatctgccttccgtcttagtcttaagcccaaggtaagcgataatatgacccatctgatggtggacttttcacaagaacgccagatgcttcagaccctcaagttcctcccggtacctaaggccccagagatcgaccccgtagaatgtctagttgccgataactctgttactgtcgcttggcggatgcctgaggaagacaacaagatagatcacttcatacttgaacaccgtaagaccaactttgacggactcccccgcgtaaaggatgagcgatgttgggagataatcgacaatataaaggggacagaatataccctcagcgggttgaaattcgacagtaaatatatgaatttccgagtgagggcatgcaacaaggcagtcgcgggagagtacagtgaccccgtgactctcgagacgaaggccctgaacttcaatctggacaactcctcaagccatttgaacctgaaagtagaggatacatgtgttgagtgggatccaaccgggggtaaggggcaggagagcaagatcaaaggaaaggaaaacaagggtagatccggaactccttcccctaaaagaacctcggtgggatctagaccgcccgccgtgagaggttcacgagacagatttaccggcgaaagctacactgtgctgggagatacagcaatcgaatctggccagcattactgggaggttaaggcacaaaaggattgcaagtcatacagtgtaggggtagcctataaaactctgggcaagttcgaccagctcggcaaaacgaacacctcctggtgcatccacgtaaacaactggttacagaacacctttgccgccaagcacaataataaagttaaggccctagatgttacagtcccagagaagatcggggtcttctgcgactttgacggggggcagctctccttctatgacgcgaatagcaagcagctgctttactctttcaagaccaaattcacccagcctgttctccctggcttcatggtctggtgcgggggtctgagtctcagtacgggaatgcaggttcccagtgccgttagaacgttgcagaagagtgagaacggtatgactggcagcgcttcgagcctgaataatgtcgtcacccaatag

SEQ ID NO: 106060 - DNA, 1497 bp, Artificial Sequence
  derived and/or modified sequence
atggacagccaaaaagaggccttgcagaggatcatctccacactcgccaacaagaatgacgagattcaaaacttcatcgataccctgcaccacacgctcaagggcgtccaggaaaacagctccaacattctgagtgagttggatgaagagttcgactccctgtactcaatattggacgaggtgaaagaaagcatgattaattgtatcaagcaggagcaggcccgaaagtcccaagaactgcagagccagatcagtcagtgtaataacgcactcgagaattccgaggagctactggagttcgctactaggagcttggatattaaagaaccagaggagttttccaaggcggcacgccagattaaggaccgcgtgacaatggctagcgccttcaggttgtctctgaagcccaaagtgtcagataacatgacacacttgatggtggacttcagccaggaacgccagatgctgcagacactgaaattcctacctgtacctaaagcccctgaaattgacccagttgagtgcctggtagcagataatagtgtaacagtggcgtggcgcatgcccgaggaggacaataagattgaccactttatcctggaacacagaaaaaccaattttgatggtctccccagagtcaaggatgaaagatgctgggagatcatcgacaatattaagggcacggaatataccttatccgggcttaagttcgattccaagtatatgaactttcgcgtgcgggcttgtaacaaggccgtggcaggcgaatactccgatccagtcaccctggaaacaaaagctttgaactttaatctggataattcaagcagccacctcaatctcaaggtagaggacacttgcgtggagtgggaccccacagggggtaaggggcaggagtcaaaaatcaaaggaaaagagaacaaagggaggtctggcactccctcacctaagcgcaccagcgtgggaagccggccaccggcagtccgtgggtctcgggaccggttcacaggggagagttacactgtacttggagatacagctatcgaaagcgggcagcactactgggaagtgaaagcccagaaagactgtaagagctacagcgtcggggtggcctataaaacactgggcaagttcgaccagctgggaaagaccaatacctcatggtgtattcacgtgaacaactggctacaaaatacctttgccgctaagcacaacaataaggtgaaggccttggatgttacagtcccagaaaagattggcgtgttttgcgactttgacggcggacagctgtcgttctacgacgccaatagcaaacaactcctgtactcatttaagacaaaatttactcaaccagtactgcccggatttatggtttggtgcgggggattgtctctctcaactggcatgcaggttccttccgctgttcgcaccttgcaaaaatccgaaaacggtatgacagggtcagcgtcatctttaaacaatgtagtgacacagtag

SEQ ID NO: 106061 - DNA, 1497 bp, Artificial Sequence
  derived and/or modified sequence
atggacagccagaaggaggccctgcagagaatcatcagcaccctggccaacaagaacgacgagatccagaacttcatcgacaccctgcaccacaccctgaagggcgtgcaggagaacagcagcaacatcctgagcgagctggacgaggagttcgacagcctgtacagcatcctggacgaggtgaaggagagcatgatcaactgcatcaagcaggagcaggccagaaagagccaggagctgcagagccagatcagccagtgcaacaacgccctggagaacagcgaggagctgctggagttcgccaccagaagcctggacatcaaggagcccgaggagttcagcaaggccgccagacagatcaaggacagagtgaccatggccagcgccttcagactgagcctgaagcccaaggtgagcgacaacatgacccacctgatggtggacttcagccaggagagacagatgctgcagaccctgaagttcctgcccgtgcccaaggcccccgagatcgaccccgtggagtgcctggtggccgacaacagcgtgaccgtggcctggagaatgcccgaggaggacaacaagatcgaccacttcatcctggagcacagaaagaccaacttcgacggcctgcccagagtgaaggacgagagatgctgggagatcatcgacaacatcaagggcaccgagtacaccctgagcggcctgaagttcgacagcaagtacatgaacttcagagtgagagcctgcaacaaggccgtggccggcgagtacagcgaccccgtgaccctggagaccaaggccctgaacttcaacctggacaacagcagcagccacctgaacctgaaggtggaggacacctgcgtggagtgggaccccaccggcggcaagggccaggagagcaagatcaagggcaaggagaacaagggcagaagcggcacccccagccccaagagaaccagcgtgggcagcagaccccccgccgtgagaggcagcagagacagattcaccggcgagagctacaccgtgctgggcgacaccgccatcgagagcggccagcactactgggaggtgaaggcccagaaggactgcaagagctacagcgtgggcgtggcctacaagaccctgggcaagttcgaccagctgggcaagaccaacaccagctggtgcatccacgtgaacaactggctgcagaacaccttcgccgccaagcacaacaacaaggtgaaggccctggacgtgaccgtgcccgagaagatcggcgtgttctgcgacttcgacggcggccagctgagcttctacgacgccaacagcaagcagctgctgtacagcttcaagaccaagttcacccagcccgtgctgcccggcttcatggtgtggtgcggcggcctgagcctgagcaccggcatgcaggtgcccagcgccgtgagaaccctgcagaagagcgagaacggcatgaccggcagcgccagcagcctgaacaacgtggtgacccagtag

SEQ ID NO: 106062 - protein, 305 aa, Artificial Sequence
  derived and/or modified sequence
MEAAHFFEGTEKLLEVWFSRQQPDANQGSGDLRTIPSESSMFVSKRRFILKTCGTTLLLKALVPLLKLARDYSGFDSIQSFFYSRKNFMKPSHQGYPHRNFQEEIEFLNAIFPNGAAYCMGRMNSDCWYLYTLDFPESRVISQPDQTLEILMSELDPAVMDQFYMKDGVTAKDVTRESGIRDLIPGSVIDATMFNPCGYSMNGMKSDGTYWTIHITPEPEFSYVSFETNLSQTSYDDLIRKVVEVFKPGKFVTTLFVNQSSKCRTVLASPQKIEGFKRLDCQSAMFNDYNFVFTSFAKKQQQQQS

SEQ ID NO: 106063 - DNA, 918 bp, Artificial Sequence
  derived and/or modified sequence
atggaagcagcccacttcttcgagggaactgagaagctgctcgaggtttggttctctaggcaacagccagacgcgaaccagggttctggagacctccgtacaatcccatcggagagttccatgtttgtgtctaagcgtcgctttattcttaaaacctgtggtaccactctgctgctcaaggccctggtgccactcctgaagctggcgagagactattctggcttcgattctatccaatcattcttttactccagaaaaaattttatgaagccttcacaccagggctacccgcatagaaatttccaggaggagattgagttcctaaacgccatctttccaaacggcgccgcctattgcatgggacgaatgaattccgactgctggtacctgtacactttagactttccagaaagtagggttattagccaaccagatcagactttggagattctgatgagcgagctcgaccccgctgtgatggatcagttctacatgaaggacggtgtcacagcaaaggatgtcacacgagagtccgggatccgggatctgattccgggaagtgtcatcgacgcaaccatgttcaacccatgcggatattccatgaatgggatgaaatccgacggcacctactggacaatccacattacgccggagcctgaatttagctacgtgtccttcgagaccaacctatcccaaacttcatacgatgacttaatcaggaaggtcgtggaagtattcaagcctgggaagttcgtgactaccctttttgttaaccagtctagcaaatgccgcaccgtgcttgcttccccccagaaaattgagggatttaagaggctcgactgccagtccgcgatgttcaatgactataatttcgtgttcacttcttttgcaaaaaaacagcagcagcaacagtcatag

SEQ ID NO: 106064 - DNA, 1605 bp, Artificial Sequence
  derived and/or modified sequence
gcttacacagtatggccggcgacattagctagcgctcgctctactctctctaacgggaaagcagcggaatacaagagactgaactgtatctgcctctatttccaaaagactcacgttcaactttcgctcacacaaagccgggaaaattttattagtcctttttttaaaaaaagttaatataaaattatagcaaaaaaaaaaaggaacctgaactttagtaacacagctggaacaatccgcagcggcggcggcagcggcgggagaagaggtttaatttagttgattttctgtggttgttggttgttcgctagtctcacggtgatggaagctgcacattttttcgaagggaccgagaagctgctggaggtttggttctcccggcagcagcccgacgcaaaccaaggatctggggatcttcgcactatcccaagtgagagtagcatgtttgtctccaagagacgtttcattttgaagacatgtggtaccaccctcttgctgaaagcactggttcccctgttgaagcttgctagggattacagtgggtttgactcaattcaaagcttcttttattctcgtaagaatttcatgaagccttctcaccaagggtacccacaccggaatttccaggaagaaatagagtttcttaatgcaattttcccaaatggagcagcatattgtatgggacgtatgaattctgactgttggtacttatatactctggatttcccagagagtcgggtaatcagtcagccagatcaaaccttggaaattctgatgagtgagcttgacccagcagttatggaccagttctacatgaaagatggtgttactgcaaaggatgtcactcgtgagagtggaattcgtgacctgataccaggttctgtcattgatgccacaatgttcaatccttgtgggtattcgatgaatggaatgaaatcggatggaacttattggactattcacatcactccagaaccagaattttcttatgttagctttgaaacaaacttaagtcagacctcctatgatgacctgatcaggaaagttgtagaagtcttcaagccaggaaaatttgtgaccaccttgtttgttaatcagagttctaaatgtcgcacagtgcttgcttcgccccagaagattgaaggttttaagcgtcttgattgccagagtgctatgttcaatgattacaattttgtttttaccagttttgctaagaagcagcaacaacagcagagttgattaagaaaaatgaagaaaaaacgcaaaaagagaacacatgtagaaggtggtggatgctttctagatgtcgatgctgggggcagtgctttccataaccaccactgtgtagttgcagaaagccctagatgtaatgatagtgtaatcattttgaattgtatgcattattatatcaaggagttagatatcttgcatgaatgctctcttctgtgtttaggtattctctgccactcttgctgtgaaattgaagtgcatgtagaaaaaaccttttactatatgaaactttacaacacttgtgaaagcaactcaatttggtttatgcacagtgtaatatttctccaagtatcatccaaaattccccacagacaa

SEQ ID NO: 106065 - DNA, 918 bp, Artificial Sequence
  derived and/or modified sequence
atggaggccgcccacttctttgagggcacagagaagctgctggaggtgtggttcagccggcagcagccagatgccaaccagggcagcggggacctgcggaccatccccagcgagagctccatgtttgtgtccaagaggcgcttcatcctgaagacctgtggcaccaccctgctgctgaaggccctggtgcccctgctgaagctggcccgggactacagcggctttgacagcatccagagcttcttctacagcaggaagaacttcatgaagcccagccaccagggctacccccacaggaacttccaggaggagattgagttcctgaatgccatcttccccaacggggccgcctactgcatgggccgcatgaacagcgactgctggtacctgtacaccctggacttccctgagagcagggtcatcagccagcctgaccagaccctggagatcctgatgtctgagctggaccctgctgtgatggaccagttctacatgaaggatggagtgacagccaaggatgtgacccgggagagcggcatccgggacctgatccctggctctgtgattgatgccaccatgttcaacccctgtggctacagcatgaatggcatgaagagtgatggcacctactggaccatccacatcaccccagagcctgagttctcctatgtgtcctttgagaccaacctgagccagaccagctatgatgacctgatcaggaaggtggtggaggtgttcaagccaggcaagtttgtgaccaccctgtttgtgaaccagagcagcaagtgcaggacagtgctggccagcccccagaagattgagggcttcaagaggctggactgccagagcgccatgtttaatgactacaactttgtgttcaccagctttgccaagaagcagcagcagcagcagagctag

SEQ ID NO: 106066 - DNA, 918 bp, Artificial Sequence
  derived and/or modified sequence
atggaggccgcccacttcttcgagggcaccgagaagctgctggaggtgtggttcagcaggcagcagccagacgcaaaccagggatccggggacctgcgcacaatacccagtgagagctcaatgtttgtgagcaagcgccggttcattctcaagacctgtggcaccacccttctgttgaaggcactagtccccctgttgaagctggctagagattacagtggttttgatagcatccagtccttcttctactcgcgcaagaatttcatgaaaccaagtcaccagggctacccccatcgcaacttccaagaagaaattgaattccttaacgccatcttcccaaacggagccgcctattgcatggggcgcatgaactccgactgctggtatctgtataccctggattttcccgaaagccgagtgatttctcagcctgaccagaccctcgaaatcctaatgtcagaacttgaccctgctgtgatggaccagttttacatgaaggacggtgtgaccgcgaaggacgtgacccgcgaatctggtattcgagatcttattccggggagtgtcatcgatgctacaatgttcaacccatgcgggtattcaatgaatggaatgaaatcagacgggacctactggacgattcatattacccctgagcctgagttctcttacgtcagttttgagaccaacttatcccaaaccagttacgatgatcttataagaaaggtggtggaagtctttaagcccgggaaattcgtcacaacactctttgtaaatcagagttcaaagtgcagaaccgtacttgcttccccacaaaagatcgaagggtttaaaagattggactgtcagtcagccatgtttaacgactacaacttcgttttcacatcatttgccaaaaagcagcaacagcaacagagctag

SEQ ID NO: 106067 - DNA, 918 bp, Artificial Sequence
  derived and/or modified sequence
atggaagccgcacattttttcgaagggaccgaaaaactgctcgaggtctggttcagccgccagcagcctgatgccaaccagggaagtggagatctgcgaacaataccttccgagtcctcaatgttcgtcagcaaaagacgctttattctgaagacgtgtgggacgactctgctgttaaaggcactggtgcccttgctcaaactggccagggactactcaggcttcgactccattcagtctttcttctattctcgcaaaaattttatgaaaccctcccatcagggctatcctcatcgaaactttcaagaggagattgaattcctgaatgcaatattccctaatggggcagcctattgcatgggacgaatgaactctgactgctggtatttatacaccctcgactttcccgagagccgggtgatttcacagccagaccagactcttgaaatcctcatgtccgagctggatcctgccgtgatggatcagttttatatgaaggacggcgtcactgcaaaggatgtgacgcgggaaagcggcattagggacctcatccctgggtccgtcatcgacgccactatgtttaacccatgcgggtactctatgaatgggatgaagagtgatggtacatactggactattcacatcaccccagagcccgagttctcgtacgtatcattcgagacaaatctctctcagacatcttatgacgacctcatccgaaaggtcgtggaagtatttaagcccggtaagtttgtgactactctcttcgttaaccagagctcaaaatgccgtacggtcctggcttccccccagaaaattgagggcttcaaaagattagattgccagagcgcaatgtttaacgattacaattttgtcttcacttcctttgcaaagaagcagcagcagcagcagtcttag

SEQ ID NO: 106068 - DNA, 918 bp, Artificial Sequence
  derived and/or modified sequence
atggaggccgcccacttcttcgagggcaccgagaagctgctggaggtgtggttcagcagacagcagcccgacgccaaccagggcagcggcgacctgagaaccatccccagcgagagcagcatgttcgtgagcaagagaagattcatcctgaagacctgcggcaccaccctgctgctgaaggccctggtgcccctgctgaagctggccagagactacagcggcttcgacagcatccagagcttcttctacagcagaaagaacttcatgaagcccagccaccagggctacccccacagaaacttccaggaggagatcgagttcctgaacgccatcttccccaacggcgccgcctactgcatgggcagaatgaacagcgactgctggtacctgtacaccctggacttccccgagagcagagtgatcagccagcccgaccagaccctggagatcctgatgagcgagctggaccccgccgtgatggaccagttctacatgaaggacggcgtgaccgccaaggacgtgaccagagagagcggcatcagagacctgatccccggcagcgtgatcgacgccaccatgttcaacccctgcggctacagcatgaacggcatgaagagcgacggcacctactggaccatccacatcacccccgagcccgagttcagctacgtgagcttcgagaccaacctgagccagaccagctacgacgacctgatcagaaaggtggtggaggtgttcaagcccggcaagttcgtgaccaccctgttcgtgaaccagagcagcaagtgcagaaccgtgctggccagcccccagaagatcgagggcttcaagagactggactgccagagcgccatgttcaacgactacaacttcgtgttcaccagcttcgccaagaagcagcagcagcagcagagctag

SEQ ID NO: 106069 - DNA, 798 bp, Artificial Sequence
  derived and/or modified sequence
atgttcgtgtccaagcggagatttatcctcaagacctgcggtactacacttctactcaaggctctggtgcctttgctgaagctggccagggattactctgggtttgattcgatccagtcattcttctactctcgcaaaaattttatgaaaccttcccatcaggggtaccctcatcggaattttcaggaagaaatagagtttctgaacgcaatattccctaacggggctgcctactgtatgggacgtatgaattcagattgttggtacttatacacccttgacttccccgagtctcgcgtcatcagtcagcccgaccagacgctggagatactgatgagcgaactcgatccagccgtgatggatcagttttacatgaaggacggagtaaccgcgaaggatgtgaccagggagtccggcattagagacctaatacctggttcagttatcgacgctacaatgttcaatccttgtgggtatagcatgaacgggatgaaaagtgacgggacatactggacaatacatattacacccgaacctgagtttagctacgtgtccttcgaaaccaatctcagccaaacaagctacgacgacctcattcggaaggttgtggaggtgttcaagcccggaaaattcgtaaccacattgttcgttaaccagtcatctaaatgcagaaccgtgttggcatccccacagaagattgagggcttcaagcgactggattgtcaatcggctatgttcaacgattacaacttcgtgttcacatcgttcgctaaaaaacagcaacagcaacaatcgtag

SEQ ID NO: 106070 - DNA, 561 bp, Artificial Sequence
  derived and/or modified sequence
atggggcgcatgaattccgactgctggtacctctacaccctggacttcccggaatctagggtcatctcccagccggatcagaccctggagatactgatgagtgagctggaccctgctgtaatggaccagttttatatgaaagacggcgtgacagccaaagatgttactagggaatctggcataagggatctcatccccgggagtgtcattgatgccaccatgttcaacccctgcggctattctatgaatggcatgaaatcggatggcacttactggaccattcacatcacccctgagccagagtttagttacgtgagctttgagactaatctgagtcagacctcttacgacgatcttatccgtaaggtggtggaagtcttcaaaccggggaagtttgtgaccacgttgttcgtgaatcaatcaagcaaatgtcggactgtactcgcctctccacaaaaaatcgagggtttcaagaggctggactgccagtctgccatgttcaacgactataactttgtttttacgagttttgctaagaaacagcagcaacagcagagctag

SEQ ID NO: 106071 - DNA, 3121 bp, Artificial Sequence
  derived and/or modified sequence
tcacgcagcgctctcgcttacacagtatggccggcgacattagctagcgctcgctctactctctctaacgggaaagcagcggaatacaagagactgaactgtatctgcctctatttccaaaagactcacgttcaactttcgctcacacaaagccgggaaaattttattagtcctttttttaaaaaaagttaatataaaattatagcaaaaaaaaaaaggaacctgaactttagtaacacagctggaacaatccgcagcggcggcggcagcggcgggagaagaggtttaatttagttgattttctgtggttgttggttgttcgctagtctcacggtgatggaagctgcacattttttcgaagggaccgagaagctgctggaggtttggttctcccggcagcagcccgacgcaaaccaaggatctggggatcttcgcactatcccaagatggagcagcatattgtatgggacgtatgaattctgactgttggtacttatatactctggatttcccagagagtcgggtaatcagtcagccagatcaaaccttggaaattctgatgagtgagcttgacccagcagttatggaccagttctacatgaaagatggtgttactgcaaaggatgtcactcgtgagagtggaattcgtgacctgataccaggttctgtcattgatgccacaatgttcaatccttgtgggtattcgatgaatggaatgaaatcggatggaacttattggactattcacatcactccagaaccagaattttcttatgttagctttgaaacaaacttaagtcagacctcctatgatgacctgatcaggaaagttgtagaagtcttcaagccaggaaaatttgtgaccaccttgtttgttaatcagagttctaaatgtcgcacagtgcttgcttcgccccagaagattgaaggttttaagcgtcttgattgccagagtgctatgttcaatgattacaattttgtttttaccagttttgctaagaagcagcaacaacagcagagttgattaagaaaaatgaagaaaaaacgcaaaaagagaacacatgtagaaggtggtggatgctttctagatgtcgatgctgggggcagtgctttccataaccaccactgtgtagttgcagaaagccctagatgtaatgatagtgtaatcattttgaattgtatgcattattatatcaaggagttagatatcttgcatgaatgctctcttctgtgtttaggtattctctgccactcttgctgtgaaattgaagtgcatgtagaaaaaaccttttactatatgaaactttacaacacttgtgaaagcaactcaatttggtttatgcacagtgtaatatttctccaagtatcatccaaaattccccacagacaaggctttcgtcctcattaggtgttggcctcagcctaaccctctaggactgttctattaaattgctgccagaattttacatccagttacctccactttctagaacatattctttactaatgttattgaaaccaatttctacttcatactgatgtttttggaaacagcaattaaagtttttcttccatgagttgagtccttaagaaaatgattccagttactcattttgcatatttgctattttaacattattggaccctgcatttatagtcctttgatttcttccctctccctggtgtctcccccaagaccccaaataaagcaatacactgttaacactgtgggtttatatactaattctataccccagatggggaatgggggagatggtccctgggcttaatattctttaaagggcatgggaatttagcctctcttttattgtaatgtgctcttttggaaaatagttggttagcagggaagacccagagttgtagattgagattagggtgtactggctgaactgtggaaaacatacaattctgtgttcctcagtaaatgagattagcgtctaatgagtagcacccctttactaacttagtagtagtataaaatcatttttatttagttaattaccagagagatttagcataattttgttctggattcagtaaatcaagtcagcttggatcattcaccttaacttttcctttagcagccatttccactagtttccattaagtagtgttctataaactttgatccaaagcagaatcaatgtcttttccatctcgtgacttaaagttctgtgactgtgatgcatgtgagtgttccgacttcatctgttcctcttaactacggtgtttcccttaccatggcattcataggatgaaatgaatgactgcccagaatgagaatttgtccagattattcagataaacatcataaagcagaatacattataaataagtagaatatgaataaatagaataataaaattccaaaatactcaatgggaaatgactagtaatataggctttcaagagttggtaccttttagctatatttgcagattctctgggattttaaggaactgagaaaacagcaaagttgactaaattttatatttcttgtcctctaaatattttgataatttctggattgatgcagtgatgtttttgttccttccgtatttataaatgaaacacctttttttagtgtttctaaacctaaaatctacttggtttgaaatcaagtggttggaacactgtttgacttttatttgaagcatgttgttgattgaaaatttcattgaggaagttttcaatcagtgtgatcagtttgattctgtaatgagcacagcacctaatattttgaggagctctgttttgaggaccaatgcttaaggtggactttgttcgtaaacaatatcccaatagatttgttgacttgaggtctggtttggttttgtttttgttttgttttgttttgttttgtttccaatagaattaagaattctaatgttgaaaaactgcacaaatttttatgggacaaagcctagaaaagagaaatgtagtttgaatcataatctaaatcatcgtatgatagaagagggaaagttttggtgccataatttctcctttcactggtgttggacttaaatcagttgaaatgtatttctgtaccacaatttacgcttcaataaaagtttaattgtctagtgacattcagaaa

SEQ ID NO: 106072 - DNA, 798 bp, Artificial Sequence
  derived and/or modified sequence
atgtttgtgtccaagaggcgcttcatcctgaagacctgtggcaccaccctgctgctgaaggccctggtgcccctgctgaagctggcccgggactacagcggctttgacagcatccagagcttcttctacagcaggaagaacttcatgaagcccagccaccagggctacccccacaggaacttccaggaggagattgagttcctgaatgccatcttccccaacggggccgcctactgcatgggccgcatgaacagcgactgctggtacctgtacaccctggacttccctgagagcagggtcatcagccagcctgaccagaccctggagatcctgatgtctgagctggaccctgctgtgatggaccagttctacatgaaggatggagtgacagccaaggatgtgacccgggagagcggcatccgggacctgatccctggctctgtgattgatgccaccatgttcaacccctgtggctacagcatgaatggcatgaagagtgatggcacctactggaccatccacatcaccccagagcctgagttctcctatgtgtcctttgagaccaacctgagccagaccagctatgatgacctgatcaggaaggtggtggaggtgttcaagccaggcaagtttgtgaccaccctgtttgtgaaccagagcagcaagtgcaggacagtgctggccagcccccagaagattgagggcttcaagaggctggactgccagagcgccatgtttaatgactacaactttgtgttcaccagctttgccaagaagcagcagcagcagcagagctag

SEQ ID NO: 106073 - DNA, 561 bp, Artificial Sequence
  derived and/or modified sequence
atgggccgcatgaacagcgactgctggtacctgtacaccctggacttccctgagagcagggtcatcagccagcctgaccagaccctggagatcctgatgtctgagctggaccctgctgtgatggaccagttctacatgaaggatggagtgacagccaaggatgtgacccgggagagcggcatccgggacctgatccctggctctgtgattgatgccaccatgttcaacccctgtggctacagcatgaatggcatgaagagtgatggcacctactggaccatccacatcaccccagagcctgagttctcctatgtgtcctttgagaccaacctgagccagaccagctatgatgacctgatcaggaaggtggtggaggtgttcaagccaggcaagtttgtgaccaccctgtttgtgaaccagagcagcaaatgtagaacagtgctggccagcccccagaagattgagggcttcaagaggctggactgccagagcgccatgtttaatgactacaactttgtgttcaccagctttgccaagaagcagcagcagcagcagagctag

SEQ ID NO: 106074 - DNA, 798 bp, Artificial Sequence
  derived and/or modified sequence
atgttcgtgagcaagcggcggttcatcctgaagacctgcggcaccactttgctacttaaggcactggtgccgttgctgaagctcgccagggactatagtggctttgacagtatccagtccttcttctatagccggaagaacttcatgaagccctcccatcaaggctatcctcatcggaattttcaagaggagatagaatttttgaacgccattttccccaacggggcagcctattgcatgggaaggatgaatagcgactgctggtatctctatacccttgacttcccggagagtagagtgatatcccagcccgaccaaaccctggaaatcttaatgtccgagctagatcccgctgttatggaccaattctacatgaaagacggggttacagccaaggacgtgacgcgcgaatccgggatcagagatctgattcctggttcagtcattgacgccacaatgtttaatccctgcgggtattccatgaacggtatgaagagtgatggaacctactggactatccacatcactccagaaccggaattctcttatgtgtccttcgagacgaacctgtcccagacctcttacgacgatctgattcggaaggtggtcgaggttttcaagcccggcaaattcgtgacgaccctctttgtgaatcagagcagcaagtgcagaacagtgctcgcctcgccccaaaagattgaaggtttcaagaggctcgactgtcaaagtgcgatgtttaacgactacaattttgtatttactagtttcgctaagaagcaacagcagcagcaaagctag

SEQ ID NO: 106075 - DNA, 561 bp, Artificial Sequence
  derived and/or modified sequence
atgggccggatgaacagcgactgctggtacctgtacaccctggacttcccagagagccgagtcatctctcaaccggatcagacattggagattcttatgtccgagctggatccggcagtcatggaccagttttacatgaaagacggcgtaacggccaaagacgtaaccagggaatcaggcatccgggatttaattcccggaagcgtgatcgatgctactatgtttaacccttgcggttatagtatgaatggaatgaagagcgacgggacctattggacgattcacatcactcctgagccagagtttagctacgtgtcctttgaaaccaatctctcacaaacgagttatgacgatctgatccgcaaggtggttgaggtgtttaaacctggcaagttcgtcaccacactcttcgtgaatcagtcttctaagtgcagaaccgtcctggccagtcctcagaaaatagagggattcaagcgtctggattgccagtcagcaatgttcaacgactataacttcgtgttcacgtcattcgccaagaagcagcagcagcaacagagctag

SEQ ID NO: 106076 - DNA, 798 bp, Artificial Sequence
  derived and/or modified sequence
atgttcgtgtccaaaagacgcttcatcctgaagacctgtggtaccaccctgcttctgaaggcccttgtgcctctgttgaagttggccagagactacagtggtttcgactctatccagtcgtttttttacagtcgaaagaatttcatgaagccttctcatcaaggctaccctcaccggaactttcaggaggagattgaatttctgaacgccatattcccaaacggtgccgcttactgcatggggaggatgaactcagactgttggtatctatacactctggattttcccgagagccgtgttatctcccagcccgaccagaccttggaaatccttatgtcagagttagaccctgccgtgatggaccagttctatatgaaagatggagttactgctaaggatgtgacacgagaaagtggcatcagagatctcatccctggaagtgtaatcgatgccaccatgttcaatccctgtggctactctatgaacgggatgaaaagtgatggaacctactggactatacacattacccctgaaccagaattttcttacgtgtcgttcgagaccaatctgtcccaaactagctacgatgatcttatcagaaaagttgtcgaggtgttcaagcccggtaagttcgtcaccactctgttcgtgaatcagagctccaaatgtagaaccgtgctcgcctccccccaaaaaatcgaagggtttaaacggttggactgccagtcagccatgtttaacgactacaatttcgtattcaccagtttcgccaagaagcaacaacagcagcagagttag

SEQ ID NO: 106077 - DNA, 561 bp, Artificial Sequence
  derived and/or modified sequence
atgggcaggatgaactctgactgctggtatctgtacacattagacttccccgaatcacgggttattagccagccagatcagacactggaaattctgatgagtgaactggaccccgctgtgatggaccaattctacatgaaagatggtgtaactgcaaaggatgtcacaagagagtcaggaattcgggatctcatccccggtagcgttattgacgcaactatgtttaatccttgcggatatagcatgaatggcatgaagtccgacggcacatactggacaatacacattactcccgaaccagaattttcgtacgttagctttgaaactaatttgtcccagaccagttatgatgatctcatccggaaagtcgtcgaggtctttaagcccggaaagttcgtgaccacactgtttgtgaaccaaagcagcaagtgcagaaccgtactggccagccctcagaaaatcgaagggtttaagcgactggactgccagagcgcgatgtttaacgattataactttgtcttcacaagctttgccaagaaacaacaacaacagcagagttag

SEQ ID NO: 106078 - DNA, 798 bp, Artificial Sequence
  derived and/or modified sequence
atgttcgtgagcaagagaagattcatcctgaagacctgcggcaccaccctgctgctgaaggccctggtgcccctgctgaagctggccagagactacagcggcttcgacagcatccagagcttcttctacagcagaaagaacttcatgaagcccagccaccagggctacccccacagaaacttccaggaggagatcgagttcctgaacgccatcttccccaacggcgccgcctactgcatgggcagaatgaacagcgactgctggtacctgtacaccctggacttccccgagagcagagtgatcagccagcccgaccagaccctggagatcctgatgagcgagctggaccccgccgtgatggaccagttctacatgaaggacggcgtgaccgccaaggacgtgaccagagagagcggcatcagagacctgatccccggcagcgtgatcgacgccaccatgttcaacccctgcggctacagcatgaacggcatgaagagcgacggcacctactggaccatccacatcacccccgagcccgagttcagctacgtgagcttcgagaccaacctgagccagaccagctacgacgacctgatcagaaaggtggtggaggtgttcaagcccggcaagttcgtgaccaccctgttcgtgaaccagagcagcaagtgcagaaccgtgctggccagcccccagaagatcgagggcttcaagagactggactgccagagcgccatgttcaacgactacaacttcgtgttcaccagcttcgccaagaagcagcagcagcagcagagctag

SEQ ID NO: 106079 - DNA, 561 bp, Artificial Sequence
  derived and/or modified sequence
atgggcagaatgaacagcgactgctggtacctgtacaccctggacttccccgagagcagagtgatcagccagcccgaccagaccctggagatcctgatgagcgagctggaccccgccgtgatggaccagttctacatgaaggacggcgtgaccgccaaggacgtgaccagagagagcggcatcagagacctgatccccggcagcgtgatcgacgccaccatgttcaacccctgcggctacagcatgaacggcatgaagagcgacggcacctactggaccatccacatcacccccgagcccgagttcagctacgtgagcttcgagaccaacctgagccagaccagctacgacgacctgatcagaaaggtggtggaggtgttcaagcccggcaagttcgtgaccaccctgttcgtgaaccagagcagcaagtgcagaaccgtgctggccagcccccagaagatcgagggcttcaagagactggactgccagagcgccatgttcaacgactacaacttcgtgttcaccagcttcgccaagaagcagcagcagcagcagagctag

SEQ ID NO: 106080 - protein, 214 aa, Artificial Sequence
  derived and/or modified sequence
MEAAHFFEGTEKLLEVWFSRQQPDANQGSGDLRTIPRYLYTLDFPESRVISQPDQTLEILMSELDPAVMDQFYMKDGVTAKDVTRESGIRDLIPGSVIDATMFNPCGYSMNGMKSDGTYWTIHITPEPEFSYVSFETNLSQTSYDDLIRKVVEVFKPGKFVTTLFVNQSSKCRTVLASPQKIEGFKRLDCQSAMFNDYNFVFTSFAKKQQQQQS

SEQ ID NO: 106081 - DNA, 645 bp, Artificial Sequence
  derived and/or modified sequence
atggaagcagctcacttctttgagggaactgaaaagttactcgaagtttggttttcgcgccagcaacccgatgcaaatcagggttcaggagacttacgcacaattcctagatatttatacactctggatttcccagaaagccgcgtcatcagccagccagatcaaacgcttgaaatcctgatgtccgagctcgatcctgccgttatggaccagttttatatgaaagacggagtgacagccaaggacgtgacaagagaaagtgggatccgagacctgattcccgggtccgttatagatgcaaccatgtttaacccctgtgggtattccatgaacggaatgaagagcgatggcacatattggactatacacattacccctgaaccagaattctcatatgtgtccttcgaaaccaacctcagtcaaacaagctacgatgatttgattagaaaagtggtggaagtctttaaaccgggtaagttcgtaacgaccctgttcgttaatcagtcttcaaaatgccgtacggtcctggctagccctcaaaaaatcgagggctttaagaggctggactgccagtctgccatgttcaatgactataattttgttttcacatcttttgctaaaaagcagcagcagcagcagtcctag

SEQ ID NO: 106082 - DNA, 1181 bp, Artificial Sequence
  derived and/or modified sequence
cgcttacacagtatggccggcgacattagctagcgctcgctctactctctctaacgggaaagcagcggaatacaagagactgaactgtatctgcctctatttccaaaagactcacgttcaactttcgctcacacaaagccgggaaaattttattagtcctttttttaaaaaaagttaatataaaattatagcaaaaaaaaaaaggaacctgaactttagtaacacagctggaacaatccgcagcggcggcggcagcggcgggagaagaggtttaatttagttgattttctgtggttgttggttgttcgctagtctcacggtgatggaagctgcacattttttcgaagggaccgagaagctgctggaggtttggttctcccggcagcagcccgacgcaaaccaaggatctggggatcttcgcactatcccaaggtacttatatactctggatttcccagagagtcgggtaatcagtcagccagatcaaaccttggaaattctgatgagtgagcttgacccagcagttatggaccagttctacatgaaagatggtgttactgcaaaggatgtcactcgtgagagtggaattcgtgacctgataccaggttctgtcattgatgccacaatgttcaatccttgtgggtattcgatgaatggaatgaaatcggatggaacttattggactattcacatcactccagaaccagaattttcttatgttagctttgaaacaaacttaagtcagacctcctatgatgacctgatcaggaaagttgtagaagtcttcaagccaggaaaatttgtgaccaccttgtttgttaatcagagttctaaatgtcgcacagtgcttgcttcgccccagaagattgaaggttttaagcgtcttgattgccagagtgctatgttcaatgattacaattttgtttttaccagttttgctaagaagcagcaacaacagcagagttgattaagaaaaatgaagaaaaaacgcaaaaagagaacacatgtagaaggtggtggatgctttctagatgtcgatgctgggggcagtgctttccataaccaccactgtgtagttgcagaaagccctagatgtaatgatagtgtaatcattttgaattgtatgcattattatatcaaggagttagatatcttgcatgaatgctctcttctgtgtttag

SEQ ID NO: 106083 - DNA, 645 bp, Artificial Sequence
  derived and/or modified sequence
atggaggccgcccacttctttgagggcacagagaagctgctggaggtgtggttcagccggcagcagccagatgccaaccagggcagcggggacctgcggaccatcccccgctacctgtacaccctggacttccctgagagcagggtcatcagccagcctgaccagaccctggagatcctgatgtctgagctggaccctgctgtgatggaccagttctacatgaaggatggagtgacagccaaggatgtgacccgggagagcggcatccgggacctgatccctggctctgtgattgatgccaccatgttcaacccctgtggctacagcatgaatggcatgaagagtgatggcacctactggaccatccacatcaccccagagcctgagttctcctatgtgtcctttgagaccaacctgagccagaccagctatgatgacctgatcaggaaggtggtggaggtgttcaagccaggcaagtttgtgaccaccctgtttgtgaaccagagcagcaaatgtagaacagtgctggccagcccccagaagattgagggcttcaagaggctggactgccagagcgccatgtttaatgactacaactttgtgttcaccagctttgccaagaagcagcagcagcagcagagctag

SEQ ID NO: 106084 - DNA, 645 bp, Artificial Sequence
  derived and/or modified sequence
atggaggccgcccacttcttcgagggcaccgagaagctgctggaggtatggttttctaggcagcagccagacgcgaaccagggctcaggtgacctccgtacaatccctcggtacctttacactctcgattttcctgagagtcgggttatttcccagcctgaccagaccctggagatcctgatgtccgagctagaccctgccgtgatggaccagttctatatgaaagatggggtgactgcaaaagatgtgaccagggaatctggaatcagggatttgatcccaggtagtgtgatcgacgctactatgttcaacccgtgtggctatagcatgaatggtatgaagtcggacggcacgtactggaccatacacattacccccgaacctgaattttcttatgtatccttcgaaacgaacctgtctcaaacttcatacgatgatctcatcagaaaagtcgtcgaggtgttcaagcccggaaaattcgtgacaaccctcttcgtgaatcagtcaagcaagtgccggaccgtactagccagtcctcaaaagatcgaggggttcaagagactcgactgtcagagtgcgatgttcaacgactataacttcgtgttcaccagctttgccaagaaacagcagcagcagcagagctag

SEQ ID NO: 106085 - DNA, 645 bp, Artificial Sequence
  derived and/or modified sequence
atggaggccgctcatttctttgaggggactgaaaagctgctggaggtctggttcagtcggcagcagccagacgctaaccagggttcaggcgacttgcgcaccatcccaagatacctgtacacactcgatttcccagaatccagagtgatttctcaacccgatcagaccctagagattctgatgtcggaactagatcccgctgtaatggaccagttctacatgaaggatggcgtcactgccaaggatgtgaccagggaaagtggtatccgggatctgattcctggctcagtgatcgatgccaccatgttcaatccctgtggttattctatgaacggcatgaagtcagatggcacttattggaccatacacatcactcctgagccagaattttcttacgtgtcttttgaaactaacctaagccagacttcctacgatgacctgattcggaaggtggtggaagtctttaaacctggaaagtttgtgaccaccctatttgtcaatcaaagctccaaatgccgaacagtgcttgctagcccacagaagattgagggcttcaagcggctggattgccaatcagcgatgtttaacgattataatttcgtgtttacctccttcgccaaaaagcagcagcaacagcagagttag

SEQ ID NO: 106086 - DNA, 645 bp, Artificial Sequence
  derived and/or modified sequence
atggaggccgcccacttcttcgagggcaccgagaagctgctggaggtgtggttcagcagacagcagcccgacgccaaccagggcagcggcgacctgagaaccatccccagatacctgtacaccctggacttccccgagagcagagtgatcagccagcccgaccagaccctggagatcctgatgagcgagctggaccccgccgtgatggaccagttctacatgaaggacggcgtgaccgccaaggacgtgaccagagagagcggcatcagagacctgatccccggcagcgtgatcgacgccaccatgttcaacccctgcggctacagcatgaacggcatgaagagcgacggcacctactggaccatccacatcacccccgagcccgagttcagctacgtgagcttcgagaccaacctgagccagaccagctacgacgacctgatcagaaaggtggtggaggtgttcaagcccggcaagttcgtgaccaccctgttcgtgaaccagagcagcaagtgcagaaccgtgctggccagcccccagaagatcgagggcttcaagagactggactgccagagcgccatgttcaacgactacaacttcgtgttcaccagcttcgccaagaagcagcagcagcagcagagctag

SEQ ID NO: 106087 - protein, 267 aa, Artificial Sequence
  derived and/or modified sequence
MVKISFQPAVAGIKGDKADKASASAPAPASATEILLTPAREEQPPQHRSKRGGSVGGVCYLSMGMVVLLMGLVFASVYIYRYFFLAQLARDNFFRCGVLYEDSLSSQVRTQMELEEDVKIYLDENYERINVPVPQFGGGDPADIIHDFQRGLTAYHDISLDKCYVIELNTTIVLPPRNFWELLMNVKRGTYLPQTYIIQEEMVVTEHVSDKEALGSFIYHLCNGKDTYRLRRRATRRRINKRGAKNCNAIRHFENTFVVETLICGVV

SEQ ID NO: 106088 - protein, 180 aa, Artificial Sequence
  derived and/or modified sequence
MVKISFQPAVAGIKGDKADKASASAPAPASATEILLTPAREEQPPQHRSKRGGSVGGVCYLSMGMVVLLMGLVFASVYIYRYFFLAQLARDNFFRCGVLYEDSLSSQVRTQMELEEDVKIYLDENYERINVPVPQFGGGDPADIIHDFQRGLTAYHDISLDKCYVIELNTTIVLPPRNFW

SEQ ID NO: 106089 - DNA, 804 bp, Artificial Sequence
  derived and/or modified sequence
atggttaaaatctcattccaaccagccgtggcggggatcaaaggtgataaggccgacaaggccagtgcttcggcgccggcacctgcctccgccacagagatcctgttaacccccgcacgagaggagcagccccctcaacacaggagtaagcggggcggctccgtcggcggcgtgtgctacctgtctatggggatggtcgtgctgttaatgggactggtcttcgcatccgtctatatatatcggtacttcttcctcgcacagctcgcaagggataattttttccggtgtggggtgctgtatgaagattccctaagttcccaagtgaggacccaaatggaactagaggaagatgtcaaaatatacctggacgagaattatgagaggatcaatgtccccgtccctcaatttgggggaggcgaccccgccgatattatacacgatttccagcgagggttaaccgcctatcacgacataagcctagacaagtgttacgtgattgaacttaacaccactatcgtgctgccaccgaggaatttctgggaactgcttatgaatgtgaaaagggggacatacttgcctcagacttacattattcaggaggaaatggtggtcactgaacatgttagcgacaaagaagccctagggtcctttatttatcacctatgtaacggcaaggatacatacagattgaggcgacgggctacacggaggcgcatcaataaacggggagccaagaactgcaatgcaattagacactttgagaacacatttgtggtggagacactcatctgtggcgtggtgtag

SEQ ID NO: 106090 - DNA, 543 bp, Artificial Sequence
  derived and/or modified sequence
atggtgaagatcagtttccagcctgccgtggcaggaattaagggagacaaggccgacaaggcatctgcctcagccccggcacctgcaagtgccacggagatccttttaacgcctgcccgtgaagaacaaccgccccagcacagatccaagagaggtggctccgtgggtggcgtctgctatctcagcatgggtatggttgttctcctgatgggactggtctttgccagcgtctacatatatcgttacttctttctcgctcagctggctagggacaacttttttcgctgcggagtcctgtacgaggactcactatctagccaggtgcgtacacaaatggagctcgaagaggacgtgaagatctacctggatgaaaactacgagaggatcaatgtgcctgtcccccagttcggtgggggcgatccagctgacatcattcatgacttccagcgtggcctgacggcttatcatgacatctccctggataagtgttatgtgatcgaattgaatacaacgatcgttctgccccctcggaatttttggtag

SEQ ID NO: 106091 - DNA, 2078 bp, Artificial Sequence
  derived and/or modified sequence
ggggttagagagagggacgcgagcgggatccaaacttccggtgcctgcagagctcggagcggcggaggcagagaccgaggctgcaccggcagaggctgcggggcggacgcgcgggccggcgcagccatggtgaagattagcttccagcccgccgtggctggcatcaagggcgacaaggctgacaaggcgtcggcgtcggcccctgcgccggcctcggccaccgagatcctgctgacgccggctagggaggagcagcccccacaacatcgatccaagagggggggctcagtgggcggcgtgtgctacctgtcgatgggcatggtcgtgctgctcatgggcctcgtgttcgcctctgtctacatctacagatacttcttccttgcgcagctggcccgagataacttcttccgctgtggtgtgctgtatgaggactccctgtcctcccaggtccggactcagatggagctggaagaggatgtgaaaatctacctcgacgagaactacgagcgcatcaacgtgcctgtgccccagtttggcggcggtgaccctgcagacatcatccatgacttccagcggggtctgactgcgtaccatgatatctccctggacaagtgctatgtcatcgaactcaacaccaccattgtgctgccccctcgcaacttctgggagctcctcatgaacgtgaagagggggacctacctgccgcagacgtacatcatccaggaggagatggtggtcacggagcatgtcagtgacaaggaggccctggggtccttcatctaccacctgtgcaacgggaaagacacctaccggctccggcgccgggcaacgcggaggcggatcaacaagcgtggggccaagaactgcaatgccatccgccacttcgagaacaccttcgtggtggagacgctcatctgcggggtggtgtgaggccctcctcccccagaaccccctgccgtgttcctcttttcttctttccggctgctctctggccctcctccttccccctgcttagcttgtactttggacgcgtttctatagaggtgacatgtctctccattcctctccaaccctgcccacctccctgtaccagagctgtgatctctcggtggggggcccatctctgctgacctgggtgtggcggagggagaggcgatgctgcaaagtgttttctgtgtcccactgtcttgaagctgggcctgccaaagcctgggcccacagctgcaccggcagcccaaggggaaggaccggttgggggagccgggcatgtgaggccctgggcaaggggatggggctgtgggggcggggcggcatgggcttcagaagtatctgcacaattagaaaagtcctcagaagctttttcttggagggtacactttcttcactgtccctattcctagacctggggcttgagctgaggatgggacgatgtgcccagggagggacccaccagagcacaagagaaggtggctacctgggggtgtcccagggactctgtcagtgccttcagcccaccagcaggagcttggagtttggggagtggggatgagtccgtcaagcacaactgttctctgagtggaaccaaagaagcaaggagctaggacccccagtcctgccccccaggagcacaagcagggtcccctcagtcaaggcagtgggatgggcggctgaggaacggggcaggcaaggtcactgctcagtcacgtccacgggggacgagccgtgggttctgctgagtaggtggagctcattgctttctccaagcttggaactgttttgaaagataacacagagggaaagggagagccacctggtacttgtccaccctgcctcctctgttctgaaattccatccccctcagcttaggggaatgcacctttttccctttccttctcacttttgcatgtttttactgatcattcgatatgctaaccgttctcagccctgagccttggagaggagggctgtaacgccttcagtcagtctctggggatgaaactcttaaatgctttgtatattttctcaattagatctcttttcagaagtgtctatagaacaataaaaatcttttacttctg

SEQ ID NO: 106092 - DNA, 763 bp, Artificial Sequence
  derived and/or modified sequence
agggaatgcgaagggattatgctacggagaacggatccgagcgtgacggctgaatgaatgagtgagcgagtgagtgagtgagtgagtgagcgagcgagtgagtgactgtgcgagcgagcggcagaaggaactccgacccgccccagagctcggagcggcggaggcagagaccgaggctgcaccggcagaggctgcggggcggacgcgcgggccggcgcagccatggtgaagattagcttccagcccgccgtggctggcatcaagggcgacaaggctgacaaggcgtcggcgtcggcccctgcgccggcctcggccaccgagatcctgctgacgccggctagggaggagcagcccccacaacatcgatccaagagggggggctcagtgggcggcgtgtgctacctgtcgatgggcatggtcgtgctgctcatgggcctcgtgttcgcctctgtctacatctacagatacttcttccttgcgcagctggcccgagataacttcttccgctgtggtgtgctgtatgaggactccctgtcctcccaggtccggactcagatggagctggaagaggatgtgaaaatctacctcgacgagaactacgagcgcatcaacgtgcctgtgccccagtttggcggcggtgaccctgcagacatcatccatgacttccagcggggtctgactgcgtaccatgatatctccctggacaagtgctatgtcatcgaactcaacaccaccattgtgctgccccctcgcaacttctggg

SEQ ID NO: 106093 - DNA, 804 bp, Artificial Sequence
  derived and/or modified sequence
atggtgaagatctccttccagcctgctgtggccggcatcaagggggacaaggctgacaaggccagcgccagcgccccagccccagccagcgccacagagatcctgctgaccccagcccgggaggagcagcccccccagcacaggagcaagaggggcggctctgtgggcggcgtgtgctacctgtccatgggcatggtggtgctgctgatgggcctggtgtttgcctctgtgtacatctaccgctacttcttcctggcccagctggcccgggacaacttcttccgctgtggggtgctgtatgaggacagcctgagcagccaggtgaggacccagatggagctggaggaggatgtgaagatctacctggatgagaactatgaaagaatcaacgtgcctgtgccccagtttggaggaggagaccctgctgacatcatccatgacttccagaggggcctgacagcctaccatgacatcagcctggacaagtgctacgtgattgagctgaacaccaccatcgtgctgcccccaagaaacttctgggagctgctgatgaatgtgaagaggggcacctacctgccccagacctacatcatccaggaggagatggtggtgacagaacatgtgtctgacaaggaggccctgggcagcttcatctaccacctgtgcaatggcaaggacacctaccgcctgcggcggcgggccacccggcggcgcatcaacaagagaggagccaagaactgcaatgccatccgccactttgagaacacctttgtggtggagaccctcatctgtggggtggtgtag

SEQ ID NO: 106094 - DNA, 543 bp, Artificial Sequence
  derived and/or modified sequence
atggtgaagatctccttccagcctgctgtggccggcatcaagggggacaaggctgacaaggccagcgccagcgccccagccccagccagcgccacagagatcctgctgaccccagcccgggaggagcagcccccccagcacaggagcaagaggggcggctctgtgggcggcgtgtgctacctgtccatgggcatggtggtgctgctgatgggcctggtgtttgcctctgtgtacatctaccgctacttcttcctggcccagctggcccgggacaacttcttccgctgtggggtgctgtatgaggacagcctgagcagccaggtgaggacccagatggagctggaggaggatgtgaagatctacctggatgagaactatgaaagaatcaacgtgcctgtgccccagtttggaggaggagaccctgctgacatcatccatgacttccagaggggcctgacagcctaccatgacatcagcctggacaagtgctacgtgattgagctgaacaccaccatcgtgctgcccccaagaaacttctggtag

SEQ ID NO: 106095 - DNA, 804 bp, Artificial Sequence
  derived and/or modified sequence
atggtgaagatcagcttccagcccgccgtggccggcatcaagggcgataaggccgacaaggcatcagccagcgcccccgcacccgccagtgcgactgagatcctgctgacccccgcccgtgaagagcaacctccccaacatcgcagcaaacgcgggggaagcgtagggggtgtgtgctatctgtcaatgggcatggtagtattattgatgggccttgtctttgctagtgtgtatatctaccgctacttttttctggcacagcttgctcgtgataacttcttccggtgtggcgtgctgtacgaggacagtttaagctctcaagttcgaactcagatggagctggaggaggacgtcaagatttacctggatgaaaattatgaacgaattaacgtgccagtcccacagtttgggggaggcgacccagctgacattatacacgacttccagagaggactcacagcttaccacgacatttctctggacaagtgctatgtcatcgagctgaacaccacgatcgttttgccgccacgcaacttttgggagcttcttatgaacgtgaaaagaggcacctatttgcctcagacatatattatccaagaggagatggtcgtcacagaacatgtgtccgacaaagaggcactaggtagttttatctaccacttatgcaacggcaaagatacttacagactgaggcggcgagcaacacggagaagaattaacaaacgaggcgctaaaaactgcaatgccatccggcatttcgaaaacacgttcgtcgtggagaccctgatctgcggcgtggtatag

SEQ ID NO: 106096 - DNA, 543 bp, Artificial Sequence
  derived and/or modified sequence
atggtgaagatcagcttccagcccgccgtggccggcatcaagggcgataaagcggataaggcctcagcttccgccccggcacctgcaagcgccacggaaatccttttaactccagcgcgagaggagcagcccccccagcacaggtccaaacggggagggtctgtgggcggtgtgtgttacctgtctatgggcatggtggtattgctgatggggttggtgtttgcaagtgtctatatatatcggtacttcttcctggcccaattagctagagacaacttctttaggtgtggtgtcctctacgaggactccctgtccagtcaagtgaggacccagatggaactggaagaggacgtcaagatttatctggatgagaactatgagaggatcaatgtgcctgtgccgcaatttggcggcggagatcctgccgatataatccatgatttccagcgaggattgactgcttaccacgacatctccctggataagtgctacgtgattgaattgaatactacgattgtgctgccaccaagaaatttctggtag

SEQ ID NO: 106097 - DNA, 804 bp, Artificial Sequence
  derived and/or modified sequence
atggtgaagatttcctttcagccagccgtggcaggaatcaaaggggacaaggcggataaagccagcgcatccgctccagcacctgcctcagctacggaaattctcctgacccctgccagagaggaacaaccaccccagcacagaagtaaacggggaggatccgtcggcggagtgtgctacctctccatgggcatggtggtcttacttatggggctggtgtttgcttcagtgtatatttacaggtatttctttctcgcacagctggccagggataattttttcaggtgtggggtcttgtatgaggatagcctatcctcccaggtacggacccagatggaacttgaggaggacgtcaagatttatctggacgagaattacgagcgaattaacgtgccagtgccccagttcgggggaggcgatccagccgatataattcatgattttcagcggggtctgacagcttaccacgacataagcctggataagtgttatgtcatagagctgaatactaccattgtcctgcccccacggaatttttgggaactcctgatgaatgtgaagcggggtacatatcttcctcagacatacattatccaagaggagatggttgtgaccgagcatgtgagtgacaaagaggcactgggctcctttatctaccatttgtgtaatggcaaggatacatatcggctaaggcgcagagcaactcgaagaagaattaataagaggggagctaaaaactgtaatgccattcggcactttgaaaacacattcgttgtggaaacgctcatttgtggcgtcgtctag

SEQ ID NO: 106098 - DNA, 543 bp, Artificial Sequence
  derived and/or modified sequence
atggttaagatttcttttcagcctgctgtcgcgggtatcaagggagacaaagcggacaaggcttcagcttctgctccggctcccgcttcggcaactgaaatcttactgaccccagcgagagaagagcaaccccctcagcataggtcaaaacgtgggggaagcgtaggcggagtgtgctacctttctatgggcatggtggttctgctgatgggcctggtcttcgcttctgtctatatttaccgatatttctttctggcacagctcgcgcgagataactttttcaggtgcggcgtgttgtacgaggattcactcagctcacaagtgcgcacccagatggagcttgaggaggatgttaagatctaccttgatgagaactacgaaaggatcaatgtacctgtgccccagtttggcggaggagacccggctgatatcatacatgactttcagcggggactcacggcttaccacgacatatctctggacaagtgttacgttatagaactgaatactacaatcgtcttgccgcctcgtaacttctggtag

SEQ ID NO: 106099 - DNA, 804 bp, Artificial Sequence
  derived and/or modified sequence
atggtgaagatcagcttccagcccgccgtggccggcatcaagggcgacaaggccgacaaggccagcgccagcgcccccgcccccgccagcgccaccgagatcctgctgacccccgccagagaggagcagcccccccagcacagaagcaagagaggcggcagcgtgggcggcgtgtgctacctgagcatgggcatggtggtgctgctgatgggcctggtgttcgccagcgtgtacatctacagatacttcttcctggcccagctggccagagacaacttcttcagatgcggcgtgctgtacgaggacagcctgagcagccaggtgagaacccagatggagctggaggaggacgtgaagatctacctggacgagaactacgagagaatcaacgtgcccgtgccccagttcggcggcggcgaccccgccgacatcatccacgacttccagagaggcctgaccgcctaccacgacatcagcctggacaagtgctacgtgatcgagctgaacaccaccatcgtgctgccccccagaaacttctgggagctgctgatgaacgtgaagagaggcacctacctgccccagacctacatcatccaggaggagatggtggtgaccgagcacgtgagcgacaaggaggccctgggcagcttcatctaccacctgtgcaacggcaaggacacctacagactgagaagaagagccaccagaagaagaatcaacaagagaggcgccaagaactgcaacgccatcagacacttcgagaacaccttcgtggtggagaccctgatctgcggcgtggtgtag

SEQ ID NO: 106100 - DNA, 543 bp, Artificial Sequence
  derived and/or modified sequence
atggtgaagatcagcttccagcccgccgtggccggcatcaagggcgacaaggccgacaaggccagcgccagcgcccccgcccccgccagcgccaccgagatcctgctgacccccgccagagaggagcagcccccccagcacagaagcaagagaggcggcagcgtgggcggcgtgtgctacctgagcatgggcatggtggtgctgctgatgggcctggtgttcgccagcgtgtacatctacagatacttcttcctggcccagctggccagagacaacttcttcagatgcggcgtgctgtacgaggacagcctgagcagccaggtgagaacccagatggagctggaggaggacgtgaagatctacctggacgagaactacgagagaatcaacgtgcccgtgccccagttcggcggcggcgaccccgccgacatcatccacgacttccagagaggcctgaccgcctaccacgacatcagcctggacaagtgctacgtgatcgagctgaacaccaccatcgtgctgccccccagaaacttctggtag

SEQ ID NO: 106101 - DNA, 3883 bp, Artificial Sequence
  derived and/or modified sequence
ccggctccgcagcggcagcgggacgctgtgccaggggcgctttgcacagcactcggcacgcacggagcagggctcgcgcccaggggctgccccaggatggcagtgaagtgcggggaactcagagagacaccgtgaccccaggctgagcccaaggcgcgccactcctcccggaggcgacatggggcacccggtgtaccgcggcgagaagccccagctgcactacgcgggtgatttcacctggaacagcatgtcaggccgcagtgtacggctgaggtcagtccccatccagagtctctcagagctggagagggcccggctgcaggaagtggctttttatcagttgcaacaggactgtgacctgagctgtcagatcaccattcccaaagatggacaaaagagaaagaaatctttaagaaagaaactggattcactaggaaaggagaaaaacaaagacaaagaattcatcccacaggcatttggaatgcccttatcccaagtcattgcgaatgacagggcctataaactcaagcaggacttgcagagggacgagcagaaagatgcatctgactttgtggcttccctcctcccatttggaaataaaagacaaaacaaagaactctcaagcagtaactcatctctcagctcaacctcagaaacaccgaatgagtcaacgtccccaaacaccccggaaccggctcctcgggctaggaggaggggtgccatgtcagtggattctatcaccgatcttgatgacaatcagtctcgactactagaagctttacaactttccttgcctgctgaggctcaaagtaaaaaggaaaaagccagagataagaaactcagtctgaatcctatttacagacaggtccctaggctggtggacagctgctgtcagcacctagaaaaacatggcctccagacagtggggatattccgagttggaagctcaaaaaagagagtgagacaattacgtgaggaatttgaccgtgggattgatgtctctctggaggaggagcacagtgttcatgatgtggcagccttgctgaaagagttcctgagggacatgccagacccccttctcaccagggagctgtacacagctttcatcaacactctcttgttggagccggaggaacagctgggcaccttgcagctcctcatataccttctacctccctgcaactgcgacaccctccaccgcctgctacagttcctctccatcgtggccaggcatgccgatgacaacatcagcaaagatgggcaagaggtcactgggaataaaatgacatctctaaacttagccaccatatttggacccaacctgctgcacaagcagaagtcatcagacaaagaattctcagttcagagttcagcccgggctgaggagagcacggccatcatcgctgttgtgcaaaagatgattgaaaattatgaagccctgttcatggttcccccagatctccagaacgaagtgctgatcagcctgttagagaccgatcctgatgtcgtggactatttactcagaagaaaggcttcccaatcatcaagccctgacatgctgcagtcggaagtttccttttccgtgggagggaggcattcatctacagactccaacaaggcctccagcggagacatctccccttatgacaacaactccccagtgctgtctgagcgctccctgctggctatgcaagaggacgcggccccggggggctcggagaagctttacagagtgccagggcagtttatgctggtgggccacttgtcgtcgtcaaagtcaagggaaagttctcctggaccaaggcttgggaaagatctgtcagaggagcctttcgatatctggggaacttggcattcaacattaaaaagcggatccaaagacccaggaatgacaggttcctctggagacatttttgaaagcagctccctaagagcggggccctgctccctttctcaagggaacctgtccccaaattggcctcggtggcaggggagccccgcagagctggacagcgacacgcagggggctcggaggactcaggccgcagcccccgcgacggagggcagggcccaccctgcggtgtcgcgcgcctgcagcacgccccacgtccaggtggcagggaaagccgagcggcccacggccaggtcggagcagtacttgaccctgagcggcgcccacgacctcagcgagagtgagctggatgtggccgggctgcagagccgggccacacctcagtgccaaagaccccatgggagtgggagggatgacaagcggcccccgcctccatacccgggcccagggaagcccgcggcagcggcagcctggatccaggggcccccggaaggcgtggagacacccacggaccagggaggccaagcagccgagcgagagcagcaggtcacgcagaaaaaactgagcagcgccaactccctgccagcgggcgagcaggacagtccgcgcctgggggacgctggctggctcgactggcagagagagcgctggcagatctgggagctcctgtcgaccgacaaccccgatgccctgcccgagacgctggtctgagcccgcacccagccgagccccccctgccccgagccccccgccctccagcccaggggggaccgtgggtggtggccactggcacacttagtgttcttctttcacacttctcaaaagtgacacaagagaaatccagttcacctacagaggtagagcactcacgcccccgccattgagaataaggttccattgcgtagccagccttaggaaaaacaaacagaacccaaaccagatggcaatgtccaatctaaaaacgtccctcttggctctataatataagatacaactcttgcttggtatagcctaaccgtatttatgtgtcttcggttttgactattgtgtattctgtaacagattatgtataatcatatatgatatattcacaaagagaaaacaaaaggaacttttaaaaaaaaaatcacttcacttatattaagcaatgagatatactaaacaatgagattctatagaatgttctagaatgtgcacaagcgggtttctgtgcttttgccatagctttataactggggataacccttccttcgataccaaacactaacaagaggaagcagaatatgagaagccatatttttacataggagtcagatacaaaaagaaaaatcactgaatgcttttagatattgaatacgttttcaggaaaatgctaaatctgatagattacgaaatatatttttagaacttgtttagaaaggattcagttaaccaaacaagaaaaaggcagtgcctcacaaagaaattaagaagttgtccgtcccacgttacatcaaattcagttttatataggccatatataatatatatttataatgtataatttttatgtatttttcaaaactacaaactggaatccaactataaagtgtttaagaatctacacagaatattcaaattatagaacatgttttttccctttgccccataatcagtatttgccaaattacatgcaattccttaaaaactaaatcacatttggtaaaaggcctacagctttgtacttacattgtgccaaaggctgaggaaatgttttctttcgtaattttatgtgtattgtaaaatgttctaccgtactttagtagtttgaagtttttcaagtgcataactatttttgaccagcagatggcgatacgcttcagtattttatgcaattttttttcacttctgaagggaaagtgtattataaaaaaagattttttttttttttataaaacatgctactcttaattttcatgttggtgatgaaattcccagtggtgtttcttaaggttctatcttgtgccatgatgaataaaaagttaagcaaag

SEQ ID NO: 106102 - protein, 218 aa, Artificial Sequence
  derived and/or modified sequence
MTMYKSKRRHQRYINMAGEPKPYRPKPGNKRPLSALYRLESKEPFLSVGGYVFDYDYYRDDFYNRLFDYHGRVPPPPRAVIPLKRPRVAVTTTRRGKGVFSMKGGSRSTASGSTGSKLKSDELQTIKKELTQIKTKIDSLLGRLEKIEKQQKAEAEAQKKQLEESLVLIQEECVSEIADHSTEEPAEGGPDADGEEMTDGIEEDFDEDGGHELFLQIK

SEQ ID NO: 106103 - DNA, 1684 bp, Artificial Sequence
  derived and/or modified sequence
agtgagcaacagtcttactgcaaagcaggagcacaacccgtctctttgtctccgtggtcaaatcaattacttcttagaaagtctaatttttttcaaaatgaccatgtacaagagcaaacgcagacatcagagatatatcaacatggcaggagagcccaaaccatacagaccaaaacctggaaacaagaggcccctttctgcactttacagacttgaatcaaaggaacctttcctgtctgttggcggttatgtctttgactatgattactacagagatgatttctacaatcggttatttgattaccacgggcgtgtgcctccacctccccgtgcagtaattccgctgaagcgtcccagagtggcagtcacaacgactcgcagggggaaaggagtcttttccatgaaaggtggatcgagatctactgccagtgggtcaacaggttctaaattgaaatcagatgagttacagaccatcaagaaagaattaacccagatcaaaactaaaattgactccttgctagggcgcctggagaagattgagaaacagcagaaggcggaggcagaagctcagaagaagcaattggaagagagtctagtgctgatccaagaggaatgtgtgtcagagattgcagatcactctacagaggagcctgctgaaggagggccagatgccgatggagaagagatgacagatgggatagaggaggacttcgatgaagatgggggtcatgagctgtttctacagataaagtgatctgaaataacgcatgatgccacaaagcagaaaagagaaactgtgacaacccccagaaatgtgaaaggaggtttcttactggacagcagcatctttggttcaatttatataaaaacccaaataaataaaatggacagtattgctcagttttagaaattccatttcttctatgttttaagctgtacaattgtcaggtttttatggtttaaattgtaaatgtgttttcccctttgctaattatgttttttttttcagtcttaaaatgtgaaaggcatttatgaatggtaagggaaacactatatacaaatgtatatttgtaaaagctatttttatgattagcatgtttcactgttgatcatatataaagtcaggtgatattgcaattctgtatttaaagcttatttccaacaatgtcatgtaagaaaagatgcatcttatgctagtttttataatttatttataatttatagtttaaagtacttcagatcataatgataaaatacttgaaaaagttatatttctgccctgtataagcaccctttttattaataaagaatgcagatatttcagatgtgatataatagttaaagaactgttggtttgatctgtgattaagttgagcatgctccgctctactgaactaaatgatccaattattacttcagtctgggtatgagattccatggacaagtaaggactagattgccaaggaaaagactgtcttgcccttggatccaaaagtttaaattagtgcatacatcatgtcatttcacctcctgttcctaggaactctccattcccaagcattgccagtgttttccagataatcttagctgttgtcttgtgctgtggaaatggaagaaaccatcttcacagaccgtaggagaattcaacatataatttcttaataaatactgtttcttttaaaac

SEQ ID NO: 106104 - DNA, 657 bp, Artificial Sequence
  derived and/or modified sequence
atgaccatgtacaagagcaagagaagacaccagagatacatcaacatggccggcgagcccaagccctacagacccaagcccggcaacaagagacccctgagcgccctgtacagactggagagcaaggagcccttcctgagcgtgggcggctacgtgttcgactacgactactacagagacgacttctacaacagactgttcgactaccacggcagagtgccccccccccccagagccgtgatccccctgaagagacccagagtggccgtgaccaccaccagaagaggcaagggcgtgttcagcatgaagggcggcagcagaagcaccgccagcggcagcaccggcagcaagctgaagagcgacgagctgcagaccatcaagaaggagctgacccagatcaagaccaagatcgacagcctgctgggcagactggagaagatcgagaagcagcagaaggccgaggccgaggcccagaagaagcagctggaggagagcctggtgctgatccaggaggagtgcgtgagcgagatcgccgaccacagcaccgaggagcccgccgagggcggccccgacgccgacggcgaggagatgaccgacggcatcgaggaggacttcgacgaggacggcggccacgagctgttcctgcagatcaagtag

SEQ ID NO: 106105 - DNA, 657 bp, Artificial Sequence
  derived and/or modified sequence
atgacaatgtacaaatcaaaaaggcgccaccaacggtacatcaatatggctggggaacctaagccataccgccctaagcccggaaacaaacggccactctccgccctgtatcgcctagagagtaaggagccttttcttagcgtgggtggatacgtgttcgattacgactactatcgggacgatttctataatagactctttgattatcacggcagggttcctcccccgccacgcgcggtgatccccctgaaacgtccgcgggtggcagttaccacaacacggcgcggtaaaggcgtcttttcaatgaaaggcggctcgaggtcaacagcctccggatccacggggtccaaacttaagagtgacgagttgcaaacaatcaaaaaggaattgacacagatcaaaacaaaaatcgactccctcctcggtaggctcgagaaaatagaaaagcagcaaaaagcagaggctgaagcacagaaaaagcagctggaagaaagcctggtccttatccaggaggagtgcgtgtccgaaatcgctgaccacagcacagaggaacccgctgaaggtgggcccgacgctgatggagaggaaatgaccgatgggatcgaagaggattttgacgaagatggtggacacgagctgttccttcaaattaaatag

SEQ ID NO: 106106 - DNA, 657 bp, Artificial Sequence
  derived and/or modified sequence
atgaccatgtacaagagcaagaggaggcaccagcgctacatcaacatggccggggagcccaagccctaccggcccaagccaggcaacaagaggcccctgagcgccctgtaccgcctggagagcaaggagcccttcctgtctgtgggcggctacgtgtttgattatgactactacagagatgacttctacaaccggctgtttgactaccacggccgggtgcccccaccacccagggctgtgatccccctgaagaggccccgggtggccgtgaccaccacccggcggggcaaaggagtcttctccatgaagggcggcagccgcagcacagccagcggcagcacaggcagcaagctgaagagtgatgagctgcagaccatcaagaaggagctgacccagatcaagaccaagattgacagcctgctgggccgcctggagaagattgagaagcagcagaaggccgaggccgaggcccagaagaagcagctggaggagagcctggtgctgatccaggaggagtgtgtgtctgaaattgctgaccacagcacagaggagcctgctgagggcggcccagatgctgatggagaggagatgacagatggcattgaagaagattttgatgaagatggcggccacgagctgttcctgcagatcaagtag

SEQ ID NO: 106107 - DNA, 657 bp, Artificial Sequence
  derived and/or modified sequence
atgaccatgtacaagagcaagcggcggcaccagcggtacatcaacatggccggtgagcctaagccctaccgtccaaagcccgggaacaagagaccactttctgccttgtaccggctggaatccaaagagccttttctgtccgtgggaggatacgttttcgattatgattactaccgcgacgatttctataacaggctgtttgattaccacggacgagtgcctcccccacctagagcagtgatccccctcaaaagacctcgcgtggctgtaaccactaccaggcgcggaaagggcgttttctcgatgaagggtgggtctcgcagcactgcctcgggctccacaggctctaaattaaagtcagacgagttacagacaataaagaaagagctcactcagatcaagaccaagatagatagtttgttggggaggctagagaagatcgagaaacagcagaaggctgaagccgaggcccagaagaaacagttagaggagtccctggttcttatccaagaagagtgcgtgagcgagatagccgaccatagcacagaggagccagccgaaggtggccccgatgcagacggcgaagagatgacagatgggatcgaggaagattttgatgaggacggcgggcatgaactgtttctgcagataaaatag

SEQ ID NO: 106108 - DNA, 657 bp, Artificial Sequence
  derived and/or modified sequence
atgaccatgtataagtctaagcgcagacatcaaagatatatcaacatggctggggagccgaagccctacaggcccaagcctggcaacaagcgcccactttctgccctgtaccgcctggagtccaaggagccctttttgagtgtgggcggttacgtgtttgactacgattactatcgagatgacttctataatcgcctgtttgactatcacggacgggtgccacccccacccagggccgtgatacctctgaagagacctcgcgttgccgtgacaacaacaagacggggaaaaggcgtcttcagcatgaagggcggaagtcgaagcacggcctcaggaagcaccggtagtaaactgaagagcgacgagctgcagaccataaagaaggagttgactcaaatcaaaacaaaaatagactcactcctaggcagactcgaaaaaattgagaaacagcagaaagccgaggccgaggcccagaaaaaacagttggaggagagcctggtcctcatccaggaggaatgcgtctccgaaatcgccgaccacagcaccgaagagccggcagagggagggccagacgccgacggcgaggagatgaccgatggaatagaggaggacttcgacgaggatggcggacacgagctcttcctacagatcaaatag

SEQ ID NO: 106109 - protein, 1417 aa, Artificial Sequence
  derived and/or modified sequence
MAAVPQNNLQEQLERHSARTLNNKLSLSKPKFSGFTFKKKTSSDNNVSVTNVSVAKTPVLRNKDVNVTEDFSFSEPLPNTTNQQRVKDFFKNAPAGQETQRGGSKSLLPDFLQTPKEVVCTTQNTPTVKKSRDTALKKLEFSSSPDSLSTINDWDDMDDFDTSETSKSFVTPPQSHFVRVSTAQKSKKGKRNFFKAQLYTTNTVKTDLPPPSSESEQIDLTEEQKDDSEWLSSDVICIDDGPIAEVHINEDAQESDSLKTHLEDERDNSEKKKNLEEAELHSTEKVPCIEFDDDDYDTDFVPPSPEEIISASSSSSKCLSTLKDLDTSDRKEDVLSTSKDLLSKPEKMSMQELNPETSTDCDARQISLQQQLIHVMEHICKLIDTIPDDKLKLLDCGNELLQQRNIRRKLLTEVDFNKSDASLLGSLWRYRPDSLDGPMEGDSCPTGNSMKELNFSHLPSNSVSPGDCLLTTTLGKTGFSATRKNLFERPLFNTHLQKSFVSSNWAETPRLGKKNESSYFPGNVLTSTAVKDQNKHTASINDLERETQPSYDIDNFDIDDFDDDDDWEDIMHNLAASKSSTAAYQPIKEGRPIKSVSERLSSAKTDCLPVSSTAQNINFSESIQNYTDKSAQNLASRNLKHERFQSLSFPHTKEMMKIFHKKFGLHNFRTNQLEAINAALLGEDCFILMPTGGGKSLCYQLPACVSPGVTVVISPLRSLIVDQVQKLTSLDIPATYLTGDKTDSEATNIYLQLSKKDPIIKLLYVTPEKICASNRLISTLENLYERKLLARFVIDEAHCVSQWGHDFRQDYKRMNMLRQKFPSVPVMALTATANPRVQKDILTQLKILRPQVFSMSFNRHNLKYYVLPKKPKKVAFDCLEWIRKHHPYDSGIIYCLSRRECDTMADTLQRDGLAALAYHAGLSDSARDEVQQKWINQDGCQVICATIAFGMGIDKPDVRFVIHASLPKSVEGYYQESGRAGRDGEISHCLLFYTYHDVTRLKRLIMMEKDGNHHTRETHFNNLYSMVHYCENITECRRIQLLAYFGENGFNPDFCKKHPDVSCDNCCKTKDYKTRDVTDDVKSIVRFVQEHSSSQGMRNIKHVGPSGRFTMNMLVDIFLGSKSAKIQSGIFGKGSAYSRHNAERLFKKLILDKILDEDLYINANDQAIAYVMLGNKAQTVLNGNLKVDFMETENSSSVKKQKALVAKVSQREEMVKKCLGELTEVCKSLGKVFGVHYFNIFNTVTLKKLAESLSSDPEVLLQIDGVTEDKLEKYGAEVISVLQKYSEWTSPAEDSSPGISLSSSRGPGRSAAEELDEEIPVSSHYFASKTRNERKRKKMPASQRSKRRKTASSGSKAKGGSATCRKISSKTKSSSIIGSSSASHTSQATSGANSKLGIMAPPKPINRPFLKPSYAFS

SEQ ID NO: 106110 - protein, 1047 aa, Artificial Sequence
  derived and/or modified sequence
MSMQELNPETSTDCDARQISLQQQLIHVMEHICKLIDTIPDDKLKLLDCGNELLQQRNIRRKLLTEVDFNKSDASLLGSLWRYRPDSLDGPMEGDSCPTGNSMKELNFSHLPSNSVSPGDCLLTTTLGKTGFSATRKNLFERPLFNTHLQKSFVSSNWAETPRLGKKNESSYFPGNVLTSTAVKDQNKHTASINDLERETQPSYDIDNFDIDDFDDDDDWEDIMHNLAASKSSTAAYQPIKEGRPIKSVSERLSSAKTDCLPVSSTAQNINFSESIQNYTDKSAQNLASRNLKHERFQSLSFPHTKEMMKIFHKKFGLHNFRTNQLEAINAALLGEDCFILMPTGGGKSLCYQLPACVSPGVTVVISPLRSLIVDQVQKLTSLDIPATYLTGDKTDSEATNIYLQLSKKDPIIKLLYVTPEKICASNRLISTLENLYERKLLARFVIDEAHCVSQWGHDFRQDYKRMNMLRQKFPSVPVMALTATANPRVQKDILTQLKILRPQVFSMSFNRHNLKYYVLPKKPKKVAFDCLEWIRKHHPYDSGIIYCLSRRECDTMADTLQKWINQDGCQVICATIAFGMGIDKPDVRFVIHASLPKSVEGYYQESGRAGRDGEISHCLLFYTYHDVTRLKRLIMMEKDGNHHTRETHFNNLYSMVHYCENITECRRIQLLAYFGENGFNPDFCKKHPDVSCDNCCKTKDYKTRDVTDDVKSIVRFVQEHSSSQGMRNIKHVGPSGRFTMNMLVDIFLGSKSAKIQSGIFGKGSAYSRHNAERLFKKLILDKILDEDLYINANDQAIAYVMLGNKAQTVLNGNLKVDFMETENSSSVKKQKALVAKVSQREEMVKKCLGELTEVCKSLGKVFGVHYFNIFNTVTLKKLAESLSSDPEVLLQIDGVTEDKLEKYGAEVISVLQKYSEWTSPAEDSSPGISLSSSRGPGRSAAEELDEEIPVSSHYFASKTRNERKRKKMPASQRSKRRKTASSGSKAKGGSATCRKISSKTKSSSIIGSSSASHTSQATSGANSKLGIMAPPKPINRPFLKPSYAFS

SEQ ID NO: 106111 - protein, 519 aa, Artificial Sequence
  derived and/or modified sequence
MNMLRQKFPSVPVMALTATANPRVQKDILTQLKILRPQVFSMSFNRHNLKYYVLPKKPKKVAFDCLEWIRKHHPYDSGIIYCLSRRECDTMADTLQRDGLAALAYHAGLSDSARDEVQQKWINQDGCQVICATIAFGMGIDKPDVRFVIHASLPKSVEGYYQESGRAGRDGEISHCLLFYTYHDVTRLKRLIMMEKDGNHHTRETHFNNLYSMVHYCENITECRRIQLLAYFGENGFNPDFCKKHPDVSCDNCCKTKDYKTRDVTDDVKSIVRFVQEHSSSQGMRNIKHVGPSGRFTMNMLVDIFLGSKSAKIQSGIFGKGSAYSRHNAERLFKKLILDKILDEDLYINANDQAIAYVMLGNKAQTVLNGNLKVDFMETENSSSVKKQKALVAKVSQREEMVKKCLGELTEVCKSLGKVFGVHYFNIFNTVTLKKLAESLSSDPEVLLQIDGVTEDKLEKYGAEVISVLQKYSEWTSPAEDSSPGISLSSSRGPGRSAAEELDEEIPVSSHYFASKTRN

SEQ ID NO: 106112 - DNA, 4254 bp, Artificial Sequence
  derived and/or modified sequence
atggccgccgtgccccagaacaatctgcaggaacaactggagcgccactctgcgagaaccctgaacaacaagctctcattgagcaagcccaagttttccggttttacgttcaaaaagaagactagtagcgacaacaacgtcagcgtgaccaatgtttcagttgctaagaccccagtgctccgtaacaaggacgtaaacgttacagaagactttagtttttcagagcccctgccgaatactactaatcagcaaagggtcaaggatttttttaagaatgcgccagccggacaggaaacacagcgcggagggagtaagtctctgctccctgattttctgcagactccaaaggaggtggtttgcacaacccagaacactcctacggtaaaaaagtcccgcgatactgcactgaaaaaattagagttctcctcaagtcctgatagcctcagcaccatcaatgattgggatgacatggacgattttgacacctctgaaacttcaaagtcttttgtcactcccccccagtcccacttcgtgagagtgagtactgcccagaagtcaaagaaggggaagcgcaacttttttaaagctcaactctatacaaccaataccgtcaagacagacctgccaccgccctcatccgaatccgagcagatagacctgaccgaagaacagaaagatgactcagagtggttatcctccgatgttatctgcatcgatgatgggcctatcgcagaagtccacatcaacgaggatgctcaggagtccgatagtctgaagacacatctggaggacgaacgagacaacagtgagaagaaaaaaaatctagaagaagcagagctccattctacggagaaagtcccttgcatcgagtttgatgatgatgattacgacacagatttcgttccccctagccccgaggagattattagtgcctcgtcgagctctagcaagtgcctgtcaaccctgaaagatctcgacacatcggatcggaaggaggacgtgttgtctacttccaaagacttgctgtccaaaccagagaagatgtcgatgcaagagctgaatcccgaaactagtacggactgcgatgcccggcagatatctctgcagcaacaactcatccacgtcatggagcacatctgcaagctcattgatacgatccctgacgataagctcaagctcctagactgcggaaatgagctcttgcagcagaggaatattagaaggaagcttctcacagaagtggatttcaacaaaagtgatgctagtctgctggggagtttatggaggtaccggcctgacagcctcgatgggcctatggagggggattcctgtccgactggcaactctatgaaagaactgaactttagtcacttgccttccaactccgttagccccggggattgtctgctgactacaaccctgggcaagacggggttcagcgcgaccagaaagaatctattcgaacgcccgctgttcaatactcacctgcaaaagagcttcgtttcttccaactgggctgagactcctagactcgggaaaaagaacgagagttcatacttcccaggcaacgtcctgacatccactgccgtgaaagatcagaataaacatactgcatcgataaacgacctggaaagggagacccaaccaagctatgacatagacaattttgatatcgatgattttgatgacgatgatgattgggaggacattatgcataacctggccgcttctaaaagttccaccgctgcctatcagccaataaaagaaggcagaccaatcaagtctgtgtcagagcgcctgtcttcagccaaaacggattgtctgcctgtgagttctactgcgcagaacatcaattttagtgaaagcattcagaattacacggacaagagtgctcaaaacttggcaagtcgcaatctgaagcacgaaagatttcaaagtctttcattcccccatactaaggagatgatgaagatttttcataagaagtttggtctccacaacttcaggactaatcaattggaagcaatcaatgcggcgctccttggagaggactgcttcatccttatgcctacaggcggcgggaaatccctctgctaccagcttcccgcgtgcgtcagcccaggggtcaccgttgtgatctcaccccttcgcagcctgatcgtcgaccaggtgcaaaagttaacatcactggacatcccagccacctacctcactggcgataagacagactctgaggcaaccaacatttatcttcagctcagcaagaaagatcccatcattaagctcctgtacgttacacccgagaagatatgtgcttctaaccggttgatctctaccttggagaacttatacgagcggaaactccttgctagattcgttatagacgaggctcattgtgtctctcagtggggacacgattttcgacaagattacaagagaatgaatatgttaaggcagaagttcccctcagtgcccgttatggccctaacagcaaccgccaaccctagggtgcaaaaggacatcctcacgcagctgaaaatactgcgaccacaggtgttctccatgagcttcaacagacacaacctcaagtattacgtattgcctaaaaagcccaagaaggtggccttcgactgtctggaatggatcagaaagcatcatccatatgactctggcattatctattgtttgagtcgaagagagtgtgacacaatggccgatactttgcaacgagatggcctcgcagccttagcttatcacgcagggctcagtgattctgccagggatgaggtgcagcagaagtggatcaatcaagatggctgtcaagtgatttgcgccaccatcgcattcggaatgggtattgataagccagacgtgaggtttgtgattcacgcaagtctgcccaagtccgttgagggctactaccaggagtccggcagggcaggaagggacggggaaatctctcactgcctgctcttctacacgtatcatgacgtcacccggttaaagaggttgattatgatggaaaaagacggtaatcaccatacccgagaaacgcattttaataatctgtactccatggtgcactattgtgagaatattacagagtgtagaagaattcagctcctggcctattttggcgagaatggatttaatccagacttctgcaaaaagcatccagatgtgtcctgcgacaattgttgcaaaacgaaggactacaagactagagacgtaactgatgacgtgaaatccatagtccgcttcgtgcaggaacacagcagctcccagggcatgcggaacatcaaacacgtcggcccctccggacggtttactatgaatatgctggtggacatctttcttgggtctaagagcgcaaaaattcagtcagggatctttggcaagggttctgcgtattctcgccataatgccgaacgtctttttaaaaagctgatcctggacaaaatcctagatgaagatttgtacatcaatgccaacgaccaagctattgcatatgttatgctggggaataaggcccaaacagtattgaacgggaacctgaaggtagactttatggagactgagaattctagcagcgtcaagaagcagaaggccctggtcgcaaaagtctcacagcgcgaagagatggtgaaaaaatgtctcggtgaacttacagaagtttgcaaaagtctaggaaaagtttttggagtacactactttaatatttttaatacagtgacacttaagaagttagcggagagcctttctagcgaccccgaagtcttactgcagatcgatggagtcacagaagacaaactagagaagtacggcgctgaggtcatatccgtactgcaaaaatatagtgaatggacctcacctgcggaggatagtagcccagggatttccctaagttcctctcgaggcccgggtcgatctgccgccgaggaattggacgaagaaatacctgtgtcctcacattacttcgcgtcaaaaacgcggaatgagcgaaagcggaaaaaaatgcccgcttctcaacgttcaaagaggcgcaaaactgctagcagcggttctaaggcaaagggaggatccgctacttgcagaaagatctcctctaagactaagtcctccagcatcattggcagctcatccgcctcacacacttcacaggcaaccagcggcgccaactcaaaacttggaatcatggcacccccgaaaccaatcaatcgacctttccttaaaccctcctacgctttttcatag

SEQ ID NO: 106113 - DNA, 3144 bp, Artificial Sequence
  derived and/or modified sequence
atgtccatgcaggaattaaatcctgaaacttccacggactgcgacgctcgccagatttcattgcagcagcagctcatccacgtgatggagcacatatgcaaactgatcgacactatacccgacgacaagctcaaactgctcgattgcggaaatgaactgttacaacagagaaacataagaaggaagcttctcacagaggtggactttaacaaaagcgacgcgtcgttgctgggctcactctggcggtatcgaccggacagcctagacggccctatggaaggggatagctgtccaacaggaaatagcatgaaagaactgaatttctctcacttgccgtccaatagcgtgtcacccggagactgcctgttaaccacaaccctgggcaagacgggatttagtgccacacgcaagaacctgttcgaacgtcccctgttcaatactcatctgcagaagtccttcgtgtcatccaactgggcggagactcctagactgggtaagaagaacgaatctagctacttccctggtaacgttcttacttcaacggcggtcaaggatcagaataaacataccgcgtccatcaatgatctagagcgggagacccagccttcctatgatattgataattttgatatcgacgattttgacgacgatgacgattgggaggatataatgcataacctcgctgcaagcaaatcctcgaccgccgcatatcagccaatcaaggaaggacgtccaataaagtctgtgtccgaaaggctgtcgagcgctaagactgactgcttgcccgtctcaagcaccgctcagaatattaacttctcagagtcaattcagaattacactgacaagagcgcacagaatttagcctcaaggaatttaaagcacgagagattccagagtttatcttttccacacacaaaagagatgatgaagatatttcacaagaaattcggcctgcataactttcggaccaatcaacttgaggccattaacgctgctttgcttggagaagattgcttcatcctcatgcccacaggaggagggaagtcattatgctaccagctccctgcatgcgtgtcccccggtgtcacagtcgtgattagtcctcttagatctcttattgtggatcaggtgcagaagctcacttcgctggacatccctgccacatacctcacaggagataagaccgattccgaggcaacaaacatttacctgcaattgtcaaagaaggaccctatcattaagctgttatacgtgactcccgagaaaatttgtgcctccaatcgccttatctccaccttggagaatctctatgaacgcaaactcctcgctcgctttgtgatcgacgaagctcattgcgtcagccagtggggtcacgactttagacaggattataagagaatgaacatgttgaggcaaaagtttccttccgtccccgtgatggcactcacggcgaccgccaaccccagggtccagaaagacattttaactcaactgaaaatcttgcgcccccaagtgttctccatgtcgttcaatagacacaacttaaaatactatgtcctgccaaaaaaacccaaaaaggtggccttcgattgtctagagtggattaggaaacatcatccttacgatagcggaatcatatactgcctgagtcgcagagagtgcgacacaatggcagataccttgcagaagtggattaaccaagacggctgtcaggttatctgtgccaccatcgcctttggcatgggcatcgacaagccagatgtgaggttcgtaatccatgccagcttgccaaaaagcgtcgaggggtattaccaggagtcgggccgagcgggacgtgatggagaaatatcccactgcctgttattctatacctaccacgatgtgacgcggctgaaacggctgataatgatggaaaaagatgggaatcaccatacgcgcgagacccacttcaacaacctgtattcaatggtacattattgtgaaaacataacagaatgccgcagaattcagctgctagcctacttcggggaaaacggctttaatccggatttctgcaaaaaacaccccgacgtttcctgcgataactgttgcaagacaaaggattacaagacccgcgatgtaaccgacgatgtgaagagtatcgtacggttcgttcaggagcacagcagtagccagggtatgaggaacatcaaacacgtgggacctagtggtcggttcactatgaatatgctggtcgatatattcctgggaagtaagagcgcaaagatccagagtggaatctttggaaaggggtccgcctactcccgacataatgccgagaggctgtttaaaaagctcatcctcgacaagatcttagatgaggacctgtatattaatgctaacgaccaggctattgcctatgtgatgctcgggaataaggctcagactgtcctcaacggaaatctcaaagtggacttcatggagactgagaactcttctagcgtgaagaaacagaaagccctggtagccaaagtttcacagcgagaagaaatggtgaagaaatgccttggagaactaaccgaggtgtgcaaaagcctgggcaaggtgtttggtgtgcactatttcaatatcttcaacactgttaccctcaagaagttagctgaatcactgtcttccgaccccgaagtactcctccagatcgacggtgttacggaagacaagctggagaagtatggagctgaggtgatttcagtgcttcagaagtattctgaatggactagccctgctgaagactcgagcccagggatcagtctgagcagctcaagaggccctggccggagtgcagccgaggaacttgatgaagagatccctgtcagttcccattacttcgctagcaaaacccgcaatgaaagaaaaaggaagaaaatgcctgcgagtcagagatccaaacgacggaaaaccgccagcagcggttctaaggctaagggcggatctgctacctgcagaaaaatttcatctaagaccaagtcttcttcgattattgggtcctcctcagctagtcacacatcccaggccacctccggcgccaatagtaaactgggaatcatggctccacctaaacctattaatagaccctttttaaaaccttcgtacgccttttcctag

SEQ ID NO: 106114 - DNA, 4254 bp, Artificial Sequence
  derived and/or modified sequence
atggctgctgtgccccagaacaacctgcaggagcagctggagcggcacagcgcccggaccctgaacaacaagctgagcctgagcaagcccaagttcagcggcttcaccttcaagaagaagaccagcagtgacaacaacgtgtctgtgaccaacgtgtctgtggccaagacccctgtgctgaggaacaaggatgtgaatgtgacagaggacttctccttcagcgagcccctgcccaacaccaccaaccagcagagggtgaaggacttcttcaagaatgccccagctggccaggagacccagaggggcggcagcaagagcctgctgcctgacttcctgcagacccccaaggaggtggtgtgcaccacccagaacacccccaccgtgaagaagagccgggacacagccctgaagaagctggagttcagcagcagcccagacagcctgagcaccatcaatgactgggatgacatggatgactttgacaccagcgagaccagcaagagctttgtgaccccaccccagagccactttgtgcgggtgtccacagcccagaagagcaagaagggcaagaggaacttcttcaaggcccagctgtacaccaccaacacagtgaagacagacctgcccccacccagcagcgagagcgagcagattgacctgacagaggagcagaaggatgacagcgagtggctgagcagtgatgtgatctgcattgatgatggccccatcgccgaggtgcacatcaatgaagatgcccaggagagtgacagcctgaagacccacctggaggatgagcgggacaacagcgagaagaagaagaacctggaggaggccgagctgcacagcacagagaaggtgccctgcattgaatttgatgatgatgattatgacacagactttgtgccccccagccctgaggagatcatcagcgccagcagcagcagcagcaagtgcctgagcaccctgaaggacctggacaccagtgacaggaaggaggatgtgctgagcaccagcaaggacctgctgagcaagccagagaagatgtccatgcaggagctgaaccctgagaccagcacagactgtgatgcccggcagatcagcctgcagcagcagctgatccacgtgatggagcacatctgcaagctgattgacaccatcccagatgacaagctgaagctgctggactgtggaaatgagctgctgcagcagaggaacatccggaggaagctgctgacagaggtggacttcaacaagagtgatgccagcctgctgggcagcctgtggagatacagaccagacagcctggatggccccatggagggggacagctgccccaccggcaacagcatgaaggagctgaacttcagccacctgcccagcaacagcgtgtcccctggggactgcctgctgaccaccaccctgggcaagacaggcttcagcgccaccaggaagaacctgtttgagcggcccctcttcaacacccacctgcagaagagctttgtgagcagcaactgggccgagaccccccggctgggcaagaagaatgaaagcagctacttccctggaaatgtgctgaccagcacagctgtgaaggaccagaacaagcacacagccagcatcaatgacctggagcgggagacccagcccagctatgacatcgacaactttgatattgatgactttgatgatgatgatgactgggaggacatcatgcacaacctggccgccagcaagagcagcacagctgcctaccagcccatcaaggagggccggcccatcaagtctgtgtctgagcggctgagcagcgccaagacagactgcctgcctgtgagcagcacagcccagaacatcaacttcagcgagagcatccagaactacacagacaagagcgcccagaacctggccagcaggaacctgaagcatgagcgcttccagagcctgtccttcccccacaccaaggagatgatgaagatcttccacaagaagtttggcctgcacaacttccgcaccaaccagctggaggccatcaatgctgccctgctgggggaggactgcttcatcctgatgcccactggaggcggcaagagcctgtgctaccagctgcctgcctgtgtgtccccaggagtgacagtggtgatcagccccctgcggagcctcatcgtggaccaggtgcagaagctgaccagcctggacatcccagccacctacctgaccggggacaagacagacagcgaggccaccaacatctacctgcagctgagcaagaaggaccccatcatcaagctgctgtatgtgaccccagagaagatctgtgccagcaacagactcatcagcaccctggagaacctgtatgaaaggaagctgctggccaggtttgtgattgatgaggcccactgtgtgtcccagtggggccatgacttccggcaggactacaagaggatgaacatgctgcggcagaagttccccagcgtgcctgtgatggccctgacagccacagccaacccccgggtgcagaaggacatcctgacccagctgaagatcctgcggccccaggtgttctccatgtccttcaacagacacaacctgaagtactacgtgctgcccaagaagcccaagaaggtggcctttgactgcctggagtggatcaggaagcaccacccctatgacagcggcatcatctactgcctgagccggcgggagtgtgacaccatggctgacaccctgcagagagatggcctggccgccctggcctaccacgccggcctgagtgacagcgccagagatgaggtgcagcagaagtggatcaaccaggacggctgccaggtgatctgtgccaccatcgccttcggcatgggcatcgacaagccagatgtgcgcttcgtcatccacgccagcctgcccaagtctgtggagggctactaccaggagagcggccgggccggcagagatggagagatcagccactgcctgctcttctacacctaccatgatgtgacccggctgaagaggctcatcatgatggagaaggatggcaaccaccacacccgggagacccacttcaacaacctgtacagcatggtgcactactgtgagaacatcacagaatgtcgccgcatccagctgctggcctactttggagaaaatggcttcaacccagacttctgcaagaagcacccagatgtgtcctgtgacaactgctgcaagaccaaggactacaagaccagagatgtgacagatgatgtgaagagcatcgtgcgctttgtgcaggagcacagcagcagccagggcatgaggaacatcaagcacgtgggccccagcggccgcttcaccatgaacatgctggtggacatcttcctgggcagcaagagcgccaagatccagagcggcatctttggaaaaggaagtgcctacagccgccacaatgctgagcggctcttcaagaagctgatcctggacaagatcctggatgaagatctctacatcaatgccaatgaccaggccatcgcctacgtgatgctgggcaacaaggcccagacagtgctgaatggaaacctgaaggtggacttcatggagacagagaacagcagctctgtgaagaagcagaaggccctggtggccaaggtgtcccagcgggaggagatggtgaagaagtgcctgggggagctgacagaggtgtgcaagagcctgggcaaggtgtttggagtgcactacttcaacatcttcaacacagtgaccctgaagaagctggccgagagcctgagcagtgaccctgaggtgctgctgcagattgatggagtgacagaggacaagctggagaagtacggggctgaggtgatctctgtgctgcagaagtacagcgagtggaccagccctgctgaggacagcagccctggcatcagcctgagcagcagccggggccctggccgctctgctgctgaggagctggatgaggagatccctgtgagcagccactactttgccagcaagaccagaaatgaaaggaagaggaagaagatgcctgccagccagaggagcaagaggaggaagacagccagcagcggcagcaaggccaagggcggcagcgccacctgcaggaagatcagcagcaagaccaagagcagcagcatcatcggcagcagcagcgccagccacaccagccaggccaccagcggggccaacagcaagctgggcatcatggccccacccaagcccatcaaccggcccttcctgaagcccagctatgccttctcctag

SEQ ID NO: 106115 - DNA, 3144 bp, Artificial Sequence
  derived and/or modified sequence
atgtccatgcaggagctgaaccctgagaccagcacagactgtgatgcccggcagatcagcctgcagcagcagctgattcatgtgatggagcacatctgcaagctgattgacaccatcccagatgacaagctgaagctgctggactgtggaaatgagctgctgcagcagaggaacatccggaggaagctgctgacagaggtggacttcaacaagagtgatgccagcctgctgggcagcctgtggagatacagaccagacagcctggatggccccatggagggggacagctgccccactggaaacagcatgaaggagctgaacttcagccacctgcccagcaacagcgtgtcccctggggactgcctgctgaccaccaccctgggcaagacaggcttcagcgccaccaggaagaacctgtttgagcggcccctcttcaacacccacctgcagaagagctttgtgagcagcaactgggccgagaccccccggctgggcaagaagaatgaaagcagctacttccctggaaatgtgctgaccagcacagctgtgaaggaccagaacaagcacacagccagcatcaatgacctggagcgggagacccagcccagctatgacatcgacaactttgatattgatgactttgatgatgatgatgactgggaggacatcatgcacaacctggccgccagcaagagcagcacagctgcctaccagcccatcaaggagggccggcccatcaagtctgtgtctgagcggctgagcagcgccaagacagactgcctgcctgtgagcagcacagcccagaacatcaacttcagcgagagcatccagaactacacagacaagagcgcccagaacctggccagcaggaacctgaagcatgagcgcttccagagcctgtccttcccccacaccaaggagatgatgaagatcttccacaagaagtttggcctgcacaacttccgcaccaaccagctggaggccatcaatgctgccctgctgggggaggactgcttcatcctgatgcccaccggcggcggcaagagcctgtgctaccagctgcctgcctgtgtgtcccctggggtgacagtggtgatcagccccctgcggagcctgattgtggaccaggtgcagaagctgaccagcctggacatcccagccacctacctgactggagacaagacagattctgaggccaccaacatctacctgcagctgagcaagaaggaccccatcatcaagctgctgtatgtgaccccagagaagatctgtgccagcaacagactcatcagcaccctggagaacctgtatgaaaggaagctgctggccaggtttgtgattgatgaggcccactgtgtgtcccagtggggccatgacttccggcaggactacaagaggatgaacatgctgcggcagaagttccccagcgtgcctgtgatggccctgacagccacagccaacccccgggtgcagaaggacatcctgacccagctgaagatcctgcggccccaggtgttctccatgtccttcaacagacacaacctgaagtactacgtgctgcccaagaagcccaagaaggtggcctttgactgcctggagtggatcaggaagcaccacccctatgattctggcatcatctactgcctgagcagaagagaatgtgacaccatggctgacaccctgcagaagtggatcaaccaggacggctgccaggtgatctgtgccaccatcgccttcggcatgggcatcgacaagccagatgtgcgcttcgtcatccacgccagcctgcccaagtctgtggagggctactaccaggagagcggccgggccggcagagatggagagatcagccactgcctgctcttctacacctaccatgatgtgacccggctgaagaggctcatcatgatggagaaggatggcaaccaccacacccgggagacccacttcaacaacctgtacagcatggtgcactactgtgagaacatcacagaatgtcgccgcatccagctgctggcctactttggagaaaatggcttcaacccagacttctgcaagaagcacccagatgtgtcctgtgacaactgctgcaagaccaaggactacaagaccagagatgtgacagatgatgtgaagagcatcgtgcgctttgtgcaggagcacagcagcagccagggcatgaggaacatcaagcacgtgggccccagcggccgcttcaccatgaacatgctggtggacatcttcctgggcagcaagagcgccaagatccagagcggcatctttggaaaaggaagtgcctacagccgccacaatgctgagcggctcttcaagaagctgatcctggacaagatcctggatgaagatctctacatcaatgccaatgaccaggccatcgcctacgtgatgctgggcaacaaggcccagacagtgctgaatggaaacctgaaggtggacttcatggagacagagaacagcagctctgtgaagaagcagaaggccctggtggccaaggtgtcccagcgggaggagatggtgaagaagtgcctgggggagctgacagaggtgtgcaagagcctgggcaaggtgtttggagtgcactacttcaacatcttcaacacagtgaccctgaagaagctggccgagagcctgagcagtgaccctgaggtgctgctgcagattgatggagtgacagaggacaagctggagaagtacggggctgaggtgatctctgtgctgcagaagtacagcgagtggaccagccctgctgaggacagcagccctggcatcagcctgagcagcagccggggccctggccgctctgctgctgaggagctggatgaggagatccctgtgagcagccactactttgccagcaagaccagaaatgaaaggaagaggaagaagatgcctgccagccagaggagcaagaggaggaagacagccagcagcggcagcaaggccaagggcggcagcgccacctgcaggaagatcagcagcaagaccaagagcagcagcatcatcggcagcagcagcgccagccacaccagccaggccaccagcggggccaacagcaagctgggcatcatggccccacccaagcccatcaaccggcccttcctgaagcccagctatgccttctcctag

SEQ ID NO: 106116 - DNA, 4254 bp, Artificial Sequence
  derived and/or modified sequence
atggccgccgtgccccagaacaacctgcaggagcagctggagcggcacagcgcacgcacactgaataacaaactctccctcagcaagccaaaattttctgggttcacattcaagaagaagacctcatccgacaataacgttagcgttaccaatgtctctgtggccaaaacacccgtgctaaggaacaaagatgtgaatgtcaccgaagacttttccttttcggagcctctccctaacacaactaatcagcagagggtgaaggacttctttaagaatgcgcccgccgggcaggagacgcagcgaggcggctctaaaagcctgctccctgattttctgcagactcctaaggaggtcgtatgtacaacacagaatacccccactgtgaagaaatctcgcgacaccgccttgaagaagctcgagttttctagctctccagactccctgtcaaccatcaatgattgggatgacatggatgacttcgatacctccgagacatcaaagtcgttcgtgacccccccccagtctcattttgtgcgggtgagcactgctcagaaaagcaaaaagggtaaacgcaattttttcaaggctcagctgtacactacaaatacagtaaaaaccgacctacccccccccagtagcgaaagcgagcagatcgatttaaccgaagaacagaaggatgattctgagtggctaagctctgatgtcatatgcatcgacgatggtccgatagccgaggttcacatcaacgaggacgcccaggagagtgatagcctgaagacgcatctggaggacgaacgagataattcagagaagaagaagaacctcgaggaggccgaactccacagcaccgaaaaggtgccgtgcatagagttcgacgatgatgactacgatacagattttgtgccaccatctccagaagaaataattagcgctagtagctcatcctctaaatgtctttctaccctaaaggatttagacacctctgatagaaaggaggatgtgctctccaccagcaaagatctactgtccaagccagagaaaatgagcatgcaggaactgaacccagaaacttcaactgactgtgacgcaagacaaatctctctccagcagcaacttattcacgtgatggagcacatctgtaaactgatcgacacaattccagacgataaactgaaattgcttgactgtggaaatgagcttttgcagcagcgaaacatcagaagaaagctgctaacagaggtcgattttaacaagagtgacgcttcactgcttggttcattatggcgttaccgaccagattcccttgacggcccgatggaaggcgacagttgccccactggcaattctatgaaagaattgaacttcagccacctcccatccaacagcgtttctcctggagactgtctcctcaccaccacccttggtaagactggatttagcgctacgaggaagaacctatttgagagacctcttttcaacactcaccttcaaaagtcctttgtctctagcaattgggccgagactccacgtctgggaaagaagaatgagagctcatatttccctggcaatgtcctgactagtacagctgtgaaggaccagaacaagcacactgcatctatcaatgatctggagcgggagacccagcccagttatgatatcgataactttgacatcgacgactttgacgatgatgacgattgggaggatataatgcataatctggcggcctccaagtcttcgacagccgcttaccagcctataaaggagggccgcccaatcaaaagtgtctcagagagactgtcatcagcaaagacagactgtctgccagtgtcaagtacggcccagaacatcaatttttccgagtctattcagaactatactgacaagtcggcgcagaacctcgcctctcgaaacctgaagcacgaaaggtttcagagcctgagttttccgcatacaaaggaaatgatgaagatttttcacaagaagtttggattacacaatttcaggaccaaccagttggaagccatcaacgccgcactcctgggcgaggattgcttcatcctcatgccaaccggcggggggaagtcactttgctaccaacttcccgcatgcgtgtctccaggagtgaccgtagtgatctccccccttcgctcccttatcgtggaccaggttcagaagctaacctctcttgacattccggccacgtacttgactggcgacaagactgattccgaggctaccaatatctatctgcagttatccaaaaaagatcccatcatcaaactactttatgtcactcccgaaaagatatgtgccagtaataggttgatctcaaccctggagaacctctatgaacggaaactattggcaaggttcgttattgatgaggctcactgtgtgtcgcagtgggggcacgacttccgtcaggactataaacgcatgaatatgctgagacaaaagtttccgtctgtccccgtgatggctttgactgccaccgccaatccacgagtccagaaagatatcttgacccagcttaagatactgagacctcaagtatttagtatgagtttcaatcgtcataatctaaagtattacgtcttgcctaaaaaaccaaagaaagttgctttcgactgtctcgaatggattagaaagcaccacccatatgactctggaatcatctactgtctgagcaggcgggaatgcgacacaatggccgacaccttacagcgtgacggcttggccgccttggcctatcacgccggtttgagcgattctgcacgggatgaggtccagcaaaagtggattaatcaggacggctgccaggtcatctgcgccacaatcgcattcgggatggggatcgataaacctgacgtaaggtttgtgatacacgccagtctcccgaagagcgtggagggatactaccaggagagcgggcgagccggccgggacggcgagatcagtcactgcttgttgttctacacctaccacgatgttacaaggcttaagcgcttaattatgatggaaaaggatgggaaccaccacactcgagagacccactttaacaacctgtattcgatggtacactactgcgagaatataaccgagtgtaggagaattcaactgctggcctacttcggcgaaaacgggtttaacccagacttctgtaagaagcaccctgatgtgtcatgtgataactgctgtaagacaaaagactacaagacccgcgatgttaccgacgacgtgaagagtattgtgcggtttgtgcaggagcattcatcttcccagggaatgagaaacattaaacacgtcggaccaagtggaagattcaccatgaacatgttggttgacatattcttaggctctaaaagtgctaagatccaaagtggaatcttcggcaagggatcagcttactcgcgacacaatgcagagcgcctgtttaagaagctaatactagacaaaattctggatgaggacctttatattaacgccaatgatcaggcaattgcgtatgtgatgctagggaataaagctcaaaccgttctgaacgggaatcttaaagtcgatttcatggagactgagaactcaagttcagtcaagaagcagaaagctttggttgcaaaggtgtcccagagggaagagatggtgaaaaagtgtttgggcgagctgactgaggtctgcaagagtcttggaaaagtgttcggggtgcactatttcaacattttcaacaccgtcactctaaagaagctggcagaatctctcagctccgacccagaggtgcttcttcagattgacggggtcacagaggataaactcgagaaatacggagctgaagtgattagcgtactgcaaaagtactctgagtggaccagcccggccgaggattcttctcccggaataagcttgtcctcatctcgcggtcccggccgttccgcagctgaagagcttgacgaggagatccctgtgagcagtcattacttcgcttccaaaactcggaacgagcgaaaaagaaaaaagatgcccgcctcgcagcgaagcaagcggaggaaaaccgccagttccggcagtaaggcaaaggggggttccgctacgtgccggaagatctcctcaaagaccaagtcttcgtcgataatcgggtcttcgtctgcaagtcacacatcccaggccacctccggagccaactcaaaactgggaatcatggctcctccgaaacctattaataggccctttctgaagccaagttacgcattctcctag

SEQ ID NO: 106117 - DNA, 3144 bp, Artificial Sequence
  derived and/or modified sequence
atgagcatgcaggagctgaaccccgagaccagcaccgactgcgacgcccggcaaataagtctccagcaacagttgatacacgtgatggaacacatctgtaaacttatagacacgatccctgatgacaagttgaaactgctggactgtggaaatgagctactacagcagagaaacatcaggaggaagctccttacagaagtcgactttaataagagcgacgcctctcttctggggagcctgtggagataccggccagacagccttgacggtcctatggaaggcgacagttgtcctacggggaattccatgaaagaattaaattttagccacctcccctctaacagtgtatctcctggcgactgtctgctgacgactacgctaggcaagacaggcttctccgccacgcgcaagaatctgtttgagagacccctgtttaatacacatctgcagaagtctttcgtttcaagtaactgggctgagaccccaagactgggaaaaaaaaatgaaagcagctactttccagggaatgttctgacctcgacagcggtaaaagaccagaataaacatactgcctcaataaatgacctggaaagagagacccagccatcctacgacatagacaactttgacatagatgatttcgacgatgacgacgactgggaagatatcatgcataatctcgcggcctcaaagtcaagtaccgccgcataccagcccattaaggaagggaggcctatcaagagtgtctccgaacgcctgtcgtcagcaaagacagactgcttgcccgtgagcagtactgcccagaacataaacttctctgagtctatccagaactataccgacaagagcgctcaaaatctcgccagcaggaacctgaaacacgagaggtttcaaagcctgtcatttccccacaccaaagagatgatgaagatctttcataaaaagtttggtctgcacaatttcaggaccaaccagctcgaagcgatcaacgcagccttactcggggaagattgttttatcctgatgccaactggcggcgggaagagtctgtgctatcagcttcccgcatgtgtgtcccccggggtaactgtggttatcagcccgctgcgaagtcttatcgttgatcaggtacaaaaactgacctccctggatatccctgccacctatctcacaggggacaaaacggattccgaagctaccaatatctacctgcaactgtctaagaaggacccaatcatcaagctactatacgtcacccccgaaaaaatctgcgcatccaaccgcctgatcagcactttagaaaatctgtatgagcggaagctgctcgccagattcgttattgatgaagcacactgcgtgtcacaatggggccacgacttccggcaagattataaaagaatgaatatgctcagacagaagttcccttccgtacctgtcatggccctgaccgccacggccaatcccagggtgcaaaaggacattttgacccagctgaaaattctgagaccccaggtgttttccatgtcctttaatagacacaacttgaagtactacgtcctacccaaaaaacctaaaaaggtggcattcgactgtctagagtggatcaggaagcatcatccttacgattccgggattatctattgtttgagtaggcgcgaatgcgacacaatggcagacacattgcagaaatggattaaccaggacgggtgtcaagttatatgcgctaccatcgccttcggcatgggcattgacaagcccgatgtgaggttcgtgatccacgccagtctccccaaaagcgtcgagggatattaccaagagagcggcagagcaggacgcgacggcgaaattagccactgtctcctgttctatacttaccatgacgtgacgcggctgaagcggctgattatgatggagaaagacggcaaccatcatacccgggaaacccacttcaataatctgtactccatggtgcactactgcgaaaacatcacggaatgccgtcgtatccagctgctcgcatacttcggagagaacggcttcaaccccgatttctgcaagaaacaccctgatgtgagttgcgacaactgttgtaagaccaaggattacaaaacccgtgatgtcaccgacgatgttaaaagcatagtcagatttgtccaagagcactcatcatcacagggtatgcggaacataaaacacgtgggcccttcagggaggtttacaatgaacatgctggtggatattttcttaggctcaaagagtgccaagattcaatcagggatattcggcaaaggttctgcctactcaagacataatgcggagagacttttcaagaagttaatcctggacaagattcttgacgaagacctctatatcaatgccaatgatcaggcaatcgcctatgttatgctgggcaataaagcccagacagtcctcaacgggaatcttaaggtggacttcatggagacagagaattcctcctccgtgaagaagcagaaagccttagtggctaaagtgtctcagcgcgaggagatggtcaaaaaatgtctgggtgagttgacggaggtatgtaagagcctggggaaagtcttcggtgttcattattttaatatctttaacaccgtcactcttaagaagttagctgagtcactgtcctcagatccagaggtgctgctgcagattgacggcgtgacagaagataaacttgaaaagtacggggccgaggtcatctccgttcttcaaaaatacagcgaatggacgagccctgcagaggacagttcccccggaattagcctatcctcctctagaggtccaggccgctctgctgctgaagagcttgatgaggaaatacctgtgagcagccattatttcgcgtccaagaccagaaacgaacggaaacggaaaaagatgcctgcttcacaaaggagcaaacgaagaaagaccgcctcttccggatctaaggccaaaggtggcagcgcaacctgccggaagatctcttctaaaactaaatcaagtagcattattgggagttcatcagcatctcatacgtcacaggccactagtggcgctaactccaaacttggcattatggctccaccaaagcccattaatcggccgttcttaaaacccagctatgccttctcttag

SEQ ID NO: 106118 - DNA, 4254 bp, Artificial Sequence
  derived and/or modified sequence
atggctgccgtacctcagaacaatctgcaggaacagttggagaggcacagcgccaggacactgaacaataagctcagtctctctaagcctaaattcagcggatttacattcaagaagaaaacttcgtccgacaacaatgtgagcgtaacgaatgtaagcgtggcgaagactccagtgctgcggaacaaagatgtcaacgtgacggaggatttttctttcagcgagcctctcccgaatactactaaccaacagcgggtgaaagacttctttaaaaacgccccagccggtcaggaaacacaacgagggggaagcaaatctttgttaccggattttctgcagacacctaaagaggtggtttgcacgacccagaatacccccacagtcaagaaaagccgcgacacagcccttaagaagctcgagttttctagcagcccagactcactcagcacgataaatgactgggacgatatggatgatttcgacactagcgaaacatctaagagtttcgtgacaccaccccagagccatttcgttcgtgtgagcaccgcccagaagagtaaaaagggtaaaaggaatttctttaaagcccaactgtataccacaaacaccgtcaagacggacctgcctccgccatccagcgagtccgagcagatcgacttaaccgaagaacagaaggacgactcagaatggctgtctagtgacgtgatttgcatcgatgacggccctattgcagaggtgcacattaatgaggacgctcaagagagtgattctctgaaaacacatctcgaggatgaacgggataattcagagaaaaagaagaatctggaagaagcagagttacacagcaccgaaaaggttccttgcatcgaatttgatgatgacgattatgataccgatttcgttccaccttcccctgaggagattatatcggcctcaagctcctcatctaagtgccttagcaccttgaaagatctggacacctccgaccgcaaagaagatgtgctgtctacttccaaggatctgctgagcaagcccgaaaaaatgtctatgcaagaactaaaccccgagacctcaacggattgcgatgctaggcagatctctctgcagcagcaactcatccacgtgatggagcatatttgcaaactcatcgataccattcccgacgataaactgaaactgttggactgtggcaatgagttgttgcaacaacgtaatataagaaggaaacttctaactgaagtggacttcaataagagtgatgcttcactgctgggctcgttgtggcgctacaggcccgacagtctggacggccctatggagggcgactcttgtccgactgggaatagcatgaaggagctgaatttttcccacttgccatccaattcagtaagcccaggcgactgcctgctgactaccacgttagggaaaacaggattttccgcaacccggaagaatctatttgagcggccactgttcaatactcatcttcagaaatctttcgtctccagtaattgggcggagacccccagactagggaagaagaacgagtctagctactttccagggaatgtgctgacctccaccgccgtcaaggatcaaaacaagcacaccgcctctatcaatgaccttgaaagggaaactcagccctcttatgatattgataacttcgacatcgatgatttcgatgatgacgacgattgggaggacattatgcacaatttggctgcttcaaagagctcgaccgcggcataccagcccatcaaggagggcaggcccatcaagtccgtgtcagagcgactgagcagcgcaaagacagattgtctgcctgtctcgtcaacagcccagaatattaacttcagtgagtccatccagaattacacagacaaatccgcccaaaatctcgcttcccggaatctgaaacacgagaggtttcagtctctttcattcccccacactaaagaaatgatgaaaatatttcacaagaaatttggcctgcataatttccggaccaatcaactggaggcgatcaacgcggcactcctcggagaggattgctttatcctgatgcctaccggtggcggtaaatctttgtgctatcagctgcccgcttgcgtttcacccggagtcaccgtggttataagccctctccgcagcttgatcgtggaccaagtgcagaagttaacatctctagatattcctgcaacctacctgacaggagacaagacagattctgaagctacgaacatctacctgcagctctccaaaaaggatccaattatcaaactgctctatgtgacaccggaaaaaatctgtgcaagcaacaggctgatcagcactctcgagaacctgtatgagagaaaattgctggcaaggtttgtaattgatgaggcccactgtgtttctcagtggggacacgatttccgccaggattataaaaggatgaatatgcttcgacagaaattcccttctgttcctgtcatggcccttacggccaccgcaaatccaagagtgcagaaagatattcttactcagctcaaaattctgagaccgcaagtctttagcatgagctttaacaggcacaatttgaaatactacgtattgccaaaaaagccaaagaaggtggcctttgattgcttggagtggataaggaagcaccacccatatgattctgggatcatttactgcctgtctcgcagggagtgcgatacaatggccgataccctgcaaagagatggattggccgctctggcgtatcacgccggattgtcagacagcgctcgcgatgaagtccagcagaagtggatcaatcaggacgggtgtcaggtgatctgcgccactatagccttcggcatggggattgacaagcccgacgtgaggtttgtgatccacgcctctcttcccaagagcgtcgaggggtactatcaggaatcaggtagagccggacgggatggggaaattagtcactgtctgctgttctatacctatcacgacgtgaccagacttaagcggctgatcatgatggagaaggatggcaaccaccacacacgagagacccattttaacaatctgtatagtatggtgcattattgtgaaaacataaccgaatgccgcaggattcagctcctcgcatattttggggaaaacgggttcaatcctgacttttgcaaaaagcatccggacgtcagttgtgataactgttgtaagaccaaggactataagacacgcgacgtgaccgacgatgtgaagtcaatagttaggttcgtgcaggagcattcctctagccaggggatgcgtaacattaaacacgtcggaccaagcggcagatttactatgaatatgttggtcgacatcttcctaggttccaagtccgctaaaattcaatcaggaatattcgggaaaggatccgcgtattctcgtcacaacgccgagcgactgttcaagaagttaatactagacaaaattctggatgaagacctttacatcaatgctaatgaccaggcgatcgcttacgtcatgctgggcaataaagcacaaacagtccttaacgggaatctgaaggtcgatttcatggagaccgagaacagcagctctgtaaagaaacagaaagccctggtggccaaagtcagccaacgcgaggagatggtcaaaaaatgcctgggagagctgaccgaagtgtgcaaatccctgggcaaggtgttcggtgtgcactatttcaacatatttaacactgtaacgcttaaaaagctcgctgagagcttgagtagcgacccagaagtcttgctccaaatcgacggggtgactgaggacaagctagagaagtatggggcagaggttattagcgtgttgcagaagtacagcgaatggacatcgcctgctgaggacagctctcctgggatctcactgtctagctctaggggtcctggaagatccgccgcagaggagctcgatgaggaaattccagtttctagtcactatttcgcatctaagacaagaaatgagcgcaagagaaagaaaatgccagcaagtcagagatctaaaaggaggaagacggccagctctgggtctaaggctaaggggggttccgctacctgccgaaaaatctcttcaaagaccaaatcgagcagcatcattggctcttcatcagcgtcccacacttcccaggccacctccggagctaattcaaagttagggattatggcaccccctaaacctatcaaccggcctttcctgaagccttcgtacgctttttcctag

SEQ ID NO: 106119 - DNA, 3144 bp, Artificial Sequence
  derived and/or modified sequence
atgtccatgcaggaactcaatccagagaccagcaccgactgtgatgcaaggcagatcagcctccagcaacaactgattcacgtgatggagcatatttgtaaactcatcgataccatacccgatgacaagctgaagttgttggattgtggcaacgaactgctacagcagcggaatatacgtcgtaaactcttgactgaagttgacttcaacaagtctgatgccagtctgttgggaagtctgtggaggtaccgaccggactctcttgatggaccaatggaaggagacagctgtccgaccggaaacagcatgaaagagctgaatttctctcatctgcctagcaattctgtcagtccgggtgactgcctgctgaccaccacactgggcaagaccggcttctcagctacgaggaaaaatttgttcgaacggcctctgtttaatacccatctgcaaaagagttttgtttcatctaattgggctgaaacacctcgcctcggcaagaaaaatgagagctcttattttccagggaatgttctcacctcgactgccgtgaaagaccagaacaagcacaccgcaagcatcaacgatctggagcgggaaacacaaccaagctacgatatcgataattttgacatagacgactttgacgatgatgatgactgggaagacataatgcacaacctcgctgctagcaagtcctccacagccgcatatcagccaattaaagaagggagacctataaagtccgtgtccgagcgccttagttcagccaagactgactgcctcccagtgagctccacagcgcagaacatcaatttttcagagtccatacagaattacacagacaagagcgcccaaaacctggcttcccggaaccttaagcacgagaggtttcaatccttgtctttcccgcacactaaggaaatgatgaaaatcttccataaaaaattcggcctgcacaacttccgaacgaatcaacttgaggccattaacgcagcactgctcggggaagattgtttcatcctaatgcctacagggggtggaaaaagcctgtgctaccaattgcctgcatgtgtcagcccaggggtgacggttgtgatttctccgctcaggtccctcatcgtcgaccaggtgcagaagcttacaagtctcgacattccagccacttaccttactggagacaagactgactctgaagctaccaacatctatcttcagctgagtaaaaaggatcctattattaagctgctttatgtaacacctgaaaagatttgcgcatccaataggcttatatcaactctggagaacctgtatgagcggaaacttttagcgaggtttgttattgacgaggcccactgtgtatcacagtggggacatgatttccggcaggactataaaagaatgaatatgctcagacaaaagtttcccagtgtgcccgtgatggcgctgaccgccactgccaatcctcgggtgcaaaaggacattctcactcaattgaagattctgcggccacaggtgttctctatgagcttcaatcgccataacttaaagtactatgtgctccctaaaaaaccgaagaaggttgcttttgactgcttggagtggatcaggaagcaccatccctacgactccgggattatatattgtttaagcaggagagaatgtgacacaatggctgatactttacaaaagtggattaaccaggacggctgccaggttatatgtgccactatcgctttcggtatgggcatcgataaaccagacgtcagattcgtgattcacgcctctctgcccaagtctgttgaaggctactaccaagaatctggccgagcaggcagagacggcgaaatctcacactgcctgctgttctatacttatcacgacgtcaccaggttgaagaggctaatcatgatggagaaagatggcaatcaccacacgagggagacacactttaacaacctatatagtatggtccactattgtgagaatataacagagtgcagaaggattcagctactagcctactttggtgaaaacggattcaaccctgacttctgcaaaaagcatccagacgtgtcctgcgacaattgttgcaaaaccaaggattataagactcgggacgtgaccgatgacgtgaaatccatagtcaggtttgtgcaggaacactcgagctctcagggtatgcgcaatatcaaacacgtagggccatcaggccgtttcacaatgaacatgctcgttgacattttcttaggctcaaagtctgcaaagattcagtcaggcattttcggaaagggcagcgcctacagcagacacaacgccgagcggctattcaagaaacttatcctcgacaaaatccttgacgaggacttgtatatcaatgccaacgatcaggcaattgcttatgtgatgcttggcaacaaagctcaaacggtgctgaacgggaatctaaaggtggactttatggaaacggaaaacagcagctcagtgaagaagcagaaggcgctcgtcgccaaagtttcccaacgggaagagatggtgaagaaatgcctgggggagcttaccgaggtgtgcaaaagcttgggcaaggttttcggggtacactattttaacattttcaataccgtgactctgaagaaactggccgaatccctatcaagcgatcctgaagttctcttacagattgacggcgtcactgaggataagcttgaaaagtacggcgctgaagtcatctctgtattgcagaagtactcggagtggacctctcctgccgaggacagtagccccggtataagcctgtcaagtagccgcggacctggccgatcagccgctgaggagttggacgaagaaatccccgtgagcagtcactatttcgcatctaaaaccagaaatgagcggaagaggaagaagatgcccgcatcacagagatccaaaagaagaaagaccgcctcgtccggttctaaagccaagggtgggtccgcgacctgcagaaaaatctccagtaagaccaaatccagttcgattatcggatcatcaagcgccagtcacacttcccaggctacttctggggcaaatagcaagctcggaattatggcaccccctaagcctattaataggcccttcttaaaaccaagttatgccttctcatag

SEQ ID NO: 106120 - DNA, 4555 bp, Artificial Sequence
  derived and/or modified sequence
aatcggaataggcaagcttccggcgggaagtgagccagggcttggcgcggcggccgtggttgcggcgcgggaagtttggatcctggttccgtccgctaggagtctgcgtgcgaggattatggctgctgttcctcaaaataatctacaggagcaactagaacgtcactcagccagaacacttaataataaattaagtctttcaaaaccaaaattttcaggtttcacttttaaaaagaaaacatcttcagataacaatgtatctgtaactaatgtgtcagtagcaaaaacacctgtattaagaaataaagatgttaatgttaccgaagacttttccttcagtgaacctctacccaacaccacaaatcagcaaagggtcaaggacttctttaaaaatgctccagcaggacaggaaacacagagaggtggatcaaaatcattattgccagatttcttgcagactccgaaggaagttgtatgcactacccaaaacacaccaactgtaaagaaatcccgggatactgctctcaagaaattagaatttagttcttcaccagattctttaagtaccatcaatgattgggatgatatggatgactttgatacttctgagacttcaaaatcatttgttacaccaccccaaagtcactttgtaagagtaagcactgctcagaaatcaaaaaagggtaagagaaacttttttaaagcacagctttatacaacaaacacagtaaagactgatttgcctccaccctcctctgaaagcgagcaaatagatttgactgaggaacagaaggatgactcagaatggttaagcagcgatgtgatttgcatcgatgatggccccattgctgaagtgcatataaatgaagatgctcaggaaagtgactctctgaaaactcatttggaagatgaaagagataatagcgaaaagaagaagaatttggaagaagctgaattacattcaactgagaaagttccatgtattgaatttgatgatgatgattatgatacggattttgttccaccttctccagaagaaattatttctgcttcttcttcctcttcaaaatgccttagtacgttaaaggaccttgacacctctgacagaaaagaggatgttcttagcacatcaaaagatcttttgtcaaaacctgagaaaatgagtatgcaggagctgaatccagaaaccagcacagactgtgacgctagacagataagtttacagcagcagcttattcatgtgatggagcacatctgtaaattaattgatactattcctgatgataaactgaaacttttggattgtgggaacgaactgcttcagcagcggaacataagaaggaaacttctaacggaagtagattttaataaaagtgatgccagtcttcttggctcattgtggagatacaggcctgattcacttgatggccctatggagggtgattcctgccctacagggaattctatgaaggagttaaatttttcacaccttccctcaaattctgtttctcctggggactgtttactgactaccaccctaggaaagacaggattctctgccaccaggaagaatctttttgaaaggcctttattcaatacccatttacagaagtcctttgtaagtagcaactgggctgaaacaccaagactaggaaaaaaaaatgaaagctcttatttcccaggaaatgttctcacaagcactgctgtgaaagatcagaataaacatactgcttcaataaatgacttagaaagagaaacccaaccttcctatgatattgataattttgacatagatgactttgatgatgatgatgactgggaagacataatgcataatttagcagccagcaaatcttccacagctgcctatcaacccatcaaggaaggtcggccaattaaatcagtatcagaaagactttcctcagccaagacagactgtcttccagtgtcatctactgctcaaaatataaacttctcagagtcaattcagaattatactgacaagtcagcacaaaatttagcatccagaaatctgaaacatgagcgtttccaaagtcttagttttcctcatacaaaggaaatgatgaagatttttcataaaaaatttggcctgcataattttagaactaatcagctagaggcgatcaatgctgcactgcttggtgaagactgttttatcctgatgccgactggaggtggtaagagtttgtgttaccagctccctgcctgtgtttctcctggggtcactgttgtcatttctcccttgagatcacttatcgtagatcaagtccaaaagctgacttccttggatattccagctacatatctgacaggtgataagactgactcagaagctacaaatatttacctccagttatcaaaaaaagacccaatcataaaacttctatatgtcactccagaaaagatctgtgcaagtaacagactcatttctactctggagaatctctatgagaggaagctcttggcacgttttgttattgatgaagcacattgtgtcagtcagtggggacatgattttcgtcaagattacaaaagaatgaatatgcttcgccagaagtttccttctgttccggtgatggctcttacggccacagctaatcccagggtacagaaggacatcctgactcagctgaagattctcagacctcaggtgtttagcatgagctttaacagacataatctgaaatactatgtattaccgaaaaagcctaaaaaggtggcatttgattgcctagaatggatcagaaagcaccacccatatgattcagggataatttactgcctctccaggcgagaatgtgacaccatggctgacacgttacagagagatgggctcgctgctcttgcttaccatgctggcctcagtgattctgccagagatgaagtgcagcagaagtggattaatcaggatggctgtcaggttatctgtgctacaattgcatttggaatggggattgacaaaccggacgtgcgatttgtgattcatgcatctctccctaaatctgtggagggttactaccaagaatctggcagagctggaagagatggggaaatatctcactgcctgcttttctatacctatcatgatgtgaccagactgaaaagacttataatgatggaaaaagatggaaaccatcatacaagagaaactcacttcaataatttgtatagcatggtacattactgtgaaaatataacggaatgcaggagaatacagcttttggcctactttggtgaaaatggatttaatcctgatttttgtaagaaacacccagatgtttcttgtgataattgctgtaaaacaaaggattataaaacaagagatgtgactgacgatgtgaaaagtattgtaagatttgttcaagaacatagttcatcacaaggaatgagaaatataaaacatgtaggtccttctggaagatttactatgaatatgctggtcgacattttcttggggagtaagagtgcaaaaatccagtcaggtatatttggaaaaggatctgcttattcacgacacaatgccgaaagactttttaaaaagctgatacttgacaagattttggatgaagacttatatatcaatgccaatgaccaggcgatcgcttatgtgatgctcggaaataaagcccaaactgtactaaatggcaatttaaaggtagactttatggaaacagaaaattccagcagtgtgaaaaaacaaaaagcgttagtagcaaaagtgtctcagagggaagagatggttaaaaaatgtcttggagaacttacagaagtctgcaaatctctggggaaagtttttggtgtccattacttcaatatttttaataccgtcactctcaagaagcttgcagaatctttatcttctgatcctgaggttttgcttcaaattgatggtgttactgaagacaaactggaaaaatatggtgcggaagtgatttcagtattacagaaatactctgaatggacatcgccagctgaagacagttccccagggataagcctgtccagcagcagaggccccggaagaagtgccgctgaggagctcgacgaggaaatacccgtatcttcccactactttgcaagtaaaaccagaaatgaaaggaagaggaaaaagatgccagcctcccaaaggtctaagaggagaaaaactgcttccagtggttccaaggcaaagggggggtctgccacatgtagaaagatatcttccaaaacgaaatcctccagcatcattggatccagttcagcctcacatacttctcaagcgacatcaggagccaatagcaaattggggattatggctccaccgaagcctataaatagaccgtttcttaagccttcatatgcattctcataacaaccgaatctcaatgtacatagaccctctttcttgtttgtcagcatctgaccatctgtgactataaagctgttattcttgttataccatttgaagtttttactcgtctctattaatatttaaataaatgctggggggtgatagttcttctttttaaaataaacattttcttttgaataagca

SEQ ID NO: 106121 - DNA, 3505 bp, Artificial Sequence
  derived and/or modified sequence
gaagatgctcaggaaagtgactctctgaaaactcatttggaagatgaaagagataatagcgaaaagaagaagaatttggaagaagctgaattacattcaactgagaaagttccatgtattgaatttgatgatgatgattatgatacggattttgttccaccttctccagaagaaattatttctgcttcttcttcctcttcaaaatgccttagtacgttaaaggaccttgacacctctgacagaaaagaggatgttcttagcacatcaaaagatcttttgtcaaaacctgagaaaatgagtatgcaggagctgaatccagaaaccagcacagactgtgacgctagacagataagtttacagcagcagcttattcatgtgatggagcacatctgtaaattaattgatactattcctgatgataaactgaaacttttggattgtgggaacgaactgcttcagcagcggaacataagaaggaaacttctaacggaagtagattttaataaaagtgatgccagtcttcttggctcattgtggagatacaggcctgattcacttgatggccctatggagggtgattcctgccctacagggaattctatgaaggagttaaatttttcacaccttccctcaaattctgtttctcctggggactgtttactgactaccaccctaggaaagacaggattctctgccaccaggaagaatctttttgaaaggcctttattcaatacccatttacagaagtcctttgtaagtagcaactgggctgaaacaccaagactaggaaaaaaaaatgaaagctcttatttcccaggaaatgttctcacaagcactgctgtgaaagatcagaataaacatactgcttcaataaatgacttagaaagagaaacccaaccttcctatgatattgataattttgacatagatgactttgatgatgatgatgactgggaagacataatgcataatttagcagccagcaaatcttccacagctgcctatcaacccatcaaggaaggtcggccaattaaatcagtatcagaaagactttcctcagccaagacagactgtcttccagtgtcatctactgctcaaaatataaacttctcagagtcaattcagaattatactgacaagtcagcacaaaatttagcatccagaaatctgaaacatgagcgtttccaaagtcttagttttcctcatacaaaggaaatgatgaagatttttcataaaaaatttggcctgcataattttagaactaatcagctagaggcgatcaatgctgcactgcttggtgaagactgttttatcctgatgccgactggaggtggtaagagtttgtgttaccagctccctgcctgtgtttctcctggggtcactgttgtcatttctcccttgagatcacttatcgtagatcaagtccaaaagctgacttccttggatattccagctacatatctgacaggtgataagactgactcagaagctacaaatatttacctccagttatcaaaaaaagacccaatcataaaacttctatatgtcactccagaaaagatctgtgcaagtaacagactcatttctactctggagaatctctatgagaggaagctcttggcacgttttgttattgatgaagcacattgtgtcagtcagtggggacatgattttcgtcaagattacaaaagaatgaatatgcttcgccagaagtttccttctgttccggtgatggctcttacggccacagctaatcccagggtacagaaggacatcctgactcagctgaagattctcagacctcaggtgtttagcatgagctttaacagacataatctgaaatactatgtattaccgaaaaagcctaaaaaggtggcatttgattgcctagaatggatcagaaagcaccacccatatgattcagggataatttactgcctctccaggcgagaatgtgacaccatggctgacacgttacagaagtggattaatcaggatggctgtcaggttatctgtgctacaattgcatttggaatggggattgacaaaccggacgtgcgatttgtgattcatgcatctctccctaaatctgtggagggttactaccaagaatctggcagagctggaagagatggggaaatatctcactgcctgcttttctatacctatcatgatgtgaccagactgaaaagacttataatgatggaaaaagatggaaaccatcatacaagagaaactcacttcaataatttgtatagcatggtacattactgtgaaaatataacggaatgcaggagaatacagcttttggcctactttggtgaaaatggatttaatcctgatttttgtaagaaacacccagatgtttcttgtgataattgctgtaaaacaaaggattataaaacaagagatgtgactgacgatgtgaaaagtattgtaagatttgttcaagaacatagttcatcacaaggaatgagaaatataaaacatgtaggtccttctggaagatttactatgaatatgctggtcgacattttcttggggagtaagagtgcaaaaatccagtcaggtatatttggaaaaggatctgcttattcacgacacaatgccgaaagactttttaaaaagctgatacttgacaagattttggatgaagacttatatatcaatgccaatgaccaggcgatcgcttatgtgatgctcggaaataaagcccaaactgtactaaatggcaatttaaaggtagactttatggaaacagaaaattccagcagtgtgaaaaaacaaaaagcgttagtagcaaaagtgtctcagagggaagagatggttaaaaaatgtcttggagaacttacagaagtctgcaaatctctggggaaagtttttggtgtccattacttcaatatttttaataccgtcactctcaagaagcttgcagaatctttatcttctgatcctgaggttttgcttcaaattgatggtgttactgaagacaaactggaaaaatatggtgcggaagtgatttcagtattacagaaatactctgaatggacatcgccagctgaagacagttccccagggataagcctgtccagcagcagaggccccggaagaagtgccgctgaggagctcgacgaggaaatacccgtatcttcccactactttgcaagtaaaaccagaaatgaaaggaagaggaaaaagatgccagcctcccaaaggtctaagaggagaaaaactgcttccagtggttccaaggcaaagggggggtctgccacatgtagaaagatatcttccaaaacgaaatcctccagcatcattggatccagttcagcctcacatacttctcaagcgacatcaggagccaatagcaaattggggattatggctccaccgaagcctataaatagaccgtttcttaagccttcatatgcattctcataacaaccgaatctcaatgtacatagaccctctttcttgtttgtcagcatctgaccatctgtgactataa

SEQ ID NO: 106122 - DNA, 4254 bp, Artificial Sequence
  derived and/or modified sequence
atggccgccgtgccccagaacaacctgcaggagcagctggagagacacagcgccagaaccctgaacaacaagctgagcctgagcaagcccaagttcagcggcttcaccttcaagaagaagaccagcagcgacaacaacgtgagcgtgaccaacgtgagcgtggccaagacccccgtgctgagaaacaaggacgtgaacgtgaccgaggacttcagcttcagcgagcccctgcccaacaccaccaaccagcagagagtgaaggacttcttcaagaacgcccccgccggccaggagacccagagaggcggcagcaagagcctgctgcccgacttcctgcagacccccaaggaggtggtgtgcaccacccagaacacccccaccgtgaagaagagcagagacaccgccctgaagaagctggagttcagcagcagccccgacagcctgagcaccatcaacgactgggacgacatggacgacttcgacaccagcgagaccagcaagagcttcgtgacccccccccagagccacttcgtgagagtgagcaccgcccagaagagcaagaagggcaagagaaacttcttcaaggcccagctgtacaccaccaacaccgtgaagaccgacctgcccccccccagcagcgagagcgagcagatcgacctgaccgaggagcagaaggacgacagcgagtggctgagcagcgacgtgatctgcatcgacgacggccccatcgccgaggtgcacatcaacgaggacgcccaggagagcgacagcctgaagacccacctggaggacgagagagacaacagcgagaagaagaagaacctggaggaggccgagctgcacagcaccgagaaggtgccctgcatcgagttcgacgacgacgactacgacaccgacttcgtgccccccagccccgaggagatcatcagcgccagcagcagcagcagcaagtgcctgagcaccctgaaggacctggacaccagcgacagaaaggaggacgtgctgagcaccagcaaggacctgctgagcaagcccgagaagatgagcatgcaggagctgaaccccgagaccagcaccgactgcgacgccagacagatcagcctgcagcagcagctgatccacgtgatggagcacatctgcaagctgatcgacaccatccccgacgacaagctgaagctgctggactgcggcaacgagctgctgcagcagagaaacatcagaagaaagctgctgaccgaggtggacttcaacaagagcgacgccagcctgctgggcagcctgtggagatacagacccgacagcctggacggccccatggagggcgacagctgccccaccggcaacagcatgaaggagctgaacttcagccacctgcccagcaacagcgtgagccccggcgactgcctgctgaccaccaccctgggcaagaccggcttcagcgccaccagaaagaacctgttcgagagacccctgttcaacacccacctgcagaagagcttcgtgagcagcaactgggccgagacccccagactgggcaagaagaacgagagcagctacttccccggcaacgtgctgaccagcaccgccgtgaaggaccagaacaagcacaccgccagcatcaacgacctggagagagagacccagcccagctacgacatcgacaacttcgacatcgacgacttcgacgacgacgacgactgggaggacatcatgcacaacctggccgccagcaagagcagcaccgccgcctaccagcccatcaaggagggcagacccatcaagagcgtgagcgagagactgagcagcgccaagaccgactgcctgcccgtgagcagcaccgcccagaacatcaacttcagcgagagcatccagaactacaccgacaagagcgcccagaacctggccagcagaaacctgaagcacgagagattccagagcctgagcttcccccacaccaaggagatgatgaagatcttccacaagaagttcggcctgcacaacttcagaaccaaccagctggaggccatcaacgccgccctgctgggcgaggactgcttcatcctgatgcccaccggcggcggcaagagcctgtgctaccagctgcccgcctgcgtgagccccggcgtgaccgtggtgatcagccccctgagaagcctgatcgtggaccaggtgcagaagctgaccagcctggacatccccgccacctacctgaccggcgacaagaccgacagcgaggccaccaacatctacctgcagctgagcaagaaggaccccatcatcaagctgctgtacgtgacccccgagaagatctgcgccagcaacagactgatcagcaccctggagaacctgtacgagagaaagctgctggccagattcgtgatcgacgaggcccactgcgtgagccagtggggccacgacttcagacaggactacaagagaatgaacatgctgagacagaagttccccagcgtgcccgtgatggccctgaccgccaccgccaaccccagagtgcagaaggacatcctgacccagctgaagatcctgagaccccaggtgttcagcatgagcttcaacagacacaacctgaagtactacgtgctgcccaagaagcccaagaaggtggccttcgactgcctggagtggatcagaaagcaccacccctacgacagcggcatcatctactgcctgagcagaagagagtgcgacaccatggccgacaccctgcagagagacggcctggccgccctggcctaccacgccggcctgagcgacagcgccagagacgaggtgcagcagaagtggatcaaccaggacggctgccaggtgatctgcgccaccatcgccttcggcatgggcatcgacaagcccgacgtgagattcgtgatccacgccagcctgcccaagagcgtggagggctactaccaggagagcggcagagccggcagagacggcgagatcagccactgcctgctgttctacacctaccacgacgtgaccagactgaagagactgatcatgatggagaaggacggcaaccaccacaccagagagacccacttcaacaacctgtacagcatggtgcactactgcgagaacatcaccgagtgcagaagaatccagctgctggcctacttcggcgagaacggcttcaaccccgacttctgcaagaagcaccccgacgtgagctgcgacaactgctgcaagaccaaggactacaagaccagagacgtgaccgacgacgtgaagagcatcgtgagattcgtgcaggagcacagcagcagccagggcatgagaaacatcaagcacgtgggccccagcggcagattcaccatgaacatgctggtggacatcttcctgggcagcaagagcgccaagatccagagcggcatcttcggcaagggcagcgcctacagcagacacaacgccgagagactgttcaagaagctgatcctggacaagatcctggacgaggacctgtacatcaacgccaacgaccaggccatcgcctacgtgatgctgggcaacaaggcccagaccgtgctgaacggcaacctgaaggtggacttcatggagaccgagaacagcagcagcgtgaagaagcagaaggccctggtggccaaggtgagccagagagaggagatggtgaagaagtgcctgggcgagctgaccgaggtgtgcaagagcctgggcaaggtgttcggcgtgcactacttcaacatcttcaacaccgtgaccctgaagaagctggccgagagcctgagcagcgaccccgaggtgctgctgcagatcgacggcgtgaccgaggacaagctggagaagtacggcgccgaggtgatcagcgtgctgcagaagtacagcgagtggaccagccccgccgaggacagcagccccggcatcagcctgagcagcagcagaggccccggcagaagcgccgccgaggagctggacgaggagatccccgtgagcagccactacttcgccagcaagaccagaaacgagagaaagagaaagaagatgcccgccagccagagaagcaagagaagaaagaccgccagcagcggcagcaaggccaagggcggcagcgccacctgcagaaagatcagcagcaagaccaagagcagcagcatcatcggcagcagcagcgccagccacaccagccaggccaccagcggcgccaacagcaagctgggcatcatggccccccccaagcccatcaacagacccttcctgaagcccagctacgccttcagctag

SEQ ID NO: 106123 - DNA, 3144 bp, Artificial Sequence
  derived and/or modified sequence
atgagcatgcaggagctgaaccccgagaccagcaccgactgcgacgccagacagatcagcctgcagcagcagctgatccacgtgatggagcacatctgcaagctgatcgacaccatccccgacgacaagctgaagctgctggactgcggcaacgagctgctgcagcagagaaacatcagaagaaagctgctgaccgaggtggacttcaacaagagcgacgccagcctgctgggcagcctgtggagatacagacccgacagcctggacggccccatggagggcgacagctgccccaccggcaacagcatgaaggagctgaacttcagccacctgcccagcaacagcgtgagccccggcgactgcctgctgaccaccaccctgggcaagaccggcttcagcgccaccagaaagaacctgttcgagagacccctgttcaacacccacctgcagaagagcttcgtgagcagcaactgggccgagacccccagactgggcaagaagaacgagagcagctacttccccggcaacgtgctgaccagcaccgccgtgaaggaccagaacaagcacaccgccagcatcaacgacctggagagagagacccagcccagctacgacatcgacaacttcgacatcgacgacttcgacgacgacgacgactgggaggacatcatgcacaacctggccgccagcaagagcagcaccgccgcctaccagcccatcaaggagggcagacccatcaagagcgtgagcgagagactgagcagcgccaagaccgactgcctgcccgtgagcagcaccgcccagaacatcaacttcagcgagagcatccagaactacaccgacaagagcgcccagaacctggccagcagaaacctgaagcacgagagattccagagcctgagcttcccccacaccaaggagatgatgaagatcttccacaagaagttcggcctgcacaacttcagaaccaaccagctggaggccatcaacgccgccctgctgggcgaggactgcttcatcctgatgcccaccggcggcggcaagagcctgtgctaccagctgcccgcctgcgtgagccccggcgtgaccgtggtgatcagccccctgagaagcctgatcgtggaccaggtgcagaagctgaccagcctggacatccccgccacctacctgaccggcgacaagaccgacagcgaggccaccaacatctacctgcagctgagcaagaaggaccccatcatcaagctgctgtacgtgacccccgagaagatctgcgccagcaacagactgatcagcaccctggagaacctgtacgagagaaagctgctggccagattcgtgatcgacgaggcccactgcgtgagccagtggggccacgacttcagacaggactacaagagaatgaacatgctgagacagaagttccccagcgtgcccgtgatggccctgaccgccaccgccaaccccagagtgcagaaggacatcctgacccagctgaagatcctgagaccccaggtgttcagcatgagcttcaacagacacaacctgaagtactacgtgctgcccaagaagcccaagaaggtggccttcgactgcctggagtggatcagaaagcaccacccctacgacagcggcatcatctactgcctgagcagaagagagtgcgacaccatggccgacaccctgcagaagtggatcaaccaggacggctgccaggtgatctgcgccaccatcgccttcggcatgggcatcgacaagcccgacgtgagattcgtgatccacgccagcctgcccaagagcgtggagggctactaccaggagagcggcagagccggcagagacggcgagatcagccactgcctgctgttctacacctaccacgacgtgaccagactgaagagactgatcatgatggagaaggacggcaaccaccacaccagagagacccacttcaacaacctgtacagcatggtgcactactgcgagaacatcaccgagtgcagaagaatccagctgctggcctacttcggcgagaacggcttcaaccccgacttctgcaagaagcaccccgacgtgagctgcgacaactgctgcaagaccaaggactacaagaccagagacgtgaccgacgacgtgaagagcatcgtgagattcgtgcaggagcacagcagcagccagggcatgagaaacatcaagcacgtgggccccagcggcagattcaccatgaacatgctggtggacatcttcctgggcagcaagagcgccaagatccagagcggcatcttcggcaagggcagcgcctacagcagacacaacgccgagagactgttcaagaagctgatcctggacaagatcctggacgaggacctgtacatcaacgccaacgaccaggccatcgcctacgtgatgctgggcaacaaggcccagaccgtgctgaacggcaacctgaaggtggacttcatggagaccgagaacagcagcagcgtgaagaagcagaaggccctggtggccaaggtgagccagagagaggagatggtgaagaagtgcctgggcgagctgaccgaggtgtgcaagagcctgggcaaggtgttcggcgtgcactacttcaacatcttcaacaccgtgaccctgaagaagctggccgagagcctgagcagcgaccccgaggtgctgctgcagatcgacggcgtgaccgaggacaagctggagaagtacggcgccgaggtgatcagcgtgctgcagaagtacagcgagtggaccagccccgccgaggacagcagccccggcatcagcctgagcagcagcagaggccccggcagaagcgccgccgaggagctggacgaggagatccccgtgagcagccactacttcgccagcaagaccagaaacgagagaaagagaaagaagatgcccgccagccagagaagcaagagaagaaagaccgccagcagcggcagcaaggccaagggcggcagcgccacctgcagaaagatcagcagcaagaccaagagcagcagcatcatcggcagcagcagcgccagccacaccagccaggccaccagcggcgccaacagcaagctgggcatcatggccccccccaagcccatcaacagacccttcctgaagcccagctacgccttcagctag

SEQ ID NO: 106124 - protein, 387 aa, Artificial Sequence
  derived and/or modified sequence
MVGGSVPVFDEIILSTARMNRVLSFHSVSGILVCQAGCVLEELSRYVEERDFIMPLDLGAKGSCHIGGNVATNAGGLRFLRYGSLHGTVLGLEVVLADGTVLDCLTSLRKDNTGYDLKQLFIGSEGTLGIITTVSILCPPKPRAVNVAFLGCPGFAEVLQTFSTCKGMLGEILSAFEFMDAVCMQLVGRHLHLASPVQESPFYVLIETSGSNAGHDAEKLGHFLEHALGSGLVTDGTMATDQRKVKMLWALRERITEALSRDGYVYKYDLSLPVERLYDIVTDLRARLGPHAKHVVGYGHLGDGNLHLNVTAEAFSPSLLAALEPHVYEWTAGQQGSVSAEHGVGFRKRDVLGYSKPPGALQLMQQLKALLDPKGILNPYKTLPSQA

SEQ ID NO: 106125 - protein, 141 aa, Artificial Sequence
  derived and/or modified sequence
MLWALRERITEALSRDGYVYKYDLSLPVERLYDIVTDLRARLGPHAKHVVGYGHLGDGNLHLNVTAEAFSPSLLAALEPHVYEWTAGQQGSVSAEHGVGFRKRDVLGYSKPPGALQLMQQLKALLDPKGILNPYKTLPSQA

SEQ ID NO: 106126 - DNA, 1164 bp, Artificial Sequence
  derived and/or modified sequence
atggtggggggctcagtgcctgtgtttgacgagattatcttatcaaccgcaagaatgaatcgggtccttagctttcatagcgtgtcgggcatcttagtctgtcaagcgggatgcgtgttggaggaattgagtcgctacgttgaggagcgcgacttcatcatgccgttagatctaggtgctaaagggagctgccatataggcgggaacgttgcaactaatgctggcggcctgcggttcctgaggtatggtagcctgcacggcaccgtcctagggcttgaggtggtgctggcagacggaacggtgctggactgcctgactagcctgaggaaagataatactgggtatgaccttaagcagttattcatcggtagcgagggaactctgggcatcattacaacggtgtcaatcttgtgtccccctaagccccgggccgtcaatgtagcctttctggggtgccctggatttgcagaagtgctgcagactttcagcacatgtaagggcatgctaggggagatcttaagcgcttttgagtttatggacgccgtttgcatgcagttagtgggccgccacctacacttagcctcccctgttcaggagagtcccttttacgttctgatcgaaacgtccgggagcaatgctggtcacgatgccgaaaagctgggccattttttggagcatgccctgggaagcggcctcgttacggacggcaccatggccacagaccagcggaaagtgaagatgttgtgggccctgagggaacgaatcaccgaggctctttctagagatggttacgtttataagtacgatctcagtctgccggtcgagcgcctgtacgacatcgtgaccgatctgcgcgcccgtctaggcccccatgcaaagcacgtcgtcggttacggacacttaggtgacgggaacttgcatcttaatgtgacggccgaggccttttctccttcccttctggcggcccttgaaccacatgtctatgagtggacggccggacagcagggctccgtgtcggcagaacacggcgtaggctttcgaaagcgtgatgttcttggatatagcaagcccccaggcgctttacagctaatgcagcagctgaaggctttgcttgacccgaagggtatcctgaatccctacaagacattaccgtctcaggcatag

SEQ ID NO: 106127 - DNA, 426 bp, Artificial Sequence
  derived and/or modified sequence
atgctgtgggccctgagagaaagaattactgaagcactgtctagagatggatatgtctacaagtacgatcttagcctgcccgtagagagactctacgatatcgtgactgacctcagagcccggctggggccacatgctaagcacgtggtaggatacgggcacctaggcgacgggaacctccacctgaacgtgaccgccgaggctttttctccttcccttttggccgcgcttgagccccacgtctatgagtggaccgctgggcagcaaggttctgtttcagccgagcacggggtaggttttcgcaaacgagacgtacttggctactcaaagcctcccggcgctctgcagcttatgcagcagcttaaagctcttctagatccgaagggcatcctcaatccctacaagactctgccttctcaggcttag

SEQ ID NO: 106128 - DNA, 1164 bp, Artificial Sequence
  derived and/or modified sequence
atggtgggcggctctgtgcctgtgtttgatgagatcatcctgagcacagccaggatgaacagagtgctgtccttccacagcgtgtctggcatcctggtgtgccaggccggctgtgtgctggaggagctgagccgctacgtggaggagcgggacttcatcatgcccctggacctgggcgccaagggcagctgccacatcggcggcaatgtggccaccaatgctgggggcctgcgcttcctgcgctatggcagcctgcacggcaccgtgctgggcctggaggtggtgctggctgatggcaccgtgctggactgcctgaccagcctgaggaaggacaacacaggctatgacctgaagcagctgttcatcggcagcgagggcaccctgggcatcatcaccaccgtgtccatcctgtgcccccccaagcccagggctgtgaatgtggccttcctgggctgccccggctttgctgaggtgctgcagaccttcagcacctgcaagggcatgctgggggagatcctgagcgcctttgagttcatggatgctgtgtgcatgcagctggtgggccgccacctgcacctggccagccctgtgcaggagagccccttctacgtgctgattgagaccagcggcagcaatgccggccatgatgctgagaagctgggccacttcctggagcacgccctgggcagcggcctggtgacagatggcaccatggccacagaccagaggaaggtgaagatgctgtgggccctgcgggagcgcatcacagaggccctgagcagagatggctacgtgtacaagtatgacctgagcctgcctgtggagcggctgtatgacatcgtgacagacctgcgggcccggctgggcccccacgccaagcacgtggtgggctacggccacctgggagatggcaacctgcacctgaatgtgacagctgaggccttcagccccagcctgctggccgccctggagccccacgtgtatgagtggacagctggccagcagggctctgtgtctgctgagcacggcgtgggcttcaggaagagagatgtgctgggctacagcaagcccccaggggccctgcagctgatgcagcagctgaaggccctgctggaccccaagggcatcctgaacccctacaagaccctgcccagccaggcctag

SEQ ID NO: 106129 - DNA, 426 bp, Artificial Sequence
  derived and/or modified sequence
atgctgtgggccctgcgggagcgcatcacagaggccctgagcagagatggctacgtgtacaagtatgacctgagcctgcctgtggagcggctgtatgacatcgtgacagacctgcgggcccggctgggcccccacgccaagcacgtggtgggctacggccacctgggagatggcaacctgcacctgaatgtgacagctgaggccttcagccccagcctgctggccgccctggagccccacgtgtatgagtggacagctggccagcagggctctgtgtctgctgagcacggcgtgggcttcaggaagagagatgtgctgggctacagcaagcccccaggggccctgcagctgatgcagcagctgaaggccctgctggaccccaagggcatcctgaacccctacaagaccctgcccagccaggcctag

SEQ ID NO: 106130 - DNA, 1164 bp, Artificial Sequence
  derived and/or modified sequence
atggtgggcggcagcgtgcccgtgttcgacgagatcatcctgagcaccgcacgcatgaatcgtgtgcttagtttccacagcgtaagtggcatcctcgtgtgtcaagctggatgtgtcttggaagaactgtcccggtatgttgaggaacgggattttatcatgccactcgacctcggggccaagggaagctgccatatcgggggcaacgtggctactaatgccggtggcctgcgattcctgagatacgggagcctccatggcacggtgctggggctcgaagtggtgttagccgacggaactgtgcttgattgcctgacatcactgcgcaaggataacaccggttatgacttaaagcagcttttcatcggaagcgaggggacgctgggcattatcacaaccgtctccatcctttgcccacctaaaccacgcgccgtgaacgtggccttcctcggatgcccaggctttgcagaggtcctccaaactttcagcacctgcaaaggaatgctcggcgagattctgtctgcctttgagttcatggatgcagtttgtatgcagttggttggccggcacttgcacctggcctcgccagtgcaggagtcgccgttttatgtgctgatcgaaacctctggatccaatgccggtcatgatgctgagaagctgggacattttctggagcatgcccttggaagtggtttggtcaccgacggcaccatggccacagaccagcgaaaggtaaaaatgctgtgggcgcttcgggaacgcatcacagaggccctgtccagagacgggtacgtgtacaagtatgatttgtctttgcccgtggaaaggctttatgacatcgtgactgacctgcgggccagactgggcccccacgccaaacatgtcgtgggctatggacatttgggggacgggaacctacatctgaatgttaccgctgaggcattcagtccgagcctgctagcagctctggaaccacacgtctatgaatggaccgccggacaacaggggagtgtgtctgccgaacatggggtgggcttccggaaacgcgatgttttgggatatagcaaaccacccggcgccttgcaacttatgcagcagctcaaggctctgctggatccaaaaggaatcttaaacccttacaaaaccttaccatcccaagcatag

SEQ ID NO: 106131 - DNA, 426 bp, Artificial Sequence
  derived and/or modified sequence
atgctgtgggccctgcgggagcggatcaccgaggccctgagccgggacggatatgtatataagtacgacctctccctgccagtggagaggctgtacgatatagtaacagacctgcgtgcaaggctcggcccacacgccaaacacgttgtgggctacgggcacctaggggacggaaatctccacctgaacgttactgcggaggcattttctccatccctcctggctgcattggagccacacgtttacgaatggaccgctggacagcaggggagcgtcagcgccgaacatggagtggggttccggaagagggatgtactgggctactctaagccacctggagctctgcagcttatgcagcagctgaaggcactgcttgacccgaaagggatccttaacccttacaagaccctcccatctcaggcttag

SEQ ID NO: 106132 - DNA, 1164 bp, Artificial Sequence
  derived and/or modified sequence
atggtcggcggaagcgtgccagtgttcgacgaaataatattgagcactgccagaatgaatcgggtcttgtcctttcacagcgtttcagggattctcgtttgccaggccggttgtgtgctggaagaattgtcccgttatgtcgaggagcgagacttcatcatgccccttgatctaggcgctaaagggtcatgtcacataggcggtaacgtcgctaccaacgccggtggtctccggttcctccgatatgggtcattgcatggtacggtcctcggtttggaggtggtgctggcagacggcacagtacttgattgcctgacttctctaaggaaagacaacactggttacgatcttaagcaactgtttattgggtccgagggaactctgggcatcatcactaccgtatcgattctgtgcccccctaagccacgcgcagtgaatgtggcttttctggggtgtccaggattcgctgaagttctccagacattcagcacctgtaagggaatgctcggagagatactctctgccttcgagttcatggacgctgtgtgcatgcagctggtgggcagacatctgcacctcgccagccccgtgcaggagagccccttctacgttctgatagaaacaagcggctctaacgccggtcatgatgctgagaaactgggccattttttagagcacgcattgggcagcggtctagtaactgatgggacgatggcgaccgaccagcgtaaggtaaagatgctgtgggcccttagggagcggattactgaggccctgtcacgagatgggtacgtatataagtatgatctaagcctgcccgtggagaggctgtatgacatcgtaaccgacttgagggccagactcggcccacatgcgaaacacgttgtgggttacggccatctcggggacggcaatttgcatctaaatgtgactgccgaggccttctcccccagcctgttggcagccctggagccccatgtgtatgagtggacagccggtcagcaggggagcgtctctgctgaacacggcgtgggtttcagaaaaagagacgttctcgggtattccaaaccacctggagccctgcaacttatgcagcagctaaaggcgcttctcgaccccaagggaatactcaacccctacaaaactcttccaagtcaggcctag

SEQ ID NO: 106133 - DNA, 426 bp, Artificial Sequence
  derived and/or modified sequence
atgctgtgggcccttagagaacgcatcactgaagcattatcccgcgatggctatgtgtacaagtacgacttaagcctgcccgtagagcggctctatgatatcgtaactgatctccgggcaaggctggggccacacgctaagcacgtcgtgggatatggacacctcggcgacggcaatctgcacttaaatgtgactgccgaagccttttcacctagtctgctagccgctctcgagcctcacgtgtatgaatggactgccggacagcagggtagcgtctctgcagaacatggagtcggtttcaggaaacgtgacgtgttaggctatagtaagccccctggtgctcttcagctaatgcagcaattgaaggcccttttagaccctaaaggcattttaaatccctacaagaccctgccctctcaggcctag

SEQ ID NO: 106134 - DNA, 2227 bp, Artificial Sequence
  derived and/or modified sequence
ttggcgaggctctgggcaggtcctgaggcttttctctgctgttgtccggtgttggcgaggctctgggcaggtcctgagccattctgctttccactctgtggtctttcccttctgggagccctgggtttttggacatgttgagacaatggggcttgcgcaggtccagccgctgccgcgggggccctgtgttcaacgggggacactcagccctgcccaggccccgctgtagcctcagcccacccgagtggaagccacactggtcgcaccagatgccccgggctcctctgagtagtgaccacggcgggtctcattggcactgcctatccacccgtcacgtgtccttccctcccccgtggcccacccaccatgtccttccctcccctgtggcccacccgccatgtccctgcctcccacccgacatgccccttgagctgcctgggccctgctgttgtccccactgcctgtgtgactctgcgcccccttccctaccctgccccaccctggttcagggagcgtccaggcccattctcatcctcagggccttccctggcccttgccactctgtgccgtgtcatgacctgaagctgcaggtgggcgcctcccccttccgtcatggctgtcccccttctgtgaggtgtcccagccgcctgattgccggagtcccagggtgctcggtgctgtcgtggagcctgggacattcactgtctgggattgattccagggttggagccacacctggtctggggcattcgctgtcctgggtcagagcccctcctggtctgggacattcgctgtctggggttggagccacacctggtctggggcatttgctgtccggggtcggagcctcacctggtgaagatacagaacatgctgctgccctaaccccgtgtggtgtgccccctgtccccgggtgtcgttcccatagccagcccttgtctcatctcgtctcatcctctagatgctgtgggccctgagggaaaggatcacagaggcgctgagccgggatggctacgtgtacaagtacgacctctccctccctgtggagcggctctacgacatcgtgactgacctgcgcgcccgcctcggcccgcacgccaagcacgtggtgggctatggccaccttggagatggtaacctgcacctcaatgtgacggcggaggccttcagcccctcgctcctggctgccctggagccccacgtgtacgagtggacggccgggcagcagggcagcgtcagcgcggagcacggagtgggcttcaggaagagggacgtcctgggctacagcaagccaccgggggccctgcagctcatgcagcagctcaaggccctgctggaccccaagggcatcctcaacccctacaagacgctgcccagccaggcctgacggccactcctgctgctgccaaggcccactgggggtcggcgggtggctctcgggcgggggtgttgcggtggctctgagggatgagccggcagtgggcaggggaccaggcacctggttgaagggactgggagcccgcactggggaactgccggacgcaggccctcgggcaggagcatctggcagagtggggggcgtggcaggcaccctcctttgcagggcgaggtggggcctctgcagccatcctggacaggccggggtggcggcagctttgcccacgtggaagcggggtgggtctcacttgcgtggtggcccctggccccatcttgcctgctgcggcctggggagcaggcgctgggtggtggttctgcctgcttgctgctcgttccccgggcatgcgtgggcagcggggggcatgcgtgggcagcagggggcgtgggcagcgggggcacgggcaggaccacgtgggccgtgatcgtgggttgccgagaggacctgagcgctgcggctctgctgaatggagccgggtccctcaggccgtggacgccctcgggaggggggtgactgtggcttgtgtctggacaggaatgtgtcatttcccacatcttctagagggctgccagctgggaagacagttatcagggcaagctgtgctctgagtttcgggttctgctcctacaaagaacgtgcggtgctgcgggcgagggccccggcacggacaagggccactgcagagtgtgtttctgctcgtcagctgccctgggcagcggatgggctgggcgatgcagctggatgcacatctcattctgtcatgaatgtccagtaaaaatctgaattggttgc

SEQ ID NO: 106135 - DNA, 2294 bp, Artificial Sequence
  derived and/or modified sequence
ggccggattcccagtggtggcgaggaggtggtatttttttaagtgtcagtgtggcattgtggttgcctcaataaaacagagtctttttttgtcttttttttttgagacagggtctcgctctcacccaggctggagtgcagtgacacagttgcagctcactgcagcctcgacctcctgggctcaagcaatcctcccgcctcagcctcccgagtagctgagtctacagatctccacaatggaagttcgaagcaagcaaaagccacgcaaaccacaggccgatctgtctgagccctaggatttggcccggttctgcttcagccaccagcaccgtctgctcctcctcagaatccttcctcccccgtggcccgcccgccgtgtccctcctcctccacggcccgcccaccgtgtccttccctcccccgtggcccacccaccatgtccttccctcccctgtggcccacccgccatgtccctgcctcccacccgacatgccccttgctgcctgggccctgctgttgtccccactgcctgtgtgactctgcgcccccttccctaccctgccccaccctggttcagggagcgtccaggcccattctcatcctcagggccttccctggcccttgccactctgtgccgtgtcatgacctgaagctgcaggtgggcgcctcccccttccgtcatggctgtcccccttctgtgaggtgtcccagccgcctgattgccggagtcccagggtgctcggtgctgtcgtggagcctgggacattcactgtctgggattgattccagggttggagccacacctggtctggggcattcgctgtcctgggtcagagcccctcctggtctgggacattcgctgtctggggttggagccacacctggtctggggcatttgctgtccggggtcggagcctcacctggtgaagatacagaacatgctgctgccctaaccccgtgtggtgtgccccctgtccccgggtgtcgttcccatagccagcccttgtctcatctcgtctcatcctctagatgctgtgggccctgagggaaaggatcacagaggcgctgagccgggatggctacgtgtacaagtacgacctctccctccctgtggagcggctctacgacatcgtgactgacctgcgcgcccgcctcggcccgcacgccaagcacgtggtgggctatggccaccttggagatggtaacctgcacctcaatgtgacggcggaggccttcagcccctcgctcctggctgccctggagccccacgtgtacgagtggacggccgggcagcagggcagcgtcagcgcggagcacggagtgggcttcaggaagagggacgtcctgggctacagcaagccaccgggggccctgcagctcatgcagcagctcaaggccctgctggaccccaagggcatcctcaacccctacaagacgctgcccagccaggcctgacggccactcctgctgctgccaaggcccactgggggtcggcgggtggctctcgggcgggggtgttgcggtggctctgagggatgagccggcagtgggcaggggaccaggcacctggttgaagggactgggagcccgcactggggaactgccggacgcaggccctcgggcaggagcatctggcagagtggggggcgtggcaggcaccctcctttgcagggcgaggtggggcctctgcagccatcctggacaggccggggtggcggcagctttgcccacgtggaagcggggtgggtctcacttgcgtggtggcccctggccccatcttgcctgctgcggcctggggagcaggcgctgggtggtggttctgcctgcttgctgctcgttccccgggcatgcgtgggcagcggggggcatgcgtgggcagcagggggcgtgggcagcgggggcacgggcaggaccacgtgggccgtgatcgtgggttgccgagaggacctgagcgctgcggctctgctgaatggagccgggtccctcaggccgtggacgccctcgggaggggggtgactgtggcttgtgtctggacaggaatgtgtcatttcccacatcttctagagggctgccagctgggaagacagttatcagggcaagctgtgctctgagtttcgggttctgctcctacaaagaacgtgcggtgctgcgggcgagggccccggcacggacaagggccactgcagagtgtgtttctgctcgtcagctgccctgggcagcggatgggctgggcgatgcagctggatgcacatctcattctgtcatgaatgtccagtaaaaatctgaattggttgc

SEQ ID NO: 106136 - DNA, 1164 bp, Artificial Sequence
  derived and/or modified sequence
atggtgggcggcagcgtgcccgtgttcgacgagatcatcctgagcaccgccagaatgaacagagtgctgagcttccacagcgtgagcggcatcctggtgtgccaggccggctgcgtgctggaggagctgagcagatacgtggaggagagagacttcatcatgcccctggacctgggcgccaagggcagctgccacatcggcggcaacgtggccaccaacgccggcggcctgagattcctgagatacggcagcctgcacggcaccgtgctgggcctggaggtggtgctggccgacggcaccgtgctggactgcctgaccagcctgagaaaggacaacaccggctacgacctgaagcagctgttcatcggcagcgagggcaccctgggcatcatcaccaccgtgagcatcctgtgcccccccaagcccagagccgtgaacgtggccttcctgggctgccccggcttcgccgaggtgctgcagaccttcagcacctgcaagggcatgctgggcgagatcctgagcgccttcgagttcatggacgccgtgtgcatgcagctggtgggcagacacctgcacctggccagccccgtgcaggagagccccttctacgtgctgatcgagaccagcggcagcaacgccggccacgacgccgagaagctgggccacttcctggagcacgccctgggcagcggcctggtgaccgacggcaccatggccaccgaccagagaaaggtgaagatgctgtgggccctgagagagagaatcaccgaggccctgagcagagacggctacgtgtacaagtacgacctgagcctgcccgtggagagactgtacgacatcgtgaccgacctgagagccagactgggcccccacgccaagcacgtggtgggctacggccacctgggcgacggcaacctgcacctgaacgtgaccgccgaggccttcagccccagcctgctggccgccctggagccccacgtgtacgagtggaccgccggccagcagggcagcgtgagcgccgagcacggcgtgggcttcagaaagagagacgtgctgggctacagcaagccccccggcgccctgcagctgatgcagcagctgaaggccctgctggaccccaagggcatcctgaacccctacaagaccctgcccagccaggcctag

SEQ ID NO: 106137 - DNA, 426 bp, Artificial Sequence
  derived and/or modified sequence
atgctgtgggccctgagagagagaatcaccgaggccctgagcagagacggctacgtgtacaagtacgacctgagcctgcccgtggagagactgtacgacatcgtgaccgacctgagagccagactgggcccccacgccaagcacgtggtgggctacggccacctgggcgacggcaacctgcacctgaacgtgaccgccgaggccttcagccccagcctgctggccgccctggagccccacgtgtacgagtggaccgccggccagcagggcagcgtgagcgccgagcacggcgtgggcttcagaaagagagacgtgctgggctacagcaagccccccggcgccctgcagctgatgcagcagctgaaggccctgctggaccccaagggcatcctgaacccctacaagaccctgcccagccaggcctag

SEQ ID NO: 106138 - protein, 373 aa, Artificial Sequence
  derived and/or modified sequence
MKYTKQNFMMSVLGIIIYVTDLIVDIWVSVRFFHEGQYVFSALALSFMLFGTLVAQCFSYSWFKADLKKAGQESQHCFLLLHCLQGGVFTRYWFALKRGYHAAFKYDSNTSNFVEEQIDLHKEVIDRVTDLSMLRLFETYLEGCPQLILQLYILLEHGQANFSQYAAIMVSCCAISWSTVDYQVALRKSLPDKKLLNGLCPKITYLFYKLFTLLSWMLSVVLLLFLNVKIALFLLLFLWLLGIIWAFKNNTQFCTCISMEFLYRIVVGFILIFTFFNIKGQNTKCPMSCYYIVRVLGTLGILTVFWVCPLTIFNPDYFIPISITIVLTLLLGILFLIVYYGSFHPNRSAETKCDEIDGKPVLRECRMRYFLME

SEQ ID NO: 106139 - DNA, 1122 bp, Artificial Sequence
  derived and/or modified sequence
atgaagtacaccaagcagaacttcatgatgagcgtgctgggcatcatcatctacgtgaccgacctgatcgtggacatctgggtgagcgtgagattcttccacgagggccagtacgtgttcagcgccctggccctgagcttcatgctgttcggcaccctggtggcccagtgcttcagctacagctggttcaaggccgacctgaagaaggccggccaggagagccagcactgcttcctgctgctgcactgcctgcagggcggcgtgttcaccagatactggttcgccctgaagagaggctaccacgccgccttcaagtacgacagcaacaccagcaacttcgtggaggagcagatcgacctgcacaaggaggtgatcgacagagtgaccgacctgagcatgctgagactgttcgagacctacctggagggctgcccccagctgatcctgcagctgtacatcctgctggagcacggccaggccaacttcagccagtacgccgccatcatggtgagctgctgcgccatcagctggagcaccgtggactaccaggtggccctgagaaagagcctgcccgacaagaagctgctgaacggcctgtgccccaagatcacctacctgttctacaagctgttcaccctgctgagctggatgctgagcgtggtgctgctgctgttcctgaacgtgaagatcgccctgttcctgctgctgttcctgtggctgctgggcatcatctgggccttcaagaacaacacccagttctgcacctgcatcagcatggagttcctgtacagaatcgtggtgggcttcatcctgatcttcaccttcttcaacatcaagggccagaacaccaagtgccccatgagctgctactacatcgtgagagtgctgggcaccctgggcatcctgaccgtgttctgggtgtgccccctgaccatcttcaaccccgactacttcatccccatcagcatcaccatcgtgctgaccctgctgctgggcatcctgttcctgatcgtgtactacggcagcttccaccccaacagaagcgccgagaccaagtgcgacgagatcgacggcaagcccgtgctgagagagtgcagaatgagatacttcctgatggagtag

SEQ ID NO: 106140 - DNA, 1122 bp, Artificial Sequence
  derived and/or modified sequence
atgaagtatacaaaacagaactttatgatgagtgtgctgggcattattatctacgtgaccgacctcatagtcgacatttgggtctccgttcgattctttcacgaaggtcagtatgtgttttcagccctggccctcagtttcatgcttttcggcacccttgtcgctcaatgcttttcgtattcatggttcaaggccgatctcaagaaagctggccaggagagtcagcactgcttcctcctcttacactgcctccaaggcggcgtttttacacgttactggttcgctttaaagaggggctatcatgcagccttcaagtacgatagcaacacttccaactttgttgaggagcagatcgacctgcacaaggaggtgattgaccgcgtgacagatctctcaatgctccgcctcttcgaaacatatttggaagggtgtccacagctgattctgcagctgtatattctgctggaacacggacaggcgaacttttctcagtatgcggccattatggtgtcttgttgcgcgatctcatggtctacagttgactaccaggtggccctgcgaaagtccctacccgataagaaacttctgaacggtctctgccctaaaattacctatctgttttacaaacttttcacactgttatcttggatgctgagtgtggtgttacttctctttcttaatgtgaagatagcgctgttcctcctcctgtttctgtggctgctggggattatatgggccttcaagaataacactcaattttgtacctgcatatctatggagtttctgtatcgaatcgtcgtcggcttcattttgatcttcacctttttcaacattaagggacaaaatacaaaatgtccaatgtcatgctactatattgtccgggtactgggcacgctcggcattttaacagtgttctgggtttgtcctctgaccatattcaacccggactacttcattccaatttctattaccatcgtgttgacattattgctgggcatcctttttcttattgtgtactatggaagttttcatcctaatcgaagtgccgagactaagtgcgacgagatcgacggcaaacccgtacttagagaatgccggatgaggtattttctgatggagtag

SEQ ID NO: 106141 - DNA, 1122 bp, Artificial Sequence
  derived and/or modified sequence
atgaagtatacaaagcagaattttatgatgtcagtgcttggcatcatcatctatgtgaccgacctgattgtagatatctgggtgtcggtgcggttctttcatgagggacagtacgtgttttccgccctggccttgagctttatgctgttcggcactctggtagcccagtgtttcagctacagttggtttaaggcagatctgaagaaagcagggcaggagtctcagcactgttttttactgctgcactgcctgcagggaggcgtgttcacaaggtactggtttgctctcaaacgtggctaccacgctgcctttaaatatgattcaaacacttcaaactttgtggaagagcagatcgacttacataaggaagtgatagatagagttactgacttgagcatgctccgcttattcgagacgtacctggagggttgcccccaactgatcctgcagctctatattctccttgagcacgggcaggctaacttctcgcagtacgccgccatcatggtatcatgttgcgcgatctcttggtccaccgtggattatcaggtcgcactgaggaaatctttgcccgacaagaaattgctaaacgggctgtgccccaaaatcacatatctgttttacaagctgtttacgctgctaagctggatgctgtccgtcgtactgctcctgtttctgaatgtgaagattgcacttttcttgctgctgtttctctggctgctgggaatcatctgggcctttaagaataatacgcaattctgcacctgcatatccatggagttcctgtatagaattgtggtcgggtttattctgatcttcactttctttaacatcaagggtcagaacaccaagtgtccaatgtcttgttattacatcgtgagagttctgggcaccctcggaatcttgaccgtgttctgggtctgccccctgaccattttcaatccagactacttcattccgatttctattaccattgtgctgaccctgctactgggaatcctgttcctgattgtgtactacggttcttttcaccccaaccgctctgcagaaactaaatgtgacgaaatagacggcaaaccagtgctgagagaatgccggatgagatacttcttgatggaatag

SEQ ID NO: 106142 - DNA, 1122 bp, Artificial Sequence
  derived and/or modified sequence
atgaagtacaccaagcagaacttcatgatgtctgtgctgggcatcatcatctacgtgacagacctgattgtggacatctgggtgtctgtgcgcttcttccacgagggccagtatgtgttttctgccctggccctgtccttcatgctgtttggcaccctggtggcccagtgcttctcctacagctggttcaaggctgacctgaagaaggccggccaggagagccagcactgcttcctgctgctgcactgcctgcagggcggcgtcttcacccgctactggtttgccctgaagaggggctaccacgccgccttcaagtatgacagcaacaccagcaactttgtggaggagcagattgacctgcacaaggaggtgattgacagagtgacagacctgtccatgctgcggctgtttgagacctacctggagggctgcccccagctgatcctgcagctgtacatcctgctggagcacggccaggccaacttcagccagtatgctgccatcatggtgtcctgctgtgccatctcctggagcacagtggactaccaggtggccctgaggaagagcctgcctgacaagaagctgctgaatggcctgtgccccaagatcacctacctgttctacaagctgttcaccctgctgtcctggatgctgtctgtggtgctgctgctcttcctgaatgtgaagatcgccctcttcctgctgctcttcctgtggctgctgggcatcatctgggccttcaagaacaacacccagttctgcacctgcatctccatggagttcctgtacagaattgtggtgggcttcatcctgatcttcaccttcttcaacatcaagggccagaacaccaagtgccccatgagctgctactacatcgtgcgggtgctgggcaccctgggcatcctgactgtgttctgggtgtgccccctgaccatcttcaacccagactacttcatccccatcagcatcaccatcgtgctgaccctgctgctgggcatcctcttcctgattgtgtactacggcagcttccaccccaacagatctgctgagaccaagtgtgatgaaattgatggcaagcctgtgctgcgggagtgcaggatgagatacttcctgatggagtag

SEQ ID NO: 106143 - DNA, 1122 bp, Artificial Sequence
  derived and/or modified sequence
atgaagtacaccaagcagaacttcatgatgagcgtgctgggcatcattatctacgtgactgatctgatcgtggacatctgggtttccgtgagattctttcacgaggggcagtacgtgttcagtgccctggccctgtctttcatgttatttggcactctcgtcgcacagtgcttttcctacagctggtttaaagccgacctgaagaaggcgggccaggagtcccagcactgctttttgctcctccattgcctacaaggaggcgtgttcactcgctattggtttgcccttaaacgcggctaccacgctgcatttaagtacgactctaacacctccaatttcgtcgaagaacagattgatcttcacaaggaggtcattgatcgggtgactgatctgtcaatgctcaggttgttcgaaacatatctggaagggtgtccccagctgatcctgcaactgtacatcttgcttgagcatggacaggccaacttctctcagtatgccgccatcatggtatcttgttgtgcaatttcctggtccacggtggattatcaggtggctcttcggaaaagcctccctgataaaaagcttctgaatgggttgtgcccaaagattacctacctgttctacaagcttttcacactcttgtcctggatgctgtctgttgttctcctcctatttctgaatgtgaagatagcgctatttctcctactttttctctggctcctgggcatcatctgggcatttaaaaataatacccagttctgtacgtgcatctctatggagttcctataccgcatcgtggtggggtttattttgatattcaccttctttaatattaaaggccagaacactaaatgtccaatgtcctgttattacattgtccgggtcttgggcactctgggaatcctaacggttttttgggtgtgccccctgacaatttttaatcctgactacttcattccaatctctattacgatcgtgctaaccctgctccttggcatattgtttttaatagtctactacggatcattccatcctaatagatcggctgagactaagtgcgatgagattgacggaaagccagtgctgcgcgaatgcaggatgcggtattttttgatggaatag

SEQ ID NO: 106144 - DNA, 1122 bp, Artificial Sequence
  derived and/or modified sequence
atgaagtacaccaagcagaacttcatgatgagcgtgctgggcatcatcatctacgttactgacctgattgtggacatctgggtttcagttcggttttttcacgaaggccagtacgttttttcagccttagccctgagctttatgctgttcggaacgctggttgctcagtgtttcagctacagctggttcaaagctgacctgaagaaggccggacaggaatcccagcattgttttctcctcttacattgcttgcagggtggtgtatttacgagatattggttcgccctcaagcgcggctaccatgcggcctttaaatatgatagtaatacaagcaacttcgttgaggagcagattgacctgcacaaggaggtgattgaccgggtcacagacctgtctatgctgcgactgtttgagacgtacttggagggttgcccccaattgattctgcagctgtacatcctcctcgagcacgggcaggcaaacttttcgcagtacgctgctatcatggtatcatgttgcgctatctcatggtctactgtggactatcaagtagctctccgaaagagcctgccggacaaaaaactcctaaacggcctgtgtccgaagataacatacctcttctacaaactttttaccctgctttcctggatgctgtctgtcgtgctgcttctgttcctgaacgtcaaaattgctctgttcttactgctatttttgtggctgcttggaattatctgggccttcaaaaacaacacgcagttctgcacctgtatctctatggagttcctgtacagaatcgtggtcgggttcatattgatcttcacatttttcaatataaaagggcagaatactaagtgcccgatgagctgttattatatcgtgagagtgttgggcacgctgggaatactgaccgtcttctgggtctgtcctctcacaatttttaacccagattacttcatccccatcagcattaccatcgtccttactctgctgctcggaattctattcctcattgtgtactacgggtcctttcaccctaatcggtcggcagaaactaaatgcgatgagattgatggcaaaccggtcctgagggaatgtagaatgcgctattttttgatggaatag

SEQ ID NO: 106145 - DNA, 1122 bp, Artificial Sequence
  derived and/or modified sequence
atgaagtacacgaaacagaacttcatgatgagcgttttgggtataatcatatatgtgacggatctgattgtcgatatctgggtgtcagtacgattcttccatgagggccagtacgtcttcagcgccttggccctcagtttcatgttatttggcaccctcgtggcacaatgcttctcttattcatggtttaaggctgacctgaagaaggcaggtcaggaatcacagcactgtttcctgctcctacactgtctgcaggggggtgtcttcacaaggtactggttcgccctaaaacgcggatatcacgccgcatttaagtatgattccaacacatccaatttcgtggaggaacaaatagatctgcataaggaagtaatcgatcgggtgaccgatctcagcatgctgcgactgttcgaaacataccttgaagggtgcccccagctgatcctgcagctgtatattttgctagagcacgggcaggctaattttagtcagtatgctgctattatggtgtcctgctgtgcaatttcttggagcacagtggattatcaggtggccctgcgaaagtccctccccgataagaaacttttgaacgggctgtgccccaaaattacgtacctgttctacaagctgtttacactcttgtcctggatgctgagtgtggtcctcttgctctttctgaacgttaagattgcactcttcctccttttgttcctatggctattgggtataatctgggcttttaaaaataatactcagttttgtacgtgtatcagcatggagtttttgtaccggattgtcgtcgggttcattctcatattcacctttttcaatattaaggggcaaaataccaagtgccccatgagctgctactatattgtgcgcgtcttaggcactctcgggattctgactgtgttttgggtgtgccccctcacaatcttcaatcctgattacttcataccgatctcaatcactatagtgctcacactcttgctcggcattttatttttgattgtgtactacggttcttttcaccccaatcgatctgccgagacaaagtgcgacgaaatcgacggaaagcccgtgctgcgcgaatgcaggatgagatattttctgatggagtag

SEQ ID NO: 106146 - DNA, 1122 bp, Artificial Sequence
  derived and/or modified sequence
atgaagtacaccaagcagaattttatgatgagtgtcttgggaattattatctacgtgactgacctaattgttgacatttgggtgagcgtgcggtttttccacgagggccagtacgtgttctcggcactcgctctgagtttcatgttattcggtactctagtcgcccaatgcttcagctactcatggtttaaggccgacctgaaaaaggcaggccaggaatcccagcactgttttctgctgctgcattgtcttcagggcggtgtattcactcggtactggtttgctctcaagaggggatatcacgccgcatttaagtacgactcaaatacatcgaactttgtggaggaacagattgacctccacaaggaagtcatcgatagggttacagacttgtctatgctgcgcttgttcgagacctatctggagggatgtccccagctgattctgcaactgtacatcctcctcgaacatgggcaagcgaatttctcgcagtacgccgctatcatggtatcttgttgtgcaatcagctggagtacagttgattaccaggtagccttgcgcaagagcctccccgacaagaagttgctgaacgggctgtgtccaaaaattacgtacctgttttacaagctgttcacactgctctcctggatgctgagtgttgtgctgctgctgtttctgaacgtgaagatcgccctctttctcttattatttctttggctgttggggattatttgggcttttaaaaacaacacccagttttgcacctgtatctccatggaatttttgtatcggatcgttgtcgggttcattctgatatttaccttctttaatattaaggggcagaacaccaaatgtccgatgtcctgttactacattgtaagagtgctgggaacacttgggatactaactgtcttctgggtctgtccgcttacaattttcaatcctgattatttcatccctatttctataacaattgtgctgactctcctcctcggaatccttttcttaattgtgtactacggctcgttccaccctaaccggtcagcagagactaagtgtgatgagatcgatggcaaacccgtgctgagagagtgccgcatgcgatatttcttaatggagtag

SEQ ID NO: 106147 - DNA, 3174 bp, Artificial Sequence
  derived and/or modified sequence
gcgcgggcagtggtgggaaggctggcgcgaggcgtgaggtggcgtgaggcgaagctggaatctgcctctgtcacgggggctggtgcctcacgggtttgtgtcctagacaggcgagtggatccaagtgggcgagagacattttaatctggaagagtcttgtgatttgggagacagtgaagaagaagtaaaatattcacaagatgaagatttttccagaagggactttgagtcaaagatggctttttatatttgacaagtcttgtcatctgtaatgaagatcattgtgaaacagaagattgattaaagccttgtaacattggacctagattagagatttagaaaagaaagtcaaaattagtcactttagtgttagtgttcccatttcataatatttattctttcttctaaatagatttagggagtagaaattaaaattcaatgctataccaaagggtatactaatatttgtttggctttttttccctttttgtgagggagaaaaaagtagataacgaaaagctatagtcattcgtaatgaaatatactaaacagaattttatgatgtcagttcttggcattataatctacgtaactgatttaattgtggacatatgggtatctgtcagatttttccatgaaggacagtatgtttttagtgctttagcgttaagctttatgctttttggaacacttgtggctcagtgttttagttattcttggttcaaggctgatttaaagaaagcaggccaagaaagtcagcattgttttcttctacttcattgcttgcaaggaggagtttttacaaggtattggtttgccttaaaaaggggttaccatgcagcttttaaatatgacagcaatactagtaacttcgtggaagaacaaattgatctacataaagaagttatagatagagtgactgatttgagcatgctcagactatttgagacctacctggaaggctgcccacaacttattcttcaactctacattcttctggagcatggacaagcgaatttcagtcagtatgcggccatcatggtctcttgctgtgctatttcttggtcaactgttgattatcaagtagctttaagaaaatccttgcctgacaaaaagcttcttaatggattatgtcccaaaatcacatatctcttttacaagttgtttacattattatcgtggatgctgagtgttgtacttctactattcttaaatgttaagattgctttatttctgttgttatttctttggttgttaggtataatatgggcatttaaaaacaacacccagttttgtacttgtataagtatggaattcttatataggattgttgttggattcattcttatctttacattttttaatattaagggacagaataccaagtgtccaatgtcttgttattatattgttagggtactgggcactttggggatattgactgtattctgggtttgccccctcactatttttaatccagactattttatacctatcagtataactatagttcttactcttcttcttggaattctttttcttattgtttattatgggagttttcacccaaacagaagtgcagaaacaaaatgtgatgaaattgatggaaaaccagttctaagagaatgtagaatgagatatttcctaatggaataagctattcatttatgatatatattttcttatattttgtttcattggttagtaaagaaaatgtgtgttatgtgggtgtgttgtctcttatttttgccacctttaatttgaaattagttcagtgaaataggagatacatagtagtattttatttttaaaattaatttctcatttggttttgaagatcttgagtactcagatatctttctactgcctggtagagctgccatcttgagcctgaaatataagaaatggtctggttttcataatgagaaggctggaattgagcttccctcccattttccttgttcctgaactaatactactgtacctgttatggaggactgcaaagggaagagaaaagcagaacactgtattattttttcctttattgtcttcagtgcatatatttgcagttggggacaggttgagtagaggaaaagggaaagaagggaaagcagaaaacaaatttttagcatctgctgtgctttcatccatgaaatctccaattcagtaagtgcaaaagagaattggtgtgcatctgagaggtctgacatttcattatttacttatttcctagcttttctgaattaatgcactcttaacatataattatattaatcctatttgtgctagaatagttgtatctaaatcatattttaaaattatttttatttttaaaaaattatggtaaaaacatataaaatttaccatcttaatcactttgagtgtacagttcatcagtgttaactgtattcaccttgtgcaacagatctcaaggactttttcaccttgtaaaactaagattctctatttattgaacaaatccccatttcctccttccccaagtctctctcaactgaaattataattttttgtttctatgagtttgaatactttagataccttgttgccatggtttgaatgtgccccccagatttcatgtgtgtgaaacttaatctccaaatttgtatgttgatggcatttggaagtggtggggactttgtttatttatttatttttaattttttaattttatattattattattattattatactttaaggtttagggtacatgtgcacaatgtgcaggttagttacatatgtatacatgtgccatgctggtgtgctgcacccattaactcgtcatttatcattaggtatatctcctaaagctatccctcccccctccccccaccccacaacagtccccagagtgtgatgatccccttcctgtgtccatgtgttctcattgttcagttcccacctatgagtgagaatatgcagtgtttggttttttgttcttgcgatagtttactgagaatgatgatttccagcttcatccatgtccctacaaaggacatgaactcatcattttttatggctgcatagtattccatggtgtatatgtgccacattttcttaatccagtctattgttgttggacatttgggttggttccaagtctttgctattgtgaatagtgctgcaataaacatacgtgtgcatgtgtcttta

SEQ ID NO: 106148 - DNA, 1799 bp, Artificial Sequence
  derived and/or modified sequence
gtgaggtggcgtgaggcgaagctggaatctgcctctgtcacgggggctggtgcctcacgggtttgtgtcctagacaggcgagtggatccaagtgggcgagagacattttaatctggaagagtcttgtgatttgggagacagtgaagaagaagtaaaatattcacaagatgaagatttttccagaagggactttgagtcaaagatggctttttatatttgacaagattcaaaatctagtgcattagacttttgaactagctgttccttcaagctggaaggcttttccatctctatgcacatggccaatttcactactcaaatgccaccttctcagtcttgtcatctgtaatgaagatcattgtgaaacagaagattgattaaagccttgtaacattggacctagattagagatttagaaaagaaagtcaaaattagtcactttagtgttagtgttcccatttcataatatttattctttcttctaaatagatttagggagtagaaattaaaattcaatgctataccaaagggtatactaatatttgtttggctttttttccctttttgtgagggagaaaaaagtagataacgaaaagctatagtcattcgtaatgaaatatactaaacagaattttatgatgtcagttcttggcattataatctacgtaactgatttaattgtggacatatgggtatctgtcagatttttccatgaaggacagtatgtttttagtgctttagcgttaagctttatgctttttggaacacttgtggctcagtgttttagttattcttggttcaaggctgatttaaagaaagcaggccaagaaagtcagcattgttttcttctacttcattgcttgcaaggaggagtttttacaaggtattggtttgccttaaaaaggggttaccatgcagcttttaaatatgacagcaatactagtaacttcgtggaagaacaaattgatctacataaagaagttatagatagagtgactgatttgagcatgctcagactatttgagacctacctggaaggctgcccacaacttattcttcaactctacattcttctggagcatggacaagcgaatttcagtcagtatgcggccatcatggtctcttgctgtgctatttcttggtcaactgttgattatcaagtagctttaagaaaatccttgcctgacaaaaagcttcttaatggattatgtcccaaaatcacatatctcttttacaagttgtttacattattatcgtggatgctgagtgttgtacttctactattcttaaatgttaagattgctttatttctgttgttatttctttggttgttaggtataatatgggcatttaaaaacaacacccagttttgtacttgtataagtatggaattcttatataggattgttgttggattcattcttatctttacattttttaatattaagggacagaataccaagtgtccaatgtcttgttattatattgttagggtactgggcactttggggatattgactgtattctgggtttgccccctcactatttttaatccagactattttatacctatcagtataactatagttcttactcttcttcttggaattctttttcttattgtttattatgggagttttcacccaaacagaagtgcagaaacaaaatgtgatgaaattgatggaaaaccagttctaagagaatgtagaatgagatatttcctaatggaataagctattcatttatgatatatattttcttatattttgtttcattggttagtaaagaaaatgtgtgtt

SEQ ID NO: 106149 - protein, 337 aa, Artificial Sequence
  derived and/or modified sequence
MKKMPLFSKSHKNPAEIVKILKDNLAILEKQDKKTDKASEEVSKSLQAMKEILCGTNEKEPPTEAVAQLAQELYSSGLLVTLIADLQLIDFEGKKDVTQIFNNILRRQIGTRSPTVEYISAHPHILFMLLKGYEAPQIALRCGIMLRECIRHEPLAKIILFSNQFRDFFKYVELSTFDIASDAFATFKDLLTRHKVLVADFLEQNYDTIFEDYEKLLQSENYVTKRQSLKLLGELILDRHNFAIMTKYISKPENLKLMMNLLRDKSPNIQFEAFHVFKVFVASPHKTQPIVEILLKNQPKLIEFLSSFQKERTDDEQFADEKNYLIKQIRDLKKTAP

SEQ ID NO: 106150 - protein, 314 aa, Artificial Sequence
  derived and/or modified sequence
MPLFSKSHKNPAEIVKILKDNLAILEKQDKKTDKASEEVSKSLQAMKEILCGTNEKEPPTEAVAQLAQELYSSGLLVTLIADLQLIDFEGKKDVTQIFNNILRRQIGTRSPTVEYISAHPHILFMLLKGYEAPQIALRCGIMLRECIRHEPLAKIILFSNQFRDFFKYVELSTFDIASDAFATFKIFEDYEKLLQSENYVTKRQSLKLLGELILDRHNFAIMTKYISKPENLKLMMNLLRDKSPNIQFEAFHVFKVFVASPHKTQPIVEILLKNQPKLIEFLSSFQKERTDDEQFADEKNYLIKQIRDLKKTAP

SEQ ID NO: 106151 - protein, 93 aa, Artificial Sequence
  derived and/or modified sequence
MKKMPLFSKSHKNPAEIVKILKDNLAILEKQDKKTDKASEEVSKSLQAMKEILCGTNEKEPPTEAVAQLAQELYSSGLLVTLIADLQLIDFEV

SEQ ID NO: 106152 - protein, 128 aa, Artificial Sequence
  derived and/or modified sequence
MKKMPLFSKSHKNPAEIVKILKDNLAILEKQDKKTDKASEEVSKSLQAMKEILCGTNEKEPPTEAVAQLAQELYSSGLLVTLIADLQLIDFEGKKDVTQIFNNILRRQIGTRSPTVEYISAHPHILFM

SEQ ID NO: 106153 - protein, 188 aa, Artificial Sequence
  derived and/or modified sequence
MKKMPLFSKSHKNPAEIVKILKDNLAILEKQDKKTDKASEEVSKSLQAMKEILCGTNEKEPPTEAVAQLAQELYSSGLLVTLIADLQLIDFEGKKDVTQIFNNILRRQIGTRSPTVEYISAHPHILFMLLKGYEAPQIALRCGIMLRECIRHEPLAKIILFSNQFRDFFKYVELSTFDIASDAFATFK

SEQ ID NO: 106154 - DNA, 1014 bp, Artificial Sequence
  derived and/or modified sequence
atgaaaaaaatgcccctgttcagtaagtcccacaagaaccctgcggaaattgtgaaaatcctaaaggataatctggccatcctggagaaacaggacaagaagaccgacaaggcctcagaggaagtatctaaaagtttgcaggccatgaaggagatcctgtgcgggaccaatgagaaggagcctcccacagaagctgtcgctcaactggctcaggagctttatagcagcggactgctcgtcactctcatcgccgaccttcagctcatcgatttcgagggcaaaaaggacgtgacccaaattttcaacaacatcctccgccgacagattggaactcgctccccgacggtcgaatatattagcgcccacccacatatcctttttatgctactcaagggctacgaggccccccagatcgctttacgttgtggcatcatgttacgcgaatgtatcaggcacgaacccctggccaagataattctgttctccaaccaattcagagatttcttcaaatacgtggaactatccaccttcgacatcgccagtgatgcctttgccaccttcaaagatctccttacaagacataaagttctcgtagccgattttctcgagcagaattatgacactatctttgaggattacgagaagctcctccagagcgaaaactacgtgaccaagcgacagtctctgaaacttttgggtgaactgatccttgaccgccacaacttcgctattatgacaaagtacattagcaagccggaaaacctgaaacttatgatgaaccttctccgcgataagtcaccgaacatccagtttgaagcctttcacgtgttcaaggtattcgtggcatcccctcacaaaacacagcccattgtagaaattctgctgaaaaatcagcccaagctcatcgaatttctctcaagcttccagaaagaaagaaccgatgatgagcaatttgctgatgagaaaaattatttgatcaagcagattagagatctgaaaaaaacagcaccatag

SEQ ID NO: 106155 - DNA, 1014 bp, Artificial Sequence
  derived and/or modified sequence
atgaaaaagatgccactgtttagtaaatcccacaagaaccctgcagaaattgtcaaaatcctaaaggataacctggctattctggagaagcaggacaagaaaacagacaaggctagcgaggaagttagtaaatcgctgcaagcaatgaaagagatcctctgtggaacaaacgaaaaagagccccccactgaggctgtcgcccagctggcacaagaactgtactcctccggcctactagttacgttgattgctgacctccagctcatcgacttcgaagggaagaaggacgtgacccagatcttcaacaatatactccggcgccagatagggacaagaagcccgactgtggagtacatctctgctcatccccatatattgttcatgctccttaaaggatacgaggctccccaaatcgcgctgcgatgtgggattatgctacgggagtgcatccgtcacgagcccctagctaagattatcttgttcagtaatcaattcagagactttttcaaatacgtggagctaagcacattcgatatcgcttctgatgcatttgcgacatttaaggacctgctcactcgccacaaggtgctagtggccgatttcctggagcaaaactacgacactatttttgaggattatgagaagcttctgcagtctgagaactacgtcaccaagaggcagagcctgaagctcctgggcgaactcattttagacagacataattttgcgatcatgaccaaatacatctccaagccggagaaccttaagctcatgatgaaccttctgcgggacaagagcccaaatattcagtttgaggcttttcacgtgtttaaggttttcgtcgcatcgccccataagacccagccgattgttgaaattctattgaagaaccagccaaaactgatcgaatttctcagctccttccaaaaggaaaggaccgatgatgagcaattcgccgacgagaaaaattatctgattaagcagattcgagatctcaagaaaacggccccctag

SEQ ID NO: 106156 - DNA, 945 bp, Artificial Sequence
  derived and/or modified sequence
atgcccctcttttccaagagtcacaagaatcccgcggagatcgtgaaaattctgaaggataatctggccatcttggagaagcaagacaaaaaaactgataaggccagcgaggaggtcagtaagagtctgcaagccatgaaagagatcttgtgcggaacaaacgaaaaggaaccccccactgaagccgtggctcaactagcccaggagctctactcttccggattactggtcacactgattgcagatctgcagttgattgactttgaaggtaagaaggatgtcactcaaatattcaacaacattctaaggcggcagattggaacgagaagtccgactgtagaatacatttctgcacatccccatattctgtttatgctgctgaaaggctatgaggcaccacaaattgctctgcgctgtggcatcatgctcagagaatgcattcgacacgagccactcgccaagataattcttttcagtaatcagttccgcgatttttttaaatatgtggaattgagcacctttgatatcgcttctgatgccttcgcaacattcaagatattcgaagactatgaaaagctgctgcagagcgagaactacgtgacaaaacgccagagccttaaacttctcggggaactgattctggatcggcacaatttcgcaattatgaccaagtacattagcaagcccgagaatctcaaactcatgatgaatctcctgagggataaatcacccaatatacagttcgaggcctttcacgtgttcaaggtttttgtggcgtccccacataagacacagcccatagtcgagattctgctcaaaaatcagcccaagttaattgagttcttaagtagctttcagaaggagagaacagacgacgaacagttcgccgacgaaaaaaactacctcatcaagcagatccgcgatctgaagaagacagccccttag

SEQ ID NO: 106157 - DNA, 282 bp, Artificial Sequence
  derived and/or modified sequence
atgaaaaaaatgccattattctcgaaatctcacaagaaccctgcagagattgtaaaaatcctgaaggacaatcttgcaatcctggagaaacaggataagaaaactgataaggctagcgaggaagtaagtaaatccctgcaagcgatgaaggagatactgtgtgggacgaatgagaaagagccacccacagaggctgtagcacagcttgctcaagagttgtattcgagcgggttactcgtgacgctgattgctgacctacagttgattgacttcgaggtatag

SEQ ID NO: 106158 - DNA, 1014 bp, Artificial Sequence
  derived and/or modified sequence
atgaagaaaatgccccttttctcaaagtcacacaagaaccccgctgaaattgtcaagatcttgaaggataatctcgccatcttagaaaagcaggacaaaaagaccgacaaggcatccgaggaagtgtctaagtctctgcaagcaatgaaggaaatcttgtgcgggacgaacgagaaggagccccctacagaagcggtggcccaactagcacaagaactgtacagttccggcctgctggtaactctaatcgcagacctgcagctgattgattttgagggaaagaaggatgtaacccagatttttaataatattttgaggaggcagattggaacccgaagcccaaccgtcgagtacatttccgcccatccacatatcctgtttatgctgttgaagggctatgaagctccccagatcgcgctcaggtgtgggatcatgctgagagagtgcattcgacatgaacctttggctaagatcattctattcagcaaccagtttcgggacttctttaagtatgtggagctctccacattcgacatcgcatcagatgcctttgccaccttcaaggatctgctgactaggcataaagtgcttgtggccgatttcctcgaacaaaattatgataccatcttcgaagattatgaaaagttgctgcagtctgaaaactacgtcacgaaacggcaatcccttaaactcctcggggagctaattctggatcggcataactttgctattatgacaaagtacatttccaaaccagagaacctcaagctgatgatgaatcttctccgagacaaaagccctaatatccaatttgaggccttccacgtgttcaaagtttttgttgcaagtccacataagacccaacctatcgttgagattttactaaaaaaccagccaaaattgattgagttcctctcatcattccagaaggaacgtacagacgacgaacagtttgccgatgaaaagaactatttgattaaacagatccgagatctcaagaagaccgcaccttag

SEQ ID NO: 106159 - DNA, 1014 bp, Artificial Sequence
  derived and/or modified sequence
atgaagaaaatgcccctcttcagcaaatcccacaagaatcccgctgagattgtaaagatccttaaggacaatctagctattctcgaaaaacaagataagaagacagacaaagcatcagaggaagtcagcaagtcactccaggctatgaaggagatcctctgtgggacaaatgaaaaagagccacctaccgaagccgtcgcacagctggcccaggaactctactctagtgggctgctggtcacacttatcgcggacctgcaactgatcgattttgagggcaagaaggatgtgactcaaatctttaataatatattgcgccgccagatcggcacaaggagtcccacagtggagtacatttccgcccacccccacattctgtttatgctacttaagggatacgaagcacctcaaatcgccctgagatgcgggatcatgctccgagaatgtattcggcatgaacccttggcaaaaatcatactgttttcaaaccagttccgcgacttcttcaaatacgttgagctgtcaacgttcgacatcgcctcagacgcttttgccaccttcaaagacctcctgactcgtcataaagtcctcgtggcggactttctcgagcagaactacgatacgatctttgaggattacgagaagctgctccagagcgagaactacgttaccaagcggcagtccctcaagcttttaggtgaattgatcctggataggcacaacttcgcaattatgacgaaatatattagcaagcccgagaatttgaagctgatgatgaacctgctcagggacaaatcgccgaatatccagtttgaggccttccatgtttttaaagtgtttgtagcatccccgcacaaaactcagccaatcgttgagatcttgctgaagaaccagcccaaattaatcgagttcttgtcatcatttcaaaaagaaaggactgatgatgagcaatttgctgatgaaaagaactacctcatcaagcagatcagagatctgaaaaagaccgctccatag

SEQ ID NO: 106160 - DNA, 387 bp, Artificial Sequence
  derived and/or modified sequence
atgaagaaaatgcccctcttctccaagtctcacaaaaacccggcagagatcgttaaaatcttaaaagacaacttagcaatactggaaaagcaggataagaagaccgataaagcttccgaggaggtgtccaaaagcctgcaggccatgaaggagatcctatgcgggaccaatgaaaaagagccacccacagaggcagtcgcgcaactggcccaggaattgtattctagcggcctgctggtgaccctgatcgccgatttgcaactgatcgattttgaaggtaaaaaagatgtgacccaaattttcaacaacattctgaggcgccaaataggcacaaggtctcccacagtagagtatatctcagcacaccctcacattctcttcatgtag

SEQ ID NO: 106161 - DNA, 567 bp, Artificial Sequence
  derived and/or modified sequence
atgaaaaagatgcctttattcagcaagagtcataaaaatcctgcggaaattgtgaaaatcctgaaggacaacctggctatcctagaaaaacaggacaagaaaactgataaggccagtgaagaggtaagtaagtctctacaggccatgaaagaaatactctgcggtactaacgagaaagaacctccaaccgaagctgttgcacagctggctcaggaattatactccagcggcttgctggtcactctgatagccgacctgcagctcatcgatttcgagggaaaaaaggatgtgactcaaatattcaataacattttgagacgtcagattggaaccaggagtcctaccgtcgaatacatatctgcccatccccatatcctcttcatgctcctgaagggatacgaggcacctcagatcgctcttcgatgcggcatcatgcttcgcgaatgtattagacacgaacctctcgccaaaatcatcctgttctctaaccagtttcgagatttcttcaaatatgtggagctgagcacttttgatattgcctcggacgcatttgccacatttaagtag

SEQ ID NO: 106162 - DNA, 1014 bp, Artificial Sequence
  derived and/or modified sequence
atgaagaagatgcccctcttcagcaagagccacaagaacccagctgagatcgtgaagatcctgaaggacaacctggccatcctggagaagcaggacaagaagacagacaaggccagcgaggaggtgtccaagagcctgcaggccatgaaggagatcctgtgtggcaccaatgagaaggagcccccaacagaagctgtggcccagctggcccaggagctgtacagcagcggcctgctggtgaccctgattgctgacctgcagctgattgactttgagggcaagaaggatgtgacccagatcttcaacaacatcctgcggcggcagatcggcaccaggagccccaccgtggagtacatcagcgcccacccccacatcctcttcatgctgctgaagggctatgaggccccccagatcgccctgcgctgtggcatcatgctgcgggagtgcatcagacatgagcccctggccaagatcatcctcttcagcaaccagttccgggacttcttcaagtatgtggagctgagcacctttgatattgccagtgatgcctttgccaccttcaaggacctgctgaccaggcacaaggtgctggtggccgacttcctggagcagaactatgacaccatctttgaagattatgagaagctgctgcagagcgagaactacgtgaccaagaggcagagcctgaagctgctgggggagctgatcctggacagacacaactttgccatcatgaccaagtacatcagcaagccagagaacctgaagctgatgatgaacctgctgcgggacaagagccccaacatccagtttgaggccttccacgtgttcaaggtgtttgtggccagcccccacaagacccagcccatcgtggagatcctgctgaagaaccagcccaagctgattgagttcctgagcagcttccagaaggagaggacagatgatgagcagtttgctgatgagaagaactacctgatcaagcagatccgggacctgaagaagacagccccctag

SEQ ID NO: 106163 - DNA, 945 bp, Artificial Sequence
  derived and/or modified sequence
atgcccctcttcagcaagagccacaagaacccagctgagatcgtgaagatcctgaaggacaacctggccatcctggagaagcaggacaagaagacagacaaggccagcgaggaggtgtccaagagcctgcaggccatgaaggagatcctgtgtggcaccaatgagaaggagcccccaacagaggccgtggcccagctggcccaggagctgtacagcagcggcctgctggtgaccctgattgctgacctgcagctgattgactttgagggcaagaaggatgtgacccagatcttcaacaacatcctgcggcggcagatcggcaccaggagccccaccgtggagtacatcagcgcccacccccacatcctcttcatgctgctgaagggctatgaggccccccagatcgccctgcgctgtggcatcatgctgcgggagtgcatcagacatgagcccctggccaagatcatcctcttcagcaaccagttccgggacttcttcaagtatgtggagctgagcacctttgacatcgccagtgatgcctttgccaccttcaagatctttgaggactatgagaagctgctgcagagtgaaaattatgtgaccaagaggcagagcctgaagctgctgggggagctgatcctggacagacacaactttgccatcatgaccaagtacatcagcaagccagagaacctgaagctgatgatgaacctgctgcgggacaagagccccaacatccagtttgaggccttccacgtgttcaaggtgtttgtggccagcccccacaagacccagcccatcgtggagatcctgctgaagaaccagcccaagctgattgagttcctgagcagcttccagaaggagaggacagatgatgagcagtttgctgatgagaagaactacctgatcaagcagatccgggacctgaagaagacagccccctag

SEQ ID NO: 106164 - DNA, 282 bp, Artificial Sequence
  derived and/or modified sequence
atgaagaagatgcccctcttcagcaagagccacaagaacccagctgagatcgtgaagatcctgaaggacaacctggccatcctggagaagcaggacaagaagacagacaaggccagcgaggaggtgtccaagagcctgcaggccatgaaggagatcctgtgtggcaccaatgagaaggagcccccaacagaagctgtggcccagctggcccaggagctgtacagcagcggcctgctggtgaccctgattgctgacctgcagctgattgactttgaggtgtag

SEQ ID NO: 106165 - DNA, 387 bp, Artificial Sequence
  derived and/or modified sequence
atgaagaagatgcccctcttcagcaagagccacaagaacccagctgagatcgtgaagatcctgaaggacaacctggccatcctggagaagcaggacaagaagacagacaaggccagcgaggaggtgtccaagagcctgcaggccatgaaggagatcctgtgtggcaccaatgagaaggagcccccaacagaagctgtggcccagctggcccaggagctgtacagcagcggcctgctggtgaccctgattgctgacctgcagctgattgactttgagggcaagaaggatgtgacccagatcttcaacaacatcctgcggcggcagatcggcaccaggagccccaccgtggagtacatcagcgcccacccccacatcctcttcatgtag

SEQ ID NO: 106166 - DNA, 567 bp, Artificial Sequence
  derived and/or modified sequence
atgaagaagatgcccctcttcagcaagagccacaagaacccagctgagatcgtgaagatcctgaaggacaacctggccatcctggagaagcaggacaagaagacagacaaggccagcgaggaggtgtccaagagcctgcaggccatgaaggagatcctgtgtggcaccaatgagaaggagcccccaacagaagctgtggcccagctggcccaggagctgtacagcagcggcctgctggtgaccctgattgctgacctgcagctgattgactttgagggcaagaaggatgtgacccagatcttcaacaacatcctgcggcggcagatcggcaccaggagccccaccgtggagtacatcagcgcccacccccacatcctcttcatgctgctgaagggctatgaggccccccagatcgccctgcgctgtggcatcatgctgcgggagtgcatcagacatgagcccctggccaagatcatcctcttcagcaaccagttccgggacttcttcaagtatgtggagctgagcacctttgatattgccagtgatgcctttgccaccttcaagtag

SEQ ID NO: 106167 - DNA, 1014 bp, Artificial Sequence
  derived and/or modified sequence
atgaagaagatgcccctgttcagcaagagccacaagaaccccgccgagatcgtcaagatcctcaaagataacttggctattctcgaaaagcaggataagaaaactgacaaggcttctgaggaagtgtcgaaaagtctgcaggccatgaaagaaatcctgtgcgggacaaatgagaaagagccacccaccgaggccgtggcacagttggctcaggaattatactctagtggactcttggtcaccttgatcgccgacctgcagctcattgacttcgaaggaaagaaggatgtgacccagatctttaacaacatactcaggcggcagatcgggacccgctcccccactgtagagtatatctcagcccatccccacatcctcttcatgctgttaaaaggatacgaggcgcctcagatcgcgctgcgatgcggcatcatgttgcgtgagtgcattcggcacgagccgcttgcaaagattatcttgtttagcaatcagttccgggactttttcaagtatgttgaattgtccactttcgacatcgcatcagatgccttcgcaacatttaaagacttgctcacccgccacaaagtgctggtggcggactttctggagcagaattatgataccatcttcgaagattacgaaaagctgttacaatccgagaactacgtaaccaaaaggcagtcactgaaactgctgggcgaactcatactagataggcacaattttgctataatgaccaagtacatttcaaaaccagaaaatttaaagctcatgatgaacctgctgcgcgacaaatcccccaatattcagttcgaagcattccatgtgtttaaggtgttcgtcgccagtcctcataaaacacagcctatcgttgagatcttactcaaaaatcaaccgaagctgattgagttcctgtcctccttccaaaaggagcgtactgacgatgagcagttcgcagacgaaaagaactacctgatcaagcagattagagacctcaaaaaaacagcgccctag

SEQ ID NO: 106168 - DNA, 1014 bp, Artificial Sequence
  derived and/or modified sequence
atgaagaagatgcccctgttcagcaagagccacaagaaccccgccgagattgtgaagatactcaaagacaacttagctatcttggagaaacaggataaaaaaaccgataaggcttcagaggaggtgtctaagtcactccaggcaatgaaggaaatactgtgtggcaccaatgaaaaagagccacccacagaagcggtggcccagctagcccaggagctgtattcaagcggcctgttggtcaccctcattgccgatctccagctgatcgactttgaagggaagaaggacgtaacacaaatattcaataatatccttaggagacagatcgggacccgatcgcccactgtagaatacattagcgcccaccctcatattctttttatgctgctgaagggctatgaggccccgcagatcgcgctcaggtgtgggattatgctccgcgaatgtattagacacgaaccactggccaagattatcctgttttccaatcagttccgggacttttttaaatacgttgagctttctacattcgacatagcctcagatgcattcgcgaccttcaaggacctgttgactcgtcataaagtccttgtcgccgactttctggagcagaactatgataccatcttcgaggattatgaaaaactcctgcagagtgagaattatgttactaagcggcagtcattgaagctcctgggggagcttatcctggaccggcataacttcgctatcatgacaaaatacatttccaagccagaaaatctcaagctgatgatgaatcttctgagagataagtccccaaacatccagttcgaggcttttcacgtctttaaggtgttcgtcgcatccccacataaaacccagcccattgtagaaattctgctcaagaatcagcccaagctcatcgagtttctgagcagctttcagaaggagcggactgacgatgagcagtttgcagacgaaaaaaattacttgattaagcagatccgtgacttgaaaaaaacagctccatag

SEQ ID NO: 106169 - DNA, 945 bp, Artificial Sequence
  derived and/or modified sequence
atgcccctgttcagcaagagccacaagaaccccgccgagatcgtgaagatcttgaaagataatttagcgattttagagaagcaagataagaaaacggataaggcctctgaggaagtgtctaagtccctccaggcaatgaaggagattctttgcggtaccaatgaaaaggaacctcccacagaagccgttgcacagctggctcaggaactctactcttccgggctgttggttacactgatcgccgatctgcagctaatcgacttcgaggggaagaaggacgttacgcagatatttaacaatatcctcagacgccagattggtactcgttctccaacagtggaatatatctccgcacacccacacattcttttcatgctcctgaagggctatgaggcgccgcagatcgccctgaggtgcggcattatgctgcgtgaatgcatacgtcacgaaccactcgcgaagattatcttgttctcaaatcagtttagggatttcttcaagtatgtggagttaagcacctttgacattgcatcagatgccttcgccacgtttaaaatatttgaagactacgagaagttgttacagtccgaaaattatgtcaccaaaagacagtccctgaaactgttaggcgaactgatcctggatcgccacaacttcgctattatgacaaagtacatttccaaacccgagaacctaaagctgatgatgaatctgttacgcgacaagagcccaaacatccaatttgaggcattccacgtgtttaaagtgttcgtggctagtccccacaagacccagccaatcgtggagattctgttgaagaaccagcccaagcttattgagttcctatcttcattccagaaagagaggacggatgacgagcaatttgctgacgaaaagaactatctcattaaacaaatccgggatcttaaaaaaacagctccctag

SEQ ID NO: 106170 - DNA, 282 bp, Artificial Sequence
  derived and/or modified sequence
atgaagaagatgcccctgttcagcaagagccacaagaaccccgccgaaatagtcaagattctcaaggataacctcgctattttggaaaagcaagataagaaaaccgacaaggcatcagaagaggtgtcaaagtctcttcaagccatgaaagagattttatgcgggacgaatgaaaaagaacctccgactgaggccgtggcgcagctggcgcaagaactttactccagtggtctgctggttacgttaattgcagatctgcagctaatagatttcgaggtttag

SEQ ID NO: 106171 - DNA, 1014 bp, Artificial Sequence
  derived and/or modified sequence
atgaagaagatgcccctgttcagcaagagccacaagaaccccgccgaaattgtgaaaattttgaaagataatctcgctattttagagaagcaagacaaaaaaaccgacaaggcttccgaggaagtgtcaaaaagcctccaggctatgaaggaaattttgtgcggaactaatgagaaggaaccacccactgaggccgtggcccagttagctcaggagctttactcctctggcctgctagtcacccttatagccgacctccagttgatcgacttcgaaggcaaaaaggatgtaacacagatttttaacaatatcctcagaagacaaatcggtacacgctctcctactgttgaatatatttctgcacatccacatatactctttatgctgctaaaaggttatgaggcccctcagatcgccctccgctgcgggattatgttgcgcgaatgtatcaggcacgagccactggctaagattatactgtttagcaatcaattccgcgatttttttaaatacgtggaactcagtacctttgacattgcctccgatgcgtttgctaccttcaaagatctgcttaccagacacaaggtactagtggcagacttcctcgagcaaaattatgacactatctttgaggactacgaaaaactccttcagtcagaaaattacgtcacgaaaaggcagagcttgaagctgctgggagagttgatcctggatcgtcacaattttgctatcatgaccaagtacatatcgaaacccgagaacttaaaactaatgatgaacttgctcagagacaagtctcccaacatacagtttgaggcctttcatgtttttaaagtctttgtggcaagcccccacaaaacgcaacccatcgtggaaatcctgctcaagaaccagcccaaactgatcgagttcctctctagcttccagaaggagcgcaccgatgacgaacagtttgccgacgagaagaactatttgattaaacaaattcgggatctcaaaaaaacggccccgtag

SEQ ID NO: 106172 - DNA, 1014 bp, Artificial Sequence
  derived and/or modified sequence
atgaagaagatgcccctgttcagcaagagccacaagaaccccgccgagatcgtcaaaatcctcaaggataacctggctatcctagagaagcaggacaaaaaaacagacaaggcgtctgaagaggtatcgaagtccctccaggctatgaaggaaattctatgtggcacaaatgagaaagaacctccaactgaggctgtggctcagctggctcaggagctttattcctcaggcctcctggtgaccttaatcgctgatctccagctcattgactttgaggggaagaaagacgtgacccagatctttaataacatactcaggaggcaaattggaactagaagccccaccgtcgaatatattagcgctcacccacacattttattcatgctgctcaaaggctatgaagctccacagatcgccctgcgttgcggcattatgctccgagagtgtattcggcacgaaccgttagctaaaatcatcctgttctctaaccagttcagggacttcttcaaatacgtcgagctctcaacattcgacatcgcctccgacgccttcgcaacatttaaggacctccttacgcggcacaaggtgctggtggctgattttttagagcagaactatgatactattttcgaggactatgagaaacttctgcaaagtgagaattacgtcactaagcggcagtctctgaaactactcggagagctcatcctggaccgacataatttcgccatcatgacaaaatacatctcaaagccagaaaacctcaaactcatgatgaatctgcttcgtgataagtcccccaatattcaatttgaggcttttcacgtatttaaggtcttcgttgcatctcctcacaagactcagcccatcgttgagattcttcttaaaaaccaaccgaaattgatcgagttcctgtcttcctttcagaaggaacggactgacgatgaacagttcgcagacgagaagaactacctcatcaagcagatccgagacctaaagaagactgcgccctag

SEQ ID NO: 106173 - DNA, 387 bp, Artificial Sequence
  derived and/or modified sequence
atgaagaagatgcccctgttcagcaagagccacaagaaccccgccgagatcgtcaaaatccttaaagacaatctggccatcctcgagaaacaggacaaaaagaccgataaggcctccgaagaggtttcgaagtccctccaagcaatgaaagagattttgtgtggcaccaatgagaaagagccgccgactgaggccgtggcccagctggcccaggagctgtactctagcggtctgttagtcacactcatcgccgacctgcagttaattgattttgaagggaagaaggatgtcacccagatcttcaataatattctgcgacggcagattggtactcggagtcctacagtggagtacatttccgctcacccacatatcctttttatgtag

SEQ ID NO: 106174 - DNA, 567 bp, Artificial Sequence
  derived and/or modified sequence
atgaagaagatgcccctgttcagcaagagccacaagaaccccgccgaaatcgtcaaaatcttgaaagataatctggccatacttgaaaagcaagacaagaagaccgataaagcctctgaagaagtctcaaagtccctgcaggcgatgaaagagatcctgtgcggcactaatgagaaggagcccccgactgaggccgtagctcagcttgcccaggaattgtactcaagcgggttgttggttaccctgattgctgacctacaacttatcgactttgagggcaagaaagacgtgacccagatatttaacaacatcctccgcaggcagattggcacgagaagccccactgttgagtacatctccgcgcacccccacattctgttcatgcttctgaaggggtacgaggcgccacaaatagctttgaggtgtggcattatgctgcgagaatgtatcaggcacgagccgctggcgaagatcatcctgttcagcaaccagttccgggattttttcaagtacgttgaactgtccacattcgacattgcatctgacgcattcgctacttttaaatag

SEQ ID NO: 106175 - DNA, 1014 bp, Artificial Sequence
  derived and/or modified sequence
atgaaaaagatgcccctgttttcgaagagtcacaagaaccccgcagagatcgttaaaatcctgaaagacaacctcgcaatactggagaagcaggacaagaagacagacaaggcatccgaagaggtgtccaagagtctgcaggcaatgaaggaaatcctgtgcggcacaaacgagaaagaaccgcctacagaagccgtggcccaactcgctcaggaactatactcttcaggcctgttggtgacacttatagctgaccttcagttgatcgactttgaaggaaagaaagatgttacgcagatctttaataacatcctgcgccgtcagatcggtacgcggtctcctaccgtggagtacataagcgcacatccccacatcttgttcatgttgttgaaaggttatgaagcccctcagattgccctgagatgcggcattatgctgcgcgagtgtatccggcacgagcctttggcaaagatcatcctctttagcaatcagtttcgggatttttttaagtatgtggaactttccacgtttgatatcgcaagtgacgcatttgctacattcaaggatctgctcacacgccataaagttttggtcgctgattttctggagcagaattacgataccatatttgaggattacgaaaaacttctacagtccgagaattacgtaacaaagagacaaagccttaagctactgggcgagttaatccttgataggcacaactttgcaatcatgactaagtacatctcaaaacctgagaaccttaaactcatgatgaatcttctaagggataaatcccctaacatacagtttgaagcgttccacgtcttcaaggtctttgttgcttctccccacaagactcaacctatagtggagatccttctgaagaaccagcccaaactgatcgagttcctgtcatcatttcagaaagagcggactgacgatgagcagtttgctgacgaaaagaactacctcattaaacaaatcagggacctcaagaaaactgcgccttag

SEQ ID NO: 106176 - DNA, 1014 bp, Artificial Sequence
  derived and/or modified sequence
atgaagaagatgcctctatttagcaaaagccacaagaacccagcggagattgtcaagattctgaaagacaatctggcaatactggagaagcaggacaaaaagactgataaggccagcgaggaggtgagtaagtcccttcaagccatgaaggagattctgtgcggtacgaacgagaaagagcctcccaccgaggccgtggcccagctagcacaagaactctatagtagtgggctcctcgtgacactgattgccgatcttcagctgattgatttcgaggggaaaaaggacgtcacacaaatttttaacaacattctaaggcgacaaattggtacaagatcgcccactgtggagtacatttctgctcaccctcacatactgttcatgctcctgaaaggctacgaagctcctcagatcgcactgagatgtgggattatgctccgggaatgtataagacacgagcctcttgctaaaattattttgttttccaatcaattccgggacttcttcaaatacgtagaactctctacatttgacatcgccagtgatgcctttgctacatttaaagatctgctaacaagacataaagttctggtcgcagacttcctggagcagaactacgacaccatcttcgaagattacgagaaactcctgcagtccgaaaactatgtcactaaaagacaaagtctgaagctcctgggcgagctgattcttgacagacacaatttcgccatcatgactaagtacatcagcaaaccggagaacctaaagctgatgatgaacttattgagggataagagccccaacatccagttcgaagctttccacgtatttaaagtgttcgtggccagcccgcataagacacagcctatcgttgaaatcctgctcaaaaaccagcccaagctgattgagtttcttagcagtttccaaaaagagaggaccgatgacgaacagttcgcggacgaaaagaactatctgataaaacagatccgggaccttaagaaaactgctccttag

SEQ ID NO: 106177 - DNA, 945 bp, Artificial Sequence
  derived and/or modified sequence
atgcctctttttagcaagagccataaaaatcctgccgaaatagttaagatcttaaaggacaaccttgcgattcttgagaagcaagacaaaaagaccgacaaggcatcagaagaagttagtaaaagcctgcaagcgatgaaggagatactgtgtggtaccaacgagaaggagcctccaactgaggctgtagctcagttagcccaagaactgtatagctccggcctgcttgtcacactgatcgctgaccttcagcttatcgactttgaggggaagaaagatgttacccagatcttcaacaacatcctccggcgtcagattggcactagatctccaaccgtggaatacatcagtgctcatccccacatcctgtttatgctgctgaaaggctacgaggctccacaaatcgcgctccgctgcggcattatgctgcgtgagtgtattcgccatgagccccttgccaagatcatcctgttctccaatcagtttagagacttttttaaatacgtcgagctgagcactttcgacatcgccagcgacgcatttgcaactttcaaaatattcgaggattacgagaagcttttgcagagcgaaaactacgttacaaagcgacagtcactgaagctactgggcgaactgatattggaccgccataatttcgcaatcatgactaaatatatctcgaagcccgagaaccttaaactgatgatgaacctactgagagataaatcccctaatattcagtttgaagccttccacgttttcaaagtgtttgttgcctccccccataagacacagccaattgtggaaattctgctcaaaaaccagcccaaactgatcgagttcttgtcctcatttcagaaggagagaacagacgacgaacagttcgctgatgagaagaactatctgataaagcagatacgcgatttgaagaagaccgccccttag

SEQ ID NO: 106178 - DNA, 282 bp, Artificial Sequence
  derived and/or modified sequence
atgaagaagatgccgctgtttagcaagtctcataagaaccccgcagagatagtgaaaatccttaaggacaacctggccattctcgagaaacaagataagaaaaccgacaaggcctccgaagaggtgtccaagagcttgcaggctatgaaggaaattctctgtggaaccaacgagaaagagccacctacagaagccgttgcacagctggcccaggaactgtatagttcaggtctgctggtgaccctaattgcagatctgcagctcatagacttcgaggtctag

SEQ ID NO: 106179 - DNA, 1014 bp, Artificial Sequence
  derived and/or modified sequence
atgaaaaagatgccccttttttctaagtctcacaagaacccagccgagattgtaaagatcctgaaagataacctggcaatcctggagaagcaggataaaaagaccgacaaagcctctgaagaggtgtctaagagtttgcaggcaatgaaagagatcttgtgcgggacaaacgagaaggaaccccctaccgaagcggtggcacaactagcccaagaactgtattcgtctggtctcctcgtgacgcttatcgctgatttgcagctcatcgactttgagggtaagaaagatgtgacacagatcttcaataatatactacggaggcagatcggcactagaagtcccacagttgaatacatttcagctcacccacacattctctttatgttattaaagggctatgaagcccctcagatcgctctacgttgcggcataatgttgcgcgaatgtatacgccacgagccactcgctaaaattatcctcttttcaaatcagttcagggacttcttcaagtatgtggagttatccactttcgacattgcatccgatgcctttgctacctttaaggaccttctgacacgccataaggtgctcgttgcagatttcttggagcagaactacgacaccatatttgaagactatgaaaagttattgcagagcgaaaattacgtgactaaaagacagagtctgaaactgctgggagagctgatcctggacaggcacaacttcgctattatgaccaagtacatttcgaagcccgagaaccttaaactcatgatgaacttactcagggataaatctcccaacattcagttcgaagctttccatgtgttcaaagtcttcgtggcttctccacataaaacgcagccaatcgtcgaaatacttctcaagaatcagcctaagctgattgagtttctgagtagttttcagaaagaaagaaccgatgatgaacagttcgctgacgagaagaactatctcatcaaacagatcagggatcttaaaaagacagccccttag

SEQ ID NO: 106180 - DNA, 1014 bp, Artificial Sequence
  derived and/or modified sequence
atgaagaagatgcctctgttttccaaatcacataaaaatcctgctgagatagtgaagatcctgaaagataacctggctatcctcgagaagcaggataagaaaacagataaggccagcgaggaagtatccaaatctctccaggctatgaaagaaattctctgcggtactaatgagaaagaacctcccactgaagccgttgctcagctcgcacaagaactgtacagtagcggactcctggtgacactgatagcagatctacagctgatcgatttcgagggaaagaaggatgttactcagatcttcaataacattttacgaaggcagattggtacacgcagccctaccgtcgaatacatcagcgcccacccacatatactattcatgttgctcaaaggttacgaggccccacagatagctctgcgttgtggaatcatgctcagagagtgtatccggcatgaacctttagccaagataattctattctctaaccagtttcgggacttctttaagtatgttgagctgtcaacctttgacatcgcctctgatgctttcgcaacattcaaagatctactgaccaggcacaaagttctggtcgcagactttcttgaacagaattacgacacaatcttcgaagactatgagaaactgctccagagcgaaaactacgttaccaagcgccagtccctgaagctcctcggcgagcttatactggatcgacacaacttcgccattatgaccaagtatatctctaaaccagaaaatctgaagctaatgatgaaccttttgcgcgacaagtcaccaaatattcaattcgaggctttccacgtttttaaagtctttgtggcatcaccccacaagacacagcctatcgtggagatcctcctgaagaaccagcccaagctcatagagtttttatcctcctttcagaaagaacggacagatgacgagcagtttgcggatgaaaagaattacctcatcaaacagatcagagatctcaagaaaaccgctccctag

SEQ ID NO: 106181 - DNA, 387 bp, Artificial Sequence
  derived and/or modified sequence
atgaagaaaatgccactcttcagtaagtcccataagaatcccgcagaaatagtcaagatcctgaaagacaacctggcaattctggagaaacaggataagaaaacagacaaggcaagcgaggaggtgtccaagagcctgcaggcaatgaaggaaattctgtgtggtaccaacgaaaaagagccccctacagaggccgtcgcacagttggcacaggagctgtattcttcagggctcctcgtcacccttatcgctgatctgcagcttatcgattttgaaggcaagaaagatgtcacccagatcttcaacaatattcttaggcggcagattggtacgcgttccccaaccgtagaatatatctccgcccacccacacatactctttatgtag

SEQ ID NO: 106182 - DNA, 567 bp, Artificial Sequence
  derived and/or modified sequence
atgaagaaaatgcctctttttagcaaatctcacaaaaacccagctgaaatagtaaagatcttaaaagacaatttggccatccttgaaaagcaggataaaaagaccgacaaagcttctgaggaggtgtctaagagcctccaggccatgaaagagatcctgtgtggtaccaacgagaaggagccgcctaccgaagccgtggctcagttggctcaggaattatactcaagcggcctgctcgtcacattaattgctgacctgcagttaatcgactttgagggtaaaaaagatgttactcagattttcaataacattttgcggaggcagatcggaacccggtcgccaactgttgagtacatatcagcacacccacacatcctgttcatgctgctaaaaggctacgaagcacctcagattgctttgcgttgcggcattatgctcagggagtgtatcaggcatgagcccctcgcaaagataattttgttttccaatcagttcagagatttctttaaatatgtagaactgtcaacctttgacattgcctcagatgcttttgccacgtttaagtag

SEQ ID NO: 106183 - DNA, 3520 bp, Artificial Sequence
  derived and/or modified sequence
agcgctctcggcttgtctcgcgcactgtagctgagccaatggagttactcgtagtcgagaggccggcatcactggagtggtggcgcagctgtttcctccggatatccatcaaatattgagaagaaagaatatcaggagcaaagtgttctaagttgctgttcagaacgtaaagatgcgaaccccaaatcagtggtttgttcattcttcatgcaagagcaatgcactaaaggagagaagcgtaagttttctcttatttctgatggggaaacaagcacacgcatacacactcttgtgatggagatagattttacaagcattccatattggaagaagagatttctacacatgaaaaaaatgcctttgtttagtaaatcacacaaaaatccagcagaaattgtgaaaatcctgaaagacaatttggccattttggaaaagcaagacaaaaagacagacaaggcttcagaagaagtgtctaaatcactgcaagcaatgaaagaaattctgtgtggtacaaacgagaaagaacccccaacagaagcagtggctcagctagcacaagaactctacagcagtggcctgctagtgacactgatagctgacctgcagctgatagactttgagggaaaaaaagatgtgacccagatatttaacaacatcttgagaagacagataggcactcggagtcctactgtggagtatattagtgctcatcctcatatcctgtttatgctcctcaaaggatatgaagccccacagattgccttacgttgtgggattatgctgagagaatgtattcgacatgaaccacttgccaaaatcatcctcttttctaatcaattcagagatttctttaagtacgtggagttgtcaacatttgatattgcttcagatgcctttgctactttcaaggatttactaaccagacataaagtgttggtagcagacttcttagaacaaaattacgacactatttttgaagactatgagaaattgcttcagtctgagaattatgttactaagagacagtctttaaagctgctaggggagctgatcctggaccgtcacaactttgccatcatgacaaagtatatcagcaagccggagaacctgaaactcatgatgaacctccttcgggataaaagtcccaacatccagtttgaagcctttcatgtttttaaggtgtttgtggccagtcctcacaaaacacagcctattgtggagatcctgttaaaaaatcagcccaaactcattgagtttctgagcagcttccaaaaagaaaggacggatgatgagcagttcgctgacgagaagaactacttgattaaacagatccgagacttgaagaaaacggccccttgaagagctccccggcccctgtcacagtcagtcgtctcatttgtccagtttgtacagtgtgtcatttcagaaagtcatcattcttgggaagactttggaggtgcctattttttctgctgtaattgttctgggtagatggagtataaacatttgaatggaaaaaaattaacctagaataatatattcattttagtcaagtctgtgattatttatgtgaaatgagaaccattgtatcagatgttgataaaagcaattttaacttgcagatgtgagcccctgggcacaatgagccgctaaatgggagctcaattgacaggcatcaccaagtcttcaaggaggactgagttctcaggggagaactgggaatggggccagggtgcaaaaatgctttgcccatctgtaggtagacacacagatcgctcagggcactgagagatcccagaaggtaacgttaatgttttcagtcattgtgtgtcctttgttgctgccaatgtctttggactgtaatcagtgcatccacacctcccaggatccagtgctccctctcagctcagtctcccctctctccctgtcctgcattccatcccagctcctcagcatggcctcagtgggcgcacccatgcctcccgcagtccaggtgagcaggggagcaactgagcaggaagaggatggatcaacaagggtcacggggaataggggacccacggggtgtgacctgcttgctagagaactgtgaacatgtggctctggatagagtgactgctgctccatattagcttccagagggtgagtgagggacagaatatttccttcataatggtcatgggtgaatgctttctgctgtaagtgtcttttagagtaggaatcagcatagtgggatgcccagcaggcacaaaccatgggtccagggagtctcagcggggaacttctatcagtatcaataaccattggaaggagaaatgattcatgtgtgaaaaaattctcagatccatcaataaatttttttcagagccattgtatcagatgttgataaaagcaatttttttctaataagctgtcattctataattgcccatcacagtctttagtgaacacatagaaagcctatacagttttggtcctgaatagtctcttgtgactaggatgattgaggtgttaattcctcttccttataaaaaggcttggaatcaaaaatattttaaaaggccgtggtttcgtttcagacatcaaccatctaaaacgggattttaaagcgatattttacaagaatgaaaggcacaattgttgatctgtattttttacacttcagtttctaaatcatgaatcgttgccttccacaggaaccctcccttatacattacttgagtgttgtgtagtttttcttcagccaggtatttctctgcctagagaggggaagagaaatgtgttctccaggactgatcccctttgtagattttgtacctgaagagttacctggcagggcaccacccttggctaggcccaggtgtgtgtttctttcttgcctggcatggaccccgaggcaggtgatgtggggcctggcgcacctccccgctttggcagctgtggcctccctggccagtgcccttgcaggaggccggccggcagcctgatgacccgtactctttagtcactgacgtcagattatttttataacgttccctgacagttcagagtcccttcgaattgcacttttctggtttcgcttatttaattaaaagagatgagtgtaagtataaaaaatgaaggtgaaataaccattggaattgtatttggttacttaatactgttccacaacatcttgggacgtctgttttcctttggagagtgaggccttgttattattcttttctgataaagaaaacattttatttcctttgggcttgcattagctctttcctagcaacccattatcccagctcagtacctttcaaacagaaaactagagtctggggttttgttgtgatctgaatttgtaagttattaatgtgaaagggggagcaggaagctccccctttgcacaaagggggatttgtttgcacaaagttcactgtaaatactgtgagaattgaattctgaaaaggtcatatttagtgatttcaaaagcacacatttaaatgaagactgactaaataaaaggtaccac

SEQ ID NO: 106184 - DNA, 3676 bp, Artificial Sequence
  derived and/or modified sequence
gtgacgttacaggactgaggagggaggaagtaaaagggagctgtgactgtggtacgtatctgaaagcaagtgttagagagggagtggagaacgcataagcaagctggtttgaccagaaacagaactgcctgtgacagattaagagacaagcaaggcttggaatctgagagcaagcaaagagagtggaaatttacagctgccctatgtgagtgttcaagtgatcattttctggtaacgttttccagtggtaactgttactcttcaaaaagagggacagaaagtcaagacctaattgtggaaactcttttctctgccacgcttggtaataggaggcaacctctattaaatggacgataaaggctacttcatctaaagtgctttgagctcaagaaagagctgtcttcagcacctcaccatgtgtctacattttgttgcttagaaaagcctaggcatttctgtaacatttgcattccatattggaagaagagatttctacacatgaaaaaaatgcctttgtttagtaaatcacacaaaaatccagcagaaattgtgaaaatcctgaaagacaatttggccattttggaaaagcaagacaaaaagacagacaaggcttcagaagaagtgtctaaatcactgcaagcaatgaaagaaattctgtgtggtacaaacgagaaagaacccccaacagaagcagtggctcagctagcacaagaactctacagcagtggcctgctagtgacactgatagctgacctgcagctgatagactttgagggaaaaaaagatgtgacccagatatttaacaacatcttgagaagacagataggcactcggagtcctactgtggagtatattagtgctcatcctcatatcctgtttatgctcctcaaaggatatgaagccccacagattgccttacgttgtgggattatgctgagagaatgtattcgacatgaaccacttgccaaaatcatcctcttttctaatcaattcagagatttctttaagtacgtggagttgtcaacatttgatattgcttcagatgcctttgctactttcaaggatttactaaccagacataaagtgttggtagcagacttcttagaacaaaattacgacactatttttgaagactatgagaaattgcttcagtctgagaattatgttactaagagacagtctttaaagctgctaggggagctgatcctggaccgtcacaactttgccatcatgacaaagtatatcagcaagccggagaacctgaaactcatgatgaacctccttcgggataaaagtcccaacatccagtttgaagcctttcatgtttttaaggtgtttgtggccagtcctcacaaaacacagcctattgtggagatcctgttaaaaaatcagcccaaactcattgagtttctgagcagcttccaaaaagaaaggacggatgatgagcagttcgctgacgagaagaactacttgattaaacagatccgagacttgaagaaaacggccccttgaagagctccccggcccctgtcacagtcagtcgtctcatttgtccagtttgtacagtgtgtcatttcagaaagtcatcattcttgggaagactttggaggtgcctattttttctgctgtaattgttctgggtagatggagtataaacatttgaatggaaaaaaattaacctagaataatatattcattttagtcaagtctgtgattatttatgtgaaatgagaaccattgtatcagatgttgataaaagcaattttaacttgcagatgtgagcccctgggcacaatgagccgctaaatgggagctcaattgacaggcatcaccaagtcttcaaggaggactgagttctcaggggagaactgggaatggggccagggtgcaaaaatgctttgcccatctgtaggtagacacacagatcgctcagggcactgagagatcccagaaggtaacgttaatgttttcagtcattgtgtgtcctttgttgctgccaatgtctttggactgtaatcagtgcatccacacctcccaggatccagtgctccctctcagctcagtctcccctctctccctgtcctgcattccatcccagctcctcagcatggcctcagtgggcgcacccatgcctcccgcagtccaggtgagcaggggagcaactgagcaggaagaggatggatcaacaagggtcacggggaataggggacccacggggtgtgacctgcttgctagagaactgtgaacatgtggctctggatagagtgactgctgctccatattagcttccagagggtgagtgagggacagaatatttccttcataatggtcatgggtgaatgctttctgctgtaagtgtcttttagagtaggaatcagcatagtgggatgcccagcaggcacaaaccatgggtccagggagtctcagcggggaacttctatcagtatcaataaccattggaaggagaaatgattcatgtgtgaaaaaattctcagatccatcaataaatttttttcagagccattgtatcagatgttgataaaagcaatttttttctaataagctgtcattctataattgcccatcacagtctttagtgaacacatagaaagcctatacagttttggtcctgaatagtctcttgtgactaggatgattgaggtgttaattcctcttccttataaaaaggcttggaatcaaaaatattttaaaaggccgtggtttcgtttcagacatcaaccatctaaaacgggattttaaagcgatattttacaagaatgaaaggcacaattgttgatctgtattttttacacttcagtttctaaatcatgaatcgttgccttccacaggaaccctcccttatacattacttgagtgttgtgtagtttttcttcagccaggtatttctctgcctagagaggggaagagaaatgtgttctccaggactgatcccctttgtagattttgtacctgaagagttacctggcagggcaccacccttggctaggcccaggtgtgtgtttctttcttgcctggcatggaccccgaggcaggtgatgtggggcctggcgcacctccccgctttggcagctgtggcctccctggccagtgcccttgcaggaggccggccggcagcctgatgacccgtactctttagtcactgacgtcagattatttttataacgttccctgacagttcagagtcccttcgaattgcacttttctggtttcgcttatttaattaaaagagatgagtgtaagtataaaaaatgaaggtgaaataaccattggaattgtatttggttacttaatactgttccacaacatcttgggacgtctgttttcctttggagagtgaggccttgttattattcttttctgataaagaaaacattttatttcctttgggcttgcattagctctttcctagcaacccattatcccagctcagtacctttcaaacagaaaactagagtctggggttttgttgtgatctgaatttgtaagttattaatgtgaaagggggagcaggaagctccccctttgcacaaagggggatttgtttgcacaaagttcactgtaaatactgtgagaattgaattctgaaaaggtcatatttagtgatttcaaaagcacacatttaaatgaagactgactaaataaaaggtaccacaca

SEQ ID NO: 106185 - DNA, 3613 bp, Artificial Sequence
  derived and/or modified sequence
gtgacgttacaggactgaggagggaggaagtaaaagggagctgtgactgtggtacgtatctgaaagcaagtgttagagagggagtggagaacgcataagcaagctggtttgaccagaaacagaactgcctgtgacagattaagagacaagcaaggcttggaatctgagagcaagcaaagagagtggaaatttacagctgccctatgtgagtgttcaagtgatcattttctggtaacgttttccagtggtaactgttactcttcaaaaagagggacagaaagtcaagacctaattgtggaaactcttttctctgccacgcttggtaataggaggcaacctctattaaatggacgataaaggctacttcatctaaagtgctttgagctcaagaaagagctgtcttcagcacctcaccatgtgtctacattttgttgcttagaaaagcctaggcatttctgtaacatttgcattccatattggaagaagagatttctacacatgaaaaaaatgcctttgtttagtaaatcacacaaaaatccagcagaaattgtgaaaatcctgaaagacaatttggccattttggaaaagcaagacaaaaagacagacaaggcttcagaagaagtgtctaaatcactgcaagcaatgaaagaaattctgtgtggtacaaacgagaaagaacccccaacagaagcagtggctcagctagcacaagaactctacagcagtggcctgctagtgacactgatagctgacctgcagctgatagactttgagggaaaaaaagatgtgacccagatatttaacaacatcttgagaagacagataggcactcggagtcctactgtggagtatattagtgctcatcctcatatcctgtttatgctcctcaaaggatatgaagccccacagattgccttacgttgtgggattatgctgagagaatgtattcgacatgaaccacttgccaaaatcatcctcttttctaatcaattcagagatttctttaagtacgtggagttgtcaacatttgatattgcttcagatgcctttgctactttcaagatttttgaagactatgagaaattgcttcagtctgagaattatgttactaagagacagtctttaaagctgctaggggagctgatcctggaccgtcacaactttgccatcatgacaaagtatatcagcaagccggagaacctgaaactcatgatgaacctccttcgggataaaagtcccaacatccagtttgaagcctttcatgtttttaaggtgtttgtggccagtcctcacaaaacacagcctattgtggagatcctgttaaaaaatcagcccaaactcattgagtttctgagcagcttccaaaaagaaaggacggatgatgagcagttcgctgacgagaagaactacttgattaaacagatccgagacttgaagaaaacggccccttgaagagctccccggcccctgtcacagtcagtcgtctcatttgtccagtttgtacagtgtgtcatttcagaaagtcatcattcttgggaagactttggaggtgcctattttttctgctgtaattgttctgggtagatggagtataaacatttgaatggaaaaaaattaacctagaataatatattcattttagtcaagtctgtgattatttatgtgaaatgagaaccattgtatcagatgttgataaaagcaattttaacttgcagatgtgagcccctgggcacaatgagccgctaaatgggagctcaattgacaggcatcaccaagtcttcaaggaggactgagttctcaggggagaactgggaatggggccagggtgcaaaaatgctttgcccatctgtaggtagacacacagatcgctcagggcactgagagatcccagaaggtaacgttaatgttttcagtcattgtgtgtcctttgttgctgccaatgtctttggactgtaatcagtgcatccacacctcccaggatccagtgctccctctcagctcagtctcccctctctccctgtcctgcattccatcccagctcctcagcatggcctcagtgggcgcacccatgcctcccgcagtccaggtgagcaggggagcaactgagcaggaagaggatggatcaacaagggtcacggggaataggggacccacggggtgtgacctgcttgctagagaactgtgaacatgtggctctggatagagtgactgctgctccatattagcttccagagggtgagtgagggacagaatatttccttcataatggtcatgggtgaatgctttctgctgtaagtgtcttttagagtaggaatcagcatagtgggatgcccagcaggcacaaaccatgggtccagggagtctcagcggggaacttctatcagtatcaataaccattggaaggagaaatgattcatgtgtgaaaaaattctcagatccatcaataaatttttttcagagccattgtatcagatgttgataaaagcaatttttttctaataagctgtcattctataattgcccatcacagtctttagtgaacacatagaaagcctatacagttttggtcctgaatagtctcttgtgactaggatgattgaggtgttaattcctcttccttataaaaaggcttggaatcaaaaatattttaaaaggccgtggtttcgtttcagacatcaaccatctaaaacgggattttaaagcgatattttacaagaatgaaaggcacaattgttgatctgtattttttacacttcagtttctaaatcatgaatcgttgccttccacaggaaccctcccttatacattacttgagtgttgtgtagtttttcttcagccaggtatttctctgcctagagaggggaagagaaatgtgttctccaggactgatcccctttgtagattttgtacctgaagagttacctggcagggcaccacccttggctaggcccaggtgtgtgtttctttcttgcctggcatggaccccgaggcaggtgatgtggggcctggcgcacctccccgctttggcagctgtggcctccctggccagtgcccttgcaggaggccggccggcagcctgatgacccgtactctttagtcactgacgtcagattatttttataacgttccctgacagttcagagtcccttcgaattgcacttttctggtttcgcttatttaattaaaagagatgagtgtaagtataaaaaatgaaggtgaaataaccattggaattgtatttggttacttaatactgttccacaacatcttgggacgtctgttttcctttggagagtgaggccttgttattattcttttctgataaagaaaacattttatttcctttgggcttgcattagctctttcctagcaacccattatcccagctcagtacctttcaaacagaaaactagagtctggggttttgttgtgatctgaatttgtaagttattaatgtgaaagggggagcaggaagctccccctttgcacaaagggggatttgtttgcacaaagttcactgtaaatactgtgagaattgaattctgaaaaggtcatatttagtgatttcaaaagcacacatttaaatgaagactgactaaataaaaggtaccac

SEQ ID NO: 106186 - DNA, 468 bp, Artificial Sequence
  derived and/or modified sequence
ggatttcttgtagaagccagttaaaaggagaacctagtatcacactaggcttctgaaaacaccaatcaagagttgcttaatgcaggggtcccttacccctgggctgcagacctgtacctgtccatggcctgttaggaaccgggcagcacagtaggagcattccatattggaagaagagatttctacacatgaaaaaaatgcctttgtttagtaaatcacacaaaaatccagcagaaattgtgaaaatcctgaaagacaatttggccattttggaaaagcaagacaaaaagacagacaaggcttcagaagaagtgtctaaatcactgcaagcaatgaaagaaattctgtgtggtacaaacgagaaagaacccccaacagaagcagtggctcagctagcacaagaactctacagcagtggcctgctagtgacactgatagctgacctgcagctgatagactttgaggtaa

SEQ ID NO: 106187 - DNA, 2416 bp, Artificial Sequence
  derived and/or modified sequence
ccgcagtggcgcccgagcgcgccgcctcccgattgactgctagcgctctcggcttgtctcgcgcactgtagctgagccaatggagttactcgtagtcgagaggccggcatcactggagtggtggcgcagctgtttcctccggatatccatcaaatattgagaagaaagaatatcaggagcaaagtgttctaagttgctgttcagaacgtaaagatgcgaaccccaaatcagtggtttgttcattcttcatgcaagagcaatgcactaaaggagagaagcaagctgtggtgatcagtgactttggtgaaagctaagaaggttcaaacaaatttgcaaatgatatacaacttctaagcattccatattggaagaagagatttctacacatgaaaaaaatgcctttgtttagtaaatcacacaaaaatccagcagaaattgtgaaaatcctgaaagacaatttggccattttggaaaagcaagacaaaaagacagacaaggcttcagaagaagtgtctaaatcactgcaagcaatgaaagaaattctgtgtggtacaaacgagaaagaacccccaacagaagcagtggctcagctagcacaagaactctacagcagtggcctgctagtgacactgatagctgacctgcagctgatagactttgagggaaaaaaagatgtgacccagatatttaacaacatcttgagaagacagataggcactcggagtcctactgtggagtatattagtgctcatcctcatatcctgtttatgctcctcaaaggatatgaagccccacagattgccttacgttgtgggattatgctgagagaatgtattcgacatgaaccacttgccaaaatcatcctcttttctaatcaattcagagatttctttaagtacgtggagttgtcaacatttgatattgcttcagatgcctttgctactttcaaggatttactaaccagacataaagtgttggtagcagacttcttagaacaaaattacgacactatttttgaagactatgagaaattgcttcagtctgagaattatgttactaagagacagtctttaaagctgctaggggagctgatcctggaccgtcacaactttgccatcatgacaaagtatatcagcaagccggagaacctgaaactcatgatgaacctccttcgggataaaagtcccaacatccagtttgaagcctttcatgtttttaaggtgtttgtggccagtcctcacaaaacacagcctattgtggagatcctgttaaaaaatcagcccaaactcattgagtttctgagcagcttccaaaaagaaaggacggatgatgagcagttcgctgacgagaagaactacttgattaaacagatccgagacttgaagaaaacggccccttgaagagctccccggcccctgtcacagtcagtcgtctcatttgtccagtttgtacagtgtgtcatttcagaaagtcatcattcttgggaagactttggaggtgcctattttttctgctgtaattgttctgggtagatggagtataaacatttgaatggaaaaaaattaacctagaataatatattcattttagtcaagtctgtgattatttatgtgaaatgagaaccattgtatcagatgttgataaaagcaattttaacttgcagatgtgagcccctgggcacaatgagccgctaaatgggagctcaattgacaggcatcaccaagtcttcaaggaggactgagttctcaggggagaactgggaatggggccagggtgcaaaaatgctttgcccatctgtaggtagacacacagatcgctcagggcactgagagatcccagaaggtaacgttaatgttttcagtcattgtgtgtcctttgttgctgccaatgtctttggactgtaatcagtgcatccacacctcccaggatccagtgctccctctcagctcagtctcccctctctccctgtcctgcattccatcccagctcctcagcatggcctcagtgggcgcacccatgcctcccgcagtccaggtgagcaggggagcaactgagcaggaagaggatggatcaacaagggtcacggggaataggggacccacggggtgtgacctgcttgctagagaactgtgaacatgtggctctggatagagtgactgctgctccatattagcttccagagggtgagtgagggacagaatatttccttcataatggtcatgggtgaatgctttctgctgtaagtgtcttttagagtaggaatcagcatagtgggatgcccagcaggcacaaaccatgggtccagggagtctcagcggggaacttctatcagtatcaataaccattggaaggagaaatgattcatgtgtgaaaaaattctcagatccatcaataaatttttttcagagccattgta

SEQ ID NO: 106188 - DNA, 1627 bp, Artificial Sequence
  derived and/or modified sequence
gagccaatggagttactcgtagtcgagaggccggcatcactggagtggtggcgcagctgtttcctccggatatccatcaaatattgagaagaaagaatatcaggagcaaagtgttctaagttgctgttcagaacgtaaagatgcgaaccccaaatcagtggtttgttcattcttcatgcaagagcaatgcactaaaggagagaagcaagctgtggtgatcagtgactttggtgaaagctaagaaggttcaaacaaatttgcaaatgatatacaacttctaaggaggcaacctctattaaatggacgataaaggctacttcatctaaagtgctttgagctcaagaaagagctgtcttcagcacctcaccatgtgtctacattttgttgcttagaaaagcctaggcatttctgtaacatttgcattccatattggaagaagagatttctacacatgaaaaaaatgcctttgtttagtaaatcacacaaaaatccagcagaaattgtgaaaatcctgaaagacaatttggccattttggaaaagcaagacaaaaagacagacaaggcttcagaagaagtgtctaaatcactgcaagcaatgaaagaaattctgtgtggtacaaacgagaaagaacccccaacagaagcagtggctcagctagcacaagaactctacagcagtggcctgctagtgacactgatagctgacctgcagctgatagactttgagggaaaaaaagatgtgacccagatatttaacaacatcttgagaagacagataggcactcggagtcctactgtggagtatattagtgctcatcctcatatcctgtttatgctcctcaaaggatatgaagccccacagattgccttacgttgtgggattatgctgagagaatgtattcgacatgaaccacttgccaaaatcatcctcttttctaatcaattcagagatttctttaagtacgtggagttgtcaacatttgatattgcttcagatgcctttgctactttcaaggatttactaaccagacataaagtgttggtagcagacttcttagaacaaaattacgacactatttttgaagactatgagaaattgcttcagtctgagaattatgttactaagagacagtctttaaagctgctaggggagctgatcctggaccgtcacaactttgccatcatgacaaagtatatcagcaagccggagaacctgaaactcatgatgaacctccttcgggataaaagtcccaacatccagtttgaagcctttcatgtttttaaggtgtttgtggccagtcctcacaaaacacagcctattgtggagatcctgttaaaaaatcagcccaaactcattgagtttctgagcagcttccaaaaagaaaggacggatgatgagcagttcgctgacgagaagaactacttgattaaacagatccgagacttgaagaaaacggccccttgaagagctccccggcccctgtcacagtcagtcgtctcatttgtccagtttgtacagtgtgtcatttcagaaagtcatcattcttgggaagactttggaggtgcctattttttctgctgtaattgttctgggtagatggagtataaacatttgaatggaaaaaaa

SEQ ID NO: 106189 - DNA, 633 bp, Artificial Sequence
  derived and/or modified sequence
agcgttttgttagggaagaagtggagaacagatattggaaggcaattagctgtctctaatacattgataaaatatataactataactgcaaaatgctaataacccagcagaggagtagatttgggaacataagatgaaaaagtcaacaagtgcattgatcacaacatatggtaatgatagcgtgattgtgatgacctttgttttatacctccttttacattccatattggaagaagagatttctacacatgaaaaaaatgcctttgtttagtaaatcacacaaaaatccagcagaaattgtgaaaatcctgaaagacaatttggccattttggaaaagcaagacaaaaagacagacaaggcttcagaagaagtgtctaaatcactgcaagcaatgaaagaaattctgtgtggtacaaacgagaaagaacccccaacagaagcagtggctcagctagcacaagaactctacagcagtggcctgctagtgacactgatagctgacctgcagctgatagactttgagggaaaaaaagatgtgacccagatatttaacaacatcttgagaagacagataggcactcggagtcctactgtggagtatattagtgctcatcctcatatcctgtttatgc

SEQ ID NO: 106190 - DNA, 727 bp, Artificial Sequence
  derived and/or modified sequence
agagagggagtggagaacgcataagcaagctggtttgaccagaaacagaactgcctgtgacagattaagagacaagcaaggcttggaatctgagagcaagcaaagagagtggaaatttacagctgccctatcattccatattggaagaagagatttctacacatgaaaaaaatgcctttgtttagtaaatcacacaaaaatccagcagaaattgtgaaaatcctgaaagacaatttggccattttggaaaagcaagacaaaaagacagacaaggcttcagaagaagtgtctaaatcactgcaagcaatgaaagaaattctgtgtggtacaaacgagaaagaacccccaacagaagcagtggctcagctagcacaagaactctacagcagtggcctgctagtgacactgatagctgacctgcagctgatagactttgagggaaaaaaagatgtgacccagatatttaacaacatcttgagaagacagataggcactcggagtcctactgtggagtatattagtgctcatcctcatatcctgtttatgctcctcaaaggatatgaagccccacagattgccttacgttgtgggattatgctgagagaatgtattcgacatgaaccacttgccaaaatcatcctcttttctaatcaattcagagatttctttaagtacgtggagttgtcaacatttgatattgcttcagatgcctttgctactttcaagg

SEQ ID NO: 106191 - DNA, 1014 bp, Artificial Sequence
  derived and/or modified sequence
atgaagaagatgcccctgttcagcaagagccacaagaaccccgccgagatcgtgaagatcctgaaggacaacctggccatcctggagaagcaggacaagaagaccgacaaggccagcgaggaggtgagcaagagcctgcaggccatgaaggagatcctgtgcggcaccaacgagaaggagccccccaccgaggccgtggcccagctggcccaggagctgtacagcagcggcctgctggtgaccctgatcgccgacctgcagctgatcgacttcgagggcaagaaggacgtgacccagatcttcaacaacatcctgagaagacagatcggcaccagaagccccaccgtggagtacatcagcgcccacccccacatcctgttcatgctgctgaagggctacgaggccccccagatcgccctgagatgcggcatcatgctgagagagtgcatcagacacgagcccctggccaagatcatcctgttcagcaaccagttcagagacttcttcaagtacgtggagctgagcaccttcgacatcgccagcgacgccttcgccaccttcaaggacctgctgaccagacacaaggtgctggtggccgacttcctggagcagaactacgacaccatcttcgaggactacgagaagctgctgcagagcgagaactacgtgaccaagagacagagcctgaagctgctgggcgagctgatcctggacagacacaacttcgccatcatgaccaagtacatcagcaagcccgagaacctgaagctgatgatgaacctgctgagagacaagagccccaacatccagttcgaggccttccacgtgttcaaggtgttcgtggccagcccccacaagacccagcccatcgtggagatcctgctgaagaaccagcccaagctgatcgagttcctgagcagcttccagaaggagagaaccgacgacgagcagttcgccgacgagaagaactacctgatcaagcagatcagagacctgaagaagaccgccccctag

SEQ ID NO: 106192 - DNA, 945 bp, Artificial Sequence
  derived and/or modified sequence
atgcccctgttcagcaagagccacaagaaccccgccgagatcgtgaagatcctgaaggacaacctggccatcctggagaagcaggacaagaagaccgacaaggccagcgaggaggtgagcaagagcctgcaggccatgaaggagatcctgtgcggcaccaacgagaaggagccccccaccgaggccgtggcccagctggcccaggagctgtacagcagcggcctgctggtgaccctgatcgccgacctgcagctgatcgacttcgagggcaagaaggacgtgacccagatcttcaacaacatcctgagaagacagatcggcaccagaagccccaccgtggagtacatcagcgcccacccccacatcctgttcatgctgctgaagggctacgaggccccccagatcgccctgagatgcggcatcatgctgagagagtgcatcagacacgagcccctggccaagatcatcctgttcagcaaccagttcagagacttcttcaagtacgtggagctgagcaccttcgacatcgccagcgacgccttcgccaccttcaagatcttcgaggactacgagaagctgctgcagagcgagaactacgtgaccaagagacagagcctgaagctgctgggcgagctgatcctggacagacacaacttcgccatcatgaccaagtacatcagcaagcccgagaacctgaagctgatgatgaacctgctgagagacaagagccccaacatccagttcgaggccttccacgtgttcaaggtgttcgtggccagcccccacaagacccagcccatcgtggagatcctgctgaagaaccagcccaagctgatcgagttcctgagcagcttccagaaggagagaaccgacgacgagcagttcgccgacgagaagaactacctgatcaagcagatcagagacctgaagaagaccgccccctag

SEQ ID NO: 106193 - DNA, 282 bp, Artificial Sequence
  derived and/or modified sequence
atgaagaagatgcccctgttcagcaagagccacaagaaccccgccgagatcgtgaagatcctgaaggacaacctggccatcctggagaagcaggacaagaagaccgacaaggccagcgaggaggtgagcaagagcctgcaggccatgaaggagatcctgtgcggcaccaacgagaaggagccccccaccgaggccgtggcccagctggcccaggagctgtacagcagcggcctgctggtgaccctgatcgccgacctgcagctgatcgacttcgaggtgtag

SEQ ID NO: 106194 - DNA, 387 bp, Artificial Sequence
  derived and/or modified sequence
atgaagaagatgcccctgttcagcaagagccacaagaaccccgccgagatcgtgaagatcctgaaggacaacctggccatcctggagaagcaggacaagaagaccgacaaggccagcgaggaggtgagcaagagcctgcaggccatgaaggagatcctgtgcggcaccaacgagaaggagccccccaccgaggccgtggcccagctggcccaggagctgtacagcagcggcctgctggtgaccctgatcgccgacctgcagctgatcgacttcgagggcaagaaggacgtgacccagatcttcaacaacatcctgagaagacagatcggcaccagaagccccaccgtggagtacatcagcgcccacccccacatcctgttcatgtag

SEQ ID NO: 106195 - DNA, 567 bp, Artificial Sequence
  derived and/or modified sequence
atgaagaagatgcccctgttcagcaagagccacaagaaccccgccgagatcgtgaagatcctgaaggacaacctggccatcctggagaagcaggacaagaagaccgacaaggccagcgaggaggtgagcaagagcctgcaggccatgaaggagatcctgtgcggcaccaacgagaaggagccccccaccgaggccgtggcccagctggcccaggagctgtacagcagcggcctgctggtgaccctgatcgccgacctgcagctgatcgacttcgagggcaagaaggacgtgacccagatcttcaacaacatcctgagaagacagatcggcaccagaagccccaccgtggagtacatcagcgcccacccccacatcctgttcatgctgctgaagggctacgaggccccccagatcgccctgagatgcggcatcatgctgagagagtgcatcagacacgagcccctggccaagatcatcctgttcagcaaccagttcagagacttcttcaagtacgtggagctgagcaccttcgacatcgccagcgacgccttcgccaccttcaagtag

SEQ ID NO: 106196 - protein, 234 aa, Artificial Sequence
  derived and/or modified sequence
RHYVVCSTPQSQYYLAEKHLFSTIPELINYHQHNSAGLISRLKYPVSQQNKNAPSTAGLGYGSWEIDPKDLTFLKELGTGQFGVVKYGKWRGQYDVAIKMIKEGSMSEDEFIEEAKVMMYVLDDEYTSSVGSKFPVRWSPPEVLMYSKFSSKSDIWAFGVLMWEIYSLGKMPYERFTNSETAEHIAQGLRLYRPHLASEKVYTIMYSCWHEKADERPTFKILLSNILDVMDEES

SEQ ID NO: 106197 - DNA, 1980 bp, Artificial Sequence
  derived and/or modified sequence
atggccgcggtcatcctggagagtattttccttaaacggtcacagcagaagaaaaagacttctccccttaattttaagaagcgactgtttctcctgactgtccataagctgtcctattatgagtacgattttgagcgtggacgtcgcggatccaagaaaggctctatcgatgtggaaaagattacatgcgtggagacggttgtgccagaaaagaacccccccccggagaggcagatccccagacgcggcgaagagtctagcgaaatggaacaaatatccatcattgaacgcttcccttacccctttcaggtggtgtatgacgagggtccactctatgtgttctcacccacagaggagctgaggaagcggtggatacaccagctcaagaatgtcatccgatataattcagatctggttcagaagtaccacccctgtttctggattgatggccagtatctgtgttgtagccagaccgcaaagaacgccatgggctgccagattctagaaaatcgcaatggcagtcttaaaccaggctcctcccatcgaaaaaccaagaaacctctcccacctacaccagaggaggaccagatactcaagaaaccactacctcctgaacccgctgccgctccagtgagcacgagtgaactcaaaaaggttgtcgcgctctacgactatatgcctatgaacgccaatgatttgcagctccgcaagggcgacgagtattttattctcgaggaatcaaacctgccatggtggcgagcccgggacaagaatggtcaagagggctacattccctctaactacgtaacagaagcagaggatagtatcgaaatgtacgaatggtattccaagcacatgacgagaagtcaggctgaacagcttctgaaacaagagggaaaagagggcggctttattgttcgcgacagctccaaggcaggaaaatacactgtaagcgtgtttgccaaatccacaggcgatccacagggggtgattcggcactacgtagtctgtagtactccccagtcacagtactatctagcggagaaacacctttttagtacaatcccagagctgataaattaccaccagcataattctgccggcctcattagccgactgaaatatccagtttcgcagcagaataaaaatgcaccctcgacggccggcctgggctatggctcttgggagatcgaccctaaagacctgaccttcctcaaggaactaggaacagggcagttcggtgtcgttaagtatggaaagtggcgcggacagtacgatgttgcaatcaagatgataaaagaggggtctatgtccgaagacgagttcatcgaagaggcaaaagtcatgatgaatttatcccacgagaagctggtgcaactgtacggcgtgtgcacaaagcagcgccctatcttcattatcacagagtatatggcgaacggatgccttttgaattatctgcgggagatgcgccacaggtttcaaactcagcaactgctcgagatgtgtaaagacgtctgcgaggccatggagtatctagagagcaagcagtttctgcatcgcgatcttgctgcccgcaactgcctggtgaacgatcagggtgtagtcaaagtaagcgattttgggctgagtcgttacgtcttggatgatgagtatacttctagcgtgggatcaaagttcccggtaagatggtcacctccagaggtcctgatgtactcaaagttctctagcaaaagtgacatctgggcatttggggtgctcatgtgggagatctatagcctcggtaaaatgccttacgaacgttttaccaactcagagactgcagaacacatagcacagggcctccgcctttaccggcctcatttggcctccgagaaggtgtacaccatcatgtattcttgctggcatgagaaagcggatgaacggcctacctttaagatcctgctcagcaatattttggacgtaatggatgaggagagctag

SEQ ID NO: 106198 - DNA, 1980 bp, Artificial Sequence
  derived and/or modified sequence
atggctgctgtgatcctggagagcatcttcctgaagaggagccagcagaagaagaagaccagccccctgaacttcaagaagaggctcttcctgctgactgtgcacaagctgagctactatgaatatgactttgagcggggccggcggggcagcaagaagggcagcattgatgtggagaagatcacctgtgtggagaccgtggtgcctgagaagaaccccccacctgagcggcagatccccaggagaggagaggagagcagcgagatggagcagatcagcatcatcgagcgcttcccctaccccttccaggtggtgtatgatgagggccccctgtatgtgttcagccccacagaggagctgaggaagcgctggatccaccagctgaagaatgtcatccgctacaacagcgacctggtgcagaagtaccacccctgcttctggattgatggccagtacctgtgctgcagccagacagccaagaatgccatgggctgccagatcctggagaacagaaatggcagcctgaagccaggcagcagccacaggaagaccaagaagcccctgccccccaccccagaggaggaccagatcctgaagaagcccctgcccccagagcctgctgctgcccctgtgtccaccagcgagctgaagaaggtggtggccctgtatgactacatgcccatgaatgccaatgacctgcagctgaggaaaggagatgagtacttcatcctggaggagagcaacctgccctggtggagggcccgggacaagaatggccaggagggctacatccccagcaactacgtgacagaagcagaagattccattgagatgtatgagtggtacagcaagcacatgaccaggagccaggccgagcagctgctgaagcaggagggcaaggagggcggcttcatcgtgcgggacagcagcaaggccggcaagtacacagtgtctgtgtttgccaagagcactggagacccccagggcgtcatccgccactacgtggtgtgcagcaccccccagagccagtactacctggccgagaagcacctgttcagcaccatccctgagctgatcaactaccaccagcacaacagcgctggcctcatcagccggctgaagtaccctgtgtcccagcagaacaagaatgcccccagcacagctggcctgggctacggctcctgggagattgaccccaaggacctgaccttcctgaaggagctgggcaccggccagtttggagtggtgaagtatggcaagtggaggggccagtatgatgtggccatcaagatgatcaaggagggctccatgtctgaagatgagttcatcgaggaggccaaggtgatgatgaacctgagccatgagaagctggtgcagctgtatggagtgtgcaccaagcagaggcccatcttcatcatcacagagtacatggccaacggctgcctgctgaactacctgcgggagatgaggcaccgcttccagacccagcagctgctggagatgtgcaaggatgtgtgtgaggccatggagtacctggagagcaagcagttcctgcaccgggacctggccgccaggaactgcctggtgaatgaccagggcgtggtgaaggtgtctgactttggcctgagccgctacgtgctggatgatgagtacaccagctctgtgggcagcaagtttcctgtgcgctggagccccccagaggtgctgatgtacagcaagttcagcagcaagagtgacatctgggcctttggagtgctgatgtgggagatctacagcctgggcaagatgccctatgagcgcttcaccaacagcgagacagctgagcacatcgcccagggcctgcggctgtaccggccccacctggccagcgagaaggtgtacaccatcatgtacagctgctggcatgagaaggcagatgagcggcccaccttcaagatcctgctgagcaacatcctggatgtgatggatgaggagagctag

SEQ ID NO: 106199 - DNA, 1980 bp, Artificial Sequence
  derived and/or modified sequence
atggccgccgtgatcctggagagcatcttcctgaagcggagccagcagaaaaaaaagaccagcccactaaatttcaagaagcggctattccttctaacggtacacaagctgtcctattacgagtatgatttcgaaaggggtcgaaggggctcaaagaaaggatccattgacgtggagaaaatcacctgcgtggagaccgttgtgccggaaaagaatcctccgccggagaggcagattccaagaaggggcgaagagtcgagtgagatggaacagatttccattatcgagagattcccgtacccctttcaggtggtgtatgatgaagggcctctctatgttttctcaccaaccgaggaactgcggaaaagatggatccaccagctgaagaacgtcatccggtataatagtgacctggtacagaaatatcatccctgtttttggatcgatgggcaatacttgtgttgctcacagacagccaaaaatgcaatgggctgtcagatccttgagaataggaacgggtctttgaagcctggatcgtcacacagaaagaccaaaaaacccctgcctccaacacctgaggaggatcagattctcaagaagcccctcccaccggaaccggccgccgcccccgtgagcacttccgagttgaaaaaggttgtggccctatacgattacatgcccatgaacgccaacgatctacaactgaggaagggtgatgagtactttattctggaggaatctaatttaccatggtggagggctagggacaagaacggccaggaggggtatattccctccaactacgttactgaagccgaggatagcattgagatgtacgaatggtactctaaacacatgacccggtcccaagccgaacagctgctgaagcaggagggaaaggaaggcggcttcatcgttcgagactcaagcaaggccggcaaatataccgtttcagtcttcgccaagtctaccggtgatccccagggcgtgattcggcactatgtagtatgttctactccccagtcccagtattacctcgccgagaaacacctattttctaccattcctgaactcattaattaccaccagcataactccgctgggctaatctctcgattgaagtaccccgtgagtcagcaaaacaaaaacgcaccaagcaccgctggcctgggatatggaagctgggagatcgatcctaaggatttaacatttctgaaagaactagggacaggtcagtttggtgtggtgaaatatgggaaatggcgcgggcagtatgatgttgctattaaaatgatcaaggaggggtctatgtcggaggacgaattcattgaagaagcaaaagttatgatgaatctcagtcacgaaaagctcgtgcagctgtatggggtatgtacaaaacagagacccatttttattatcactgagtacatggctaacggatgcctattaaattatctaagagagatgcgacaccgtttccaaacacaacagctgcttgagatgtgtaaagatgtttgtgaagccatggaatacctggagagtaaacaatttctacaccgggaccttgcagcccgcaactgcctcgtaaatgaccagggagtcgtgaaggtgagtgacttcggactgtcccgatatgtcctggatgacgagtacacatcttccgtaggatctaaatttccagtcagatggtccccccctgaggtactcatgtattccaagttctcttctaaaagtgatatttgggcatttggtgttctgatgtgggagatctattccctgggaaagatgccctacgagagatttactaatagtgagaccgcagaacacattgcacaggggcttcggctgtaccggccacacctcgcatccgaaaaggtttacaccattatgtactcttgttggcatgaaaaggctgatgagcgaccaacattcaagatcctcctaagcaatattctggacgtgatggatgaagagtcttag

SEQ ID NO: 106200 - DNA, 1980 bp, Artificial Sequence
  derived and/or modified sequence
atggccgctgttattttggaaagcatatttctgaagcgcagtcagcagaagaagaaaaccagtcccctaaactttaagaagcgcctgttcctcctcaccgtacataagctctcttattacgaatatgattttgagagagggaggagaggctcaaaaaaaggaagcatcgatgtggagaaaataacttgcgtcgaaactgttgtgcctgaaaagaacccccctccagagcggcagattccacgcaggggcgaggaatctagtgagatggaacagatctccatcatcgaacgcttcccataccctttccaggtagtatacgacgagggtcccttgtacgtgttcagcccaacagaggaactgcggaagcgctggatacaccagctgaagaatgtgatacggtataactctgacctcgtccagaagtaccatccttgtttctggatcgatggtcagtacttgtgttgcagccaaaccgctaaaaatgccatggggtgtcagatcctcgagaaccggaacgggagtctcaagccagggagttctcacaggaaaaccaaaaaaccccttcccccaacacccgaggaagatcaaattttgaaaaagcccttaccaccagagcccgctgccgctcctgtgtccaccagtgaactgaaaaaagtggtcgcactgtacgattacatgccgatgaatgcaaacgacttacaactgcgtaaaggcgatgaatactttatcctggaagagtccaacctaccctggtggagagcgagggacaagaatggccaggaagggtatattccctccaactatgtgaccgaagccgaagattccattgagatgtacgagtggtactccaaacatatgactaggtcccaggcggagcagctgctgaagcaagaaggtaaggagggaggatttattgttagagattcatccaaggccggaaaatacaccgtttcggtcttcgccaaatccacaggcgacccacagggagttatccgccattacgtagtgtgctccactcctcaatctcagtattatttggcggaaaagcacctgttttctaccatccccgaactcataaactatcaccagcataactccgccggattgataagccggttgaaatatcccgtatcacagcaaaacaagaatgcacccagtaccgctggactgggctacggctcatgggagattgatcccaaggatttgaccttcttgaaagaactcggaacaggacagttcggggtggttaaatatggaaagtggagaggtcagtacgatgtggcaatcaaaatgatcaaggaaggttctatgtcggaagacgagttcatcgaagaggcaaaggttatgatgaatttgtcacatgaaaaacttgtccaactgtacggcgtttgcaccaagcagaggccaattttcatcatcaccgagtacatggccaacggctgtcttctgaactatctacgtgaaatgcgccataggtttcaaactcagcagttgctggaaatgtgcaaggacgtgtgtgaggctatggaatatcttgagagcaaacagttcctgcatcgcgaccttgccgcacgcaattgtctagtgaatgaccagggcgtggtgaaggtgtccgactttggattgtctcgatacgtgcttgacgacgaatatacctcctcagtaggatccaagttccccgtacgttggagtccaccggaggtcctgatgtacagcaagttctcaagcaaaagcgacatctgggccttcggtgttctgatgtgggagatctactctctgggcaagatgccatacgagagattcacaaactccgaaactgccgaacacatagctcagggtctgcgtctttaccgccctcatctggcctccgagaaggtgtatacaattatgtacagctgttggcacgaaaaagcagacgaacgaccaactttcaagatcctattgagcaacatcttggacgtgatggacgaagagtcttag

SEQ ID NO: 106201 - DNA, 2579 bp, Artificial Sequence
  derived and/or modified sequence
gctcagactgtccttcctctctggactgtaagaatatgtctccagggccagtgtctgctgcgatcgagtcccaccttccaagtcctggcatctcaatgcatctgggaagctacctgcattaagtcaggactgagcacacaggtgaactccagaaagaagaagctatggccgcagtgattctggagagcatctttctgaagcgatcccaacagaaaaagaaaacatcacctctaaacttcaagaagcgcctgtttctcttgaccgtgcacaaactctcctactatgagtatgactttgaacgtgggagaagaggcagtaagaagggttcaatagatgttgagaagatcacttgtgttgaaacagtggttcctgaaaaaaatcctcctccagaaagacagattccgagaagaggtgaagagtccagtgaaatggagcaaatttcaatcattgaaaggttcccttatcccttccaggttgtatatgatgaagggcctctctacgtcttctccccaactgaagaactaaggaagcggtggattcaccagctcaaaaacgtaatccggtacaacagtgatctggttcagaaatatcacccttgcttctggatcgatgggcagtatctctgctgctctcagacagccaaaaatgctatgggctgccaaattttggagaacaggaatggaagcttaaaacctgggagttctcaccggaagacaaaaaagcctcttcccccaacgcctgaggaggaccagatcttgaaaaagccactaccgcctgagccagcagcagcaccagtctccacaagtgagctgaaaaaggttgtggccctttatgattacatgccaatgaatgcaaatgatctacagctgcggaagggtgatgaatattttatcttggaggaaagcaacttaccatggtggagagcacgagataaaaatgggcaggaaggctacattcctagtaactatgtcactgaagcagaagactccatagaaatgtatgagtggtattccaaacacatgactcggagtcaggctgagcaactgctaaagcaagaggggaaagaaggaggtttcattgtcagagactccagcaaagctggcaaatatacagtgtctgtgtttgctaaatccacaggggaccctcaaggggtgatacgtcattatgttgtgtgttccacacctcagagccagtattacctggctgagaagcaccttttcagcaccatccctgagctcattaactaccatcagcacaactctgcaggactcatatccaggctcaaatatccagtgtctcaacaaaacaagaatgcaccttccactgcaggcctgggatacggatcatgggaaattgatccaaaggacctgaccttcttgaaggagctggggactggacaatttggggtagtgaagtatgggaaatggagaggccagtacgacgtggccatcaagatgatcaaagaaggctccatgtctgaagatgaattcattgaagaagccaaagtcatgatgaatctttcccatgagaagctggtgcagttgtatggcgtctgcaccaagcagcgccccatcttcatcatcactgagtacatggccaatggctgcctcctgaactacctgagggagatgcgccaccgcttccagactcagcagctgctagagatgtgcaaggatgtctgtgaagccatggaatacctggagtcaaagcagttccttcaccgagacctggcagctcgaaactgtttggtaaacgatcaaggagttgttaaagtatctgatttcggcctgtccaggtatgtcctggatgatgaatacacaagctcagtaggctccaaatttccagtccggtggtccccaccggaagtcctgatgtatagcaagttcagcagcaaatctgacatttgggcttttggggttttgatgtgggaaatttactccctggggaagatgccatatgagagatttactaacagtgagactgctgaacacattgcccaaggcctacgtctctacaggcctcatctggcttcagagaaggtatataccatcatgtacagttgctggcatgagaaagcagatgagcgtcccactttcaaaattcttctgagcaatattctagatgtcatggatgaagaatcctgagctcgccaataagcttcttggttctacttctcttctccacaagccccaatttcactttctcagaggaaatcccaagcttaggagccctggagcctttgtgctcccactcaatacaaaaaggcccctctctacatctgggaatgcacctcttctttgattccctgggatagtggcttctgagcaaaggccaagaaattattgtgcctgaaatttcccgagagaattaagacagactgaatttgcgatgaaaatattttttaggagggaggatgtaaatagccgcacaaaggggtccaacagctctttgagtaggcatttggtagagcttgggggtgtgtgtgtgggggtggaccgaatttggcaagaatgaaatggtgtcataaagatgggaggggagggtgttttgataaaataaaattactagaaagcttgaaa

SEQ ID NO: 106202 - DNA, 1366 bp, Artificial Sequence
  derived and/or modified sequence
gtgatacgtcattatgttgtgtgttccacacctcagagccagtattacctggctgagaagcaccttttcagcaccatccctgagctcattaactaccatcagcacaactctgcaggactcatatccaggctcaaatatccagtgtctcaacaaaacaagaatgcaccttccactgcaggcctgggatacggatcatgggaaattgatccaaaggacctgaccttcttgaaggagctggggactggacaatttggggtagtgaagtatgggaaatggagaggccagtacgacgtggccatcaagatgatcaaagaaggctccatgtctgaagatgaattcattgaagaagccaaagtcatgatgaatctttcccatgagaagctggtgcagttgtatggcgtctgcaccaagcagcgccccatcttcatcatcactgagtacatggccaatggctgcctcctgaactacctgagggagatgcgccaccgcttccagactcagcagctgctagagatgtgcaaggatgtctgtgaagccatggaatacctggagtcaaagcagttccttcaccgagacctggtatgtcctggatgatgaatacacaagctcagtaggctccaaatttccagtccggtggtccccaccggaagtcctgatgtatagcaagttcagcagcaaatctgacatttgggcttttggggttttgatgtgggaaatttactccctggggaagatgccatatgagagatttactaacagtgagactgctgaacacattgcccaaggcctacgtctctacaggcctcatctggcttcagagaaggtatataccatcatgtacagttgctggcatgagaaagcagatgagcgtcccactttcaaaattcttctgagcaatattctagatgtcatggatgaagaatcctgagctcgccaataagcttcttggttctacttctcttctccacaagccccaatttcactttctcagaggaaatcccaagcttaggagccctggagcctttgtgctcccactcaatacaaaaaggcccctctctacatctgggaatgcacctcttctttgattccctgggatagtggcttctgagcaaaggccaagaaattattgtgcctgaaatttcccgagagaattaagacagactgaatttgcgatgaaaatattttttaggagggaggatgtaaatagccgcacaaaggggtccaacagctctttgagtaggcatttggtagagcttgggggtgtgtgtgtgggggtggaccgaatttggcaagaatgaaatggtgtcataaagatgggaggggagggtgttttgataaaataaaattactagaaagcttgaaagtc

SEQ ID NO: 106203 - DNA, 1980 bp, Artificial Sequence
  derived and/or modified sequence
atggccgccgtgatcctggagagcatcttcctgaagagaagccagcagaagaagaagaccagccccctgaacttcaagaagagactgttcctgctgaccgtgcacaagctgagctactacgagtacgacttcgagagaggcagaagaggcagcaagaagggcagcatcgacgtggagaagatcacctgcgtggagaccgtggtgcccgagaagaaccccccccccgagagacagatccccagaagaggcgaggagagcagcgagatggagcagatcagcatcatcgagagattcccctaccccttccaggtggtgtacgacgagggccccctgtacgtgttcagccccaccgaggagctgagaaagagatggatccaccagctgaagaacgtgatcagatacaacagcgacctggtgcagaagtaccacccctgcttctggatcgacggccagtacctgtgctgcagccagaccgccaagaacgccatgggctgccagatcctggagaacagaaacggcagcctgaagcccggcagcagccacagaaagaccaagaagcccctgccccccacccccgaggaggaccagatcctgaagaagcccctgccccccgagcccgccgccgcccccgtgagcaccagcgagctgaagaaggtggtggccctgtacgactacatgcccatgaacgccaacgacctgcagctgagaaagggcgacgagtacttcatcctggaggagagcaacctgccctggtggagagccagagacaagaacggccaggagggctacatccccagcaactacgtgaccgaggccgaggacagcatcgagatgtacgagtggtacagcaagcacatgaccagaagccaggccgagcagctgctgaagcaggagggcaaggagggcggcttcatcgtgagagacagcagcaaggccggcaagtacaccgtgagcgtgttcgccaagagcaccggcgacccccagggcgtgatcagacactacgtggtgtgcagcaccccccagagccagtactacctggccgagaagcacctgttcagcaccatccccgagctgatcaactaccaccagcacaacagcgccggcctgatcagcagactgaagtaccccgtgagccagcagaacaagaacgcccccagcaccgccggcctgggctacggcagctgggagatcgaccccaaggacctgaccttcctgaaggagctgggcaccggccagttcggcgtggtgaagtacggcaagtggagaggccagtacgacgtggccatcaagatgatcaaggagggcagcatgagcgaggacgagttcatcgaggaggccaaggtgatgatgaacctgagccacgagaagctggtgcagctgtacggcgtgtgcaccaagcagagacccatcttcatcatcaccgagtacatggccaacggctgcctgctgaactacctgagagagatgagacacagattccagacccagcagctgctggagatgtgcaaggacgtgtgcgaggccatggagtacctggagagcaagcagttcctgcacagagacctggccgccagaaactgcctggtgaacgaccagggcgtggtgaaggtgagcgacttcggcctgagcagatacgtgctggacgacgagtacaccagcagcgtgggcagcaagttccccgtgagatggagcccccccgaggtgctgatgtacagcaagttcagcagcaagagcgacatctgggccttcggcgtgctgatgtgggagatctacagcctgggcaagatgccctacgagagattcaccaacagcgagaccgccgagcacatcgcccagggcctgagactgtacagaccccacctggccagcgagaaggtgtacaccatcatgtacagctgctggcacgagaaggccgacgagagacccaccttcaagatcctgctgagcaacatcctggacgtgatggacgaggagagctag

SEQ ID NO: 106204 - protein, 139 aa, Artificial Sequence
  derived and/or modified sequence
VIRHYVVCSTPQSQYYLAEKHLFSTIPELINYHQHNSAGLISRLKYPVSQQNKNAPSTAGLGYGVLMWEIYSLGKMPYERFTNSETAEHIAQGLRLYRPHLASEKVYTIMYSCWHEKADERPTFKILLSNILDVMDEES

SEQ ID NO: 106205 - protein, 483 aa, Artificial Sequence
  derived and/or modified sequence
MAAVILESIFLKRSQQKKKTSPLNFKKRLFLLTVHKLSYYEYDFERGRRGSKKGSIDVEKITCVETVVPEKNPPPERQIPRRGEESSEMEQISIIERFPYPFQVVYDEGPLYVFSPTEELRKRWIHQLKNVIRYNSDLVQKYHPCFWIDGQYLCCSQTAKNAMGCQILENRNGSLKPGSSHRKTKKPLPPTPEEDQILKKPLPPEPAAAPVSTSELKKVVALYDYMPMNANDLQLRKGDEYFILEESNLPWWRARDKNGQEGYIPSNYVTEAEDSIEMYEWYSKHMTRSQAEQLLKQEGKEGGFIVRDSSKAGKYTVSVFAKSTGDPQGVIRHYVVCSTPQSQYYLAARNCLVNDQGVVKVSDFGLSRYVLDDEYTSSVGSKFPVRWSPPEVLMYSKFSSKSDIWAFGVLMWEIYSLGKMPYERFTNSETAEHIAQGLRLYRPHLASEKVYTIMYSCWHEKADERPTFKILLSNILDVMDEES

SEQ ID NO: 106206 - DNA, 420 bp, Artificial Sequence
  derived and/or modified sequence
gtgattcggcattatgtggtctgctccacgcctcaaagtcagtactaccttgcggagaaacacctgttttctacgattcctgagctgattaactatcaccagcacaattccgcgggcctgataagcagacttaagtatcctgtgagccaacagaacaagaacgccccatcgacagctgggttggggtacggtgttttgatgtgggagatctactctctggggaagatgccatacgagcgctttacaaactctgaaaccgccgagcatatcgcgcagggcctgcgtctttatcgcccacacctggctagtgagaaggtgtacacaattatgtatagctgctggcacgaaaaggcagacgaacgacccacgtttaaaatcctgctctccaacatcctggacgttatggacgaagaaagctag

SEQ ID NO: 106207 - DNA, 1452 bp, Artificial Sequence
  derived and/or modified sequence
atggcggccgttatactggagagcattttcttaaagcgatctcagcaaaagaaaaaaactagccctttaaactttaaaaagcgtctgtttcttctcacggtccacaagctctcttactacgaatatgacttcgagcggggaaggcgaggaagcaagaaggggagcatagatgtggagaagattacatgcgtggagactgtagtacccgaaaagaatcctcctcccgagcggcagatccctcgacggggcgaagaatccagcgagatggaacagatctccatcatcgagagattcccatacccgtttcaagttgtgtacgacgaaggacctctttacgtttttagtccaacggaggagttgagaaagagatggattcaccagcttaaaaacgtcatacgctacaactctgatctcgtgcagaaatatcatccctgcttctggatcgacgggcaatacttatgttgtagccagactgctaagaacgcgatggggtgtcaaatcctcgagaatcggaacggctcgttaaagcctggcagttcccacaggaagacaaagaagcccctgccacccactcctgaggaagaccagatcttaaagaaacccctgccccccgaaccagctgcagctcctgtgtccactagcgagctaaaaaaggttgtagctctgtacgactatatgcccatgaatgcaaacgacctgcagctgcgaaaaggcgatgaatattttattctagaagaaagcaacctgccttggtggcgtgcgagagacaagaacggacaggaagggtacattccaagcaactacgtcaccgaagcagaagactcaattgagatgtatgagtggtattctaaacacatgactagaagtcaggcagagcagctcttgaagcaagagggtaaagagggaggattcattgtccgggattccagtaaagccggcaagtatactgtttcagtgtttgcaaaaagtacaggagatccgcagggcgtaatccgccactatgtcgtttgtagcactccacagtcccagtactatttggcggccaggaactgcctcgttaacgaccagggggtggtgaaggtgagtgacttcgggctgtcaaggtatgttctggatgatgagtatactagttccgtgggatcaaaatttccagtgagatggagcccacccgaagtcctgatgtattctaaattctcttccaagtcagacatatgggcttttggagtccttatgtgggaaatttacagccttggcaaaatgccttacgaaagattcacgaacagcgagactgccgagcacatagcacaggggctgcggctctaccggcctcacctcgcttctgagaaggtttacactataatgtattcctgttggcacgagaaggcagatgaaagacccacatttaaaatcctgctgagtaatatactggatgtgatggacgaagagagctag

SEQ ID NO: 106208 - DNA, 420 bp, Artificial Sequence
  derived and/or modified sequence
gtcatccgccactacgtggtgtgcagcaccccccagagccagtactacctggccgagaagcacctgttcagcaccatccctgagctgatcaactaccaccagcacaacagcgctggcctcatcagccggctgaagtaccctgtgtcccagcagaacaagaatgcccccagcacagctggcctgggctatggagtgctgatgtgggagatctacagcctgggcaagatgccctatgagcgcttcaccaacagcgagacagctgagcacatcgcccagggcctgcggctgtaccggccccacctggccagcgagaaggtgtacaccatcatgtacagctgctggcatgagaaggcagatgagcggcccaccttcaagatcctgctgagcaacatcctggatgtgatggatgaggagagctag

SEQ ID NO: 106209 - DNA, 1452 bp, Artificial Sequence
  derived and/or modified sequence
atggctgctgtgatcctggagagcatcttcctgaagaggagccagcagaagaagaagaccagccccctgaacttcaagaagaggctcttcctgctgactgtgcacaagctgagctactatgaatatgactttgagcggggccggcggggcagcaagaagggcagcattgatgtggagaagatcacctgtgtggagaccgtggtgcctgagaagaaccccccacctgagcggcagatccccaggagaggagaggagagcagcgagatggagcagatcagcatcatcgagcgcttcccctaccccttccaggtggtgtatgatgagggccccctgtatgtgttcagccccacagaggagctgaggaagcgctggatccaccagctgaagaatgtcatccgctacaacagcgacctggtgcagaagtaccacccctgcttctggattgatggccagtacctgtgctgcagccagacagccaagaatgccatgggctgccagatcctggagaacagaaatggcagcctgaagccaggcagcagccacaggaagaccaagaagcccctgccccccaccccagaggaggaccagatcctgaagaagcccctgcccccagagcctgctgctgcccctgtgtccaccagcgagctgaagaaggtggtggccctgtatgactacatgcccatgaatgccaatgacctgcagctgaggaaaggagatgagtacttcatcctggaggagagcaacctgccctggtggagggcccgggacaagaatggccaggagggctacatccccagcaactacgtgacagaagcagaagattccattgagatgtatgagtggtacagcaagcacatgaccaggagccaggccgagcagctgctgaagcaggagggcaaggagggcggcttcatcgtgcgggacagcagcaaggccggcaagtacacagtgtctgtgtttgccaagagcactggagacccccagggcgtcatccgccactacgtggtgtgcagcaccccccagagccagtactacctggccgccaggaactgcctggtgaatgaccagggcgtggtgaaggtgtctgactttggcctgagccgctacgtgctggatgatgagtacaccagctctgtgggcagcaagtttcctgtgcgctggagccccccagaggtgctgatgtacagcaagttcagcagcaagagtgacatctgggcctttggagtgctgatgtgggagatctacagcctgggcaagatgccctatgagcgcttcaccaacagcgagacagctgagcacatcgcccagggcctgcggctgtaccggccccacctggccagcgagaaggtgtacaccatcatgtacagctgctggcatgagaaggcagatgagcggcccaccttcaagatcctgctgagcaacatcctggatgtgatggatgaggagagctag

SEQ ID NO: 106210 - DNA, 420 bp, Artificial Sequence
  derived and/or modified sequence
gtgatccggcactacgtggtgtgcagcaccccccagagccagtactacttagctgagaagcacctcttcagtactatcccagagttaattaattaccaccagcataattctgcagggctgatctccaggctgaagtacccagtgtcccagcagaataaaaacgcccccagcacagcgggactgggttatggagtgcttatgtgggagatctattctcttggaaagatgccatacgagcgcttcaccaactccgagaccgcagagcacattgcccagggcctacggttatatcgacctcatctggcctcagagaaggtctacaccattatgtattcatgctggcatgaaaaggctgatgagcggcccacatttaagatcctgctttctaacattctagacgtgatggatgaagagtcctag

SEQ ID NO: 106211 - DNA, 1452 bp, Artificial Sequence
  derived and/or modified sequence
atggccgccgtgatcctggagagcatcttcctgaagcggagccagcagaagaagaagacttcccctctgaattttaaaaagaggttattcttactgaccgtgcacaagctgtcctactatgagtatgattttgagcgtgggaggagaggctccaagaagggctctatagacgtggagaaaatcacctgcgtagagaccgtggtgcctgagaagaatcccccaccagagcgccagatcccacggcgcggggaagagtcaagcgaaatggaacagattagcataattgaaagattcccttaccccttccaggttgtctacgacgaagggcccctgtatgtgtttagcccgacagaagaactcaggaagagatggatccatcagctgaagaacgtgattcgctacaattccgacctcgtacaaaagtatcatccctgtttctggattgatggtcaatacctctgctgctcacaaacagcaaagaacgcgatgggatgccagatactcgaaaaccgcaacggaagtcttaaacctggatccagtcacagaaaaactaaaaagcctctgccacctactccagaggaagatcagatactcaaaaagcccttaccgcccgaacccgccgccgcaccggttagcacatccgaacttaaaaaagttgtggcattgtacgactacatgcccatgaatgccaacgatctccagttgcgcaaaggggacgagtactttatcttagaagagtctaatctgccctggtggcgggcacgcgacaagaacggccaagaaggctacatcccatctaactacgtgacagaagccgaagatagcatcgagatgtacgaatggtatagcaaacatatgacacggtcccaggccgagcaactcttaaaacaggaggggaaggaagggggattcatagtgcgcgattcttcgaaagccggaaagtataccgtttccgtgtttgctaagtccaccggtgatccccagggcgtcatcaggcattacgttgtttgcagtacaccacagtctcagtattacctggccgctcgcaactgcctagtaaatgatcagggagtggtgaaggtgagcgatttcgggctgtcccgttacgttctggatgacgaatacacgagttccgtgggcagcaagttccccgtcaggtggtctcctcctgaagtcctaatgtacagtaaattctcctcaaaatccgatatttgggcttttggcgttctcatgtgggaaatatacagtctcggaaaaatgccctatgaaaggttcactaattcagaaactgctgaacatatagcacaaggattacgcctatacaggccacatctggcaagtgagaaggtgtacaccatcatgtactcatgttggcatgagaaagccgatgaaaggcctacattcaaaatcctgctctccaatattctggatgtgatggacgaggagagctag

SEQ ID NO: 106212 - DNA, 420 bp, Artificial Sequence
  derived and/or modified sequence
gttattcgacactacgtggtctgttccaccccacaatcccagtactacctagcagagaaacacctgttttcaacgataccggaattaattaattaccaccagcacaactcagcgggattaatctcacgactcaagtaccctgtgtcgcaacagaacaaaaatgcgcctagcactgctggcctaggctatggagtcctgatgtgggaaatttacagcctgggcaagatgccatacgaaagatttaccaatagtgaaactgccgagcacatcgcgcagggcctacggttgtaccggcctcacctcgcctctgaaaaggtctacactattatgtactcttgttggcacgaaaaagcggacgagcgccctacctttaaaattttgctcagcaacatactcgacgtgatggacgaggaatcttag

SEQ ID NO: 106213 - DNA, 1452 bp, Artificial Sequence
  derived and/or modified sequence
atggccgcagtaatcttggaatctatcttccttaaacggagtcagcagaagaaaaaaacatcccctctcaacttcaagaaaaggctgtttctcctaaccgtgcacaaactttcctactacgaatatgactttgagcggggaagacgcggaagtaagaagggctctatcgatgtagagaagataacctgcgtggaaaccgtggtgcctgagaaaaatccaccccctgagagacagattcccagaagaggggaggagagctctgaaatggaacagatctcaataatagaacggttcccctaccccttccaggtcgtgtacgacgagggacctctctatgtgttctctccaaccgaggagctgcggaagagatggatccatcagctgaagaacgtcatcagatataatagcgatctggttcaaaaatatcacccttgtttttggatcgacggccagtatctgtgctgtagccagacggctaaaaatgccatgggctgccagattctggagaatcgaaacggaagcctgaaaccgggatcaagtcatcgtaaaaccaagaagcctttgccacctacgcctgaagaggatcaaatcctgaaaaagcctctgcctccagaacctgcagccgctcccgtttccactagcgagttaaagaaagtggtcgcactgtacgattacatgcccatgaatgccaacgacttacagctccgcaaaggcgacgaatactttatactagaagaatccaatcttccttggtggcgggctagggataaaaacggacaggaaggctacattccatcaaactacgtgacggaggctgaggactcaatcgaaatgtatgaatggtactcaaaacatatgacaagatcacaggccgagcagttgttgaaacaggaggggaaggaaggtggatttatcgtgagggactcaagtaaggctgggaaatacacggtgtcagttttcgccaagtctactggcgaccctcaaggggttatcagacactacgtagtgtgctctactccacagagtcagtattacttagccgctcggaactgccttgtgaacgaccagggcgtcgtgaaggtatcagacttcggactgtcacgctacgttttagatgacgaatatacatcgtcggtggggtctaaatttcccgtgaggtggtctccacctgaggttctgatgtattctaaattctcttctaagtccgatatctgggcattcggtgtcttgatgtgggaaatttattctctgggcaagatgccctatgagcgatttaccaatagtgaaactgcggagcacattgctcaggggcttcgcctgtatcggccacaccttgcaagcgaaaaggtgtacacaatcatgtattcgtgttggcatgagaaagctgacgaaaggcctaccttcaagatcttgctgagtaatatcctcgacgttatggatgaagagagctag

SEQ ID NO: 106214 - DNA, 858 bp, Artificial Sequence
  derived and/or modified sequence
gtgatacgtcattatgttgtgtgttccacacctcagagccagtattacctggctgagaagcaccttttcagcaccatccctgagctcattaactaccatcagcacaactctgcaggactcatatccaggctcaaatatccagtgtctcaacaaaacaagaatgcaccttccactgcaggcctgggatacggggttttgatgtgggaaatttactccctggggaagatgccatatgagagatttactaacagtgagactgctgaacacattgcccaaggcctacgtctctacaggcctcatctggcttcagagaaggtatataccatcatgtacagttgctggcatgagaaagcagatgagcgtcccactttcaaaattcttctgagcaatattctagatgtcatggatgaagaatcctgagctcgccaataagcttcttggttctacttctcttctccacaagccccaatttcactttctcagaggaaatcccaagcttaggagccctggagcctttgtgctcccactcaatacaaaaaggcccctctctacatctgggaatgcacctcttctttgattccctgggatagtggcttctgagcaaaggccaagaaattattgtgcctgaaatttcccgagagaattaagacagactgaatttgcgatgaaaatattttttaggagggaggatgtaaatagccgcacaaaggggtccaacagctctttgagtaggcatttggtagagcttgggggtgtgtgtgtgggggtggaccgaatttggcaagaatgaaatggtgtcataaagatgggaggggagggtgttttgataaaataaaattactagaaagcttgaaagtc

SEQ ID NO: 106215 - DNA, 977 bp, Artificial Sequence
  derived and/or modified sequence
gtgatacgtcattatgttgtgtgttccacacctcagagccagtattacctggctgagaagcaccttttcagcaccatccctgagctcattaactaccatcagcacaactctgcaggactcatatccaggctcaaatatccagtgtctcaacaaaacaagaatgcaccttccactgcaggcctgggatacggtatgtcctggatgatgaatacacaagctcagtaggctccaaatttccagtccggtggtccccaccggaagtcctgatgtatagcaagttcagcagcaaatctgacatttgggcttttggggttttgatgtgggaaatttactccctggggaagatgccatatgagagatttactaacagtgagactgctgaacacattgcccaaggcctacgtctctacaggcctcatctggcttcagagaaggtatataccatcatgtacagttgctggcatgagaaagcagatgagcgtcccactttcaaaattcttctgagcaatattctagatgtcatggatgaagaatcctgagctcgccaataagcttcttggttctacttctcttctccacaagccccaatttcactttctcagaggaaatcccaagcttaggagccctggagcctttgtgctcccactcaatacaaaaaggcccctctctacatctgggaatgcacctcttctttgattccctgggatagtggcttctgagcaaaggccaagaaattattgtgcctgaaatttcccgagagaattaagacagactgaatttgcgatgaaaatattttttaggagggaggatgtaaatagccgcacaaaggggtccaacagctctttgagtaggcatttggtagagcttgggggtgtgtgtgtgggggtggaccgaatttggcaagaatgaaatggtgtcataaagatgggaggggagggtgttttgataaaataaaattactagaaagcttgaaagtc

SEQ ID NO: 106216 - DNA, 2203 bp, Artificial Sequence
  derived and/or modified sequence
ctctctggactgtaagaatatgtctccagggccagtgtctgctgcgatcgagtcccaccttccaagtcctggcatctcaatgcatctgggaagctacctgcattaagtcaggactgagagctgtgtgttacacaccaaccttctggaggactcaaaaatggatccctttcctttcacattattgagtgatggaccagtggcacctaaggaagagctaccacattttcaggctgtgtgagtctggactggatcataagaaacaggagaaaagcagtcaaagaagcacacaggtgaactccagaaagaagaagctatggccgcagtgattctggagagcatctttctgaagcgatcccaacagaaaaagaaaacatcacctctaaacttcaagaagcgcctgtttctcttgaccgtgcacaaactctcctactatgagtatgactttgaacgtgggagaagaggcagtaagaagggttcaatagatgttgagaagatcacttgtgttgaaacagtggttcctgaaaaaaatcctcctccagaaagacagattccgagaagaggtgaagagtccagtgaaatggagcaaatttcaatcattgaaaggttcccttatcccttccaggttgtatatgatgaagggcctctctacgtcttctccccaactgaagaactaaggaagcggtggattcaccagctcaaaaacgtaatccggtacaacagtgatctggttcagaaatatcacccttgcttctggatcgatgggcagtatctctgctgctctcagacagccaaaaatgctatgggctgccaaattttggagaacaggaatggaagcttaaaacctgggagttctcaccggaagacaaaaaagcctcttcccccaacgcctgaggaggaccagatcttgaaaaagccactaccgcctgagccagcagcagcaccagtctccacaagtgagctgaaaaaggttgtggccctttatgattacatgccaatgaatgcaaatgatctacagctgcggaagggtgatgaatattttatcttggaggaaagcaacttaccatggtggagagcacgagataaaaatgggcaggaaggctacattcctagtaactatgtcactgaagcagaagactccatagaaatgtatgagtggtattccaaacacatgactcggagtcaggctgagcaactgctaaagcaagaggggaaagaaggaggtttcattgtcagagactccagcaaagctggcaaatatacagtgtctgtgtttgctaaatccacaggggaccctcaaggggtgatacgtcattatgttgtgtgttccacacctcagagccagtattacctggcagctcgaaactgtttggtaaacgatcaaggagttgttaaagtatctgatttcggcctgtccaggtatgtcctggatgatgaatacacaagctcagtaggctccaaatttccagtccggtggtccccaccggaagtcctgatgtatagcaagttcagcagcaaatctgacatttgggcttttggggttttgatgtgggaaatttactccctggggaagatgccatatgagagatttactaacagtgagactgctgaacacattgcccaaggcctacgtctctacaggcctcatctggcttcagagaaggtatataccatcatgtacagttgctggcatgagaaagcagatgagcgtcccactttcaaaattcttctgagcaatattctagatgtcatggatgaagaatcctgagctcgccaataagcttcttggttctacttctcttctccacaagccccaatttcactttctcagaggaaatcccaagcttaggagccctggagcctttgtgctcccactcaatacaaaaaggcccctctctacatctgggaatgcacctcttctttgattccctgggatagtggcttctgagcaaaggccaagaaattattgtgcctgaaatttcccgagagaattaagacagactgaatttgcgatgaaaatattttttaggagggaggatgtaaatagccgcacaaaggggtccaacagctctttgagtaggcatttggtagagcttgggggtgtgtgtgtgggggtggaccgaatttggcaagaatgaaatggtgtcataaagatgggaggggagggtgttttgataaaataaaattactagaaagcttgaaagtc

SEQ ID NO: 106217 - DNA, 420 bp, Artificial Sequence
  derived and/or modified sequence
gtgatcagacactacgtggtgtgcagcaccccccagagccagtactacctggccgagaagcacctgttcagcaccatccccgagctgatcaactaccaccagcacaacagcgccggcctgatcagcagactgaagtaccccgtgagccagcagaacaagaacgcccccagcaccgccggcctgggctacggcgtgctgatgtgggagatctacagcctgggcaagatgccctacgagagattcaccaacagcgagaccgccgagcacatcgcccagggcctgagactgtacagaccccacctggccagcgagaaggtgtacaccatcatgtacagctgctggcacgagaaggccgacgagagacccaccttcaagatcctgctgagcaacatcctggacgtgatggacgaggagagctag

SEQ ID NO: 106218 - DNA, 1452 bp, Artificial Sequence
  derived and/or modified sequence
atggccgccgtgatcctggagagcatcttcctgaagagaagccagcagaagaagaagaccagccccctgaacttcaagaagagactgttcctgctgaccgtgcacaagctgagctactacgagtacgacttcgagagaggcagaagaggcagcaagaagggcagcatcgacgtggagaagatcacctgcgtggagaccgtggtgcccgagaagaaccccccccccgagagacagatccccagaagaggcgaggagagcagcgagatggagcagatcagcatcatcgagagattcccctaccccttccaggtggtgtacgacgagggccccctgtacgtgttcagccccaccgaggagctgagaaagagatggatccaccagctgaagaacgtgatcagatacaacagcgacctggtgcagaagtaccacccctgcttctggatcgacggccagtacctgtgctgcagccagaccgccaagaacgccatgggctgccagatcctggagaacagaaacggcagcctgaagcccggcagcagccacagaaagaccaagaagcccctgccccccacccccgaggaggaccagatcctgaagaagcccctgccccccgagcccgccgccgcccccgtgagcaccagcgagctgaagaaggtggtggccctgtacgactacatgcccatgaacgccaacgacctgcagctgagaaagggcgacgagtacttcatcctggaggagagcaacctgccctggtggagagccagagacaagaacggccaggagggctacatccccagcaactacgtgaccgaggccgaggacagcatcgagatgtacgagtggtacagcaagcacatgaccagaagccaggccgagcagctgctgaagcaggagggcaaggagggcggcttcatcgtgagagacagcagcaaggccggcaagtacaccgtgagcgtgttcgccaagagcaccggcgacccccagggcgtgatcagacactacgtggtgtgcagcaccccccagagccagtactacctggccgccagaaactgcctggtgaacgaccagggcgtggtgaaggtgagcgacttcggcctgagcagatacgtgctggacgacgagtacaccagcagcgtgggcagcaagttccccgtgagatggagcccccccgaggtgctgatgtacagcaagttcagcagcaagagcgacatctgggccttcggcgtgctgatgtgggagatctacagcctgggcaagatgccctacgagagattcaccaacagcgagaccgccgagcacatcgcccagggcctgagactgtacagaccccacctggccagcgagaaggtgtacaccatcatgtacagctgctggcacgagaaggccgacgagagacccaccttcaagatcctgctgagcaacatcctggacgtgatggacgaggagagctag

SEQ ID NO: 106219 - protein, 208 aa, Artificial Sequence
  derived and/or modified sequence
MFEFLSNHMRDAQGRLDSTRGLLCGLGAGVAEAVVVVCPMETIKVKFIHDQTSPNPKYRGFFHGVREIVREQGLKGTYQGLTATVLKQGSNQAIRFFVMTSLRNWYRGDNPNKPMNPLITGVFGAIAGAASVFGNTPLDVIKTRMQGLEAHKYRNTWDCGLQILKKEGLKAFYKGTVPRLGRVCLDVAIVFVIYDEVVKLLNKVWKTD

SEQ ID NO: 106220 - DNA, 447 bp, Artificial Sequence
  derived and/or modified sequence
atgaacttcaccctgatggtgagcatggagcacaccaccaccatggccagcgccacccccgccccctggccccacagaagccagagatgcagacaggccgtgcccggccaccccgccagcggctgctgcggcaccggcaccttcagaacccagagaagacccggcgacaagagcagaagagccggcagcagaggcagaggcgccggccccggcagacacgacagagacagcgcccacgccggcagcatgagaggcgccagactggtgcccgccctggtgagactgcagctgagaccccccgccctgagaggcgagagaacccccatcagcatgccccccgccagaccccccgccggcgtggccttccccggcgccagcgccggccccagcagaaccagaagaggcgtggccaccgccggcggcagaagagcccccgccgtgatctag

SEQ ID NO: 106221 - DNA, 447 bp, Artificial Sequence
  derived and/or modified sequence
atgaatttcactttgatggtcagtatggagcacacaacaacaatggctagtgccacaccagccccatggccgcaccgatcccaaagatgcagacaagccgtcccagggcacccggcgagtggatgttgcggaaccggcacattccggacacagcgtcgacccggcgataagtcacggcgcgccggtagcagaggcagaggcgctgggcctggcaggcatgatagagattctgcacatgctggaagcatgcgaggagccagactagtgccagccctggtgcgcttacaactccggcctccagctttgcggggcgaaaggactcctatcagtatgcccccggcacgcccccctgccggcgtggctttcccgggcgcttccgccggaccgagcagaactcgccggggtgtggctaccgccggaggaaggcgggcgccagccgttatctag

SEQ ID NO: 106222 - DNA, 447 bp, Artificial Sequence
  derived and/or modified sequence
atgaacttcaccctgatggtgtccatggagcacaccaccaccatggccagcgccaccccagccccctggccccacaggagccagcgctgccggcaggccgtgcccggccacccagccagcggctgctgcggcaccggcaccttccgcacccagaggaggcctggggacaagagcagaagagctggcagccggggccgcggggccggccctggaagacatgaccgggacagcgcccacgccggctccatgagaggagcccggctggtgcctgccctggtgcggctgcagctgcggcccccagccctgcggggggagaggacccccatctccatgcccccagcccggcccccagctggggtggccttccctggggccagcgctggccccagcaggaccaggagaggagtggccacagctgggggccggcgggccccagctgtgatctag

SEQ ID NO: 106223 - DNA, 447 bp, Artificial Sequence
  derived and/or modified sequence
atgaatttcacccttatggttagcatggagcacactacaactatggcctccgccacgccggcaccctggccacaccgctctcagaggtgccggcaagccgtccccggacatcctgcctcggggtgctgcggcaccggtacctttaggacccagaggcggccaggcgacaagtcccggcgtgcgggtagcaggggcaggggggctggcccaggtcgacatgacagggacagcgcccacgcaggttccatgcgaggagcaagactggttcccgcactagtgagactgcaactccgaccccctgcattgcggggagagcggactccaattagcatgccaccggctcggcctccagcgggtgttgccttcccaggtgcctcggccggtccatcaaggaccaggcgcggtgttgccacagcagggggaaggcgggcacctgccgtgatctag

SEQ ID NO: 106224 - DNA, 2913 bp, Artificial Sequence
  derived and/or modified sequence
aataagcacatggacaagtgggcacagactcacaggccagatggacctccagccacggccgggccagactcgtggacacaggcgcagtgtcacgtacagaccacggggagacatggcactaggggacaaatggacgtgacaccacaatgcacagggcaggccacagagctcgagggacgtgggcaggggccttttggcatttctgcgctggaatcatgtgagacaagggtggtggccgctctggaggtgcctggggggttccctcattacccctctgggcttagtccatcctccacactgttgtgcagcttctccacctcctggtagaggataaatactgttacccttatccctggtcacatccagggagacgcggtccagcggcccaggcgggggacagtgccgttctagaggtccttgagcccctccttcctcaggatctgcagccataggccggtgtgttccgcgtttgtgctgctccaggccccgcatccggtctcgatcccatccagaggagcgtttcccaagacactggctgcgcccacaatggctccgaagaccccagcgaccagcgggtccatgggcttgctggggttgtcccctcggtaccagctgtgcagggaggtcaggaggagaagcagacggcctggttccagccctgctttagcgtgggtgccatgaggccccggtgagtccccttgttctcgcacaatctctctaacctggtgggagactcctctgcactggaggtctgggaaggtctggccgtggatgaacttcaccttgatggtgtccatggaacatacgaccaccatggcctcggccacgccagcgccctggccgcaccgcagccagcgctgccgtcaggccgtccctgggcatcccgcgtctggctgctgtggaactggaacattcagaacccaacgccgccctggagacaagagccgcagagcagggagccgaggccgcggtgccggcccgggacgccatgaccgcgacagtgcgcacgcgggatccatgcgcggtgcccggctggtgccagcgctcgtccggctgcagctacgacctcccgcgctccgtggggagcggacgcccatttcaatgccgccggccaggccgcctgctggtgtcgccttccccggagcctccgctgggccttcccggacgcggcgcggcgtggccacggcgggcgggaggcgggcgcccgctgtgatctgaagtcccagcctcctaaactccgcactgggaccttaatttggttttaacacaaatgaagatctcactaaagataaaaagggatgtcttggcttctaatttttgttaaaagcaatagcatatgttgtataggatagtgcattggggtaaatcttttttttattatttttattttttcatcagcccactgacattgaaaggggataggttttaggttattgacgagcagttttctctcagataactgccttagtataggggtttgtggtcatgttgatgagagggtaggctggggttaaaagtcgttatggcagtaacaaccttctgaggaccaggaaattcaaatccctctcatgatactttgctaatatctcccgagtttgctgtgccttccctttgtgcctcttcccacacgtggtttcttgcacttggcccagctatattccactgttttgactccatgcttcttagcctggtggcagtggtgagggagtgaggagatctctaatgttctgaggaagcctcagacttagcactgtgaactggggtgtggggttactgaccgttgaagagtttcctgcccatcctgtacatgcaatgccaggacaagagcacattcctgtccctccttgtccatggtaggggaaacgtgctccttctccatgctcttaactcccagttgaagtgggccttgaacagtgccctgtaaattaatggtttcttttctttatgggagatgcatctgtgcagaaatgcgggtgttggccttgttccttcaccctcagttccatgagcttttccccagtgccctttggctcaggtttggatgctctttctctgcagattaggcctcatgttatataggagagatgtgagggctgtgtctccagagttgcagtagtggatgggatagtggtccctccccatcagcactgtggggtaagcatcctcaggattctaaccccatcttccctgacaggccttgtagggttcctagaaaaattatacacaacggtataaaccctacgtctgtagactccagggtttctcattctcctcacccacccacacacagccaccaggaactagttcaaaagttctggcttaattttaccagtttacatggtcttcagggtacacataaaagcctggagcctgtgtgacctgcaggctttctgcatcccctgatgttgggtttgtagtctgccctgtgacctcagttctttaaagggctcaggagaaaccatccattcatttgaagtttctccagcatttttgtttgtttgtttaatgtgtaggagcaactctttgtcaggtctctatatctacaaacttaactcagaaactaatatttttaaatatatttcttttctatcatacttttagtgctcctctacctatgctaattgttcttcagtattttttatatttgtatgtctttatctattttaaaatcaggtttaattccttcttaatcaaattaataacttttcatttatttccctacgtaactttcttttcagacgtttaaagtattgctgtgtgtttcaagtggaggaggtcatattacaactgacatttgtccttgactactggacatatcacaccagccctgattgcagttatacttgaagccagatctacccttaacgtatattcattttactattcaataaatattaacttatcatgaatggt

SEQ ID NO: 106225 - DNA, 627 bp, Artificial Sequence
  derived and/or modified sequence
atgttcgaatttctgtccaaccacatgcgagacgcccaaggcaggctggactccaccagggggctcttatgtggactgggggcaggtgtagcggaggctgtcgtggtggtgtgccccatggagactatcaaggtcaagtttatccacgaccaaacctcacctaacccgaaataccggggcttcttccatggagtgcgcgaaattgtgagagaacagggcctaaaagggacgtaccaaggcctgacagccaccgttcttaagcaagggagtaatcaagccatccgcttttttgtaatgacatctttaaggaactggtataggggggacaaccctaacaagcccatgaatcccctcattactggcgtgtttggagcaatcgccggagcagcctcggtcttcgggaatactccactggacgtgataaagacacggatgcaaggcttggaagcgcacaaatatagaaatacctgggattgcggcctccagatactgaagaaggaagggctgaaggctttttacaaaggaacagtgccccgcctcggccgtgtttgcctggatgtggcgattgtcttcgtgatatacgatgaagtggtcaagctgctgaataaggtctggaagacagattag

SEQ ID NO: 106226 - DNA, 627 bp, Artificial Sequence
  derived and/or modified sequence
atgtttgagttcctgagcaaccacatgagagatgcccagggccgcctggacagcacccggggcctgctgtgtggcctgggcgctggggtggccgaggccgtggtggtggtgtgccccatggagaccatcaaggtgaagttcatccatgaccagaccagccccaaccccaagtaccggggcttcttccatggagtgcgggagatcgtgcgggagcagggcctgaagggcacctaccagggcctgacagccaccgtgctgaagcagggcagcaaccaggccatccgcttctttgtgatgaccagcctgaggaactggtacagaggagacaaccccaacaagcccatgaaccccctcatcaccggggtgtttggagccatcgccggggccgcctctgtgtttggaaacacccccctggatgtgatcaagaccaggatgcagggcctggaggcccacaagtacagaaacacctgggactgtggcctgcagatcctgaagaaggagggcctgaaggccttctacaagggcaccgtgccccggctgggccgggtgtgcctggatgtggccatcgtgtttgtgatctatgatgaggtggtgaagctgctgaacaaggtgtggaagacagactag

SEQ ID NO: 106227 - DNA, 627 bp, Artificial Sequence
  derived and/or modified sequence
atgttcgagttcctgagcaaccacatgcgggacgcccagggccggctcgatagtacccgaggcctgctttgtggcttaggggcgggcgtggccgaggctgtggtggttgtgtgcccaatggagacaattaaagtcaagttcatccatgaccagacgagtccaaatcccaagtaccggggcttctttcacggcgtccgcgagatcgtaagagagcagggtctgaaaggcacctatcagggcttgacagcaaccgtgctcaaacagggctccaaccaggctataaggttcttcgtcatgacatcattaaggaattggtatcgcggcgacaatccaaacaaaccaatgaacccactgattaccggagtgttcggggctatcgcaggcgctgcatctgtgtttgggaatacaccattagacgtaatcaagacacggatgcaggggctcgaggctcataaatacaggaatacctgggactgcggtctgcagatcttgaagaaagagggcctcaaggcattttacaaggggaccgtgcctcgcctgggccgagtgtgcctcgacgtggcaatagtatttgtgatatacgacgaggtggttaagttgctgaacaaagtttggaaaacagactag

SEQ ID NO: 106228 - DNA, 627 bp, Artificial Sequence
  derived and/or modified sequence
atgtttgaatttttaagtaatcacatgcgggacgctcaagggagactcgactctacccgcggactgctctgtggattgggggctggcgtcgccgaggcagttgttgttgtatgccctatggagactattaaagtgaaattcattcacgaccagacatcacccaatcctaaataccgcggattcttccatggagtgagggaaattgtacgggagcagggcttgaagggaacctatcagggactgaccgcgacagttctgaaacaggggagcaaccaggctatcaggttcttcgtcatgacctcattaagaaattggtacaggggcgataacccgaataaaccgatgaaccccttgattactggcgtcttcggtgcaattgctggagcagcttccgttttcgggaatactccactggatgtgatcaaaacgcgaatgcagggtctggaagcccacaagtatcggaacacatgggattgtggactacagattctgaaaaaagagggcctcaaagccttttacaaggggacagttccacggctgggtcgggtatgtcttgacgtggccatcgtgtttgtgatttatgatgaagttgttaagctgcttaacaaagtatggaagacggattag

SEQ ID NO: 106229 - DNA, 627 bp, Artificial Sequence
  derived and/or modified sequence
atgttcgagttcctgagcaaccacatgagagacgcccagggcagactggacagcaccagaggcctgctgtgcggcctgggcgccggcgtggccgaggccgtggtggtggtgtgccccatggagaccatcaaggtgaagttcatccacgaccagaccagccccaaccccaagtacagaggcttcttccacggcgtgagagagatcgtgagagagcagggcctgaagggcacctaccagggcctgaccgccaccgtgctgaagcagggcagcaaccaggccatcagattcttcgtgatgaccagcctgagaaactggtacagaggcgacaaccccaacaagcccatgaaccccctgatcaccggcgtgttcggcgccatcgccggcgccgccagcgtgttcggcaacacccccctggacgtgatcaagaccagaatgcagggcctggaggcccacaagtacagaaacacctgggactgcggcctgcagatcctgaagaaggagggcctgaaggccttctacaagggcaccgtgcccagactgggcagagtgtgcctggacgtggccatcgtgttcgtgatctacgacgaggtggtgaagctgctgaacaaggtgtggaagaccgactag

SEQ ID NO: 106230 - protein, 516 aa, Artificial Sequence
  derived and/or modified sequence
MFRTAAAISVHLVGPLQGRKAGAPLTWFLHQTQVAEKNVGSPAPRPTSHLGLANPQERKVPQGPQSPCEVPAAEGILRTGGAKLPIQGHPAKLAMAKQLQARRLDGIDYNPWVEFVKLASEHDVVNLGQGFPDFPPPDFAVEAFQHAVSGDFMLNQYTKTFGYPPLTKILASFFGELLGQEIDPLRNVLVTVGGYGALFTAFQALVDEGDEVIIIEPFFDCYEPMTMMAGGRPVFVSLKPGPIQNGELGSSSNWQLDPMELAGKFTSRTKALVLNTPNNPLGKVFSREELELVASLCQQHDVVCITDEVYQWMVYDGHQHISIASLPGMWERTLTIGSAGKTFSATGWKVGWVLGPDHIMKHLRTVHQNSVFHCPTQSQAAVAESFEREQLLFRQPSSYFVQFPQAMQRCRDHMIRSLQSVGLKPIIPQGSYFLITDISDFKRKMPDLPGAVDEPYDRRFVKWMIKNKGLVAIPVSIFYSVPHQKHFDHYIRFCFVKDEATLQAMDEKLRKWKVEL

SEQ ID NO: 106231 - DNA, 1551 bp, Artificial Sequence
  derived and/or modified sequence
atgtttcggacggctgcagctatctcagtgcacctggtggggcccctgcaggggagaaaggctggggctccactcacttggttcctgcaccagacgcaggtggccgaaaaaaacgtcggatccccagcaccccgccctacatcccacttgggcctggctaatccacaagagcgcaaagtcccccagggaccgcagagtccatgtgaggttcccgctgctgaggggatactgaggacaggcggtgccaaactgcctattcagggccaccccgccaaattggcaatggcaaagcagctccaggcccgacggctggatggaatcgattacaatccttgggtcgagttcgtgaaattagcctccgagcatgacgtggttaatctcggccagggcttccccgacttcccccctccggactttgcagttgaggcctttcagcacgctgtcagtggtgatttcatgttaaaccagtatacgaagactttcggttacccacccctgactaagattttggcatctttttttggggagctgttagggcaggagattgatccccttcgtaacgtcctggttacggttggtgggtacggcgctctttttaccgccttccaggcattagtcgacgaaggagacgaggttatcattattgaacctttctttgattgttacgaacctatgactatgatggctggcggccgacccgttttcgtctccctgaagccaggtcctatccagaatggtgaacttggatctagcagcaactggcaactggacccaatggaattagcgggtaaatttacatccaggactaaagcgctggttctgaataccccgaacaacccccttggaaaggtttttagcagagaagagctggagctggtggcctcattgtgccagcagcacgacgtggtatgcatcactgatgaagtgtatcaatggatggtgtatgatgggcatcagcatataagcatcgcaagcttgcctgggatgtgggagcgtacgttgactatcggaagtgcgggcaagacattttctgccaccggatggaaggtgggatgggtgttgggccctgaccacatcatgaagcacctcagaactgtacaccagaatagtgtttttcactgtccaacccagtctcaagccgcagtggcagaatcattcgagagggaacagttgttatttagacagccttcttcgtacttcgtgcaatttccacaggccatgcagcgatgccgcgaccacatgatccgatcccttcagagcgtgggactcaagccaatcatcccacagggatcctactttttaattactgatatttccgactttaaacggaagatgccagatctacctggggccgtcgacgagccatatgacaggagattcgtaaaatggatgataaaaaacaagggtttagttgcaattcctgtcagtatcttttacagtgtgcctcaccagaaacactttgaccattatatcaggttctgtttcgtaaaggacgaagccactctccaagcgatggacgagaagttgcgcaaatggaaggtggagctttag

SEQ ID NO: 106232 - DNA, 1551 bp, Artificial Sequence
  derived and/or modified sequence
atgttcagaacagctgctgccatctctgtgcacctggtgggccccctgcagggcaggaaggccggggcccccctgacctggttcctgcaccagacccaggtggccgagaagaatgtgggcagccctgccccccggcccaccagccacctgggcctggccaacccccaggagaggaaggtgccccagggcccccagagcccctgtgaggtgcctgctgctgagggcatcctgaggactggaggagccaagctgcccatccagggccacccagccaagctggccatggccaagcagctgcaggcccggcggctggatggcatcgactacaacccctgggtggagtttgtgaagctggccagcgagcatgatgtggtgaacctgggccagggcttcccagacttccccccaccagactttgctgtggaggccttccagcacgctgtgtctggggacttcatgctgaaccagtacaccaagaccttcggctacccacccctgaccaagatcctggccagcttcttcggggagctgctgggccaggagattgaccccctgagaaatgtgctggtgacagtgggcggctatggagccctcttcaccgccttccaggccctggtggatgaaggagatgaggtgatcatcatcgagcccttctttgactgctatgagcccatgaccatgatggccggcggccggcctgtgtttgtgtccctgaagccaggccccatccagaatggagagctgggcagcagcagcaactggcagctggaccccatggagctggccggcaagttcaccagcaggaccaaggccctggtgctgaacacccccaacaaccccctgggcaaggtgttcagccgggaggagctggagctggtggccagcctgtgccagcagcatgatgtggtgtgcatcacagatgaggtgtaccagtggatggtgtatgatggccaccagcacatcagcatcgccagcctgcccggcatgtgggagaggaccctgaccatcggcagcgctgggaagaccttcagcgccaccggctggaaggtgggctgggtgctgggccctgaccacatcatgaagcacctgaggacagtgcaccagaacagcgtcttccactgccccacccagagccaggccgctgtggccgagagctttgagcgggagcagctgctcttccggcagcccagcagctactttgtgcagttcccccaggccatgcagcgctgccgggaccacatgatccgcagcctgcagagcgtgggcctgaagcccatcatcccccagggcagctacttcctgatcacagacatcagtgacttcaagaggaagatgccagacctgcctggagctgtggatgagccctatgacagaagatttgtgaagtggatgatcaagaacaagggcctggtggccatccctgtgtccatcttctacagcgtgccccaccagaagcactttgaccactacatccgcttctgctttgtgaaggatgaggccaccctgcaggccatggatgagaagctgaggaagtggaaggtggagctgtag

SEQ ID NO: 106233 - DNA, 1551 bp, Artificial Sequence
  derived and/or modified sequence
atgttccggaccgccgccgccatcagcgtgcacctggtgggccccctccaaggccgtaaagctggggctcccctgacatggttcctgcaccagactcaggttgcggaaaagaatgtgggaagcccggcacccagacccacatctcacctaggcctagccaatccacaggaacgtaaggtcccacaggggccacagtccccatgtgaggtgcccgctgctgaggggatcctacggactgggggagcaaagctgcccatacagggccatcctgccaagcttgccatggcaaagcaactgcaggctaggagactcgacggaattgactataacccatgggtggaatttgtgaagcttgcctccgagcacgatgtggtcaacttagggcagggcttccctgactttcctccgcccgattttgcggttgaagctttccagcacgcggtgtccggcgacttcatgcttaatcagtacaccaagaccttcggctacccccctctgaccaagatactggcgtcctttttcggggagttgctaggacaggaaattgaccctctgcggaatgtgctggtcacggtgggcggctacggcgccctctttactgcctttcaggccctggttgatgaaggtgacgaggtcattatcattgaaccattctttgattgctacgagccaatgaccatgatggctggtggtaggcccgtgtttgtatcattaaaacctggtcccatccagaatggcgaattaggaagcagtagcaattggcaactcgaccctatggagttggcaggcaagttcacctcgagaacaaaggcactcgttctgaatacccctaacaacccgctgggcaaggtgttttcaagggaagaactagagctggttgcctctctttgccagcagcatgacgtggtctgtatcaccgacgaagtgtaccagtggatggtgtacgacggtcaccaacacattagcatcgcttccctgccagggatgtgggagagaaccctgaccatcgggtctgcgggtaagaccttcagtgcaactggatggaaagtcgggtgggtgctgggccctgaccacatcatgaagcatttaaggaccgttcaccaaaatagcgtgtttcactgtcctacccaaagccaggccgcggtggccgagagctttgaacgggaacaattgctgtttagacagccttctagctattttgtgcagtttccccaggctatgcaaaggtgtagggatcatatgatacgcagcttgcagagcgttgggctgaagcccattatcccacagggctcatattttctcattacagacattagcgactttaagaggaaaatgcccgacctgcccggggcagtggatgagccgtatgacagaaggtttgtcaaatggatgatcaaaaataagggcttggtcgctattcccgtctccattttctactctgtcccccaccagaagcactttgatcactacattcgattctgcttcgtgaaagacgaagccaccctgcaggctatggacgaaaagctgaggaagtggaaggtggaactgtag

SEQ ID NO: 106234 - DNA, 1551 bp, Artificial Sequence
  derived and/or modified sequence
atgtttcgtactgccgcagctattagtgttcacctggtggggcctctgcaaggcagaaaggcaggcgcaccgctgacgtggttcctgcaccagacacaagtggcggaaaagaatgtcggatctcccgctccgagacccacgagtcatttagggctggccaatcctcaggaaaggaaagtaccacagggaccccaatccccctgcgaggttccggcagctgagggcatactgcgcacagggggagcaaaattgccgatacagggccaccccgctaaacttgccatggctaagcagctccaggcaagacggcttgatggaatagattataatccatgggtggaattcgtgaaactggctagcgaacacgacgtggtcaatcttggccaaggattccccgacttcccccctccagacttcgccgtggaggcattccagcacgcagtaagtggtgactttatgcttaaccagtatactaagacgttcggctacccgccactcactaagattctcgcctcgttttttggcgagttgctcggtcaggagattgatcccttgagaaatgtgttggtgactgtgggcggatatggcgctctctttacagcttttcaggcactcgtcgacgaaggagacgaagtgatcataattgagccctttttcgattgctacgagcccatgacgatgatggcagggggaagaccagtgtttgtgagtttaaaacctgggccaattcagaatggagagcttggctcttcctccaattggcagttagaccctatggagctggccggaaagtttacctctcggactaaggcactcgttctaaacactccgaacaatccgctggggaaggtgttcagcagggaagaactggagctcgtggcttccctgtgccagcagcacgatgtggtttgcattactgacgaggtgtatcagtggatggtatacgatggccatcagcacataagcatcgcctccctgcctggaatgtgggagcgcaccctaaccatcggcagcgccggaaagacattctctgcaaccggctggaaggtggggtgggtcttagggcctgaccacatcatgaagcacttacgtaccgtgcatcagaacagcgtgttccactgccctacccagagtcaggccgcagtggcagaaagctttgagcgcgagcaactgctgtttaggcaacccagctcatacttcgtccagttcccacaagcgatgcagcgatgcagggatcacatgattaggagcctgcaaagcgtggggcttaagcctatcattccccaaggtagctactttcttatcacagacatcagtgacttcaaacggaagatgccagaccttccgggagcggtcgatgaaccctatgatcggaggttcgtaaaatggatgatcaagaataagggcctggtagccatacccgtgagcatcttctacagtgtaccccatcagaagcactttgatcattacattagattctgttttgtcaaggatgaagccaccctgcaggctatggacgaaaagttgagaaaatggaaagtggagctctag

SEQ ID NO: 106235 - DNA, 1989 bp, Artificial Sequence
  derived and/or modified sequence
acttgggaacgaggggtgaagcggcccaggtgaggagctgtgtgtgggggacccaagtcctgagctcggaggcattttctggccagggctgtttcctcccttctcccctgcctctggaaaagtctgcagtgccccaaggctctgggaggcatgttcaggactgcagcagccatctctgtgcacctggtggggccccttcagggaaggaaggctggagccccactcacttggttcttgcaccagactcaggtggctgagaagaatgttggatccccagctccacggcccaccagccatctgggactggcaaacccacaggaacggaaggttcctcagggaccacaaagcccatgtgaggtccctgctgctgaagggattctgaggacaggaggagccaaattacctatccagggtcacccagccaagctcgccatggccaaacagctgcaggcccgaaggctagacgggatcgactacaacccctgggtggagtttgtgaaactggccagtgagcatgacgtcgtgaacttgggccagggcttcccggatttcccaccaccagactttgccgtggaagcctttcagcacgctgtcagtggagacttcatgcttaaccagtacaccaagacatttggttacccaccactgacgaagatcctggcaagtttctttggggagctgctgggtcaggagatagacccgctcaggaatgtgctggtgactgttggtggctatggggccctgttcacagccttccaggccctggtggacgaaggagacgaggtcatcatcatcgaacccttttttgactgctacgagcccatgacaatgatggcagggggtcgtcctgtgtttgtgtccctgaagccgggtcccatccagaatggagaactgggttccagcagcaactggcagctggaccccatggagctggccggcaaattcacatcacgcaccaaagccctggtcctcaacacccccaacaaccccctgggcaaggtgttctccagggaagagctggagctggtggccagcctttgccagcagcatgacgtggtgtgtatcactgatgaagtctaccagtggatggtctacgacgggcaccagcacatcagcattgccagcctccctggcatgtgggaacggaccctgaccatcggcagcgccggcaagaccttcagcgccactggctggaaggtgggctgggtcctgggtccagatcacatcatgaagcacctgcggaccgtgcaccagaactccgtcttccactgccccacgcagagccaggctgcagtagccgagagctttgaacgggagcagctgctcttccgccaacccagcagctactttgtgcagttcccgcaggccatgcagcgctgccgtgaccacatgatacgtagcctacagtcagtgggcctgaagcccatcatccctcagggcagctacttcctcatcacagacatctcagacttcaagaggaagatgcctgacttgcctggagctgtggatgagccctatgacagacgcttcgtcaagtggatgatcaagaacaagggcttggtggccatccctgtctccatcttctatagtgtgccacatcagaagcactttgaccactatatccgcttctgttttgtgaaggatgaagccacgctccaggccatggacgagaagctgcggaagtggaaggtggaactctagccctgaagtcacgccttggccctgacatccccacatgcccgcagagatcctctttgagtgtctgtctttgtccaggtttcagacatttctaggttggggaagatgctattgggaaacctcttctccgtgacacagaatgttctgggtgggagccgcccttcttcatcttagagaaccaagtgcctcctgtctgaaaggtgagggtggcctgacctgggcctctccctgcccctccataggtgggtttgtagggtcttgtgttgcttctggtctctccaggcttggctg

SEQ ID NO: 106236 - DNA, 1551 bp, Artificial Sequence
  derived and/or modified sequence
atgttcagaaccgccgccgccatcagcgtgcacctggtgggccccctgcagggcagaaaggccggcgcccccctgacctggttcctgcaccagacccaggtggccgagaagaacgtgggcagccccgcccccagacccaccagccacctgggcctggccaacccccaggagagaaaggtgccccagggcccccagagcccctgcgaggtgcccgccgccgagggcatcctgagaaccggcggcgccaagctgcccatccagggccaccccgccaagctggccatggccaagcagctgcaggccagaagactggacggcatcgactacaacccctgggtggagttcgtgaagctggccagcgagcacgacgtggtgaacctgggccagggcttccccgacttccccccccccgacttcgccgtggaggccttccagcacgccgtgagcggcgacttcatgctgaaccagtacaccaagaccttcggctacccccccctgaccaagatcctggccagcttcttcggcgagctgctgggccaggagatcgaccccctgagaaacgtgctggtgaccgtgggcggctacggcgccctgttcaccgccttccaggccctggtggacgagggcgacgaggtgatcatcatcgagcccttcttcgactgctacgagcccatgaccatgatggccggcggcagacccgtgttcgtgagcctgaagcccggccccatccagaacggcgagctgggcagcagcagcaactggcagctggaccccatggagctggccggcaagttcaccagcagaaccaaggccctggtgctgaacacccccaacaaccccctgggcaaggtgttcagcagagaggagctggagctggtggccagcctgtgccagcagcacgacgtggtgtgcatcaccgacgaggtgtaccagtggatggtgtacgacggccaccagcacatcagcatcgccagcctgcccggcatgtgggagagaaccctgaccatcggcagcgccggcaagaccttcagcgccaccggctggaaggtgggctgggtgctgggccccgaccacatcatgaagcacctgagaaccgtgcaccagaacagcgtgttccactgccccacccagagccaggccgccgtggccgagagcttcgagagagagcagctgctgttcagacagcccagcagctacttcgtgcagttcccccaggccatgcagagatgcagagaccacatgatcagaagcctgcagagcgtgggcctgaagcccatcatcccccagggcagctacttcctgatcaccgacatcagcgacttcaagagaaagatgcccgacctgcccggcgccgtggacgagccctacgacagaagattcgtgaagtggatgatcaagaacaagggcctggtggccatccccgtgagcatcttctacagcgtgccccaccagaagcacttcgaccactacatcagattctgcttcgtgaaggacgaggccaccctgcaggccatggacgagaagctgagaaagtggaaggtggagctgtag

SEQ ID NO: 106237 - DNA, 2591 bp, Artificial Sequence
  derived and/or modified sequence
cggaggtgcgcgggcgcgggcgagcagggtctccgggtgggcggcggcgacgccccgcgcaggctggaggccgccgaggctcgccatgccgggagaactctaactcccccatggagtcggccgacttctacgaggcggagccgcggcccccgatgagcagccacctgcagagccccccgcacgcgcccagcagcgccgccttcggctttccccggggcgcgggccccgcgcagcctcccgccccacctgccgccccggagccgctgggcggcatctgcgagcacgagacgtccatcgacatcagcgcctacatcgacccggccgccttcaacgacgagttcctggccgacctgttccagcacagccggcagcaggagaaggccaaggcggccgtgggccccacgggcggcggcggcggcggcgactttgactacccgggcgcgcccgcgggccccggcggcgccgtcatgcccgggggagcgcacgggcccccgcccggctacggctgcgcggccgccggctacctggacggcaggctggagcccctgtacgagcgcgtcggggcgccggcgctgcggccgctggtgatcaagcaggagccccgcgaggaggatgaagccaagcagctggcgctggccggcctcttcccttaccagccgccgccgccgccgccgccctcgcacccgcacccgcacccgccgcccgcgcacctggccgccccgcacctgcagttccagatcgcgcactgcggccagaccaccatgcacctgcagcccggtcaccccacgccgccgcccacgcccgtgcccagcccgcaccccgcgcccgcgctcggtgccgccggcctgccgggccctggcagcgcgctcaaggggctgggcgccgcgcaccccgacctccgcgcgagtggcggcagcggcgcgggcaaggccaagaagtcggtggacaagaacagcaacgagtaccgggtgcggcgcgagcgcaacaacatcgcggtgcgcaagagccgcgacaaggccaagcagcgcaacgtggagacgcagcagaaggtgctggagctgaccagtgacaatgaccgcctgcgcaagcgggtggaacagctgagccgcgaactggacacgctgcggggcatcttccgccagctgccagagagctccttggtcaaggccatgggcaactgcgcgtgaggcgcgcggctgtgggaccgccctgggccagcctccggcggggacccagggagtggtttggggtcgccggatctcgaggcttgcccgagccgtgcgagccaggactaggagattccggtgcctcctgaaagcctggcctgctccgcgtgtcccctcccttcctctgcgccggacttggtgcgtctaagatgagggggccaggcggtggcttctccctgcgaggaggggagaattcttggggctgagctgggagcccggcaactctagtatttaggataaccttgtgccttggaaatgcaaactcaccgctccaatgcctactgagtagggggagcaaatcgtgccttgtcattttatttggaggtttcctgcctccttcccgaggctacagcagacccccatgagagaaggaggggagcaggcccgtggcaggaggagggctcagggagctgagatcccgacaagcccgccagccccagccgctcctccacgcctgtccttagaaaggggtggaaacatagggacttggggcttggaacctaaggttgttcccctagttctacatgaaggtggagggtctctagttccacgcctctcccacctccctccgcacacaccccaccccagcctgctataggctgggcttccccttggggcggaactcactgcgatgggggtcaccaggtgaccagtgggagcccccaccccgagtcacaccagaaagctaggtcgtgggtcagctctgaggatgtatacccctggtgggagagggagacctagagatctggctgtggggcgggcatggggggtgaagggccactgggaccctcagccttgtttgtactgtatgccttcagcattgcctaggaacacgaagcacgatcagtccatcccagagggaccggagttatgacaagctttccaaatattttgctttatcagccgatatcaacacttgtatctggcctctgtgccccagcagtgccttgtgcaatgtgaatgtgcgcgtctctgctaaaccaccattttatttggtttttgttttgttttggttttgctcggatacttgccaaaatgagactctccgtcggcagctgggggaagggtctgagactccctttccttttggttttgggattacttttgatcctgggggaccaatgaggtgaggggggttctcctttgccctcagctttccccagcccctccggcctgggctgcccacaaggcttgtcccccagaggccctggctcctggtcgggaagggaggtggcctcccgccaacgcatcactggggctgggagcagggaaggacggcttggttctcttcttttggggagaacgtagagtctcactctagatgttttatgtattatatctataatataaacatatcaaagtcaa

SEQ ID NO: 106238 - DNA, 2631 bp, Artificial Sequence
  derived and/or modified sequence
tataaaagctgggccggcgcgggccgggccattcgcgacccggaggtgcgcgggcgcgggcgagcagggtctccgggtgggcggcggcgacgccccgcgcaggctggaggccgccgaggctcgccatgccgggagaactctaactcccccatggagtcggccgacttctacgaggcggagccgcggcccccgatgagcagccacctgcagagccccccgcacgcgcccagcagcgccgccttcggctttccccggggcgcgggccccgcgcagcctcccgccccacctgccgccccggagccgctgggcggcatctgcgagcacgagacgtccatcgacatcagcgcctacatcgacccggccgccttcaacgacgagttcctggccgacctgttccagcacagccggcagcaggagaaggccaaggcggccgtgggccccacgggcggcggcggcggcggcgactttgactacccgggcgcgcccgcgggccccggcggcgccgtcatgcccgggggagcgcacgggcccccgcccggctacggctgcgcggccgccggctacctggacggcaggctggagcccctgtacgagcgcgtcggggcgccggcgctgcggccgctggtgatcaagcaggagccccgcgaggaggatgaagccaagcagctggcgctggccggcctcttcccttaccagccgccgccgccgccgccgccctcgcacccgcacccgcacccgccgcccgcgcacctggccgccccgcacctgcagttccagatcgcgcactgcggccagaccaccatgcacctgcagcccggtcaccccacgccgccgcccacgcccgtgcccagcccgcaccccgcgcccgcgctcggtgccgccggcctgccgggccctggcagcgcgctcaaggggctgggcgccgcgcaccccgacctccgcgcgagtggcggcagcggcgcgggcaaggccaagaagtcggtggacaagaacagcaacgagtaccgggtgcggcgcgagcgcaacaacatcgcggtgcgcaagagccgcgacaaggccaagcagcgcaacgtggagacgcagcagaaggtgctggagctgaccagtgacaatgaccgcctgcgcaagcgggtggaacagctgagccgcgaactggacacgctgcggggcatcttccgccagctgccagagagctccttggtcaaggccatgggcaactgcgcgtgaggcgcgcggctgtgggaccgccctgggccagcctccggcggggacccagggagtggtttggggtcgccggatctcgaggcttgcccgagccgtgcgagccaggactaggagattccggtgcctcctgaaagcctggcctgctccgcgtgtcccctcccttcctctgcgccggacttggtgcgtctaagatgagggggccaggcggtggcttctccctgcgaggaggggagaattcttggggctgagctgggagcccggcaactctagtatttaggataaccttgtgccttggaaatgcaaactcaccgctccaatgcctactgagtagggggagcaaatcgtgccttgtcattttatttggaggtttcctgcctccttcccgaggctacagcagacccccatgagagaaggaggggagcaggcccgtggcaggaggagggctcagggagctgagatcccgacaagcccgccagccccagccgctcctccacgcctgtccttagaaaggggtggaaacatagggacttggggcttggaacctaaggttgttcccctagttctacatgaaggtggagggtctctagttccacgcctctcccacctccctccgcacacaccccaccccagcctgctataggctgggcttccccttggggcggaactcactgcgatgggggtcaccaggtgaccagtgggagcccccaccccgagtcacaccagaaagctaggtcgtgggtcagctctgaggatgtatacccctggtgggagagggagacctagagatctggctgtggggcgggcatggggggtgaagggccactgggaccctcagccttgtttgtactgtatgccttcagcattgcctaggaacacgaagcacgatcagtccatcccagagggaccggagttatgacaagctttccaaatattttgctttatcagccgatatcaacacttgtatctggcctctgtgccccagcagtgccttgtgcaatgtgaatgtgcgcgtctctgctaaaccaccattttatttggtttttgttttgttttggttttgctcggatacttgccaaaatgagactctccgtcggcagctgggggaagggtctgagactccctttccttttggttttgggattacttttgatcctgggggaccaatgaggtgaggggggttctcctttgccctcagctttccccagcccctccggcctgggctgcccacaaggcttgtcccccagaggccctggctcctggtcgggaagggaggtggcctcccgccaacgcatcactggggctgggagcagggaaggacggcttggttctcttcttttggggagaacgtagagtctcactctagatgttttatgtattatatctataatataaacatatcaaagtcaa

SEQ ID NO: 106239 - protein, 310 aa, Artificial Sequence
  derived and/or modified sequence
MAATGANAEKAESHNDCPVRLLNPNIAKMKEDILYHFNLTTSRHNFPALFGDVKFVCVGGSPSRMKAFIRCVGAELGLDCPGRDYPNICAGTDRYAMYKVGPVLSVSHGMGIPSISIMLHELIKLLYYARCSNVTIIRIGTSGGIGLEPGTVVITEQAVDTCFKAEFEQIVLGKRVIRKTDLNKKLVQELLLCSAELSEFTTVVGNTMCTLDFYEGQGRLDGALCSYTEKDKQAYLEAAYAAGVRNIEMESSVFAAMCSACGLQAAVVCVTLLNRLEGDQISSPRNVLSEYQQRPQRLVSYFIKKKLSKA

SEQ ID NO: 106240 - protein, 144 aa, Artificial Sequence
  derived and/or modified sequence
MAATGANAEKAESHNDCPVRLLNPNIAKMKEDILYHFNLTTSRHNFPALFGDVKFVCVGGSPSRMKAFIRCVGAELGLDCPGRDYPNICAGTDRYAMYKVGPVLSVSHGMGIPSISIMLHELIKLLYYARCSNVTIIRIGTSGG

SEQ ID NO: 106241 - protein, 29 aa, Artificial Sequence
  derived and/or modified sequence
MAATGANAEKAESHNDCPVRLLNPNIAKM

SEQ ID NO: 106242 - protein, 146 aa, Artificial Sequence
  derived and/or modified sequence
MAATGANAEKAESHNDCPVRLLNPNIAKMKEDILYHFNLTTSRHNFPALFGDVKFVCVGGSPSRMKAFIRCVGAELGLDCPGRDYPNICAGTDRYAMYKVGPVLSVSHGMGIPSISIMLHELIKLLYYARCSNVTIIRIGTSGGIG

SEQ ID NO: 106243 - DNA, 933 bp, Artificial Sequence
  derived and/or modified sequence
atggccgccaccggcgccaacgccgagaaggccgagagccacaacgactgccccgtgagactgctgaaccccaacatcgccaagatgaaggaggacatcctgtaccacttcaacctgaccaccagcagacacaacttccccgccctgttcggcgacgtgaagttcgtgtgcgtgggcggcagccccagcagaatgaaggccttcatcagatgcgtgggcgccgagctgggcctggactgccccggcagagactaccccaacatctgcgccggcaccgacagatacgccatgtacaaggtgggccccgtgctgagcgtgagccacggcatgggcatccccagcatcagcatcatgctgcacgagctgatcaagctgctgtactacgccagatgcagcaacgtgaccatcatcagaatcggcaccagcggcggcatcggcctggagcccggcaccgtggtgatcaccgagcaggccgtggacacctgcttcaaggccgagttcgagcagatcgtgctgggcaagagagtgatcagaaagaccgacctgaacaagaagctggtgcaggagctgctgctgtgcagcgccgagctgagcgagttcaccaccgtggtgggcaacaccatgtgcaccctggacttctacgagggccagggcagactggacggcgccctgtgcagctacaccgagaaggacaagcaggcctacctggaggccgcctacgccgccggcgtgagaaacatcgagatggagagcagcgtgttcgccgccatgtgcagcgcctgcggcctgcaggccgccgtggtgtgcgtgaccctgctgaacagactggagggcgaccagatcagcagccccagaaacgtgctgagcgagtaccagcagagaccccagagactggtgagctacttcatcaagaagaagctgagcaaggcctag

SEQ ID NO: 106244 - DNA, 933 bp, Artificial Sequence
  derived and/or modified sequence
atggccgcaacaggtgccaatgctgagaaggcggaaagtcataacgactgcccagtgagactacttaatcctaacattgccaagatgaaagaggacattctctatcactttaacctgactacgagcaggcacaacttcccagcactcttcggtgatgtcaaatttgtgtgtgtgggtggttccccaagcagaatgaaagccttcattcggtgcgtcggggcggagcttggcctggactgccctggacgcgactatccaaacatctgcgcaggaaccgatagatatgcgatgtataaggtgggacccgtattgtccgtaagccacgggatgggtatcccttctatttcaattatgctgcatgaacttattaaactcctgtattatgctcgctgctctaacgtgacgatcatcaggataggaactagtggtggcatcggcctcgagcctgggaccgtggtgattaccgagcaagctgtcgacacttgttttaaagccgaatttgaacaaatagtgctggggaaacgggtcatcaggaagaccgacctgaataagaagctcgtgcaggagttgctgctttgctccgccgaactgtcggagttcacaactgtggttggtaacaccatgtgtactttggacttttacgaggggcagggccgcctcgacggggctttatgtagctatacagaaaaagacaaacaggcttacctggaagccgcctatgctgctggggtccgcaatatcgaaatggaatctagcgtgtttgcggccatgtgctcagcatgtggcctccaggccgccgttgtgtgtgtgactttactcaaccgtcttgagggcgatcagatctcttcaccaaggaatgtgctgagcgaataccagcagaggccacagaggcttgtgtcctacttcattaagaaaaagctgtctaaagcctag

SEQ ID NO: 106245 - DNA, 933 bp, Artificial Sequence
  derived and/or modified sequence
atggcagccaccggcgctaacgctgaaaaggctgaatcacacaacgattgcccggttcggttgcttaatcccaacattgcgaagatgaaagaggatattctctaccatttcaatttgaccacttcccgacacaacttccccgcactttttggtgacgtgaaattcgtctgcgtaggagggtcacctagcaggatgaaggccttcatccggtgcgtaggggcagagctgggtctggactgccccgggagagattatccaaacatctgcgcaggcaccgatcgttacgcaatgtataaagtcggccctgtgctgtccgtcagccacggtatgggaattccctcgatttccattatgttgcacgagctgatcaaactcctgtactatgcgcggtgttccaacgtcactattataagaatcgggacttcaggcggtattgggctcgagccgggtactgtcgtgatcaccgagcaggcggttgacacctgctttaaagcggagtttgaacaaattgtcttggggaagagggtaattcgcaaaactgacctgaataagaagctcgtgcaagagctgctactctgttcagcggaactgtctgagttcaccacagtggtgggtaacaccatgtgcacactcgatttttacgagggtcaggggcgcctcgacggcgcactatgctcttatacagaaaaagataaacaggcctacctggaagccgcctacgccgcaggagtgcgaaacatagaaatggaaagcagcgtgtttgccgctatgtgcagtgcctgcggactgcaagcagctgtggtgtgcgtcactcttctaaaccgcctcgagggtgaccagattagttctcctcggaacgttttaagtgagtatcaacagagaccccaaagattggtaagttatttcataaaaaagaaactatctaaagcttag

SEQ ID NO: 106246 - DNA, 933 bp, Artificial Sequence
  derived and/or modified sequence
atggccgccaccggcgcaaacgccgagaaggccgagtcacataatgactgccccgtgcggctgctgaatccgaatattgctaaaatgaaggaagacatactgtatcactttaatttaacaacgtcccgacacaatttcccggcattatttggcgatgtgaaatttgtttgtgttgggggcagccccagcagaatgaaggccttcattcgctgtgttggagctgagctgggccttgactgtccaggcagggattatccaaacatctgcgccggaacagaccgatatgctatgtataaagttggccctgtgctgtcagttagccatggaatgggcatccccagtatctctatcatgctgcatgaactcataaagctactttattacgccagatgtagcaatgtgacaataattcggattggcacttcaggaggcattggcctggagcccggcaccgtcgtcataaccgagcaggctgtcgacacatgcttcaaggcagagttcgagcagatcgtactgggaaagagggtgattagaaaaacagacctgaacaagaagcttgttcaggagttgcttctctgcagcgctgagctcagcgagtttaccacagtggtggggaacaccatgtgcacgctagatttctatgagggacaggggagactcgacggggccttgtgtagctacaccgaaaaagataaacaggcttacctcgaggctgcctacgcagctggcgtgaggaacatcgagatggagagtagcgtctttgctgccatgtgtagtgcctgcggtcttcaagctgccgtggtttgcgtcacattgctgaatcggctcgaaggagatcagatatctagtccaagaaatgtactgagcgaataccagcagaggccacagcgccttgttagctactttatcaaaaagaagttatctaaagcatag

SEQ ID NO: 106247 - DNA, 933 bp, Artificial Sequence
  derived and/or modified sequence
atggccgccaccggggccaatgctgagaaggccgagagccacaatgactgccctgtgcggctgctgaaccccaacatcgccaagatgaaggaggacatcctgtaccacttcaacctgaccaccagccgccacaacttccctgccctgtttggagatgtgaagtttgtgtgtgtgggcggcagccccagcaggatgaaggccttcatccgctgtgtgggcgctgagctgggcctggactgccccggccgggactaccccaacatctgtgccggcacagacagatatgccatgtacaaggtgggccctgtgctgtctgtgagccacggcatgggcatccccagcatcagcatcatgctgcacgagctgatcaagctgctgtactatgcccgctgcagcaatgtgaccatcatcagaattggcaccagcggcggcatcggcctggagcccggcaccgtggtgatcacagagcaggccgtggacacctgcttcaaggccgagtttgagcagatcgtgctgggcaagagggtcatcaggaagacagacctgaacaagaagctggtgcaggagctgctgctgtgcagcgctgagctgtctgagttcaccaccgtggtgggcaacaccatgtgcaccctggacttctatgagggccagggccgcctggatggagccctgtgcagctacacagagaaggacaagcaggcctacctggaggccgcctatgctgctggggtgagaaatattgagatggagagctctgtgtttgctgccatgtgcagcgcctgtggcctgcaggccgctgtggtgtgtgtgaccctgctgaaccggctggagggggaccagatcagcagccccagaaatgtgctgtctgagtaccagcagaggccccagaggctggtgtcctacttcatcaagaagaagctgagcaaggcctag

SEQ ID NO: 106248 - DNA, 933 bp, Artificial Sequence
  derived and/or modified sequence
atggccgccaccggcgccaacgccgagaaggccgagagccacaacgattgccccgtaaggctgctcaatcctaatatcgctaaaatgaaggaggacattttatatcatttcaatttaactacgagccgacacaacttccctgccctattcggtgatgtgaaatttgtatgcgtcggaggctctccatccaggatgaaggcgttcatccggtgcgtgggcgccgagcttggcctcgattgccctgggagagactatccaaacatatgcgcaggcactgacagatacgcgatgtacaaggttggcccagttctgtcagtttctcatggcatgggaattcctagcattagcatcatgctccatgagcttatcaagctgctctactatgcccgatgcagcaatgtgaccatcatcaggattggtacttccggcggcataggcctggagccaggaacagtcgtaatcaccgagcaagccgtggatacctgttttaaagccgaatttgaacaaatcgtcttaggcaagagagtgattaggaagacagatcttaacaagaagttggtgcaggagctattgctatgttcagctgaattgagcgagttcacgaccgtggtcggtaatacgatgtgcaccctggacttttacgaagggcaaggccgactggacggcgccctatgttcctacacggaaaaggataaacaggcttaccttgaagcagcctatgctgccggagtgcgcaacatcgagatggaaagctcagtcttcgctgccatgtgttcagcgtgtgggctgcaggccgccgtggtttgcgttactttgctgaaccggctggagggcgatcagatctcatctcctcgaaatgtgttatccgagtaccagcagcgcccacaacgcctcgtctcgtactttatcaaaaaaaaactcagcaaagcctag

SEQ ID NO: 106249 - DNA, 933 bp, Artificial Sequence
  derived and/or modified sequence
atggccgccaccggcgccaacgccgagaaggccgagagccacaacgactgccctgtgaggcttctgaaccccaatattgcaaagatgaaggaggacatcctgtaccatttcaaccttaccacttctaggcataattttccggctctgttcggcgatgtcaagtttgtatgtgtgggcggatcccctagtcgcatgaaggcgtttatcaggtgcgttggcgccgagctcgggcttgattgcccaggaagagattatcctaatatttgcgccggcacagacagatacgccatgtacaaggttgggccggtattgagcgtcagccatgggatgggaatccccagcataagcatcatgcttcacgaactgatcaagttactctactatgctcgatgttcaaatgtaaccattattaggatcggcacctctggcggcattggactcgagccggggacggtcgtgatcaccgagcaggccgtagacacctgctttaaagcagaatttgaacagatcgttttgggaaagagagttatccgaaagactgacctgaacaagaagctggtccaggagctgctgctctgctcagccgaactgtctgagttcaccactgtggtgggtaacactatgtgtaccctagatttctacgaggggcagggcaggctcgacggggccctttgctcatacaccgaaaaagataaacaggcttatctggaggccgcttatgcagctggagtgcggaacatcgaaatggaaagctcagtgtttgcagccatgtgcagcgcctgtggcctgcaagcagccgtggtgtgtgtgacattgctcaaccgcctcgaaggggatcagatctctagtcctcggaacgtactttccgagtatcagcagcgaccccaaaggctggtgtcttacttcattaaaaaaaaactgagtaaggcttag

SEQ ID NO: 106250 - DNA, 933 bp, Artificial Sequence
  derived and/or modified sequence
atggccgccaccggcgccaacgccgagaaggccgagagccacaacgactgtccagtacgtctgcttaaccctaacatcgcaaaaatgaaagaggacatactgtaccacttcaacctcaccacatcacgccacaattttcccgccctattcggcgacgtaaagttcgtttgcgttggggggagcccatccagaatgaaagcctttataagatgtgttggtgctgagttaggtctggactgccctggaagagattatcctaacatctgtgccggaacagatcggtatgcaatgtacaaggtaggccccgttctgagtgtgtctcatggaatgggtattccttctatcagtatcatgctgcacgagttgattaaactgctctactacgccaggtgcagtaatgtgacaataataaggatagggacatctggaggaataggactggagccaggcacggtggtcataacggagcaggcagtcgacacttgtttcaaagccgagttcgagcaaatcgtgctcgggaaacgggtgatacggaaaacagatcttaataagaagctggtacaggagctcctgctgtgctctgcggagctgtctgaattcaccacagtggtgggtaacacgatgtgcaccctagatttctacgaaggccaagggcgcttggacggtgccctgtgtagttatactgaaaaagataagcaagcatacttggaggccgcctacgctgctggcgtcaggaacatcgagatggagtcctccgtatttgccgccatgtgtagcgcctgcggactacaggccgctgttgtgtgtgttacattactaaatagacttgaaggggaccagattagcagtccgcgcaacgtattaagtgagtaccagcaaagaccccagaggttggtgagctatttcatcaaaaagaaactctcaaaagcttag

SEQ ID NO: 106251 - DNA, 933 bp, Artificial Sequence
  derived and/or modified sequence
atggctgccaccggcgcaaacgctgagaaagccgagtctcataacgactgcccagtccgtctgcttaacccgaatatcgcaaaaatgaaggaagatattctttatcacttcaacctgacaactagtagacataacttccccgctctgttcggtgacgtgaagtttgtctgtgtcggcggttcccccagccggatgaaagcttttatcagatgcgtgggcgctgaacttgggctggactgtcccggacgggactacccgaatatatgcgccggtacggataggtacgcgatgtataaggtgggcccagtgctgagcgtgtctcatggcatgggcatcccctctattagcataatgctgcatgagttgattaaactgctgtattacgctcgatgttcaaatgttaccataattcgcatcggaacttccggtggcattggcctcgaacctggcacggttgtcattaccgaacaggccgtagatacttgcttcaaagccgaattcgaacagatcgtgctggggaaacgcgtgatacgcaagaccgatctgaacaaaaaacttgtacaagagctactgctatgcagtgccgagttatctgaatttaccacagtggttggtaacacaatgtgcactttagacttttacgagggccaggggcgtttagacggcgcactctgtagttacacagagaaggacaagcaagcatacttggaggccgcatatgctgctggtgtccgtaacattgagatggagtctagcgtgtttgccgcaatgtgttctgcttgtggtctgcaggctgctgtggtctgcgtgaccctacttaatcgcctagagggggatcaaatttcttcacctcgcaacgtcttgagcgagtatcagcagagaccacagagactggtgtcctactttatcaagaaaaagttgtcaaaggcatag

SEQ ID NO: 106252 - DNA, 933 bp, Artificial Sequence
  derived and/or modified sequence
atggccgcaacaggggctaatgccgaaaaagctgagtctcacaacgactgccctgttcgcctcctgaacccaaatatagcaaagatgaaagaggacattctataccacttcaatctgaccacctccagacataactttcctgcgttgtttggagatgtcaagtttgtgtgcgttgggggaagcccaagccggatgaaggctttcatccgatgtgtcggggctgaactgggcctggattgtccaggacgcgactatcccaacatttgtgctggcaccgaccggtatgccatgtacaaggtcggcccagtccttagcgtctcacacggcatgggtattccatctatcagtattatgctgcacgaactcatcaagctcctgtattacgcaaggtgctccaacgtgacaatcatcaggattggcaccagtgggggaattggcctggagcccggaacggtcgtgattacagagcaggccgtggatacctgttttaaggcggagtttgagcagattgtgctcgggaagagagtcattagaaaaacagacctgaacaaaaagttggtccaggaactgttactctgtagtgccgagctgtccgagttcacaaccgtcgtgggcaacacaatgtgtacgttggacttctatgaaggccagggacgcctggacggcgcactgtgttcgtataccgagaaagataagcaggcctacttagaagccgcttacgccgcaggagttcgcaacattgagatggagtctagcgtattcgctgcaatgtgttcagcatgtgggttgcaagcagcggttgtgtgtgttacactgctgaacaggttagagggcgaccagattagttcacccagaaacgtcctgtctgagtaccagcagcgtccacagaggctggtttcgtatttcattaagaagaagctgtccaaggcgtag

SEQ ID NO: 106253 - DNA, 933 bp, Artificial Sequence
  derived and/or modified sequence
atggctgctactggggctaacgctgaaaaggcagaatctcacaacgactgccccgtccgcctgctgaatccaaacatcgccaagatgaaagaggatattttataccacttcaaccttaccacctcaagacacaatttcccagcacttttcggtgacgtcaagtttgtatgcgttggcggatcaccaagcaggatgaaggccttcattagatgtgttggcgcagagctcggactggattgtcccggacgtgattatcccaacatttgtgctgggacagaccgatatgcaatgtataaggtcggcccagtcttaagcgtttctcatggaatggggattccctctatttcgatcatgctgcatgagcttatcaagctactgtactatgccagatgttcaaatgttacaataataagaattggtacgtctggagggatcggattggagcctgggactgtcgtgatcaccgagcaggccgtggatacctgtttcaaagctgaattcgagcagatcgtcctgggaaagagagtaatacggaagactgacctcaataagaaacttgttcaggaactgttactctgcagcgcggagctttccgagttcacaactgtcgtcggcaacacaatgtgcactctggatttctacgaagggcaaggcagactggacggggctttatgttcatacaccgaaaaggacaagcaggcatatctggaggccgcatatgccgctggggtcagaaacattgaaatggagtcttctgtattcgctgctatgtgctcagcatgcggtcttcaagcagctgtggtatgtgttaccctgctgaatcggctggagggcgatcagatttcatcgcccaggaacgtgctgtccgagtaccagcaacgccctcagcgccttgtgtcctatttcattaaaaagaagctgagcaaggcctag

SEQ ID NO: 106254 - DNA, 1932 bp, Artificial Sequence
  derived and/or modified sequence
gcgggaactcccaggatcaggaaggtcccagagaaactccccaggggggaagccgaggccgtccagagagatccagggtacacacagtgacagtgccagctccacattcccgaccaccgggccagggctggttccacgctgtcatttctctccgctggccccagccgcggggccaccgccagacagacagaccggggatcctgcctggcggcgtgaccttgggttagtcctagagccgcttctagcccggtttcctccgccccaggttaggaccacgtggggcggggccgctcgcagactccatatgagattcacctcgcaggtggttccctcattcgagtgctccggcgcacagacccgcgccccgccgtctgcgagcctcccgagagccgtcccttcgtccggccctggagcattgcgtttgtcgccggtgtcgcagtgcgaggatggcgccgcgggtgtagcggctctctgcgcaggccgagtgggcttggtgaggtgactcgcggtcgcgggtgactcgccggcaggacactgcctggaacgcctggagcgcctcccactgcagacgtctgtccgcctccagccgctctcctctgacgggtcctgcctcagttggcggaatggcggccacgggagccaatgcagagaaagctgaaagtcacaatgattgccccgtcagacttttaaatccaaacatagcaaaaatgaaagaagatattctctatcatttcaatctcaccactagcagacacaatttcccagccttgtttggagatgtgaagtttgtgtgtgttggtggaagcccctcccggatgaaagccttcatcaggtgcgttggtgcagagctgggccttgactgcccaggtagagactatcccaacatctgtgcgggaactgaccgctatgccatgtataaagtaggaccggtgctgtctgtcagtcatggtatgggcattccttctatctcaatcatgttgcatgagctcataaagctgctgtactatgcccggtgctccaacgtcactatcatccgcattggcacttctggtgggataggtctggagcccggcactgtggtcataacagagcaggcagtggatacctgcttcaaggcagagtttgagcagattgtcctggggaagcgggtcatccggaaaacggaccttaacaagaagctggtgcaggagctgttgctgtgttctgcagagctgagcgagttcaccacagtggtggggaacaccatgtgcaccttggacttctatgaagggcaaggccgtctggatggggctctctgctcctacacggagaaggacaagcaggcgtatctggaggcagcctatgcagccggcgtccgcaatatcgagatggagtcctcggtgtttgccgccatgtgcagcgcctgcggcctccaagcggccgtggtgtgtgtcaccctcctgaaccgcctggaaggggaccagatcagcagccctcgcaatgtgctcagcgagtaccagcagaggccgcagcggctggtgagctacttcatcaagaagaaactgagcaaggcctgagcgctgccctgcacctccgcagacctgctgtgatgacttgccattaaaagcattgtccaaaatcccctgttgtgtggactttgagcacactttacacaagaatctagaaaatcagatcgcgattaagagacagagaatcttggattaaccgcatgggagatgttcttccttttgaagtttcattggagcattttcaatgatgttagcctgatttggggtttcttcaagaacattctaccaaatttttgtactatttctagggaaatttttcagactttaaaattctaatggtagtcagatttcatgtcactaaacaagaaatctgacaatagtgccaggaaactaatttcctgatacattaaaaaaattccatgca

SEQ ID NO: 106255 - DNA, 1822 bp, Artificial Sequence
  derived and/or modified sequence
caccgggccagggctggttccacgctgtcatttctctccgctggccccagccgcggggccaccgccagacagacagaccggggatcctgcctggcggcgtgaccttgggttagtcctagagccgcttctagcccggtttcctccgccccaggttaggaccacgtgggtggttccctcattcgagtgctccggcgcacagacccgcgccccgccgtctgcgagcctcccgagagccgtcccttcgtccggccctggagcattgcgtttgtcgccggtgtcgcagtgcgaggatggcgccgcgggtgtagcggctctctgcgcaggccgagtgggcccagagaagcgaggaactccgcagctcgtcgacacgtctcgtctcctgtcccaattcagggcttggtgaggtgactcgcggtcgcgggtgactcgccggcaggacactgcctggaacgcctggagcgcctcccactgcagacgtctgtccgcctccagccgctctcctctgacgggtcctgcctcagttggcggaatggcggccacgggagccaatgcagagaaagctgaaagtcacaatgattgccccgtcagacttttaaatccaaacatagcaaaaatgaaagaagatattctctatcatttcaatctcaccactagcagacacaatttcccagccttgtttggagatgtgaagtttgtgtgtgttggtggaagcccctcccggatgaaagccttcatcaggtgcgttggtgcagagctgggccttgactgcccaggtagagactatcccaacatctgtgcgggaactgaccgctatgccatgtataaagtaggaccggtgctgtctgtcagtcatggtatgggcattccttctatctcaatcatgttgcatgagctcataaagctgctgtactatgcccggtgctccaacgtcactatcatccgcattggcacttctggtgggataggtctggagcccggcactgtggtcataacagagcaggcagtggatacctgcttcaaggcagagtttgagcagattgtcctggggaagcgggtcatccggaaaacggaccttaacaagaagctggtgcaggagctgttgctgtgttctgcagagctgagcgagttcaccacagtggtggggaacaccatgtgcaccttggacttctatgaagggcaaggccgtctggatggggctctctgctcctacacggagaaggacaagcaggcgtatctggaggcagcctatgcagccggcgtccgcaatatcgagatggagtcctcggtgtttgccgccatgtgcagcgcctgcggcctccaagcggccgtggtgtgtgtcaccctcctgaaccgcctggaaggggaccagatcagcagccctcgcaatgtgctcagcgagtaccagcagaggccgcagcggctggtgagctacttcatcaagaagaaactgagcaaggcctgagcgctgccctgcacctccgcagacctgctgtgatgacttgccattaaaagcattgtccaaaatcccctgttgtgtggactttgagcacactttacacaagaatctagaaaatcagatcgcgattaagagacagagaatcttggattaaccgcatgggagatgttcttccttttgaagtttcattggagcattttcaatgatgttagcctgatttggggtttcttcaagaacattctaccaaatttttgtactatttctagggaaatttttcagactttaaaattctaatggtagtcagatttcatgtcactaaacaagaaatctgacaatagtgccaggaaactaatttcctgatacatt

SEQ ID NO: 106256 - DNA, 1375 bp, Artificial Sequence
  derived and/or modified sequence
tgagattcacctcgcaggtggttccctcattcgagtgctccggcgcacagacccgcgccccgccgtctgcgagcctcccgagagccgtcccttcgtccggccctggagcattgcgtttgtcgccggtgtcgcagtgcgaggatggcgccgcgggtgtagcggctctctgcgcaggccgagtgggcccagagaagcgaggaactccgcagctcgtcgacacgtctcgtctcctgtcccaattcagggcttggtgaggtgactcgcggtcgcgggtgactcgccggcaggacactgcctggaacgcctggagcgcctcccactgcagacgtctgtccgcctccagccgctctcctctgacgggtcctgcctcagttggcggaatggcggccacgggagccaatgcagagaaagctgaaagtcacaatgattgccccgtcagacttttaaatccaaacatagcaaaaatgaaagaagatattctctatcatttcaatctcaccactagcagacacaatttcccagccttgtttggagatgtgaagtttgtgtgtgttggtggaagcccctcccggatgaaagccttcatcaggtgcgttggtgcagagctgggccttgactgcccaggtagagactatcccaacatctgtgcgggaactgaccgctatgccatgtataaagtaggaccggtgctgtctgtcagtcatggtatgggcattccttctatctcaatcatgttgcatgagctcataaagctgctgtactatgcccggtgctccaacgtcactatcatccgcattggcacttctggtgggataggtctggagcccggcactgtggtcataacagagcaggcagtggatacctgcttcaaggcagagtttgagcagattgtcctggggaagcgggtcatccggaaaacggaccttaacaagaagctggtgcaggagctgttgctgtgttctgcagagctgagcgagttcaccacagtggtggggaacaccatgtgcaccttggacttctatgaagggcaaggccgtctggatggggctctctgctcctacacggagaaggacaagcaggcgtatctggaggcagcctatgcagccggcgtccgcaatatcgagatggagtcctcggtgtttgccgccatgtgcagcgcctgcggcctccaagcggccgtggtgtgtgtcaccctcctgaaccgcctggaaggggaccagatcagcagccctcgcaatgtgctcagcgagtaccagcagaggccgcagcggctggtgagctacttcatcaagaagaaactgagcaaggcctgagcgctgccctgcacctccgcagacctgctgtgatgacttgccattaaaagcattgtccaaaa

SEQ ID NO: 106257 - protein, 242 aa, Artificial Sequence
  derived and/or modified sequence
MKSAGGSGRSLLPSPRVCEEQRCEEEVFPLAMNYLDRYLSCVPTRKAQLQLLGAVCMLLASKLRETTPLTIEKLCIYTDHAVSPRQLRDWEVLVLGKLKWDLAAVIAHDFLAFILHRLSLPRDRQALVKKHAQTFLALCATDYTFAMYPPSMIATGSIGAAVQGLGACSMSGDELTELLAGITGTEVDCLRACQEQIEAALRESLREASQTSSSPAPKAPRGSSSQGPSQTSTPTDVTAIHL

SEQ ID NO: 106258 - protein, 118 aa, Artificial Sequence
  derived and/or modified sequence
MNYLDRYLSCVPTRKAQLQLLGAVCMLLASKLRETTPLTIEKLCIYTDHAVSPRQLRDWEVLVLGKLKWDLAAVIAHDFLAFILHRLSLPRDRQALVKKHAQTFLALCATDYTFAMYP

SEQ ID NO: 106259 - DNA, 729 bp, Artificial Sequence
  derived and/or modified sequence
atgaagagcgccggcggcagcggcagaagcctgctgcccagccccagagtgtgcgaggagcagagatgcgaggaggaggtgttccccctggccatgaactacctggacagatacctgagctgcgtgcccaccagaaaggcccagctgcagctgctgggcgccgtgtgcatgctgctggccagcaagctgagagagaccacccccctgaccatcgagaagctgtgcatctacaccgaccacgccgtgagccccagacagctgagagactgggaggtgctggtgctgggcaagctgaagtgggacctggccgccgtgatcgcccacgacttcctggccttcatcctgcacagactgagcctgcccagagacagacaggccctggtgaagaagcacgcccagaccttcctggccctgtgcgccaccgactacaccttcgccatgtacccccccagcatgatcgccaccggcagcatcggcgccgccgtgcagggcctgggcgcctgcagcatgagcggcgacgagctgaccgagctgctggccggcatcaccggcaccgaggtggactgcctgagagcctgccaggagcagatcgaggccgccctgagagagagcctgagagaggccagccagaccagcagcagccccgcccccaaggcccccagaggcagcagcagccagggccccagccagaccagcacccccaccgacgtgaccgccatccacctgtag

SEQ ID NO: 106260 - DNA, 2233 bp, Artificial Sequence
  derived and/or modified sequence
acttccagtgcgtgcagcgggagatcaagccgcacatgcggaagatgctggcttactggatgctggaggtaccgcccggacgcgtccccctcccccaccgctcccgggtctggacacaccggggccgccctgtcgggacatcccggtccccacagcaatctgcaggatgctccgaggctaagactcccggggcctggcctttcactagggcacccacgccagctgcctcccttgctttcccgagccctaatcggctcctcccgacagtgactgccagtcacttggcaccctaactgtgcctctcttcgggccgagcaaacgggaccaaggacactctctccccttcggcttctcacagcgtctcccgcttccctccgcctcccggccttctccggagagcgcgcctggaaaaccctgggctcggccgcccccgcccgggagccggttcctgtgtctttcgcggggttctggcggggaaggcgatgggggtggcgcgcgccctgttccggccgacagggaaatgaaaagtgcaggaggcagcggcaggagcctcctcccttcccctcgggtatgtgaggagcagcgctgtgaggaggaagtcttccccctggccatgaactacctggatcgctacctgtcttgcgtccccacccgaaaggcgcagttgcagctcctgggtgcggtctgcatgctgctggcctccaagctgcgcgagaccacgcccctgaccatcgaaaaactgtgcatctacaccgaccacgctgtctctccccgccagttgcgggactgggaggtgctggtcctagggaagctcaagtgggacctggctgctgtgattgcacatgatttcctggccttcattctgcaccggctctctctgccccgtgaccgacaggccttggtcaaaaagcatgcccagacctttttggccctctgtgctacagattatacctttgccatgtacccgccatccatgatcgccacgggcagcattggggctgcagtgcaaggcctgggtgcctgctccatgtccggggatgagctcacagagctgctggcagggatcactggcactgaagtggactgcctgcgggcctgtcaggagcagatcgaagctgcactcagggagagcctcagggaagcctctcagaccagctccagcccagcgcccaaagccccccggggctccagcagccaagggcccagccagaccagcactcctacagatgtcacagccatacacctgtagccctggagaggccctctggagtggccactaagcagaggaggggccgctgccacccacctccctgcctccaggaaccacaccacatctaagcctgaaggggcgtctgttcccccttcacaaagcccaagggatctggtcctacccatccccgcagtgtgcactaaggggcccggccagccatgtctgcatttcggtggctagtcaagctcctcctccctgcatctgaccagcagcgcctttcccaactctagctgggggtgggccaggctgatgggacagaattggatacatacaccagcattccttttgaacgcccccccccacccctgggggctctcatgttttcaactgccaaaatgctctagtgccttctaaaggtgttgtcccttctagggttattgcatttggattggggtccctctaaaatttaatgcatgatagacacatatgagggggaatagtctagatggctcctctcagtactttggaggcccctatgtagtccgtgctgacagctgctcctagagggaggggcctaggcctcagccagagaagctataaattcctctttgctttgctttctgctcagcttctcctgtgtgattgacagctttgctgctgaaggctcattttaatttattaattgctttgagcacaactttaagaggacataatggggtcctggccatcccacaagtggtggtaaccctggtggttgctgttttcctcccttctgctactggcaaaaggatctttgtggccaaggagctgctatagcctggggtggggtcatgccctcctctcccattgtccctctgccccatcctccagcagggaaaatgcagcagggatgccctggaggtggctgagcccctgtctagagagggaggcaagccctgttgacacaggtctttcctaaggctgcaaggtttaggctggtggcccaggaccatcatcctactgtaataaagatgattgtgaaat

SEQ ID NO: 106261 - DNA, 2133 bp, Artificial Sequence
  derived and/or modified sequence
ggcagcggtccgggaacccgtgctgccccggccccgccgcccacacctgagcctccgtggcgccccgcccccgcacctatgccgcgtggggcgggggctgcgggcgggggtgcgcggcgccggatgagcctcctggcctcgccgagggtgtacagggggtgggagagtcaggccggggaccgaaacttggctgagcagagcaccagcccctttgtctcctccgccccctcttccccacttcctgcccagctctggatcggcggcgcggcgcggactttgtaaacacttcgccactgcaggggtggagactggctctgttcggatgccggccgggggggagaggtgcaatcctctcctcgcggctggtggttgcgaccacccccactccccaaaggcaggctccggaggcggcgggacagagcgcctgcgaccccagtcggtgctccggggaggtcacctgacgaggaggtatgtgaggagcagcgctgtgaggaggaagtcttccccctggccatgaactacctggatcgctacctgtcttgcgtccccacccgaaaggcgcagttgcagctcctgggtgcggtctgcatgctgctggcctccaagctgcgcgagaccacgcccctgaccatcgaaaaactgtgcatctacaccgaccacgctgtctctccccgccagttgcgggactgggaggtgctggtcctagggaagctcaagtgggacctggctgctgtgattgcacatgatttcctggccttcattctgcaccggctctctctgccccgtgaccgacaggccttggtcaaaaagcatgcccagacctttttggccctctgtgctacagattatacctttgccatgtacccgccatccatgatcgccacgggcagcattggggctgcagtgcaaggcctgggtgcctgctccatgtccggggatgagctcacagagctgctggcagggatcactggcactgaagtggactgcctgcgggcctgtcaggagcagatcgaagctgcactcagggagagcctcagggaagcctctcagaccagctccagcccagcgcccaaagccccccggggctccagcagccaagggcccagccagaccagcactcctacagatgtcacagccatacacctgtagccctggagaggccctctggagtggccactaagcagaggaggggccgctgccacccacctccctgcctccaggaaccacaccacatctaagcctgaaggggcgtctgttcccccttcacaaagcccaagggatctggtcctacccatccccgcagtgtgcactaaggggcccggccagccatgtctgcatttcggtggctagtcaagctcctcctccctgcatctgaccagcagcgcctttcccaactctagctgggggtgggccaggctgatgggacagaattggatacatacaccagcattccttttgaacgcccccccccacccctgggggctctcatgttttcaactgccaaaatgctctagtgccttctaaaggtgttgtcccttctagggttattgcatttggattggggtccctctaaaatttaatgcatgatagacacatatgagggggaatagtctagatggctcctctcagtactttggaggcccctatgtagtccgtgctgacagctgctcctagagggaggggcctaggcctcagccagagaagctataaattcctctttgctttgctttctgctcagcttctcctgtgtgattgacagctttgctgctgaaggctcattttaatttattaattgctttgagcacaactttaagaggacataatggggtcctggccatcccacaagtggtggtaaccctggtggttgctgttttcctcccttctgctactggcaaaaggatctttgtggccaaggagctgctatagcctggggtggggtcatgccctcctctcccattgtccctctgccccatcctccagcagggaaaatgcagcagggatgccctggaggtggctgagcccctgtctagagagggaggcaagccctgttgacacaggtctttcctaaggctgcaaggtttaggctggtggcccaggaccatcatcctactgtaataaagatgattgtgaaat

SEQ ID NO: 106262 - DNA, 544 bp, Artificial Sequence
  derived and/or modified sequence
acacttcgccactgcaggggtggagactggctctgttcggatgccggccgggggggagaggtgcaatcctctcctcgcggctggtggttgcgaccacccccactccccaaaggcaggctccggaggcggcgggacagagcgcctgcgaccccagtcggtgctccggggaggtcacctgacgaggagctccaacctgagcggcaagacccagatggacatgggcacctaggggctttggggcagcactggtttaccacgtgtccctccatatcctgaagatgtaggcctccgtggacacacctgtattcctgagctgtgcatggcctctgtcctggttgcacagaggattggacccacagggcagatgggtatgtgaggagcagcgctgtgaggaggaagtcttccccctggccatgaactacctggatcgctacctgtcttgcgtccccacccgaaaggcgcagttgcagctcctgggtgcggtctgcatgctgctggcctccaagctgcgcgagaccacgcccctgaccatcgaaaaactgtg

SEQ ID NO: 106263 - DNA, 540 bp, Artificial Sequence
  derived and/or modified sequence
tttattggtccttgtctctctaagtagcttaccctctctgccgtttttgctccctatcccacctcacttcagcgctcccacccccccgctgctgtgttccccacgctccagacccagcagtgactgtgcgccctcccccaggtatgtgaggagcagcgctgtgaggaggaagtcttccccctggccatgaactacctggatcgctacctgtcttgcgtccccacccgaaaggcgcagttgcagctcctgggtgcggtctgcatgctgctggcctccaagctgcgcgagaccacgcccctgaccatcgaaaaactgtgcatctacaccgaccacgctgtctctccccgccagttgcgggactgggaggtgctggtcctagggaagctcaagtgggacctggctgctgtgattgcacatgatttcctggccttcattctgcaccggctctctctgccccgtgaccgacaggccttggtcaaaaagcatgcccagacctttttggccctctgtgctacagattatacctttgccatgtacccg

SEQ ID NO: 106264 - DNA, 2394 bp, Artificial Sequence
  derived and/or modified sequence
cacaggctagagtgcaatggcgcgatctcggttcactgcaacctccacctcccaggctcaagcgatcctcccgcctcagcctccggagtagctgggattacaggcgggcaccaccacgccccgctagtttttgtatttttagtagagaccgagtttcgccatgttggccaggctggtctcgaacacctaagctcaagcagtccgcggcctcggcctcacaaggtgctgggattacaggcgtgagctaccgcgccagcctcacgtgaccttttgagagtgaagtgttctggggccttcagtggcttggttgtgggccaggaaaacgcgcccggtttcactgagttaaaagaaacctattttaatatgaaaatcggttcttataaagagcataccaggagatcatctacactcgcagggttttccaaacttgtcttattattagtaacacctggctgggcccagcccaatcccagtgacttcactctctggaagaggggcttgggaatctttctcattaaggagctccccagatgattcttctgagcgagtaatgttgggaaaccctggagcatccagcctggtgattttgtgctgagggccgccccgcctgtcaatggcccacttggaagtagagcctggaccacctagtccaagtctatcgctgcatcctgctgccttcgcgccctcgacccgcaagtatttgcgaggtatgtgaggagcagcgctgtgaggaggaagtcttccccctggccatgaactacctggatcgctacctgtcttgcgtccccacccgaaaggcgcagttgcagctcctgggtgcggtctgcatgctgctggcctccaagctgcgcgagaccacgcccctgaccatcgaaaaactgtgcatctacaccgaccacgctgtctctccccgccagttgcgggactgggaggtgctggtcctagggaagctcaagtgggacctggctgctgtgattgcacatgatttcctggccttcattctgcaccggctctctctgccccgtgaccgacaggccttggtcaaaaagcatgcccagacctttttggccctctgtgctacagattatacctttgccatgtacccgccatccatgatcgccacgggcagcattggggctgcagtgcaaggcctgggtgcctgctccatgtccggggatgagctcacagagctgctggcagggatcactggcactgaagtggactgcctgcgggcctgtcaggagcagatcgaagctgcactcagggagagcctcagggaagcctctcagaccagctccagcccagcgcccaaagccccccggggctccagcagccaagggcccagccagaccagcactcctacagatgtcacagccatacacctgtagccctggagaggccctctggagtggccactaagcagaggaggggccgctgccacccacctccctgcctccaggaaccacaccacatctaagcctgaaggggcgtctgttcccccttcacaaagcccaagggatctggtcctacccatccccgcagtgtgcactaaggggcccggccagccatgtctgcatttcggtggctagtcaagctcctcctccctgcatctgaccagcagcgcctttcccaactctagctgggggtgggccaggctgatgggacagaattggatacatacaccagcattccttttgaacgcccccccccacccctgggggctctcatgttttcaactgccaaaatgctctagtgccttctaaaggtgttgtcccttctagggttattgcatttggattggggtccctctaaaatttaatgcatgatagacacatatgagggggaatagtctagatggctcctctcagtactttggaggcccctatgtagtccgtgctgacagctgctcctagagggaggggcctaggcctcagccagagaagctataaattcctctttgctttgctttctgctcagcttctcctgtgtgattgacagctttgctgctgaaggctcattttaatttattaattgctttgagcacaactttaagaggacataatggggtcctggccatcccacaagtggtggtaaccctggtggttgctgttttcctcccttctgctactggcaaaaggatctttgtggccaaggagctgctatagcctggggtggggtcatgccctcctctcccattgtccctctgccccatcctccagcagggaaaatgcagcagggatgccctggaggtggctgagcccctgtctagagagggaggcaagccctgttgacacaggtctttcctaaggctgcaaggtttaggctggtggcccaggaccatcatcctactgtaataaagatgattgtgaaataaaactggctttggcttcttgg

SEQ ID NO: 106265 - DNA, 729 bp, Artificial Sequence
  derived and/or modified sequence
atgaagtccgccgggggcagcgggcgtagccttttaccttcgcccagggtttgtgaagaacagcgttgtgaagaggaggtctttcctcttgcaatgaattatctggacaggtatctgtcctgcgttccgaccaggaaagctcagctgcagctgcttggtgcagtttgcatgctgctagccagcaagctgagagaaaccaccccccttacgattgagaagctgtgtatctacacagaccacgcagtgtctcccaggcagctgcgcgactgggaagttctcgtgttgggaaaactgaaatgggacctcgcagccgtgatcgctcacgactttctggcatttatactgcacagactgagtcttccgcgggaccgccaagctctagtgaagaagcatgctcaaactttcctggcactgtgcgcaacagactacacattcgccatgtatccccctagcatgattgccaccggttccattggggccgccgttcaagggctgggcgcctgctctatgagtggtgacgagctgacggagctgctggccggcatcaccgggactgaggtggactgcctcagggcatgtcaggagcagatagaagcagctcttcgagagagccttcgcgaggcaagccagacatccagtagccccgcaccaaaggcaccgagaggctcctcgagtcagggaccttcccagacatctacacccactgacgtcactgcaatccacctatag

SEQ ID NO: 106266 - DNA, 729 bp, Artificial Sequence
  derived and/or modified sequence
atgaagtctgctgggggcagcggccgcagcctgctgcccagcccccgggtgtgtgaggagcagagatgtgaggaggaggtgttccccctggccatgaactacctggaccgctacctgagctgtgtgcccaccaggaaggcccagctgcagctgctgggcgctgtgtgcatgctgctggccagcaagctgcgggagaccacccccctgaccatcgagaagctgtgcatctacacagaccatgctgtgagcccccggcagctgcgggactgggaggtgctggtgctgggcaagctgaagtgggacctggccgccgtcatcgcccatgacttcctggccttcatcctgcaccggctgagcctgccccgggaccggcaggccctggtgaagaagcacgcccagaccttcctggccctgtgtgccacagactacacctttgccatgtacccacccagcatgattgccaccggcagcatcggggctgctgtgcagggcctgggcgcctgcagcatgtctggagatgagctgacagagctgctggccggcatcactggaacagaggtggactgcctgcgggcctgccaggagcagattgaagctgccctgcgggagagcctgcgggaggccagccagaccagcagcagccctgcccccaaggccccccggggcagcagcagccagggccccagccagaccagcacccccacagatgtgacagccatccacctgtag

SEQ ID NO: 106267 - DNA, 729 bp, Artificial Sequence
  derived and/or modified sequence
atgaagagcgccggcggcagcggccggagcctgctgcccagcccccgtgtctgtgaagagcagaggtgcgaagaggaagtgttcccactggctatgaactatctggatagatatctaagctgtgtccctactcgcaaggcacagctacagctccttggggcagtctgtatgcttctggcgtctaagcttcgtgaaacaactcccctgacgatcgagaaactttgtatctacactgatcatgcggtgtctccccggcaattacgagactgggaggtactggtgctgggaaagttgaaatgggatctagccgctgtcatcgcccatgatttcctagcgtttatcctgcacagactttcactgccaagagacagacaagccctggttaagaagcacgcccaaacctttctggctctctgtgcaaccgattatacttttgctatgtacccaccgagcatgatcgccacaggctccataggcgcagccgttcaaggcctgggggcctgctcaatgagcggcgacgaactgaccgaattgctcgccgggattacagggaccgaagtggactgtctacgagcctgtcaagaacagatagaggccgctcttagagaaagtttgagggaagctagtcagaccagcagttcccccgcccccaaggcccccagagggagctcttcccagggcccttctcaaacatcaacgcctacagatgttacagccattcatctgtag

SEQ ID NO: 106268 - DNA, 729 bp, Artificial Sequence
  derived and/or modified sequence
atgaagtccgctggaggttcgggcagatctttgctcccatcacctcgcgtgtgtgaggagcagcgatgcgaggaggaagtttttcccctggccatgaattacctagatagatatctctcttgtgtgcctaccaggaaggcccaactgcaactgttaggagcggtgtgtatgctcttggcctccaagctgcgggagactacgcccctaacaatcgaaaagctgtgtatctatacagaccacgcagtcagcccccgacagctgcgagattgggaagttctggttcttggtaaactgaagtgggatctcgcagccgtcatagcccacgatttcctggctttcatattgcacagactcagcctcccgagggacaggcaggcactggtgaaaaagcacgcccagactttcctggccctttgcgcaactgactatactttcgccatgtaccccccttcaatgattgctacggggagcatcggtgcagctgtacagggcctgggagcatgttctatgtcaggtgatgagctcaccgaactgctcgccggtatcacaggcactgaagttgattgcctcagggcgtgccaagagcaaatcgaagctgcccttcgggagtcgctgagggaggcttcacaaacctcctctagcccggctcctaaagctccgagaggcagctcaagccaagggccaagtcagacatcaactcccactgacgttaccgctattcacttatag

SEQ ID NO: 106269 - protein, 173 aa, Artificial Sequence
  derived and/or modified sequence
MQRKLKVTSLEPGTVVITEQAVDTCFKAEFEQIVLGKRVIRKTDLNKKLVQELLLCSAELSEFTTVVGNTMCTLDFYEGQGRLDGALCSYTEKDKQAYLEAAYAAGVRNIEMESSVFAAMCSACGLQAAVVCVTLLNRLEGDQISSPRNVLSEYQQRPQRLVSYFIKKKLSKA

SEQ ID NO: 106270 - DNA, 522 bp, Artificial Sequence
  derived and/or modified sequence
atgcagagaaagctgaaggtgaccagcctggagcccggcaccgtggtgatcaccgagcaggccgtggacacctgcttcaaggccgagttcgagcagatcgtgctgggcaagagagtgatcagaaagaccgacctgaacaagaagctggtgcaggagctgctgctgtgcagcgccgagctgagcgagttcaccaccgtggtgggcaacaccatgtgcaccctggacttctacgagggccagggcagactggacggcgccctgtgcagctacaccgagaaggacaagcaggcctacctggaggccgcctacgccgccggcgtgagaaacatcgagatggagagcagcgtgttcgccgccatgtgcagcgcctgcggcctgcaggccgccgtggtgtgcgtgaccctgctgaacagactggagggcgaccagatcagcagccccagaaacgtgctgagcgagtaccagcagagaccccagagactggtgagctacttcatcaagaagaagctgagcaaggcctag

SEQ ID NO: 106271 - DNA, 522 bp, Artificial Sequence
  derived and/or modified sequence
atgcagaggaagctgaaagtgacgtcattggaaccgggcacggtcgtgataacagaacaggctgtagatacctgtttcaaagctgaattcgaacagatcgtgctggggaagcgggtgatacgcaagacagatcttaacaaaaaactcgtgcaagagttactgttgtgctcagctgagctgtctgaattcacgacagtggtaggaaatactatgtgcactcttgatttctacgagggtcagggcaggctggacggcgccctctgctcttatacagagaaggacaaacaggcgtatttggaagcggcctacgctgctggcgtgcggaacatagagatggaaagctcagtgtttgctgcaatgtgctctgcctgcggccttcaagccgccgtggtgtgcgtcacgttactgaatagactcgagggtgatcagatttcgtctcccaggaatgtactgagcgaatatcagcagcggccccagcgtctggttagttacttcataaagaagaaattatctaaggcatag

SEQ ID NO: 106272 - DNA, 522 bp, Artificial Sequence
  derived and/or modified sequence
atgcagaggaagctgaaggtgaccagcctggagcccggcaccgtggtgatcacagagcaggccgtggacacctgcttcaaggccgagtttgagcagatcgtgctgggcaagagggtcatcaggaagacagacctgaacaagaagctggtgcaggagctgctgctgtgcagcgctgagctgtctgagttcaccaccgtggtgggcaacaccatgtgcaccctggacttctatgagggccagggccgcctggatggagccctgtgcagctacacagagaaggacaagcaggcctacctggaggccgcctatgctgctggggtgaggaacatcgagatggagagctctgtgtttgctgccatgtgcagcgcctgtggcctgcaggccgctgtggtgtgtgtgaccctgctgaaccggctggagggggaccagatcagcagccccagaaatgtgctgtctgagtaccagcagaggccccagaggctggtgtcctacttcatcaagaagaagctgagcaaggcctag

SEQ ID NO: 106273 - DNA, 522 bp, Artificial Sequence
  derived and/or modified sequence
atgcagcggaagctgaaggtgaccagcctggagcccggcaccgtggtgatcacagagcaggccgtcgacacctgcttcaaggctgaattcgagcagattgtgttgggaaaacgtgtcattcggaagaccgaccttaataaaaagctggtccaggaactcctcctgtgttctgctgaattaagtgagttcaccacagtggtaggaaataccatgtgtacgctggatttttacgagggacaaggtagattagacggtgcactttgctcgtataccgagaaagataagcaagcctatcttgaagcggcctatgccgctggcgtgcggaatatcgagatggaatcgtctgtgtttgccgccatgtgctcagcctgtggactgcaagctgccgtggtttgcgtgaccctgttgaatagactggaaggagaccaaatcagcagcccacgtaatgttttatctgagtatcaacagcgccctcagagactcgtcagctattttattaaaaagaagttatccaaggcatag

SEQ ID NO: 106274 - DNA, 522 bp, Artificial Sequence
  derived and/or modified sequence
atgcagcgcaagctgaaggtgacctctcttgagcctgggactgttgtcattactgaacaagccgtagatacctgcttcaaagcagaattcgagcagatagtgctgggcaaaagggtgattcgcaagaccgacctgaacaagaagctggtccaagaattactgttgtgcagcgctgaactgtcggagtttacaaccgtagtcggcaatacaatgtgcactctcgatttttatgagggccagggacggctcgatggtgcgttgtgtagttacaccgaaaaagacaagcaggcctacctggaggctgcctatgcggcaggggtgcgaaacattgaaatggaatcatcagtgttcgcggctatgtgttcagcatgtggacttcaggccgctgtggtttgcgtcacccttcttaaccgcttggaaggggatcagatctcatctccaaggaatgtccttagcgagtaccagcagaggccgcagaggttggtgagctatttcattaagaagaaactgtccaaagcctag

SEQ ID NO: 106275 - DNA, 778 bp, Artificial Sequence
  derived and/or modified sequence
ggatggcgccgcgggtgtagcggctctctgcgcaggccgagtgggcttggtgaggtgactcgcggtcgcgggtgactcgccggcaggacactgcctggaacgcctggagcgcctcccactgcagacgtctgtccgcctccagccgctctcctctgacgggtcctgcctcagttggcggaatggcggccacgggagccaatgcagagaaagctgaaagtcacaagtctggagcccggcactgtggtcataacagagcaggcagtggatacctgcttcaaggcagagtttgagcagattgtcctggggaagcgggtcatccggaaaacggaccttaacaagaagctggtgcaggagctgttgctgtgttctgcagagctgagcgagttcaccacagtggtggggaacaccatgtgcaccttggacttctatgaagggcaaggccgtctggatggggctctctgctcctacacggagaaggacaagcaggcgtatctggaggcagcctatgcagccggcgtccgcaatatcgagatggagtcctcggtgtttgccgccatgtgcagcgcctgcggcctccaagcggccgtggtgtgtgtcaccctcctgaaccgcctggaaggggaccagatcagcagccctcgcaatgtgctcagcgagtaccagcagaggccgcagcggctggtgagctacttcatcaagaagaaactgagcaaggcctgagcgctgccctgcacctccgcagacctgctgtgatgacttgccattaaaagcattgtcc

SEQ ID NO: 106276 - DNA, 291 bp, Artificial Sequence
  derived and/or modified sequence
atgtacccccccagcatgatcgccaccggcagcatcggcgccgccgtgcagggcctgggcgcctgcagcatgagcggcgacgagctgaccgagctgctggccggcatcaccggcaccgaggtggactgcctgagagcctgccaggagcagatcgaggccgccctgagagagagcctgagagaggccagccagaccagcagcagccccgcccccaaggcccccagaggcagcagcagccagggccccagccagaccagcacccccaccgacgtgaccgccatccacctgtag

SEQ ID NO: 106277 - DNA, 33 bp, Artificial Sequence
  derived and/or modified sequence
atgtacccccccagcatgatcgccaccggctag

SEQ ID NO: 106278 - DNA, 291 bp, Artificial Sequence
  derived and/or modified sequence
atgtacccgccttccatgattgccacaggctctataggcgcggccgtccagggactgggagcctgcagcatgagcggcgacgaattaactgaactgctcgctggcattacgggaactgaagtagactgtttacgtgcatgtcaggaacagattgaagccgcattgcgggaatccctcagagaggcaagtcagacgtcttcatcaccagcccctaaggcacctcgcggttcctctagtcagggaccatcacagacatccactccaaccgatgtcaccgctatccatctgtag

SEQ ID NO: 106279 - DNA, 33 bp, Artificial Sequence
  derived and/or modified sequence
atgtaccctcccagtatgatcgctacaggatag

SEQ ID NO: 106280 - DNA, 291 bp, Artificial Sequence
  derived and/or modified sequence
atgtacccacccagcatgattgccaccggcagcatcggggctgctgtgcagggcctgggcgcctgcagcatgtctggagatgagctgacagagctgctggccggcatcactggaacagaggtggactgcctgcgggcctgccaggagcagattgaagctgccctgcgggagagcctgcgggaggccagccagaccagcagcagccctgcccccaaggccccccggggcagcagcagccagggccccagccagaccagcacccccacagatgtgacagccatccacctgtag

SEQ ID NO: 106281 - DNA, 33 bp, Artificial Sequence
  derived and/or modified sequence
atgtacccacccagcatgattgccactggatag

SEQ ID NO: 106282 - DNA, 291 bp, Artificial Sequence
  derived and/or modified sequence
atgtacccccccagcatgatcgccaccggcagcatcggcgccgccgtgcagggcctcggcgcctgcagcatgtccggagatgagttgacagagcttcttgccggtataacgggtaccgaggtggattgtttgagggcatgccaggaacagattgaagcagccttgcgcgaaagtctccgtgaggcctcccagacctctagctcccccgctcctaaggctccccgcgggtcttcctcgcaggggccaagccagacctctacccccactgatgtgaccgctatccacttgtag

SEQ ID NO: 106283 - DNA, 291 bp, Artificial Sequence
  derived and/or modified sequence
atgtaccctcccagtatgatcgctactgggtcaattggcgcagccgtgcaagggctcggagcatgctctatgagcggcgatgaactgactgaactgctggctggtattacaggaactgaggtggactgtctgagggcatgccaggaacagattgaggccgcacttcgagagagcctccgggaggcctcccagacctccagtagcccagctcccaaggcgccacgcggaagtagcagtcaagggccatctcagaccagcacgccaacagatgtcacggctatccatctgtag

SEQ ID NO: 106284 - DNA, 33 bp, Artificial Sequence
  derived and/or modified sequence
atgtaccccccttccatgattgcaaccggctag

SEQ ID NO: 106285 - protein, 830 aa, Artificial Sequence
  derived and/or modified sequence
MKRGRLPSSSEDSDDNGSLSTTWSQNSRSQHRRSSCSRHEDRKPSEVFRTDLITAMKLHDSYQLNPDEYYVLADPWRQEWEKGVQVPVSPGTIPQPVARPKKYIVSSGSEPPELGYVDIRTLADSVCRYDLNDMDAAWLELTNEEFKEMGMPELDEYTMERVLEEFEQRCYDNMNHAIETEEGLGIEYDEDVVCDVCQSPDGEDGNEMVFCDKCNICVHQACYGILKVPEGSWLCRTCALGVQPKCLLCPKKGGAMKPTRSGTKWVHVSCALWIPEVSIGSPEKMEPITKVSHIPSSRWALVCSLCNEKFGASIQCSVKNCRTAFHVTCAFDRGLEMKTILAENDEVKFKSYCPKHSSHRKPEESLGKGAAQENGAPECSPRNPLEPFASLEQNREEAHRVSVRKQKLQQLEDEFYTFVNLLDVARALRLPEEVVDFLYQYWKLKRKVNFNKPLITPKKDEEDNLAKREQDVLFRRLQLFTHLRQDLERVRNLTYMVTRREKIKRSVCKVQEQIFNLYTKLLEQERVSGVPSSCSSSSLENMLLFNSPSVGPDAPKIEDLKWHSAFFRKQMGTSLVHSLKKPHKRDPLQNSPGSEGKTLLKQPDLCGRREGMVVPESFLGLEKTFAEARLISAQQKNGVVMPDHGKRRDNRFHCDLIKGDLKDKSFKQSHKPLRSTDVSQRHLDNTRAATSPGVGQSAPGTRKEIVPKCNGSLIKVNYNQTAVKVPTTPASPVKNWGGFRIPKKGERQQQGEAHDGACHQHSDYPYLGLGRVPAKERAKSKLKSDNENDGYVPDVEMSDSESEASEKKCIHTSSTISRRTDIIRRSILAS

SEQ ID NO: 106286 - DNA, 2493 bp, Artificial Sequence
  derived and/or modified sequence
atgaagagaggcagactgcccagcagcagcgaggacagcgacgacaacggcagcctgagcaccacctggagccagaacagcagaagccagcacagaagaagcagctgcagcagacacgaggacagaaagcccagcgaggtgttcagaaccgacctgatcaccgccatgaagctgcacgacagctaccagctgaaccccgacgagtactacgtgctggccgacccctggagacaggagtgggagaagggcgtgcaggtgcccgtgagccccggcaccatcccccagcccgtggccagacccaagaagtacatcgtgagcagcggcagcgagccccccgagctgggctacgtggacatcagaaccctggccgacagcgtgtgcagatacgacctgaacgacatggacgccgcctggctggagctgaccaacgaggagttcaaggagatgggcatgcccgagctggacgagtacaccatggagagagtgctggaggagttcgagcagagatgctacgacaacatgaaccacgccatcgagaccgaggagggcctgggcatcgagtacgacgaggacgtggtgtgcgacgtgtgccagagccccgacggcgaggacggcaacgagatggtgttctgcgacaagtgcaacatctgcgtgcaccaggcctgctacggcatcctgaaggtgcccgagggcagctggctgtgcagaacctgcgccctgggcgtgcagcccaagtgcctgctgtgccccaagaagggcggcgccatgaagcccaccagaagcggcaccaagtgggtgcacgtgagctgcgccctgtggatccccgaggtgagcatcggcagccccgagaagatggagcccatcaccaaggtgagccacatccccagcagcagatgggccctggtgtgcagcctgtgcaacgagaagttcggcgccagcatccagtgcagcgtgaagaactgcagaaccgccttccacgtgacctgcgccttcgacagaggcctggagatgaagaccatcctggccgagaacgacgaggtgaagttcaagagctactgccccaagcacagcagccacagaaagcccgaggagagcctgggcaagggcgccgcccaggagaacggcgcccccgagtgcagccccagaaaccccctggagcccttcgccagcctggagcagaacagagaggaggcccacagagtgagcgtgagaaagcagaagctgcagcagctggaggacgagttctacaccttcgtgaacctgctggacgtggccagagccctgagactgcccgaggaggtggtggacttcctgtaccagtactggaagctgaagagaaaggtgaacttcaacaagcccctgatcacccccaagaaggacgaggaggacaacctggccaagagagagcaggacgtgctgttcagaagactgcagctgttcacccacctgagacaggacctggagagagtgagaaacctgacctacatggtgaccagaagagagaagatcaagagaagcgtgtgcaaggtgcaggagcagatcttcaacctgtacaccaagctgctggagcaggagagagtgagcggcgtgcccagcagctgcagcagcagcagcctggagaacatgctgctgttcaacagccccagcgtgggccccgacgcccccaagatcgaggacctgaagtggcacagcgccttcttcagaaagcagatgggcaccagcctggtgcacagcctgaagaagccccacaagagagaccccctgcagaacagccccggcagcgagggcaagaccctgctgaagcagcccgacctgtgcggcagaagagagggcatggtggtgcccgagagcttcctgggcctggagaagaccttcgccgaggccagactgatcagcgcccagcagaagaacggcgtggtgatgcccgaccacggcaagagaagagacaacagattccactgcgacctgatcaagggcgacctgaaggacaagagcttcaagcagagccacaagcccctgagaagcaccgacgtgagccagagacacctggacaacaccagagccgccaccagccccggcgtgggccagagcgcccccggcaccagaaaggagatcgtgcccaagtgcaacggcagcctgatcaaggtgaactacaaccagaccgccgtgaaggtgcccaccacccccgccagccccgtgaagaactggggcggcttcagaatccccaagaagggcgagagacagcagcagggcgaggcccacgacggcgcctgccaccagcacagcgactacccctacctgggcctgggcagagtgcccgccaaggagagagccaagagcaagctgaagagcgacaacgagaacgacggctacgtgcccgacgtggagatgagcgacagcgagagcgaggccagcgagaagaagtgcatccacaccagcagcaccatcagcagaagaaccgacatcatcagaagaagcatcctggccagctag

SEQ ID NO: 106287 - DNA, 2493 bp, Artificial Sequence
  derived and/or modified sequence
atgaaacgtgggaggctgccgtccagctctgaggattcagatgacaatggctcattgtccactacatggagccagaatagccgctcccaacatcggcggtcatcttgttcacggcacgaggaccgaaagccaagtgaggtcttccgtacggacctgataacggcaatgaagctccacgatagttatcagcttaaccccgatgagtactatgtcctggcggatccttggaggcaggaatgggaaaagggggtccaagtgcccgtttctcccggaaccataccccagccagtggctagacctaagaagtatattgtgtctagtggctccgaaccgcccgagctcgggtacgtcgacattagaaccctggcagattcagtgtgccgttacgaccttaacgacatggatgctgcgtggcttgaactgacaaacgaggaatttaaagaaatggggatgcctgagctggatgagtatacaatggaaagagtgctggaggaattcgagcagaggtgttacgataatatgaatcatgcaattgagacagaagagggcctgggaatcgagtatgatgaagacgtggtctgtgacgtctgccagagccctgatggggaagacggaaatgagatggtgttttgcgacaaatgtaacatctgtgtgcaccaagcttgttacggaatcctcaaggtccccgaagggagttggctgtgtagaacatgtgccctgggtgtgcaaccgaaatgtctcctttgccctaagaaaggcggagccatgaaacctacacgctccggtacgaaatgggtccatgtatcctgcgctctttggataccggaggtctccattggctctcctgagaagatggaaccaatcaccaaggtgtctcacattcctagttcccgatgggctctcgtctgctcgttgtgtaatgagaaattcggggcctctattcagtgctccgtgaagaattgccggaccgcattccacgtcacatgcgcttttgaccggggcttagaaatgaaaaccatactggccgagaatgacgaagtcaaattcaagagctattgtcccaaacatagtagtcacagaaagccagaagaatccttgggcaagggagccgcgcaggaaaacggagctcccgagtgctctcccaggaacccactggaaccttttgcctccttggaacagaaccgcgaggaagctcatcgagtcagtgtccgcaaacagaagctgcagcagttggaggacgaattttataccttcgtgaatctgctggacgtggctagggctttgcgcctcccagaagaagtggtggatttcctgtaccagtactggaagctgaaacggaaggtgaattttaataaaccacttataacccctaagaaggacgaggaagataatcttgcaaaaagggaacaggacgttctgtttaggcgcctgcaactgtttacacatctcagacaggatctggaacgtgtgcgcaacttgacctacatggtcactaggagagagaaaattaagaggtctgtgtgtaaagttcaggagcaaatcttcaatctgtatacaaagttgctggaacaggagagagtcagcggcgtgccctcttcttgctcttccagctccctcgagaacatgctgttgtttaactcgccttccgtggggccagatgctccaaagatcgaagacttaaagtggcatagcgcgttctttcgaaaacagatgggaacatccttagttcattctctgaagaaaccacataagcgagaccccctgcaaaatagtcccgggtcagaaggcaagacccttctcaagcaaccagacttgtgcggcagaagagagggcatggtcgtgcctgagagttttctggggctggagaagaccttcgcagaggcgcggctgattagcgcacaacagaaaaacggtgtggtcatgcctgatcatggaaagcggagggacaacagatttcactgtgatttgattaaaggtgatctcaaggacaaaagttttaaacagagccataaaccactcaggtcaactgatgttagtcagaggcatttagataacaccagagcggctacatcacccggggtaggccagtctgcgccgggcactagaaaagaaattgtgccgaagtgcaatggttccctgattaaggtgaattacaatcagaccgccgtgaaggtgcccaccactcccgccagccccgtcaagaactgggggggttttcgcattcctaagaagggagagaggcagcagcagggggaagcccatgacggagcctgtcaccagcactctgattacccctatctgggccttggcagagtgcccgccaaagagcgggctaaatctaaactcaagagcgacaatgagaacgacgggtatgttcctgacgtagagatgagtgacagtgagtccgaggcttcagagaaaaaatgtattcacactagctccacaatcagtagacgcacagacattattagaaggagcattttggcctcttag

SEQ ID NO: 106288 - DNA, 2493 bp, Artificial Sequence
  derived and/or modified sequence
atgaagaggggccgcctgcccagcagcagtgaagattctgatgacaatggcagcctgagcaccacctggagccagaacagccgcagccagcaccggcgcagcagctgcagcagacatgaggacaggaagcccagcgaggtgttcagaacagacctgatcacagccatgaagctgcatgacagctaccagctgaacccagatgagtactacgtgctggccgacccctggaggcaggagtgggagaagggcgtgcaggtgcctgtgtccccaggcaccatcccccagcctgtggcccggcccaagaagtacatcgtgagcagcggcagcgagcccccagagctgggctacgtggacatccgcaccctggccgacagcgtgtgccgctatgacctgaatgacatggatgctgcctggctggagctgaccaatgaggagttcaaggagatgggcatgcctgagctggatgagtacaccatggagcgggtgctggaggagtttgagcagcgctgctatgacaacatgaaccacgccatcgagacagaggagggcctgggcatcgagtatgatgaagatgtggtgtgtgatgtgtgccagagcccagatggagaagatggaaatgagatggtgttctgtgacaagtgcaacatctgtgtgcaccaggcctgctacggcatcctgaaggtgcctgagggctcctggctgtgcaggacctgtgccctgggcgtgcagcccaagtgcctgctgtgccccaagaagggcggggccatgaagcccaccaggagcggcaccaagtgggtgcacgtgtcctgtgccctgtggatccctgaggtgtccatcggcagccctgagaagatggagcccatcaccaaggtgagccacatccccagcagccgctgggccctggtgtgcagcctgtgcaatgagaagtttggagccagcatccagtgcagcgtgaagaactgcaggacagccttccacgtgacctgtgcctttgaccggggcctggagatgaagaccatcctggctgaaaatgatgaggtgaagttcaagagctactgccccaagcacagcagccacaggaagccagaggagagcctgggcaagggggccgcccaggagaatggagcccctgagtgcagccccaggaaccccctggagccctttgccagcctggagcagaaccgggaggaggcccaccgggtgtctgtgaggaagcagaagctgcagcagctggaggatgagttctacacctttgtgaacctgctggatgtggcccgggccctgcggctgcctgaggaggtggtggacttcctgtaccagtactggaagctgaagaggaaggtgaacttcaacaagcccctcatcacccccaagaaggatgaggaggacaacctggccaagcgggagcaggatgtgctcttccggcggctgcagctgttcacccacctgcggcaggacctggagcgggtgaggaacctgacctacatggtgacccggcgggagaagatcaagaggtctgtgtgcaaggtgcaggagcagatcttcaacctgtacaccaagctgctggagcaggagcgggtgtctggagtgcccagcagctgcagcagcagcagcctggagaacatgctgctcttcaacagccccagcgtgggcccagatgcccccaagattgaggacctgaagtggcacagcgccttcttcaggaagcagatgggcaccagcctggtgcacagcctgaagaagccccacaagagggaccccctgcagaacagccctggcagcgagggcaagaccctgctgaagcagcctgacctgtgtggccggcgggagggcatggtggtgcctgagagcttcctgggcctggagaagacctttgctgaggcccggctcatcagcgcccagcagaagaatggagtggtgatgccagaccacggcaagagaagagacaaccgcttccactgtgacctgatcaagggggacctgaaggacaagagcttcaagcagagccacaagcccctgcggagcacagatgtgtcccagaggcacctggacaacacccgggccgccaccagccctggggtgggccagagcgcccctggcaccaggaaggagatcgtgcccaagtgcaatggcagcctcatcaaggtgaactacaaccagacagctgtgaaggtgcccaccaccccagccagccctgtgaagaactggggcggcttccgcatccccaagaagggggagcggcagcagcagggcgaggcccatgatggagcctgccaccagcacagcgactacccctacctgggcctgggccgggtgcctgccaaggagcgggccaagagcaagctgaagagtgacaatgaaaatgatggctacgtgcctgatgtggagatgtctgacagcgagagcgaggccagcgagaagaagtgcatccacaccagcagcaccatcagcagaagaacagacatcatccgccgcagcatcctggccagctag

SEQ ID NO: 106289 - DNA, 2493 bp, Artificial Sequence
  derived and/or modified sequence
atgaagcggggccggctgcccagcagcagcgaggacagcgacgacaacggatctctctccactacctggagccagaactcacgaagtcagcatagaaggtcatcctgtagccgccatgaggatcgtaagcctagtgaggtattccgaaccgacctcattacggctatgaagctacacgattcataccagctgaatccagacgagtattatgttctagccgatccttggcgccaggagtgggaaaaaggagttcaggtccccgtctcacccggcactatccctcagcctgtggctagaccaaagaaatatatcgtgtcatctggtagcgaaccacctgagcttggttacgtggatatccgaaccttagccgatagtgtttgccgatacgatcttaacgacatggacgctgcctggttggagcttaccaacgaagagtttaaggagatgggcatgcctgaactcgacgagtacaccatggaacgggtgctggaagagttcgagcaaagatgctacgataacatgaaccacgctattgagacggaagaaggactcggtatcgaatacgatgaggacgtcgtgtgtgacgtgtgccagtccccagacggagaggatggtaatgagatggtgttttgcgataagtgtaatatttgtgtgcatcaggcttgctacggcatcctgaaggtgcccgaaggaagctggttatgcagaacatgcgctctgggtgtgcagccgaagtgtctcctgtgccccaagaaagggggtgccatgaagcctacacgctccggcacaaaatgggtgcatgttagttgcgcactttggatccctgaggttagtattggttcacctgaaaagatggagcctattaccaaggtgagtcatattcctagcagccggtgggccctggtctgcagcttgtgcaatgagaagttcggcgcgtccatacagtgttccgtaaagaactgcagaactgctttccatgtcacctgtgcgttcgaccgtggtctggagatgaaaacaattctagcggaaaatgatgaagtcaaattcaagagttactgtcctaagcatagctcgcatcgaaagcctgaggagagccttggcaaaggagctgcccaggagaacggagcacctgaatgctctccccgcaatccacttgaaccatttgcatccctcgaacagaaccgggaggaggcccatagggtcagtgtgaggaaacaaaaactccaacagttggaggacgaattctatacctttgtgaatttactggacgttgcgcgagctctgcgcctgccagaagaggtcgtcgattttctgtatcaatactggaaattaaaacggaaggttaacttcaataagccattaattactcccaaaaaggacgaggaagataacctagctaagcgcgagcaggacgttttatttcggagactgcagctgtttacgcatcttcgccaggacctggaacgggtaagaaacttgacatacatggtcacgagacgcgagaaaatcaaacgttctgtgtgcaaagtccaggaacagattttcaatttgtataccaaactgctggaacaggaacgcgtcagcggtgtccccagcagttgctcctcctcctcacttgaaaatatgctgctctttaattctcccagcgtcggcccagacgcgcccaagatcgaagatctaaagtggcactccgcctttttccggaagcaaatgggaaccagcctggttcattctttaaagaaacctcacaagagggatccattgcagaatagtcccggctctgaagggaaaactctgctgaagcagccagacctgtgcggaaggcgtgagggtatggttgtgcctgaatcattcctgggactggagaagacattcgctgaggctcgcctcatatcggcacaacagaagaacggcgtggttatgcctgaccacgggaagagaagggacaatcggtttcattgtgatttaattaagggtgatctgaaggataaatccttcaagcagtctcacaaaccgttacgcagcaccgatgttagccagaggcatctggacaataccagagccgccacgagtcccggagtgggccaaagcgcccccggaactagaaaagaaattgtacctaagtgtaatggctccctgatcaaagtcaactataaccagacagctgtcaaagtgcccacaacgccggcgagtcctgtcaagaattggggaggtttccggatacctaagaaaggtgaacgccaacagcaaggagaagctcacgacggggcctgtcatcagcacagtgactacccttaccttggactgggccgcgtccccgcaaaggagagggctaagtcaaagctcaagtcggacaacgaaaatgacggctacgtgcctgacgtcgaaatgagtgattccgaaagcgaagcttccgaaaagaaatgtattcatactagttctacgatttcccgccggaccgatatcatacgtagaagcatccttgcttcatag

SEQ ID NO: 106290 - DNA, 2493 bp, Artificial Sequence
  derived and/or modified sequence
atgaagcggggacggctcccctcatccagcgaagattccgacgataacggatctctgagcacaacatggtctcagaacagcagaagtcagcataggcgttcttcctgctcgcgacacgaagaccgcaagccctctgaggtgttccgtaccgatctgattacagctatgaagctgcacgattcctaccaactaaaccccgatgagtattatgtgttagccgatccttggcgacaggagtgggagaagggagtccaagtccccgtcagtccgggtacaattcctcagccggttgctcgccctaaaaagtacattgttagttcagggagtgagccacccgagctgggttacgtggatatcagaaccctggccgattccgtttgccggtacgatctcaatgatatggacgcagcatggctagagctaactaatgaggaattcaaggagatgggcatgcccgagctcgacgaatatactatggagagagtactcgaggaatttgagcaacgctgttacgataacatgaaccacgctattgaaactgaagagggcctgggaatcgaatatgatgaagacgtggtatgtgacgtctgtcagtcgcctgacggggaggacggcaatgaaatggtcttctgcgataagtgcaatatctgcgttcaccaggcttgctacggaatactgaaagtgccagaggggagctggctgtgccgcacatgtgctctcggtgtacagcccaagtgcttgctgtgcccaaaaaaaggaggagctatgaaacccacccgctctggaactaaatgggtgcacgtgtcgtgtgcgctgtggatccctgaagtcagtataggatctcctgagaaaatggaaccaattacaaaagtcagccacatccccagcagcagatgggccctggtgtgctctctgtgcaatgagaaatttggggcatcgatccaatgctcagtgaaaaactgcagaactgcatttcatgttacctgcgcgtttgacagaggattggaaatgaaaacgatcttggctgagaatgacgaggtcaaatttaagtcctattgccccaaacatagcagtcaccgcaagcccgaagaaagtctgggtaagggcgcagcccaggagaatggcgctcccgagtgctcccctcggaatccgttggagccctttgcctccctagagcaaaacagggaagaagcgcaccgggtctcagtgaggaagcaaaaactccagcagctggaagacgaattctacacctttgttaatctgctggacgtggcaagggccctccgcctcccagaggaggttgtggacttcctgtatcagtattggaagcttaagcgcaaggttaactttaataaaccgttgatcacgccaaaaaaggacgaagaggataatcttgcaaagcgcgagcaggacgtccttttccggcgtctgcaactgtttacccatctgcggcaagacctggagagggtgcggaacctgacttatatggtaacccgtagggagaaaatcaagcggtccgtatgcaaggtgcaggaacaaatctttaacctttacacgaagctccttgagcaagaacgcgttagcggagttccttcctcctgctcctctagctctctggagaacatgctcctattcaattcgccatcagtggggccagacgcacccaagattgaggatctgaaatggcactccgccttcttccgcaaacagatgggtactagcctggtgcattcgctgaagaaacctcacaaacgtgatcccctccaaaattcccctggctcagaagggaaaacattgctcaagcaacctgacttgtgtggacggcgtgaagggatggtcgttccagagtcttttttgggcttagaaaagactttcgcggaggcgcgtctgatcagcgcacagcagaagaatggggtcgtgatgcctgatcacggcaagagaagggataatcgctttcattgcgacttgattaaaggagatctgaaagataagtccttcaaacaatcacataaaccactgcgaagtacagatgtctcccagagacatctggacaacactagagcagctacatcccccggagtgggccaatctgctccgggaactcggaaggagatcgtgcctaaatgtaatggaagcctcattaaagtgaactacaatcagaccgccgtcaaagtgccaaccactcctgctagcccagtcaagaattggggcggattccggatccccaagaaaggagagcgtcagcagcaaggcgaggcacatgacggggcttgtcatcagcattcagactacccctatttaggtcttggacgcgttccagcaaaggaacgggcaaaaagtaaattgaaaagcgataacgagaatgatgggtatgtgcctgacgtagaaatgagcgattcagagtcagaggccagcgaaaagaagtgtatccatacctcctccaccatctcacggagaaccgatataatccgaagatctatcctggcttcctag

SEQ ID NO: 106291 - DNA, 5544 bp, Artificial Sequence
  derived and/or modified sequence
atgcagctccgagcgagcgagcggcgcccagcccagcgcctcggccgaacccctccgcagcaggctgcctgctgtttcccggggagatcatgaaacgaggtcgccttcccagcagcagtgaggattctgacgacaatggcagcctgtcaactacttggtcccagaattcccgatcccagcataggagaagctcctgctccagacatgaagatcgaaagccttcagaggtgtttaggacagacctgatcactgccatgaagttgcatgactcctaccagctgaatccggatgagtactatgtgttggcagatccctggagacaggaatgggagaaaggggtccaggtgcctgtgagcccggggaccatccctcagcctgtggccaggcccaagaagtacatcgtgtcatcaggctctgagcctcccgagttgggctatgtggacatccggacgctggctgacagcgtgtgtcgctatgacctcaatgacatggatgctgcatggctggaactgaccaatgaagaatttaaggagatgggaatgcctgaactagatgaatacaccatggagagggtcctagaggaatttgagcagcgatgctacgacaatatgaatcatgccatagagactgaggaaggcctggggatcgaatatgatgaagatgttgtctgtgatgtctgccagtctcctgatggtgaggacggcaatgagatggtgttctgtgacaaatgcaacatctgtgtgcaccaggcctgttatggaatcctcaaggtaccagagggcagctggctgtgccggacatgtgccctgggggttcagccaaaatgtctgctgtgtccgaagaagggtggagctatgaagcccacccgtagcggaaccaagtgggtccacgttagctgtgctctgtggatccctgaggtgagcattggcagcccagagaagatggagcccatcaccaaggtgtcacacattcccagcagccggtgggcgctagtgtgcagcctctgcaatgagaagtttggggcctctatacagtgctctgtgaagaactgccgcacagccttccatgtgacctgtgcttttgaccggggcctggagatgaagaccatcttagcagagaatgatgaagtcaagttcaagtcctattgcccaaagcacagctcacataggaaacccgaggagagtcttggcaagggggctgcacaggagaatggggcccctgagtgttccccccggaatccgctggagccctttgccagccttgagcagaaccgggaggaggcccaccgggtgagtgtccgtaagcagaagctgcagcagttggaggatgagttctacaccttcgtcaacctgctggatgttgccagggctctgcggctgcctgaggaagtagtggatttcctgtaccagtactggaagttgaagaggaaggtcaacttcaacaagcccctgatcaccccaaagaaagatgaagaggacaatctagccaagcgggagcaggatgtcttatttaggaggctgcagctgttcacgcacctgcggcaggacctggagagggttcggaacctcacttacatggtgacccgcagggaaaagattaaacggtctgtgtgcaaagtccaggaacagatattcaatctttacactaagcttttggagcaagaaagagtttcaggtgtgccttcttcctgctcctcctcctcactggaaaacatgcttttgtttaacagtccttctgttggccctgatgctcccaagatagaggacttgaagtggcattctgcattcttcagaaaacaaatgggtacttccttggttcattcgctgaaaaagccccataagcgagatcctttgcagaatagccctggaagtgaaggcaaaaccctgctgaagcagccagacctgtgtggtagaagggaggggatggtggtcccagagagctttttgggtttagaaaagacctttgcagaagcacgtctcatatcagcacaacagaaaaatggtgtggtgatgccagaccatgggaaaagaagagacaatcgttttcattgtgatctcattaaaggagacttaaaggacaaatcttttaaacagagtcacaagcctctcaggtccacagatgtgtcccagaggcatctggacaacacaagagctgccacctcccctggagtggggcagtcagcacctggcacaaggaaggagatagtgcccaagtgcaatggctccctaatcaaagtaaactataatcagactgcagtcaaagtgcctacaacacctgccagcccagtgaaaaactggggaggattccggattccaaagaagggggaacggcagcagcagggagaggcccacgatggggcctgccaccagcactcagactacccatatttgggcttaggccgagttccagccaaggaaagggcaaaaagcaaattaaaatccgacaatgagaatgacgggtatgtccccgatgtggaaatgagtgactcagagagtgaggcatcagaaaagaaatgtatacacaccagcagcactatcagcagaaggacagacattatcaggagaagcatcttggcttcttgatgcaacagagatgatgcggaagccctttgggctcgtcattgggtttgctagaggagagctctgatgtgggggagaagcagaaacccattaatcctgagctacacaaacacatttacttgcaattcagattaatttttttccagagtcatttttaaatcatttttgtgagaagtttgtgttatttgcaacttgttgaggaaacagaagagtagattgtaaccataagacactgctaagactagaacccgaactgaacactaaaataaaaatgaaatgttttaaagaaggcaaggcttaaataagcctcatgaatttttatagccctctgcattcttcccaaagcacaaactcatggttacctgaatatagggaaccagatatggttcttgagaaaccctcatggtaccattcacagcccataaagtttattttctaggactgtggtagatcttgaaatcatatttatatttggccctcaaggctatttttgttgcattatagcatataggcagcagctctgaagcttcagtaacactaagaaatttatgtgtaaatatagcagtcagggaagagaattttaaaaaaggtcattattgaagaagctgaggggacagggtagagctgctgcaatatggagatttagggtaatatggcaaggtcctgctgcttgaagcctgtgagtgggttgtggatatgggactggtggagagtgagactgttaggaaagttgtatctatgaataagggcagttgaagtagaatttttaccagtccacttgaccttcttcttccctaaccactggctcttgagccagcttgggatttccctggccattgccaatacctggccatctggcttccaatagtacagtggctactcaagttcaagcgaagaacttccagactctggtgactgttacttcccagagccaaccactagtgcatatgttagggaatctgggcttccaacatgaatggattccttaagaaaaaggaaaaaaaaaaaaaaaagaaaaaaagaaaaaaaaaagaaaaaagaaaaaaagagaaaaaagcgaaataggttatattttaaaaacaatagaaaggcaataagttgcgataagctcttactattgaccaaggttatacaggaaagagactgaagtgtacccttgaataggttttctgtagtcagagttctaaactctaatttgtaacttggactttctaattgcaaatggcaataactattaagttatcagcaataataaatttagcattaaatttgagtacaatgttttgtttttgcactccccatagtgcgtatgtattaagacagtggatagtgtttaggtcctgttaattttctttggaattcaatgtggttgtgaatcaaacttaaggaaggaacgtttaaatagcaatgagatacagaattatgggcctttggaacaagcccgacttcccctaaattctccttagtttgttaataccagtattcagattcctgattcatttatacatctgtttccatatggcagggacattatgatacttaatgaataatgctttgaggagttctgcagttaactttcaagtcttccagatgattgtcaacaacaaaaaaggcttattgaatcccatcttgctatgcaagttttatcagatgatcaaatagtagatctgatacatccccattgtatgtacgacattttcaaaccaagtcttaacttttcaaggacattttagtagctaattcaggggagggggaagaatgatgcaggtttttagattgactgactatttttgagttatggggctcattttgaaagactgctgtccagatcagcttgttgctgcagataatagaaggttcttatgaatccaagttgtatattcacttgtaggataatttaaaaattagattttttttgcatatgagcaaaaaccttttgctggatacaggagaaggttggactttatctacagttatcttttgattacagcaacagctctgggtgagagtagaatttatagagggataatttgtcaagccatagaaagaaaatctaaattaatctagtaagtgtatgacctctcaccattttaagaggtatcagattcatttgcactattaggaatgctagttttgtgcaaaaataatgccttacctgttttttccccacatttaggttgaaaagctttcaaatgttccaagttatgctgaaccaaaaaaaacaaaacaaaaacaaaacaaaaaatattaaaaaaaacccacacaaaaacaaaacacacaaaaataaaaagcccacactttttattcctgcttcgaaatgcaaatggatagagcacggtttctctgacagtataatgatagctttgtgagttagtttcatgtcatgctgggaactctctatgaggtggccataagcagcaaccagcccaaacacccacttgcgttctattagtatggaaccatttgcatttgttttttttaagctttatctttccttgtgcatcctgaccaagaaatatctttgattatgattaatgtattatgtcaaaatgtaggctagttaaacttttgtaaagttgcctggaatgtcatttgttaggttataaacacaagatctaaatgaagggttttatgtgttgtgtacaaatcttattttgaaatggacaaacttgtcattacatttgtaaccttgtacagaggatttttcactatgtgcctagcttggtgtccattcagctaaaattgaaaaaaaaaaaaaggtgcatgaagagttaaaaatcaaattaaagtatatgtagagatgactattttatattacatgacccaatcctgtatttatttctaccccctttttgaaagtatttataaaactagttgaggacagctgtatttttttgttgaactatttagtagaattgtgcctttttgtctgtatgtgaataaatgctgtacattttgcaataca

SEQ ID NO: 106292 - protein, 379 aa, Artificial Sequence
  derived and/or modified sequence
MDAPRASAAKPPTGRKMKARAPPPPGKAATLHVHSDQKPPHDGALGSQQNLVRMKEALRASTMDVTVVLPSGLEKRSVLNGSHAMMDLLVELCLQNHLNPSHHALEIRSSETQQPLSFKPNTLIGTLNVHTVFLKEKVPEEKVKPGPPKVPEKSVRLVVNYLRTQKAVVRVSPEVPLQNILPVICAKCEVSPEHVVLLRDNIAGEELELSKSLNELGIKELYAWDNRRETFRKSSLGNDETDKEKKKFLGFFKVNKRSNSKGCLTTPNSPSMHSRSLTLGPSLSLGSISGVSVKSEMKKRRAPPPPGSGPPVQDKASEKVSLGSQIDLQKKKRRAPAPPPPQPPPPSPLIPNRTEDKEENRKSTMVYCCASFPTQAKRF

SEQ ID NO: 106293 - DNA, 1410 bp, Artificial Sequence
  derived and/or modified sequence
atggacgcccccagagccagcgccgccaagccccccaccggcagaaagatgaaggccagagccccccccccccccggcaaggccgccaccctgcacgtgcacagcgaccagaagcccccccacgacggcgccctgggcagccagcagaacctggtgagaatgaaggaggccctgagagccagcaccatggacgtgaccgtggtgctgcccagcggcctggagaagagaagcgtgctgaacggcagccacgccatgatggacctgctggtggagctgtgcctgcagaaccacctgaaccccagccaccacgccctggagatcagaagcagcgagacccagcagcccctgagcttcaagcccaacaccctgatcggcaccctgaacgtgcacaccgtgttcctgaaggagaaggtgcccgaggagaaggtgaagcccggcccccccaaggtgcccgagaagagcgtgagactggtggtgaactacctgagaacccagaaggccgtggtgagagtgagccccgaggtgcccctgcagaacatcctgcccgtgatctgcgccaagtgcgaggtgagccccgagcacgtggtgctgctgagagacaacatcgccggcgaggagctggagctgagcaagagcctgaacgagctgggcatcaaggagctgtacgcctgggacaacagaagagagaccttcagaaagagcagcctgggcaacgacgagaccgacaaggagaagaagaagttcctgggcttcttcaaggtgaacaagagaagcaacagcaagggctgcctgaccacccccaacagccccagcatgcacagcagaagcctgaccctgggccccagcctgagcctgggcagcatcagcggcgtgagcgtgaagagcgagatgaagaagagaagagccccccccccccccggcagcggcccccccgtgcaggacaaggccagcgagaaggtgagcctgggcagccagatcgacctgcagaagaagaagagaagagcccccgcccccccccccccccagccccccccccccagccccctgatccccaacagaaccgaggacaaggaggagaacagaaagagcaccatggtgtacggcgccgccgaggccgtgatcagactgctgagcctgctgctgaacaccaccgcccccggcaccgccaagcccagaaccctgtggatgagcgagggcagaagcagcctgcacaaccccgagatcaagtgcagctgcttcagcagcagcagccccttcccccagagcctgctgagcctgctgctgggcctgagcagcatctgcgagtgcatgtgcaccctgagacacacccacgcccacacccacaaccccagctgcgtgctgcccaccagcgagatcctggccttcggcagacagagcctgatcagctag

SEQ ID NO: 106294 - DNA, 1140 bp, Artificial Sequence
  derived and/or modified sequence
atggacgcccccagagccagcgccgccaagccccccaccggcagaaagatgaaggccagagccccccccccccccggcaaggccgccaccctgcacgtgcacagcgaccagaagcccccccacgacggcgccctgggcagccagcagaacctggtgagaatgaaggaggccctgagagccagcaccatggacgtgaccgtggtgctgcccagcggcctggagaagagaagcgtgctgaacggcagccacgccatgatggacctgctggtggagctgtgcctgcagaaccacctgaaccccagccaccacgccctggagatcagaagcagcgagacccagcagcccctgagcttcaagcccaacaccctgatcggcaccctgaacgtgcacaccgtgttcctgaaggagaaggtgcccgaggagaaggtgaagcccggcccccccaaggtgcccgagaagagcgtgagactggtggtgaactacctgagaacccagaaggccgtggtgagagtgagccccgaggtgcccctgcagaacatcctgcccgtgatctgcgccaagtgcgaggtgagccccgagcacgtggtgctgctgagagacaacatcgccggcgaggagctggagctgagcaagagcctgaacgagctgggcatcaaggagctgtacgcctgggacaacagaagagagaccttcagaaagagcagcctgggcaacgacgagaccgacaaggagaagaagaagttcctgggcttcttcaaggtgaacaagagaagcaacagcaagggctgcctgaccacccccaacagccccagcatgcacagcagaagcctgaccctgggccccagcctgagcctgggcagcatcagcggcgtgagcgtgaagagcgagatgaagaagagaagagccccccccccccccggcagcggcccccccgtgcaggacaaggccagcgagaaggtgagcctgggcagccagatcgacctgcagaagaagaagagaagagcccccgcccccccccccccccagccccccccccccagccccctgatccccaacagaaccgaggacaaggaggagaacagaaagagcaccatggtgtactgctgcgccagcttccccacccaggccaagagattctag

SEQ ID NO: 106295 - DNA, 2332 bp, Artificial Sequence
  derived and/or modified sequence
ccgcccgctagagacgattccagccccttccgtccgccgcgctccgccgctgtcctccgccggcccgcgtgggaggacgatgggtcagcgcggaaaaagtgaatgagggcggcagcggtggcggcggtagccagcgcctgactcggcgggcccggagcaccgcccgcgtcccggcccccggcaccatggacgcgccgcgcgcctcggcggccaagcccccgaccgggaggaagatgaaggctcgtgctcccccacctcctggaaaggctgccactctgcatgtgcacagtgaccagaagcccccccacgatggggccctcgggtcgcagcagaacttggttcgcatgaaggaggcgctgagggccagcaccatggacgtcaccgtggtcctgcctagtgggctggagaagaggagcgtgctcaatgggagccatgcgatgatggacctactggttgaactttgccttcagaaccacctgaatccatcccaccatgcccttgaaattcggtcttcagaaacccaacaacctttgagttttaagccaaatactttgattgggaccctgaatgtgcatactgtgtttctgaaagaaaaagttcctgaagagaaggttaagcctggtccccctaaggtgcctgagaaatctgtgcgtttggtcgtgaattacctgcggacacaaaaagctgttgtgcgtgtgagccctgaggttcctctccagaatattctcccagtcatttgtgcaaagtgtgaggtcagcccagagcacgtggttctcctcagggacaacattgccggagaggagctggagctgtccaagtccctgaacgagctcgggataaaggagctctacgcgtgggacaacagaagagaaacctttaggaaatcatcacttggcaatgatgagacagataaagagaagaaaaaatttctgggatttttcaaagttaataaaagaagcaatagtaagggctgtttaacgacccccaactccccatccatgcactcacgttctcttacgctgggtccatccctctcgctgggcagcatctcaggggtgtccgtgaagtcggagatgaagaagcgccgagcccctcctcctccaggttcagggccacctgtgcaagacaaggcatcggaaaaggtatctcttgggtcacagattgatttacagaagaagaagcggcgagcgccagctccccctccaccacagccaccaccaccgagtcccctgatccccaaccgcactgaggataaggaggagaacaggaagagcacgatggtttatggagcagctgaagctgtgataagacttctgagcttgcttctgaataccacagccccgggcacagcaaagccaagaaccctgtggatgagtgagggccgcagttctctacacaatcctgaaatcaagtgttcctgtttctcttcctcctccccatttccccagtcactgctcagccttctcttgggtctttcaagcatttgtgaatgcatgtgcacacttagacacacacacgcacacacacacaacccatcttgtgtcttacctacctctgaaatattggcatttgggagacaatccctaatcagctaacacttgtttttttctatcctctgtgtgcttgttagaatactgtgaaggtgttttctatggaccgacttctaaatgttcctcctgaaatcagtgttattcacacagttctaatgtaatgaattctgtctgtctgaaagcttgccatattgtccctggtttctcccagctaatagagaggaaaatgagcctgaatatgaacccgtcaccacagaccgcactgcatcctttccaggcagcagggccctggagactgtgctcaggcctggcagcctctgtgtttcacttaggcttgttttgctcaacccaggcaagacttttaaaattgtttgaataagctgcagcatcagtatgcttttttaaattgtgatttaaaaaaaaatataaaatgtcccattccttccattttcaaatgcatacttcagtagatttaagtatattcacaatgctgtgaaaccgatctccaggacctcatcgtcctgcaaatctgatactctactcactgaacagcaactcccctttgcctgcttgtctttttgcgcctggcttatttcacttagcacaatttcctcgaagtttatccatattgtagcatataacagaattcccttcccttttaaagctaaatatctttcaagtatatgtatagaccacattttctttatccatccattgtcagtggacatttaagttgttcccgcttcatggttattgtgaatgatgctgcacaggtatgcaaa

SEQ ID NO: 106296 - DNA, 3785 bp, Artificial Sequence
  derived and/or modified sequence
ctccgccggcccgcgtgggaggacgatgggtcagcgcggaaaaagtgaatgagggcggcagcggtggcggcggtagccagcgcctgactcggcgggcccggagcaccgcccgcgtcccggcccccggcaccatggacgcgccgcgcgcctcggcggccaagcccccgaccgggaggaagatgaaggctcgtgctcccccacctcctggaaaggctgccactctgcatgtgcacagtgaccagaagcccccccacgatggggccctcgggtcgcagcagaacttggttcgcatgaaggaggcgctgagggccagcaccatggacgtcaccgtggtcctgcctagtgggctggagaagaggagcgtgctcaatgggagccatgcgatgatggacctactggttgaactttgccttcagaaccacctgaatccatcccaccatgcccttgaaattcggtcttcagaaacccaacaacctttgagttttaagccaaatactttgattgggaccctgaatgtgcatactgtgtttctgaaagaaaaagttcctgaagagaaggttaagcctggtccccctaaggtgcctgagaaatctgtgcgtttggtcgtgaattacctgcggacacaaaaagctgttgtgcgtgtgagccctgaggttcctctccagaatattctcccagtcatttgtgcaaagtgtgaggtcagcccagagcacgtggttctcctcagggacaacattgccggagaggagctggagctgtccaagtccctgaacgagctcgggataaaggagctctacgcgtgggacaacagaagagaaacctttaggaaatcatcacttggcaatgatgagacagataaagagaagaaaaaatttctgggatttttcaaagttaataaaagaagcaatagtaagggctgtttaacgacccccaactccccatccatgcactcacgttctcttacgctgggtccatccctctcgctgggcagcatctcaggggtgtccgtgaagtcggagatgaagaagcgccgagcccctcctcctccaggttcagggccacctgtgcaagacaaggcatcggaaaaggtatctcttgggtcacagattgatttacagaagaagaagcggcgagcgccagctccccctccaccacagccaccaccaccgagtcccctgatccccaaccgcactgaggataaggaggagaacaggaagagcacgatggtttattgctgtgcgtcattccctactcaggccaagcgcttctgatggacgggcctcttcctgacctcggacctttcccagtgtctcttctgccctggctctgattttcctgttgttcttcctcctttcaggataaaagggctcattgtatacccagaatttacttcctttggggtttacatataaatgcattaataacagagatttgtttgattgaggtttatatttttttgaaggaggtaaattatatgcaaattttaggttgataatattcacctgtctgaaattcactgatacttggaaatgttcctgtgaagaactctgctttattttaattcattattaattcatgtttttcttattggatattcagttccagaatttattgccaatttttcttaaaactagattgtatccataaattgaccagtatagtcaatttggatagaactgaaactttctgtctacctggtaaaactaagtgcctaaaaacatgaactataaatgtagttactaggaactcacaacttatatatactatccattcaatgatacataggacccaatgtctttgtgtttttgaggttttcctgttactgtgtactttgccattttacatagttcactaaaaagaaagaagtgggagaagaagggtgttctattcattattctatattatgattctcttcattattctgttctcttcattattctattcatttcttcacccatttattcactaaacagtgacatagtacttacttgatgctaggtattacaccagttttgtgggctataagagtgaataacaagcacgtgacctctggccttggattttactacctgtggctccccaggcacatgaaaagaagtaaagatggttccatttgataagtactagtcacaagggttgtacatgtgataaagatgccagaggttgtgaccaccatgtctgtgcagaggtgctgctggctcctctttgagtgtgagatccctctgcagtcacacaacctcacccagttacgaagagctagtcacctcaactgcattgtcccaagacaggcagagtaggtaaaaatagtcatatgttaaaattcaaggtttagataaaaagacaactagttcttgcttgctttgattaacttttattatgcagatgcatttgaactggagaagcttgtcatgtttctctctaaaagatgtttttaaatgttattgctcaaaatggaaaaaaaaaaaaagaatcagtaagtattcctgacatgtaggattgttgcctggctgatcacaatgaaaatgttagctatgactaatgaaggaattatcacaacttacattggtattaataataaacaaatataagccaaagctatatataaccaatttagtgctatgtattggtgaaaaaaacagaaagttacagaaattactcacaatgaaacatagaacaagttagaaagggccttttttttttttgaaataaaggacttttgtctgataagtagcagtcatttgacctcaaatcattaaatggggaaagtctaaacaagaaaaggtaatgtttacctgaatgttggggaaagcattaggatttatggcccagacttaaagattgtagaagattgtatataattacagcaataagcatttgtgtaagaagtagctattatgctgaagaaagatgggcacacaaaatctctaggcaaatccttggaacaggggaaagtgatactgctcatagaattattggttcgagaggcagcaaatatgatgcaataagtatatcaaactcaattaaaaatagaggacagaggtatgtggtgggggaaaacaaatgcaatagggctaagtcagcttacagggggtgaatataatttgaacatggcacccccaatttacttgatcataaagttagccaaagacatgagtggtcgatctttgacaatactctagtgatctccatgagagatggcctgatagatgttggatagaatgaagggccatttgatgaacaagttttgtagatttacatgtgacttggcactgtgctgacattagagccttctaagaatcagataaattaattaggtgaaacattttttcccaaagcacttgcatttcagaaagtttctcatttctgactcagcttagaacccatcccttgttacaggtcatttctcctccttataagccatgtctgtttcttttttccatcatgtcatacaccctatccacaaaagatggtagctcacgttttctaactagagacgtgcaggcaagttgagagcatgaagaatcccttgggaataccaattctgtagcaaatgctaaggtaaaagaaaaactatgcattatttttcaactatagttggcttaaattcttagtttcaccctggagaccatgttgccagtggacaattgagcatgctgtgatttataaaatgcaagctagtttatatgataatgtttgccatctcactttaccagtactgttgaccttttcatatgattctaaaatcacttacttgtaaataaatactcctagttctgtagatgaaa

SEQ ID NO: 106297 - DNA, 1410 bp, Artificial Sequence
  derived and/or modified sequence
atggacgcaccaagggcctccgccgctaagccacctactggcagaaaaatgaaagctagagcccccccacccccaggaaaggccgctacccttcacgtccacagtgatcagaagcctccccatgacggcgcccttggatcacaacagaacctcgtgcggatgaaggaggctctgcgggctagcaccatggacgttacagtggtcctgccatccggactcgagaagagatctgtgctgaacggctcacatgctatgatggatctcctggttgagctctgcctgcagaaccatcttaatccgagtcaccacgccctggaaatccgaagctccgagacccagcagcccctgagtttcaaaccaaataccctaatcggcaccctgaacgtgcacaccgttttcttgaaagaaaaagtgcctgaggagaaggtaaaacccggtccgccgaaagtaccagagaaatccgtccgccttgtagtgaattacctgaggactcaaaaagctgtagttcgggtctctcccgaagtgccccttcagaacatattgccagtgatctgcgcaaagtgtgaagtaagtcccgagcatgtggtcctgctgcgtgacaacatcgctggtgaagaactggagctgtcgaagagcctgaatgagctcgggattaaagagctctacgcctgggacaaccgtcgagagaccttccgaaaaagtagcttaggaaacgatgagacagacaaagagaagaaaaaattccttgggttctttaaggtcaacaagagaagtaatagcaaggggtgcctgactacgccgaattcgccctctatgcatagtagaagcctcaccttggggccctctttgagccttggttctatttctggcgtatcagtaaagagcgaaatgaagaagagaagggcacctccacccccaggctcaggcccgcccgtgcaggacaaagcctccgaaaaggtctcgctcggctcacagatcgacctgcaaaaaaaaaaaagacgagcccccgccccacctcccccacaacccccacccccatcaccactgatacccaacaggaccgaggataaagaggagaatagaaaaagcaccatggtgtacggggcggcagaggccgtgatcagactccttagcttgctgcttaataccaccgcacctgggactgcaaagcccaggaccctctggatgagtgagggcagatcgtctcttcacaatcctgaaatcaagtgtagttgtttttcatcctccagcccatttccacagtcactgttgtctctccttctcggcttgagctccatctgtgaatgcatgtgcacactgcggcacactcatgctcacacacacaatccctcttgtgtcctgcccacctcagagatcctggcattcgggcggcagtctttgatatcttag

SEQ ID NO: 106298 - DNA, 1140 bp, Artificial Sequence
  derived and/or modified sequence
atggacgcccctcgtgcaagcgcagcaaaaccacccactgggagaaagatgaaagcccgggctcctcccccccctggcaaagcagcaacattacacgttcactctgatcagaaaccaccgcatgatggcgcattggggtcgcagcaaaatctggtgcgaatgaaagaggcactgagggcctccactatggacgttaccgtggtactgccatctggactggaaaaacgctcagtgcttaacgggtctcatgccatgatggacctactagtggagctgtgtctccagaaccatctgaatccctcacatcatgccctcgagatccgtagtagtgagacacagcagcctctgagcttcaaacccaatactctgatcggtactctgaatgtccataccgtcttcctgaaggaaaaggttcccgaggagaaggttaagcccgggcccccaaaggtccccgaaaagagtgtcagattagttgtgaattatctgcgcactcaaaaggccgtggtgagggtttcgcccgaagtccccctgcagaatattctgccagtgatatgtgcgaagtgtgaggtctcccccgaacacgtggttctactaagagacaacatagccggcgaggaactggaattatcaaaatcccttaacgaactgggcatcaaagaactgtatgcatgggataatcgacgagagacgttcaggaaatctagcctggggaatgacgaaaccgacaaggaaaaaaaaaaattccttggattctttaaggtcaataagagatccaactcaaaggggtgcctcaccacaccgaacagcccatccatgcattcacgctctcttactctgggcccaagccttagcctggggtcaatttccggcgttagtgttaagtcagaaatgaaaaagcgccgggcccctcctcctcccggatctggtccccccgtacaggacaaagctagcgaaaaggtcagcctagggtcgcaaattgatctccagaaaaagaaacggcgggctcccgcccctccaccaccccagcctccgcctccttccccgctcattcctaatcgtaccgaagataaagaggagaaccgtaaaagtactatggtttattgttgtgcatcattcccaacgcaggctaagagattctag

SEQ ID NO: 106299 - DNA, 1410 bp, Artificial Sequence
  derived and/or modified sequence
atggatgccccccgggccagcgctgccaagcccccaactggaaggaagatgaaggcccgggcccctcctcctcctgggaaggccgccaccctgcacgtgcacagcgaccagaagccccctcatgatggagccctgggcagccagcagaacctggtgaggatgaaggaggccctgcgggccagcaccatggatgtgacagtggtgctgcccagcggcctggagaagaggtctgtgctgaatggcagccacgccatgatggacctgctggtggagctgtgcctgcagaaccacctgaaccccagccaccacgccctggagatccgcagcagcgagacccagcagcccctgtccttcaagcccaacaccctcatcggcaccctgaatgtgcacacagtgttcctgaaggagaaggtgcctgaggagaaggtgaagccaggcccccccaaggtgcctgagaagtctgtgcggctggtggtgaactacctgcggacccagaaggctgtggtgcgggtgtccccagaggtgcccctgcagaacatcctgcccgtcatctgtgccaagtgtgaggtgtccccagagcacgtggtgctgctgcgggacaacattgctggggaggagctggagctgagcaagagcctgaatgagctgggcatcaaggagctgtatgcctgggacaacagaagagagaccttcaggaagagcagcctgggcaatgatgaaacagacaaggagaagaagaagttcctgggcttcttcaaggtgaacaagaggagcaacagcaagggctgcctgaccacccccaacagccccagcatgcacagccgcagcctgaccctgggccccagcctgagcctgggcagcatctctggagtgtctgtgaagtctgagatgaagaagaggcgggcccctcctcctcctggcagcggcccccctgtgcaggacaaggccagcgagaaggtgtccctgggcagccagattgacctgcagaagaagaagagaagagccccagcccctcctccaccccagcccccaccacccagccccctcatccccaacagaacagaggacaaggaggagaacaggaagagcaccatggtgtatggagctgctgaggccgtcatccggctgctgagcctgctgctgaacaccacagcccctggaacagccaagcccaggaccctgtggatgtctgagggccgcagcagcctgcacaaccctgagatcaagtgcagctgcttcagcagcagcagccccttcccccagagcctgctgagcctgctgctgggcctgagcagcatctgtgagtgcatgtgcaccctgcggcacacccacgcccacacccacaaccccagctgtgtgctgcccaccagcgagatcctggccttcggccggcagagcctcatctcctag

SEQ ID NO: 106300 - DNA, 1140 bp, Artificial Sequence
  derived and/or modified sequence
atggatgccccccgggccagcgctgccaagcccccaactggaaggaagatgaaggcccgggcccctcctcctcctgggaaggccgccaccctgcacgtgcacagcgaccagaagccccctcatgatggagccctgggcagccagcagaacctggtgaggatgaaggaggccctgcgggccagcaccatggatgtgacagtggtgctgcccagcggcctggagaagaggtctgtgctgaatggcagccacgccatgatggacctgctggtggagctgtgcctgcagaaccacctgaaccccagccaccacgccctggagatccgcagcagcgagacccagcagcccctgtccttcaagcccaacaccctcatcggcaccctgaatgtgcacacagtgttcctgaaggagaaggtgcctgaggagaaggtgaagccaggcccccccaaggtgcctgagaagtctgtgcggctggtggtgaactacctgcggacccagaaggctgtggtgcgggtgtccccagaggtgcccctgcagaacatcctgcccgtcatctgtgccaagtgtgaggtgtccccagagcacgtggtgctgctgcgggacaacattgctggggaggagctggagctgagcaagagcctgaatgagctgggcatcaaggagctgtatgcctgggacaacagaagagagaccttcaggaagagcagcctgggcaatgatgaaacagacaaggagaagaagaagttcctgggcttcttcaaggtgaacaagaggagcaacagcaagggctgcctgaccacccccaacagccccagcatgcacagccgcagcctgaccctgggccccagcctgagcctgggcagcatctctggagtgtctgtgaagtctgagatgaagaagaggcgggcccctcctcctcctggcagcggcccccctgtgcaggacaaggccagcgagaaggtgtccctgggcagccagattgacctgcagaagaagaagagaagagccccagcccctcctccaccccagcccccaccacccagccccctcatccccaacagaacagaggacaaggaggagaacaggaagagcaccatggtgtactgctgtgccagcttccccacccaggccaagcgcttctag

SEQ ID NO: 106301 - DNA, 1410 bp, Artificial Sequence
  derived and/or modified sequence
atggacgccccccgggccagcgccgccaagccccccaccggccggaagatgaaagcacgcgcgccgccaccacccggaaaggccgccaccctgcacgttcactcagatcagaagccgccacatgacggcgcattgggcagtcaacagaatctggtaagaatgaaggaagcgctgcgggcctcgacaatggacgtgacagtagtgctgccttctgggctggagaaacgctctgtcttaaatgggtcccacgccatgatggacctgctcgttgagctctgcctgcaaaatcacctcaacccatcacatcacgccctggaaattagatcctcagaaacgcagcaaccattgtcctttaagcctaatacactaatcggaacactgaatgtgcatacagtgttcttaaaagagaaagtgccagaggaaaaagtgaaacccggccctcccaaggtgcccgagaagagcgtgagacttgtcgttaattacctaaggactcagaaggctgtggtgcgggtgtcgcctgaggtgcccttacagaacatcctgcctgtaatctgtgcaaagtgtgaggtgtcccctgaacacgtggtgctgctgcgagataatatcgccggggaagagctcgaattaagcaagagcctgaacgagctgggaattaaggagctttacgcttgggacaacagacgggaaacctttaggaagtcgtcattaggaaacgacgaaacggataaggaaaaaaaaaagtttctaggctttttcaaggtaaacaagaggtctaatagcaaagggtgtctgacaacacctaacagtccatctatgcattctagatctctgacgttgggcccctctttatctctcggatctatttctggggtgagcgtaaagagcgaaatgaaaaagcgccgggccccgcctccacccgggtctgggcctcctgtacaggacaaagcatccgagaaggtgtccctgggatcccagatagacctgcagaaaaagaagcggcgtgctccagctccacctccgccccaaccaccgcctccaagtcccctcattcccaataggacagaggacaaagaggagaacaggaaatccactatggtttatggcgccgccgaggctgtgatcaggcttctgagcctcctgctcaataccacggctcctggcactgccaagccccggactctttggatgtctgagggccggagctccctccacaatccagagattaaatgttcgtgtttttccagcagctccccattcccacagtccctgctctcccttctcttgggtctgtcgtctatctgcgaatgcatgtgcaccctgcggcatacccacgcccacacccacaatccaagctgcgttctgccgaccagtgagatattagccttcggccgccagtcactgataagttag

SEQ ID NO: 106302 - DNA, 1140 bp, Artificial Sequence
  derived and/or modified sequence
atggacgccccccgggccagcgccgccaagccccccaccggccggaagatgaaggcgagagcccctcctccccccgggaaggccgccaccttgcacgtccattctgaccaaaagcctccacacgatggcgccctgggaagccagcagaatctcgtgcgcatgaaggaggctctgcgcgcatcaacgatggacgtgacagtggtcctgccttcagggttggagaaacggtcagtcttaaacgggtctcacgctatgatggatctccttgttgaactttgtctgcagaaccacctgaatccttctcatcacgccttggaaattcgctcaagtgagacacagcagcctctgagctttaaacccaatacgttgattgggactctgaatgtgcacaccgtcttcctcaaagagaaggtgccagaggagaaagtaaagcccggcccacctaaggtccccgaaaagagcgtccgcctggtggtaaactatcttaggacccaaaaggccgtggtccgagtcagtcccgaagtgcccctgcagaacatcctgcccgtgatttgcgccaagtgcgaggtgagccctgagcacgtcgtgctgctaagggataacatcgcaggcgaggagctggagttatctaagagcctcaacgagcttggaatcaaagagttgtatgcatgggataatcgcagggagacgttccgcaagtctagtcttggaaacgacgaaactgataaggagaagaagaagttcttgggattctttaaagtgaacaaacgcagtaacagtaagggatgtctgaccacacctaactccccatccatgcacagtcggtcccttaccctaggcccatcactttccctcgggtcgatcagcggagtttcagttaaaagtgaaatgaaaaaaaggagggcacctcctccacccggctcgggtcccccggtgcaggataaagcatctgagaaagtttccttaggatcgcagatcgacttacaaaagaagaagcgcagagccccggcaccgccaccacctcagccccctcccccctcccccctgatacctaatcgaaccgaggataaagaggagaacaggaaatctaccatggtttattgctgtgcttcatttcccactcaggcaaagcgattctag

SEQ ID NO: 106303 - DNA, 1410 bp, Artificial Sequence
  derived and/or modified sequence
atggatgctccacgggcttccgccgctaaaccgccaaccgggaggaagatgaaggctcgggctccaccgcctcccggtaaagccgctacactgcacgtacatagtgaccagaagccccctcatgatggcgctctaggatcacagcagaacctggtgagaatgaaggaggcactccgagcgtccacaatggacgtgactgtagtcctcccgagcggtttagaaaagagatctgtcctgaacggatcccatgctatgatggatttattggtggagctttgtcttcaaaatcatctaaatccctctcaccatgcactcgagatccgttcgtctgagacccaacagcccctgtctttcaaaccaaacaccctgatcgggaccctaaacgtccacaccgttttccttaaggagaaagtgcctgaggagaaggtcaaacccggtcctccaaaagtgccggaaaagtccgttcgattagttgtgaattatcttcgaacacagaaagctgtggtgcgggttagtccggaggttcctctgcagaacatcctccctgtgatttgcgccaagtgcgaggtatctcctgagcacgtggttttactccgagacaacatcgctggagaagagctagagctgtccaagtcccttaatgaactggggatcaaggagctttatgcatgggacaaccgcagggagacttttcgtaagtctagtttagggaatgatgaaacggacaaagagaagaaaaagtttttggggttttttaaagtaaacaaaaggagcaattctaaaggttgcttgacaacccccaactctccaagcatgcacagtaggagcctgacgctgggcccatctctgagtctaggatcaatcagtggcgtgtccgtgaaatccgagatgaaaaagcgcagggccccaccacccccaggctccggaccgccagttcaggataaggcttctgaaaaggtcagcttggggtctcagattgacctgcagaagaaaaagaggagggccccagccccacctcccccacagcccccaccaccttctccactgatacccaatagaacagaagacaaagaggaaaacagaaagtccacaatggtgtatggagcagcagaggctgtgatccgcctgttgagtctgctgctaaacactacagccccagggactgccaaaccacgcacgttatggatgtccgaagggagatcctctctccataacccagagatcaagtgtagttgcttttcctctagttctccttttccccaatccctgctttccttgttgctcggcctgagtagtatctgtgaatgcatgtgcacgctgaggcatacacatgctcatacacacaacccaagctgcgtcttacctacctctgagatcctggcatttgggaggcagagtctgatcagctag

SEQ ID NO: 106304 - DNA, 1140 bp, Artificial Sequence
  derived and/or modified sequence
atggatgctccacgggcttctgccgcaaagcccccaaccggtagaaagatgaaagcaagggccccaccccctcctggaaaagcagccaccttgcatgtgcatagtgaccagaaaccacctcacgatggcgctctgggctcccagcagaacctggtgcgaatgaaggaggctttaagagcctcgactatggacgtcacggttgtcctgccaagcgggctggagaagaggagtgttctcaacgggagccatgccatgatggatttactggtagaactgtgtctgcagaaccacctcaatccatcccaccacgctctggagatcagatctagtgaaactcagcaaccactttcttttaaacccaataccctaatcggaactctgaacgtgcacacagtcttcctgaaggagaaggtgcctgaagaaaaggtgaaacctggtccgccaaaggtgcctgaaaagtccgtgcggctcgtcgttaattatctgagaacacaaaaagctgtggtaagagtgagtccagaagtgcccctgcagaatatcctgcctgttatctgtgctaagtgtgaggtgagccctgagcacgtggtgcttctgcgcgataacattgccggagaggagctcgaattgtcaaagagcctcaatgaactaggtataaaagagttgtacgcgtgggacaacaggcgggaaacctttaggaagagctccctgggcaatgatgaaactgacaaggagaaaaagaaatttctggggttttttaaggtgaacaagcgtagcaattctaagggttgtctgaccactccgaatagcccgtctatgcattcccggtctcttacccttgggccaagtctgagccttgggagcatcagcggggtttcagtcaaaagtgagatgaaaaagaggagagcccctcctcctcccggttcaggacctccggtgcaggacaaggccagcgagaaagtcagcttgggatctcaaatcgacctccagaagaaaaaaagacgcgctcctgcaccacccccaccgcagccacctccacccagcccattgatcccaaataggacggaggacaaagaggagaatcgtaagtctaccatggtctactgctgcgcttcatttccaacacaggccaagcggttttag

SEQ ID NO: 106305 - protein, 842 aa, Artificial Sequence
  derived and/or modified sequence
MKRGRLPSSSEDSDDNGSLSTTWSQNSRSQHRRSSCSRHEDRKPSEVFRTDLITAMKLHDSYQLNPDEYYVLADPWRQEWEKGVQVPVSPGTIPQPVARVVSEEKSLMFIRPKKYIVSSGSEPPELGYVDIRTLADSVCRYDLNDMDAAWLELTNEEFKEMGMPELDEYTMERVLEEFEQRCYDNMNHAIETEEGLGIEYDEDVVCDVCQSPDGEDGNEMVFCDKCNICVHQACYGILKVPEGSWLCRTCALGVQPKCLLCPKKGGAMKPTRSGTKWVHVSCALWIPEVSIGSPEKMEPITKVSHIPSSRWALVCSLCNEKFGASIQCSVKNCRTAFHVTCAFDRGLEMKTILAENDEVKFKSYCPKHSSHRKPEESLGKGAAQENGAPECSPRNPLEPFASLEQNREEAHRVSVRKQKLQQLEDEFYTFVNLLDVARALRLPEEVVDFLYQYWKLKRKVNFNKPLITPKKDEEDNLAKREQDVLFRRLQLFTHLRQDLERVRNLTYMVTRREKIKRSVCKVQEQIFNLYTKLLEQERVSGVPSSCSSSSLENMLLFNSPSVGPDAPKIEDLKWHSAFFRKQMGTSLVHSLKKPHKRDPLQNSPGSEGKTLLKQPDLCGRREGMVVPESFLGLEKTFAEARLISAQQKNGVVMPDHGKRRDNRFHCDLIKGDLKDKSFKQSHKPLRSTDVSQRHLDNTRAATSPGVGQSAPGTRKEIVPKCNGSLIKVNYNQTAVKVPTTPASPVKNWGGFRIPKKGERQQQGEAHDGACHQHSDYPYLGLGRVPAKERAKSKLKSDNENDGYVPDVEMSDSESEASEKKCIHTSSTISRRTDIIRRSILAS

SEQ ID NO: 106306 - protein, 129 aa, Artificial Sequence
  derived and/or modified sequence
MKRGRLPSSSEDSDDNGSLSTTWSQNSRSQHRRSSCSRHEDRKPSEVFRTDLITAMKLHDSYQLNPDEYYVLADPWRQEWEKGVQVPVSPGTIPQPVARVVSEEKSLMFIRPKKYIVSSGSEPPELGYV

SEQ ID NO: 106307 - protein, 136 aa, Artificial Sequence
  derived and/or modified sequence
MKRGRLPSSSEDSDDNGSLSTTWSQNSRSQHRRSSCSRHEDRKPSEVFRTDLITAMKLHDSYQLNPDEYYVLADPWRQEWEKGVQVPVSPGTIPQPVARVVSEEKSLMFIRPKKYIVSSGSEPPELGYVDIRTLAD

SEQ ID NO: 106308 - protein, 132 aa, Artificial Sequence
  derived and/or modified sequence
MKRGRLPSSSEDSDDNGSLSTTWSQNSRSQHRRSSCSRHEDRKPSEVFRTDLITAMKLHDSYQLNPDEYYVLADPWRQEWEKGVQVPVSPGTIPQPVARVVSEEKSLMFIRPKKYIVSSGSEPPELGYVDIR

SEQ ID NO: 106309 - protein, 119 aa, Artificial Sequence
  derived and/or modified sequence
MKRGRLPSSSEDSDDNGSLSTTWSQNSRSQHRRSSCSRHEDRKPSEVFRTDLITAMKLHDSYQLNPDEYYVLADPWRQEWEKGVQVPVSPGTIPQPVARVVSEEKSLMFIRPKKYIVSS

SEQ ID NO: 106310 - protein, 143 aa, Artificial Sequence
  derived and/or modified sequence
MKRGRLPSSSEDSDDNGSLSTTWSQNSRSQHRRSSCSRHEDRKPSEVFRTDLITAMKLHDSYQLNPDEYYVLADPWRQEWEKGVQVPVSPGTIPQPVARVVSEEKSLMFIRPKKYIVSSGSEPPELGYVDIRTLADSVCRYDL

SEQ ID NO: 106311 - protein, 715 aa, Artificial Sequence
  derived and/or modified sequence
MKRGRLPSSSEDSDDNGSLSTTWSQNSRSQHRRSSCSRHEDRKPSEVFRTDLITAMKLHDSYQLNPDEYYVLADPWRQEWEKGVQVPVSPGTIPQPVARVVSEEKSLMFIRPKKYIVSSGSEPPELGYVDIRTLADSVCRYDLNDMDAAWLELTNEEFKEMGMPELDEYTMERVLEEFEQRCYDNMNHAIETEEGLGIEYDEDVVCDVCQSPDGEDGNEMVFCDKCNICVHQACYGILKVPEGSWLCRTCALGVQPKCLLCPKKGGAMKPTRSGTKWVHVSCALWIPEVSIGSPEKMEPITKVSHIPSSRWALVCSLCNEKFGASIQCSVKNCRTAFHVTCAFDRGLEMKTILAENDEVKFKSYCPKHSSHRKPEESLGKGAAQENGAPECSPRNPLEPFASLEQNREEAHRVSVRKQKLQQLEDEFYTFVNLLDVARALRLPEEVVDFLYQYWKLKRKVNFNKPLITPKKDEEDNLAKREQDVLFRRLQLFTHLRQDLERVRNLTYMVTRREKIKRSVCKVQEQIFNLYTKLLEQERVSGVPSSCSSSSLENMLLFNSPSVGPDAPKIEDLKWHSAFFRKQMGTSLVHSLKKPHKRDPLQNSPGSEGKTLLKQPDLCGRREGMVVPESFLGLEKTFAEARLISAQQKNGVVMPDHGKRRDNRFHCDLIKGDLKDKSFKQSHKPLRSTDVSQRHLDNTRAAAIWRFRVIWQGPAA

SEQ ID NO: 106312 - DNA, 2529 bp, Artificial Sequence
  derived and/or modified sequence
atgaagagaggcagactgcccagcagcagcgaggacagcgacgacaacggcagcctgagcaccacctggagccagaacagcagaagccagcacagaagaagcagctgcagcagacacgaggacagaaagcccagcgaggtgttcagaaccgacctgatcaccgccatgaagctgcacgacagctaccagctgaaccccgacgagtactacgtgctggccgacccctggagacaggagtgggagaagggcgtgcaggtgcccgtgagccccggcaccatcccccagcccgtggccagagtggtgagcgaggagaagagcctgatgttcatcagacccaagaagtacatcgtgagcagcggcagcgagccccccgagctgggctacgtggacatcagaaccctggccgacagcgtgtgcagatacgacctgaacgacatggacgccgcctggctggagctgaccaacgaggagttcaaggagatgggcatgcccgagctggacgagtacaccatggagagagtgctggaggagttcgagcagagatgctacgacaacatgaaccacgccatcgagaccgaggagggcctgggcatcgagtacgacgaggacgtggtgtgcgacgtgtgccagagccccgacggcgaggacggcaacgagatggtgttctgcgacaagtgcaacatctgcgtgcaccaggcctgctacggcatcctgaaggtgcccgagggcagctggctgtgcagaacctgcgccctgggcgtgcagcccaagtgcctgctgtgccccaagaagggcggcgccatgaagcccaccagaagcggcaccaagtgggtgcacgtgagctgcgccctgtggatccccgaggtgagcatcggcagccccgagaagatggagcccatcaccaaggtgagccacatccccagcagcagatgggccctggtgtgcagcctgtgcaacgagaagttcggcgccagcatccagtgcagcgtgaagaactgcagaaccgccttccacgtgacctgcgccttcgacagaggcctggagatgaagaccatcctggccgagaacgacgaggtgaagttcaagagctactgccccaagcacagcagccacagaaagcccgaggagagcctgggcaagggcgccgcccaggagaacggcgcccccgagtgcagccccagaaaccccctggagcccttcgccagcctggagcagaacagagaggaggcccacagagtgagcgtgagaaagcagaagctgcagcagctggaggacgagttctacaccttcgtgaacctgctggacgtggccagagccctgagactgcccgaggaggtggtggacttcctgtaccagtactggaagctgaagagaaaggtgaacttcaacaagcccctgatcacccccaagaaggacgaggaggacaacctggccaagagagagcaggacgtgctgttcagaagactgcagctgttcacccacctgagacaggacctggagagagtgagaaacctgacctacatggtgaccagaagagagaagatcaagagaagcgtgtgcaaggtgcaggagcagatcttcaacctgtacaccaagctgctggagcaggagagagtgagcggcgtgcccagcagctgcagcagcagcagcctggagaacatgctgctgttcaacagccccagcgtgggccccgacgcccccaagatcgaggacctgaagtggcacagcgccttcttcagaaagcagatgggcaccagcctggtgcacagcctgaagaagccccacaagagagaccccctgcagaacagccccggcagcgagggcaagaccctgctgaagcagcccgacctgtgcggcagaagagagggcatggtggtgcccgagagcttcctgggcctggagaagaccttcgccgaggccagactgatcagcgcccagcagaagaacggcgtggtgatgcccgaccacggcaagagaagagacaacagattccactgcgacctgatcaagggcgacctgaaggacaagagcttcaagcagagccacaagcccctgagaagcaccgacgtgagccagagacacctggacaacaccagagccgccaccagccccggcgtgggccagagcgcccccggcaccagaaaggagatcgtgcccaagtgcaacggcagcctgatcaaggtgaactacaaccagaccgccgtgaaggtgcccaccacccccgccagccccgtgaagaactggggcggcttcagaatccccaagaagggcgagagacagcagcagggcgaggcccacgacggcgcctgccaccagcacagcgactacccctacctgggcctgggcagagtgcccgccaaggagagagccaagagcaagctgaagagcgacaacgagaacgacggctacgtgcccgacgtggagatgagcgacagcgagagcgaggccagcgagaagaagtgcatccacaccagcagcaccatcagcagaagaaccgacatcatcagaagaagcatcctggccagctag

SEQ ID NO: 106313 - DNA, 54 bp, Artificial Sequence
  derived and/or modified sequence
atgaagagaggcagactgcccagcagcagcgaggacagcgacgacaacggctag

SEQ ID NO: 106314 - DNA, 2148 bp, Artificial Sequence
  derived and/or modified sequence
atgaagagaggcagactgcccagcagcagcgaggacagcgacgacaacggcagcctgagcaccacctggagccagaacagcagaagccagcacagaagaagcagctgcagcagacacgaggacagaaagcccagcgaggtgttcagaaccgacctgatcaccgccatgaagctgcacgacagctaccagctgaaccccgacgagtactacgtgctggccgacccctggagacaggagtgggagaagggcgtgcaggtgcccgtgagccccggcaccatcccccagcccgtggccagagtggtgagcgaggagaagagcctgatgttcatcagacccaagaagtacatcgtgagcagcggcagcgagccccccgagctgggctacgtggacatcagaaccctggccgacagcgtgtgcagatacgacctgaacgacatggacgccgcctggctggagctgaccaacgaggagttcaaggagatgggcatgcccgagctggacgagtacaccatggagagagtgctggaggagttcgagcagagatgctacgacaacatgaaccacgccatcgagaccgaggagggcctgggcatcgagtacgacgaggacgtggtgtgcgacgtgtgccagagccccgacggcgaggacggcaacgagatggtgttctgcgacaagtgcaacatctgcgtgcaccaggcctgctacggcatcctgaaggtgcccgagggcagctggctgtgcagaacctgcgccctgggcgtgcagcccaagtgcctgctgtgccccaagaagggcggcgccatgaagcccaccagaagcggcaccaagtgggtgcacgtgagctgcgccctgtggatccccgaggtgagcatcggcagccccgagaagatggagcccatcaccaaggtgagccacatccccagcagcagatgggccctggtgtgcagcctgtgcaacgagaagttcggcgccagcatccagtgcagcgtgaagaactgcagaaccgccttccacgtgacctgcgccttcgacagaggcctggagatgaagaccatcctggccgagaacgacgaggtgaagttcaagagctactgccccaagcacagcagccacagaaagcccgaggagagcctgggcaagggcgccgcccaggagaacggcgcccccgagtgcagccccagaaaccccctggagcccttcgccagcctggagcagaacagagaggaggcccacagagtgagcgtgagaaagcagaagctgcagcagctggaggacgagttctacaccttcgtgaacctgctggacgtggccagagccctgagactgcccgaggaggtggtggacttcctgtaccagtactggaagctgaagagaaaggtgaacttcaacaagcccctgatcacccccaagaaggacgaggaggacaacctggccaagagagagcaggacgtgctgttcagaagactgcagctgttcacccacctgagacaggacctggagagagtgagaaacctgacctacatggtgaccagaagagagaagatcaagagaagcgtgtgcaaggtgcaggagcagatcttcaacctgtacaccaagctgctggagcaggagagagtgagcggcgtgcccagcagctgcagcagcagcagcctggagaacatgctgctgttcaacagccccagcgtgggccccgacgcccccaagatcgaggacctgaagtggcacagcgccttcttcagaaagcagatgggcaccagcctggtgcacagcctgaagaagccccacaagagagaccccctgcagaacagccccggcagcgagggcaagaccctgctgaagcagcccgacctgtgcggcagaagagagggcatggtggtgcccgagagcttcctgggcctggagaagaccttcgccgaggccagactgatcagcgcccagcagaagaacggcgtggtgatgcccgaccacggcaagagaagagacaacagattccactgcgacctgatcaagggcgacctgaaggacaagagcttcaagcagagccacaagcccctgagaagcaccgacgtgagccagagacacctggacaacaccagagccgccgccatctggagattcagagtgatctggcagggccccgccgcctag

SEQ ID NO: 106315 - DNA, 2529 bp, Artificial Sequence
  derived and/or modified sequence
atgaaaaggggtagactgcctagctcttcagaggactctgacgataacggttccctatccaccacctggtcccaaaacagccggtcacagcacaggcgatctagctgctcccggcacgaggatcggaaaccgagcgaagtgtttcggactgatttaatcaccgcgatgaagttacacgactcctaccagttgaatcctgacgagtattacgtcctggctgatccctggagacaagaatgggagaagggagtccaggttccagtgtctccaggcactatccctcagccagttgcacgtgtggtatctgaggagaagtcactcatgtttataagaccaaagaagtacattgtgtcatctggaagcgagcccccggaactcgggtacgtagatatacgaacactggccgacagcgtctgcagatacgacctcaatgatatggacgctgcctggttggagctgactaatgaggagtttaaggagatgggcatgccagagcttgacgagtatacaatggaacgggttctggaggaattcgaacaaagatgctatgataatatgaatcacgcaatagagactgaggaaggtttggggatcgaatacgatgaggatgttgtgtgcgatgtttgtcaatcaccagacggcgaggacggcaacgagatggtcttttgcgataagtgtaacatttgcgttcatcaggcttgttacggcatcttaaaggtgccggagggtagctggttgtgccgtacttgcgctctcggggtacagccgaaatgtctcctatgtcctaaaaaggggggggccatgaagcccactcgctccgggacaaagtgggttcatgtgagctgcgcactgtggattccggaggtctctatagggtcccccgaaaaaatggagccaattaccaaggtcagccacatcccctcatctcgatgggccctggtgtgctcattgtgtaacgaaaaatttggcgcctctatccagtgcagcgtcaagaattgccgcaccgcttttcatgtcacgtgtgcctttgacagggggctggagatgaagaccattttggcagagaatgacgaagtaaaattcaaaagctactgtccgaaacacagtagccatcgaaagcccgaggagagtcttggaaaaggagccgcgcaggagaacggggcaccggagtgttctcctcggaatccgctcgaaccttttgcgagcttggagcaaaaccgcgaagaagcccatagagtctcagtgaggaagcagaagctgcaacaactcgaagacgagttttacacttttgtcaatctgttggatgtagccagggcgttacgactgcccgaggaggtggtcgactttctgtaccagtattggaagctcaagcgcaaggtcaattttaacaaacccttgattactcccaagaaggacgaggaagacaacctggctaagcgcgaacaggacgtgctattccgccgtcttcagttattcacccacctaaggcaggacttagaacgcgttcgaaatcttacgtacatggttacccgaagggaaaagatcaaacgctcggtgtgcaaggtgcaagagcagatcttcaatctttacacgaagctcttagaacaggagagagtgagcggcgtgccttccagctgctcttcctccagcctggaaaatatgctgctctttaatagcccatctgtcggtccagatgctcccaaaatcgaagatctcaaatggcatagcgctttcttccggaagcagatgggaacatccttggtacattctctgaagaagccccataagcgggaccctctacagaattcaccagggtcagaaggaaagaccctgctgaaacagcctgacctgtgtggccgcagagagggaatggtggtccctgaaagtttccttggcctcgagaagacattcgccgaagcccgccttatttcggctcagcagaagaacggggtggttatgccagaccacgggaagaggcgcgataatcgatttcactgtgacctcattaagggagatctgaaagacaaatcttttaaacagtctcataaacccctgcgatctaccgatgtaagccagcgccatctggataacacccgcgcggcaacatctccaggggtcggacagagcgcccctggaactagaaaagaaatcgtgcctaagtgcaacgggtcattgatcaaggtgaactataaccaaacagcggtgaaggtcccgaccaccccagcatctccggtgaagaactggggggggtttcgcatccccaagaagggtgagcgtcagcagcaaggggaggctcacgacggagcctgccatcagcacagcgattatccttaccttggcctggggcgagttcccgcgaaggagcgtgcaaaatcaaaactcaagagtgataacgagaatgacgggtacgttccggacgtggagatgagcgattctgagtctgaggcaagtgaaaaaaagtgcatccacacatcaagtaccatttctaggaggacggacatcattaggcgctctatccttgcctcatag

SEQ ID NO: 106316 - DNA, 54 bp, Artificial Sequence
  derived and/or modified sequence
atgaaacgggggcgcctgcccagctcctccgaggatagcgacgacaatgggtag

SEQ ID NO: 106317 - DNA, 2148 bp, Artificial Sequence
  derived and/or modified sequence
atgaaacgcggccggctgcctagctcatcagaagacagcgacgataatggcagtctttccacaacgtggtcccaaaatagccgtagtcagcatcgcagaagctcgtgttccaggcatgaggaccggaaaccgtctgaggtttttcggacggatctgattacagccatgaagctgcatgacagctatcagttaaaccctgacgaatattatgtgctcgccgacccttggcggcaggagtgggagaagggtgtgcaagtgcctgtttcgcccgggactataccccagccggtcgcccgagtggtatctgaggagaagagccttatgttcatacgccctaaaaaatatatcgtttcttccggttccgaaccaccggagctggggtacgtagatattaggacactagctgacagtgtctgtagatatgacctcaacgacatggatgcggcttggctcgaactgaccaacgaggagtttaaggaaatgggcatgccagagttagacgaatataccatggagcgggttctggaggaattcgagcagagatgttatgacaacatgaatcatgcgatcgaaaccgaagaggggctcggtatagagtacgatgaagacgtggtgtgcgacgtatgccagtctcccgacggggaagacggaaatgaaatggtgttttgcgataagtgcaatatttgcgtgcaccaagcatgttatggcatcctgaaggtgcccgaggggagttggttgtgcagaacctgcgctctgggcgtgcaacctaaatgtctgctgtgtcccaagaaaggaggggccatgaaacccactcgatccgggaccaagtgggttcacgtgagctgtgccttgtggattccagaggtatcaataggcagcccagagaaaatggagccgatcactaaggtgagtcatataccctccagcaggtgggccctggtctgtagcctgtgcaatgagaagtttggcgcctcaatccagtgttcggttaagaattgtaggactgccttccatgtgacctgcgctttcgatagggggttggagatgaagacaattcttgctgagaatgacgaagtcaagttcaaatcctactgtccaaagcactcaagccatcggaaaccagaggagtcactgggcaagggcgctgcccaggagaacggcgcccctgaatgtagccctcgaaaccctctggagcctttcgcaagtctcgagcagaatagggaagaagcccaccgcgtgtccgttaggaagcagaagttgcaacaattagaggacgaattttacactttcgttaacctcctggatgtcgccagggccctgcgcttgccggaggaggttgtcgatttcttgtatcagtattggaagctcaagcgcaaggtcaacttcaataaacccctgatcacccccaaaaaggatgaggaggacaacctggccaagcgagagcaggatgtgttattcagaaggctgcagctgtttacacaccttaggcaggacctagagagagtgaggaatctgacctatatggtgactcggcgtgagaaaatcaagcgtagtgtttgtaaagtgcaggaacaaattttcaatctctacaccaaacttctggaacaggaacgggtgagtggcgttccatcgtcatgctcttcgtcgtccttagagaatatgctgctctttaattctccatccgtgggaccagacgcccctaaaattgaggatctgaagtggcattccgcctttttcagaaagcaaatggggacctccctggtccactcactgaagaagccacacaagcgcgatcccctgcagaattctcctgggagcgagggaaaaaccttactgaagcagcccgatctatgtgggagacgtgagggcatggtggtgcctgaaagcttccttgggcttgagaaaaccttcgcggaagcccgtctgatcagcgcccaacagaaaaacggggtggtgatgccagatcatggtaagcggcgggacaacagatttcattgcgaccttattaagggggacctgaaagataagtcatttaagcagagccacaagccactccgatctactgacgtgtcacaacgccacttagacaacactcgggcggccgcgatttggcggttccgcgtcatctggcaaggaccagccgcctag

SEQ ID NO: 106318 - DNA, 2529 bp, Artificial Sequence
  derived and/or modified sequence
atgaagaggggccgcctgcccagcagcagtgaagattctgatgacaatggcagcctgagcaccacctggagccagaacagccgcagccagcaccggcgcagcagctgcagcagacatgaggacaggaagcccagcgaggtgttcagaacagacctgatcacagccatgaagctgcatgacagctaccagctgaacccagatgagtactacgtgctggccgacccctggaggcaggagtgggagaagggcgtgcaggtgcctgtgtccccaggcaccatcccccagcctgtggcccgggtggtgtctgaggagaagagcctgatgttcatccggcccaagaagtacatcgtgagcagcggcagcgagcccccagagctgggctacgtggacatccgcaccctggccgacagcgtgtgccgctatgacctgaatgacatggatgctgcctggctggagctgaccaatgaggagttcaaggagatgggcatgcctgagctggatgagtacaccatggagcgggtgctggaggagtttgagcagcgctgctatgacaacatgaaccacgccatcgagacagaggagggcctgggcatcgagtatgatgaagatgtggtgtgtgatgtgtgccagagcccagatggagaagatggaaatgagatggtgttctgtgacaagtgcaacatctgtgtgcaccaggcctgctacggcatcctgaaggtgcctgagggctcctggctgtgcaggacctgtgccctgggcgtgcagcccaagtgcctgctgtgccccaagaagggcggggccatgaagcccaccaggagcggcaccaagtgggtgcacgtgtcctgtgccctgtggatccctgaggtgtccatcggcagccctgagaagatggagcccatcaccaaggtgagccacatccccagcagccgctgggccctggtgtgcagcctgtgcaatgagaagtttggagccagcatccagtgcagcgtgaagaactgcaggacagccttccacgtgacctgtgcctttgaccggggcctggagatgaagaccatcctggctgaaaatgatgaggtgaagttcaagagctactgccccaagcacagcagccacaggaagccagaggagagcctgggcaagggggccgcccaggagaatggagcccctgagtgcagccccaggaaccccctggagccctttgccagcctggagcagaaccgggaggaggcccaccgggtgtctgtgaggaagcagaagctgcagcagctggaggatgagttctacacctttgtgaacctgctggatgtggcccgggccctgcggctgcctgaggaggtggtggacttcctgtaccagtactggaagctgaagaggaaggtgaacttcaacaagcccctcatcacccccaagaaggatgaggaggacaacctggccaagcgggagcaggatgtgctcttccggcggctgcagctgttcacccacctgcggcaggacctggagcgggtgaggaacctgacctacatggtgacccggcgggagaagatcaagaggtctgtgtgcaaggtgcaggagcagatcttcaacctgtacaccaagctgctggagcaggagcgggtgtctggagtgcccagcagctgcagcagcagcagcctggagaacatgctgctcttcaacagccccagcgtgggcccagatgcccccaagattgaggacctgaagtggcacagcgccttcttcaggaagcagatgggcaccagcctggtgcacagcctgaagaagccccacaagagggaccccctgcagaacagccctggcagcgagggcaagaccctgctgaagcagcctgacctgtgtggccggcgggagggcatggtggtgcctgagagcttcctgggcctggagaagacctttgctgaggcccggctcatcagcgcccagcagaagaatggagtggtgatgccagaccacggcaagagaagagacaaccgcttccactgtgacctgatcaagggggacctgaaggacaagagcttcaagcagagccacaagcccctgcggagcacagatgtgtcccagaggcacctggacaacacccgggccgccaccagccctggggtgggccagagcgcccctggcaccaggaaggagatcgtgcccaagtgcaatggcagcctcatcaaggtgaactacaaccagacagctgtgaaggtgcccaccaccccagccagccctgtgaagaactggggcggcttccgcatccccaagaagggggagcggcagcagcagggcgaggcccatgatggagcctgccaccagcacagcgactacccctacctgggcctgggccgggtgcctgccaaggagcgggccaagagcaagctgaagagtgacaatgaaaatgatggctacgtgcctgatgtggagatgtctgacagcgagagcgaggccagcgagaagaagtgcatccacaccagcagcaccatcagcagaagaacagacatcatccgccgcagcatcctggccagctag

SEQ ID NO: 106319 - DNA, 54 bp, Artificial Sequence
  derived and/or modified sequence
atgaagaggggccgcctgcccagcagcagtgaagattctgatgacaatggatag

SEQ ID NO: 106320 - DNA, 2148 bp, Artificial Sequence
  derived and/or modified sequence
atgaagaggggccgcctgcccagcagcagtgaagattctgatgacaatggcagcctgagcaccacctggagccagaacagccgcagccagcaccggcgcagcagctgcagcagacatgaggacaggaagcccagcgaggtgttcagaacagacctgatcacagccatgaagctgcatgacagctaccagctgaacccagatgagtactacgtgctggccgacccctggaggcaggagtgggagaagggcgtgcaggtgcctgtgtccccaggcaccatcccccagcctgtggcccgggtggtgtctgaggagaagagcctgatgttcatccggcccaagaagtacatcgtgagcagcggcagcgagcccccagagctgggctacgtggacatccgcaccctggccgacagcgtgtgccgctatgacctgaatgacatggatgctgcctggctggagctgaccaatgaggagttcaaggagatgggcatgcctgagctggatgagtacaccatggagcgggtgctggaggagtttgagcagcgctgctatgacaacatgaaccacgccatcgagacagaggagggcctgggcatcgagtatgatgaagatgtggtgtgtgatgtgtgccagagcccagatggagaagatggaaatgagatggtgttctgtgacaagtgcaacatctgtgtgcaccaggcctgctacggcatcctgaaggtgcctgagggctcctggctgtgcaggacctgtgccctgggcgtgcagcccaagtgcctgctgtgccccaagaagggcggggccatgaagcccaccaggagcggcaccaagtgggtgcacgtgtcctgtgccctgtggatccctgaggtgtccatcggcagccctgagaagatggagcccatcaccaaggtgagccacatccccagcagccgctgggccctggtgtgcagcctgtgcaatgagaagtttggagccagcatccagtgcagcgtgaagaactgcaggacagccttccacgtgacctgtgcctttgaccggggcctggagatgaagaccatcctggctgaaaatgatgaggtgaagttcaagagctactgccccaagcacagcagccacaggaagccagaggagagcctgggcaagggggccgcccaggagaatggagcccctgagtgcagccccaggaaccccctggagccctttgccagcctggagcagaaccgggaggaggcccaccgggtgtctgtgaggaagcagaagctgcagcagctggaggatgagttctacacctttgtgaacctgctggatgtggcccgggccctgcggctgcctgaggaggtggtggacttcctgtaccagtactggaagctgaagaggaaggtgaacttcaacaagcccctcatcacccccaagaaggatgaggaggacaacctggccaagcgggagcaggatgtgctcttccggcggctgcagctgttcacccacctgcggcaggacctggagcgggtgaggaacctgacctacatggtgacccggcgggagaagatcaagaggtctgtgtgcaaggtgcaggagcagatcttcaacctgtacaccaagctgctggagcaggagcgggtgtctggagtgcccagcagctgcagcagcagcagcctggagaacatgctgctcttcaacagccccagcgtgggcccagatgcccccaagattgaggacctgaagtggcacagcgccttcttcaggaagcagatgggcaccagcctggtgcacagcctgaagaagccccacaagagggaccccctgcagaacagccctggcagcgagggcaagaccctgctgaagcagcctgacctgtgtggccggcgggagggcatggtggtgcctgagagcttcctgggcctggagaagacctttgctgaggcccggctcatcagcgcccagcagaagaatggagtggtgatgccagaccacggcaagagaagagacaaccgcttccactgtgacctgatcaagggggacctgaaggacaagagcttcaagcagagccacaagcccctgcggagcacagatgtgtcccagaggcacctggacaacaccagggctgctgccatctggaggttccgggtcatctggcagggccctgctgcctag

SEQ ID NO: 106321 - DNA, 5771 bp, Artificial Sequence
  derived and/or modified sequence
gttttggcaagggattaaagtgctcccccctgtggcagcagtgacccagaaatgagtttgattcacatagtccttcctccataacaagccaaacgccagaccgagagtgcctccgtgcgcgagtgcccggtgtgtgcgcgccggcgagagcaggggcccgcccggctccccgcccgccgcggcccgaactcatgcagctccgagcgagcgagcggcgcccagcccagcgcctcggccgaacccctccgcagcaggctgcctgctgtttcccggggagatcatgaaacgaggtcgccttcccagcagcagtgaggattctgacgacaatggcagcctgtcaactacttggtcccagaattcccgatcccagcataggagaagctcctgctccagacatgaagatcgaaagccttcagaggtgtttaggacagacctgatcactgccatgaagttgcatgactcctaccagctgaatccggatgagtactatgtgttggcagatccctggagacaggaatgggagaaaggggtccaggtgcctgtgagcccggggaccatccctcagcctgtggccagggttgtgtctgaagagaaatccctcatgttcatcaggcccaagaagtacatcgtgtcatcaggctctgagcctcccgagttgggctatgtggacatccggacgctggctgacagcgtgtgtcgctatgacctcaatgacatggatgctgcatggctggaactgaccaatgaagaatttaaggagatgggaatgcctgaactagatgaatacaccatggagagggtcctagaggaatttgagcagcgatgctacgacaatatgaatcatgccatagagactgaggaaggcctggggatcgaatatgatgaagatgttgtctgtgatgtctgccagtctcctgatggtgaggacggcaatgagatggtgttctgtgacaaatgcaacatctgtgtgcaccaggcctgttatggaatcctcaaggtaccagagggcagctggctgtgccggacatgtgccctgggggttcagccaaaatgtctgctgtgtccgaagaagggtggagctatgaagcccacccgtagcggaaccaagtgggtccacgttagctgtgctctgtggatccctgaggtgagcattggcagcccagagaagatggagcccatcaccaaggtgtcacacattcccagcagccggtgggcgctagtgtgcagcctctgcaatgagaagtttggggcctctatacagtgctctgtgaagaactgccgcacagccttccatgtgacctgtgcttttgaccggggcctggagatgaagaccatcttagcagagaatgatgaagtcaagttcaagtcctattgcccaaagcacagctcacataggaaacccgaggagagtcttggcaagggggctgcacaggagaatggggcccctgagtgttccccccggaatccgctggagccctttgccagccttgagcagaaccgggaggaggcccaccgggtgagtgtccgtaagcagaagctgcagcagttggaggatgagttctacaccttcgtcaacctgctggatgttgccagggctctgcggctgcctgaggaagtagtggatttcctgtaccagtactggaagttgaagaggaaggtcaacttcaacaagcccctgatcaccccaaagaaagatgaagaggacaatctagccaagcgggagcaggatgtcttatttaggaggctgcagctgttcacgcacctgcggcaggacctggagagggttcggaacctcacttacatggtgacccgcagggaaaagattaaacggtctgtgtgcaaagtccaggaacagatattcaatctttacactaagcttttggagcaagaaagagtttcaggtgtgccttcttcctgctcctcctcctcactggaaaacatgcttttgtttaacagtccttctgttggccctgatgctcccaagatagaggacttgaagtggcattctgcattcttcagaaaacaaatgggtacttccttggttcattcgctgaaaaagccccataagcgagatcctttgcagaatagccctggaagtgaaggcaaaaccctgctgaagcagccagacctgtgtggtagaagggaggggatggtggtcccagagagctttttgggtttagaaaagacctttgcagaagcacgtctcatatcagcacaacagaaaaatggtgtggtgatgccagaccatgggaaaagaagagacaatcgttttcattgtgatctcattaaaggagacttaaaggacaaatcttttaaacagagtcacaagcctctcaggtccacagatgtgtcccagaggcatctggacaacacaagagctgccacctcccctggagtggggcagtcagcacctggcacaaggaaggagatagtgcccaagtgcaatggctccctaatcaaagtaaactataatcagactgcagtcaaagtgcctacaacacctgccagcccagtgaaaaactggggaggattccggattccaaagaagggggaacggcagcagcagggagaggcccacgatggggcctgccaccagcactcagactacccatatttgggcttaggccgagttccagccaaggaaagggcaaaaagcaaattaaaatccgacaatgagaatgacgggtatgtccccgatgtggaaatgagtgactcagagagtgaggcatcagaaaagaaatgtatacacaccagcagcactatcagcagaaggacagacattatcaggagaagcatcttggcttcttgatgcaacagagatgatgcggaagccctttgggctcgtcattgggtttgctagaggagagctctgatgtgggggagaagcagaaacccattaatcctgagctacacaaacacatttacttgcaattcagattaatttttttccagagtcatttttaaatcatttttgtgagaagtttgtgttatttgcaacttgttgaggaaacagaagagtagattgtaaccataagacactgctaagactagaacccgaactgaacactaaaataaaaatgaaatgttttaaagaaggcaaggcttaaataagcctcatgaatttttatagccctctgcattcttcccaaagcacaaactcatggttacctgaatatagggaaccagatatggttcttgagaaaccctcatggtaccattcacagcccataaagtttattttctaggactgtggtagatcttgaaatcatatttatatttggccctcaaggctatttttgttgcattatagcatataggcagcagctctgaagcttcagtaacactaagaaatttatgtgtaaatatagcagtcagggaagagaattttaaaaaaggtcattattgaagaagctgaggggacagggtagagctgctgcaatatggagatttagggtaatatggcaaggtcctgctgcttgaagcctgtgagtgggttgtggatatgggactggtggagagtgagactgttaggaaagttgtatctatgaataagggcagttgaagtagaatttttaccagtccacttgaccttcttcttccctaaccactggctcttgagccagcttgggatttccctggccattgccaatacctggccatctggcttccaatagtacagtggctactcaagttcaagcgaagaacttccagactctggtgactgttacttcccagagccaaccactagtgcatatgttagggaatctgggcttccaacatgaatggattccttaagaaaaaggaaaaaaaaaaaaaaaagaaaaaaagaaaaaaaaaagaaaaaagaaaaaaagagaaaaaagcgaaataggttatattttaaaaacaatagaaaggcaataagttgcgataagctcttactattgaccaaggttatacaggaaagagactgaagtgtacccttgaataggttttctgtagtcagagttctaaactctaatttgtaacttggactttctaattgcaaatggcaataactattaagttatcagcaataataaatttagcattaaatttgagtacaatgttttgtttttgcactccccatagtgcgtatgtattaagacagtggatagtgtttaggtcctgttaattttctttggaattcaatgtggttgtgaatcaaacttaaggaaggaacgtttaaatagcaatgagatacagaattatgggcctttggaacaagcccgacttcccctaaattctccttagtttgttaataccagtattcagattcctgattcatttatacatctgtttccatatggcagggacattatgatacttaatgaataatgctttgaggagttctgcagttaactttcaagtcttccagatgattgtcaacaacaaaaaaggcttattgaatcccatcttgctatgcaagttttatcagatgatcaaatagtagatctgatacatccccattgtatgtacgacattttcaaaccaagtcttaacttttcaaggacattttagtagctaattcaggggagggggaagaatgatgcaggtttttagattgactgactatttttgagttatggggctcattttgaaagactgctgtccagatcagcttgttgctgcagataatagaaggttcttatgaatccaagttgtatattcacttgtaggataatttaaaaattagattttttttgcatatgagcaaaaaccttttgctggatacaggagaaggttggactttatctacagttatcttttgattacagcaacagctctgggtgagagtagaatttatagagggataatttgtcaagccatagaaagaaaatctaaattaatctagtaagtgtatgacctctcaccattttaagaggtatcagattcatttgcactattaggaatgctagttttgtgcaaaaataatgccttacctgttttttccccacatttaggttgaaaagctttcaaatgttccaagttatgctgaaccaaaaaaaacaaaacaaaaacaaaacaaaaaatattaaaaaaaacccacacaaaaacaaaacacacaaaaataaaaagcccacactttttattcctgcttcgaaatgcaaatggatagagcacggtttctctgacagtataatgatagctttgtgagttagtttcatgtcatgctgggaactctctatgaggtggccataagcagcaaccagcccaaacacccacttgcgttctattagtatggaaccatttgcatttgttttttttaagctttatctttccttgtgcatcctgaccaagaaatatctttgattatgattaatgtattatgtcaaaatgtaggctagttaaacttttgtaaagttgcctggaatgtcatttgttaggttataaacacaagatctaaatgaagggttttatgtgttgtgtacaaatcttattttgaaatggacaaacttgtcattacatttgtaaccttgtacagaggatttttcactatgtgcctagcttggtgtccattcagctaaaattgaaaaaaaaaaaaaggtgcatgaagagttaaaaatcaaattaaagtatatgtagagatgactattttatattacatgacccaatcctgtatttatttctaccccctttttgaaagtatttataaaactagttgaggacagctgtatttttttgttgaactatttagtagaattgtgcctttttgtctgtatgtgaataaatgctgtacattttgcaataca

SEQ ID NO: 106322 - DNA, 2529 bp, Artificial Sequence
  derived and/or modified sequence
atgaagcggggccggctgcccagcagcagcgaggacagcgacgacaacggttcgctttctacaacttggtctcagaattccaggagtcagcaccggcgaagcagctgctctcgacacgaggacaggaaaccttccgaagtgttccgcactgacctgattacagcaatgaaactccatgacagctatcaactgaaccctgatgaatattatgttctagctgatccttggcggcaggagtgggagaagggcgtacaggtcccagtctcccctggaacaattccacaacccgtcgcccgggtggttagcgaggaaaaaagtctcatgtttatacggcccaagaagtacatcgtgtcatctggatccgaaccgcccgaattgggctacgtggacattcgcactcttgcagacagtgtgtgcaggtatgatttaaacgacatggacgctgcttggctggagctgacaaatgaggagtttaaggagatgggaatgcctgaactggatgagtacacgatggagcgggttctggaggagtttgaacagaggtgctacgataatatgaaccacgctattgaaactgaggagggactcgggatagagtacgacgaagatgtcgtgtgcgatgtctgccagtcccccgacggcgaggatgggaacgagatggtgttttgcgataagtgcaatatttgcgtgcaccaggcttgctatggaatactgaaagtgccagagggttcttggctctgtcgcacatgcgcattaggggtgcagcctaagtgtctcctgtgtccaaaaaaaggcggcgccatgaagcctacccgatctgggactaaatgggtccacgtcagttgcgctctttggatccccgaggtctctatcggttcgcccgaaaagatggagccaattaccaaggtgagccatattcccagttctcggtgggcactggtctgctcactgtgtaatgagaagttcggagcctctatccagtgtagcgttaaaaactgtagaacagcatttcacgtgacttgtgctttcgatcgaggacttgaaatgaagacaattctggcggagaacgatgaagtgaaatttaagagttactgtccaaaacacagctcgcaccggaagcctgaagagtccctgggcaagggagccgcgcaggagaatggggccccagaatgcagtccgcggaatccgctagagccctttgcaagcctggaacaaaacagggaggaggcacatcgagttagcgtccgtaagcagaaactgcagcagttagaggatgagttttacacctttgtcaacctgctggacgtcgctcgcgctttaagacttccagaggaagtcgtggattttctctaccagtactggaaattgaaaaggaaggtcaacttcaataaacccctgatcacccccaagaaagacgaagaagacaacctggctaagagggaacaggacgtgttgttcagacgcttgcagctcttcactcacctgcgccaggatttggagagagtcagaaatctgacttatatggtgacccggagggaaaaaataaagagatcggtttgcaaggtgcaagagcagatcttcaatctgtacacaaaattactggagcaggagagagtcagcggcgttccctccagttgttccagctctagtctggagaacatgctgctgttcaacagcccctctgttggacccgatgcaccgaaaatcgaggatttaaagtggcactctgccttctttaggaagcagatgggaacatcactggtccattcattaaaaaagccccacaaaagggaccctcttcagaatagcccgggttcggaaggcaagaccttgctgaagcaacccgacttgtgtgggcgtagggagggaatggtggtgcctgagagtttcctagggctggagaaaacattcgctgaggcccggctgatctccgctcagcagaagaacggggtcgttatgccggaccatggcaaacggcgagacaataggttccactgcgatctcataaaaggcgatcttaaagataaatctttcaaacaaagtcacaagcctctgcggagtactgacgtttcccagaggcacctcgataatacccgcgccgctaccagccccggagtgggtcagtcagctccagggacacgaaaagaaattgtgcccaagtgcaacgggtctttaattaaagtgaactataaccagactgctgtcaaggtccccaccactccagcgtcaccggtgaaaaactgggggggattccggattccaaaaaagggtgagcgccagcagcagggagaggcacatgatggagcgtgtcaccagcacagtgattatccttatcttggcttaggccgggtccccgcaaaagaacgcgccaaaagcaaactgaagtccgacaatgagaacgacggatacgtgccggacgtggagatgtctgacagtgagtccgaagccagtgaaaagaaatgcatccacacaagcagcaccatctcccgaagaactgacatcattagacggtccatccttgcatcatag

SEQ ID NO: 106323 - DNA, 54 bp, Artificial Sequence
  derived and/or modified sequence
atgaagcggggccggctgcccagcagcagcgaggacagcgacgacaatgggtag

SEQ ID NO: 106324 - DNA, 2148 bp, Artificial Sequence
  derived and/or modified sequence
atgaagcggggccggctgcccagcagcagcgaggacagcgacgacaacgggtctctgagtaccacatggtcccagaatagcaggtctcaacataggaggagcagctgctctaggcacgaagaccggaagccttcagaagtgtttcgtactgatctgataactgcaatgaagctgcatgactcctaccagctgaaccctgacgagtattacgtgctggccgacccgtggcgccaagagtgggaaaagggcgtgcaggttcctgtcagtccaggaaccatcccacaacccgttgcccgcgttgtcagtgaggagaaatccctgatgttcattcggcccaagaaatatattgtaagcagtggctctgagcctccagagcttggctatgttgatattcggacattagcagacagcgtgtgtcgctacgacctcaacgatatggatgcagcttggctggagctcaccaacgaggagtttaaggagatggggatgcccgagttggacgagtatacaatggagagggttctggaggagttcgaacagcgctgctacgacaatatgaaccatgctatcgagaccgaagagggtttgggtattgaatacgatgaggacgtggtgtgcgatgtttgccagtcacccgatggggaggatggcaatgaaatggtgttttgcgataaatgcaacatttgcgtgcaccaggcctgttacggcattttgaaggtgccagaaggttcctggttatgtcggacctgcgctctcggcgtgcagcctaagtgtctcctgtgccctaagaaggggggagctatgaaaccaacaagaagcggcacaaaatgggtccacgtttcttgcgcattgtggatacccgaggtctccatcggatccccagagaaaatggagcctatcactaaggtgtcccacatcccaagttctaggtgggcactggtttgttcactgtgcaacgaaaagttcggagcatctatccagtgctcggtgaagaactgcagaaccgccttccatgtcacctgcgccttcgacaggggactggagatgaagacaatcttggccgagaacgatgaggttaagtttaagtcgtattgcccaaagcattccagccacaggaagcccgaggagagcttgggcaagggagcggcacaggagaacggggcacccgaatgtagccctcgaaatccactcgaaccgttcgctagccttgaacagaatagagaagaggctcatcgagtatccgtgcggaagcagaaactgcagcagctggaggacgagttctacacttttgtgaacctattagatgtagcacgagctcttcgcctgcctgaggaggtggttgacttcctctaccagtactggaagctgaagcgaaaagttaacttcaataaaccgttgatcacgcccaaaaaagatgaagaggataacctcgcaaaaagagagcaagatgtcctgtttcggcggctccagctgtttacccacctgagacaggacctggagcgggtgcgcaaccttacctacatggtaactcgaagagagaaaattaagcgatcagtgtgtaaagtccaagaacagatattcaatctctacactaagctgctggaacaagagagggtgtctggggtgccttcctcgtgcagctcgtcctcactggagaatatgttgctgtttaactcccccagcgtgggccctgacgctcctaaaattgaagacttgaaatggcacagcgccttttttcggaagcaaatgggaacaagcctggtccactccttgaagaagccacacaagagagatcccttgcagaacagccccggctccgaaggtaaaactttgctgaagcagcctgacctttgtggacgccgcgagggaatggttgtgcctgaatcatttctcggcttggagaagaccttcgccgaggcacgtctgatatctgcacagcagaagaatggcgtggttatgcctgatcacggaaaacggagggataaccggttccattgtgatctgataaagggagacttgaaggacaaatctttcaagcagtctcacaaaccactgcgctccaccgacgtttctcagaggcatctggataacactagggccgctgcaatttggcgttttcgagttatctggcagggtcccgctgcctag

SEQ ID NO: 106325 - DNA, 2529 bp, Artificial Sequence
  derived and/or modified sequence
atgaagcggggtaggttacccagtagttccgaggactccgatgacaatgggagtttaagtacaacctggagtcaaaattccagatcccaacaccgtcgaagctcatgtagccggcacgaggaccgaaagcctagcgaggtgtttcgcaccgatctcattactgcaatgaaactgcacgacagctatcagctgaaccccgatgaatattacgtactggcagatccttggcggcaagagtgggagaagggggtgcaagtacccgtgagccccggaaccatcccgcagcctgtcgctcgcgtagtgtccgaggagaaaagccttatgttcattagacccaaaaagtacatcgttagctccggctctgaacctcctgagctgggctacgttgacattagaaccctggccgattccgtctgcagatacgatctgaacgatatggacgccgcatggttggagttgactaacgaggagtttaaggaaatgggcatgccagaacttgacgagtacacaatggaacgcgttctggaagagttcgagcagaggtgctatgacaacatgaaccatgccatcgaaacggaggaaggattaggaatcgaatacgatgaagacgtggtgtgcgacgtatgtcagtctccagacggcgaggatggaaacgaaatggtgttctgcgataagtgcaacatatgtgtgcatcaggcttgctacgggattctgaaggtcccagaaggctcctggctgtgtcggacctgcgctctcggtgtgcagccaaagtgcttgctgtgccccaagaaaggtggggctatgaaaccaactagatcaggaactaaatgggttcatgttagttgcgctctctggattccagaggttagcattggcagccctgaaaagatggaaccaattaccaaagtatcccacattccttccagtcggtgggccctagtctgtagtctgtgcaacgaaaagttcggagccagcatccaatgctctgtcaaaaattgccgaacggcattccacgtcacatgtgcattcgatagaggcctcgaaatgaagacgatcctagccgagaatgacgaggtaaagttcaagtcctactgtcctaaacactccagccataggaagcccgaggagagcctcggcaagggagcggctcaagaaaacggcgctccggaatgctccccgagaaaccctctcgaaccattcgcctctctggaacagaatagagaggaggcacaccgtgtgtccgtgcgcaagcagaagctgcagcaactcgaggacgagttctacaccttcgtcaaccttttggacgttgccagagctctgaggctgccagaggaggtggtggattttctctaccagtactggaagctgaagagaaaggtgaatttcaataagccattgatcaccccaaagaaagatgaggaggataatctcgctaagagggagcaggatgtgctattcaggcgattacagcttttcactcatctgagacaagacctggaacgtgtccggaaccttacctacatggtcacccgacgtgagaaaattaagagaagcgtgtgcaaggtgcaggagcagatctttaacttgtacaccaagttactggagcaagaacgcgtcagtggggtcccttcttcatgctccagcagttcactggaaaatatgttgctgttcaactctcctagcgttggccctgacgcgccaaaaattgaggacctgaagtggcatagtgcgttctttcgaaagcaaatgggaacttctctcgtgcattcactgaaaaaaccccacaagagagacccattgcagaatagcccaggcagcgagggcaaaacactcctaaaacagccagatttatgcggtaggagggagggcatggtcgtgcctgaatctttcctgggactggagaaaacctttgccgaggcacgcctcatatcagctcagcagaagaatggagtcgtgatgcctgatcatggaaaaagacgagataaccgattccattgtgatcttataaaaggggatttaaaagataagtcctttaagcaatcacacaaaccgctgcggtcgaccgacgtgagtcagcgccatctggacaatacgcgcgctgccacatcccccggagttgggcagtccgccccaggaacaagaaaggagattgttcccaagtgtaatggcagtctaatcaaagtgaattacaaccaaactgctgtgaaggtgccgaccacaccagcatctccagtgaaaaattggggagggtttagaataccgaagaagggcgaaaggcagcagcagggagaagcccatgatggcgcatgccatcagcactctgattacccctacctgggattgggccgagttccagccaaggagcgagccaagtccaaactgaaaagcgataatgaaaacgacggctacgtgcccgacgtcgagatgagcgatagcgaatcagaggctagcgagaagaagtgtatccacacatcatcaactattagccgtcgtacggacataatccgacgctcgatcctggcatcttag

SEQ ID NO: 106326 - DNA, 54 bp, Artificial Sequence
  derived and/or modified sequence
atgaagcgtggtcgcttgccatcttcctctgaagacagcgatgacaatgggtag

SEQ ID NO: 106327 - DNA, 2148 bp, Artificial Sequence
  derived and/or modified sequence
atgaagcgtggtaggcttccttcaagctctgaggacagcgatgacaatgggtccctgtccactacttggagccagaattctcgttcacagcatcgaagatctagttgttcaagacacgaagatcgaaaaccgtctgaggtcttccgtaccgatctgattactgccatgaagcttcacgacagttaccaactgaatccagatgagtactacgtgttagctgatccctggaggcaggagtgggaaaaaggagttcaggtccctgtgtcgccgggaaccattcctcagcctgtggctcgggtggtgagcgaagagaaatctctgatgtttattcggcctaaaaaatacatcgtgtcttctgggtctgagccacctgaacttgggtatgtcgatattaggaccctcgcagattccgtgtgtagatacgacttgaacgatatggacgccgcttggttggagctgacaaatgaggagtttaaagaaatgggaatgcctgagctggatgaatatacaatggaacgtgtgttggaggagtttgagcagagatgctatgataacatgaatcacgccatcgagaccgaagagggactgggcatcgaatacgacgaggatgttgtgtgtgacgtgtgccagagccctgacggcgaggacggaaatgaaatggtgttctgcgataaatgtaatatctgcgtacatcaggcctgttacggtatccttaaggttcctgagggttcttggctctgtcgcacttgtgccctgggggtccagccgaagtgcctcctctgtcctaaaaagggaggggcaatgaaacccactcgctcaggaacaaaatgggtccatgtctcttgcgccctgtggatcccggaggtttcgattggatcccccgaaaagatggagccaataactaaggtgagccatattccgagcagccgctgggcactcgtttgctctttatgtaacgagaaatttggggcttccatccagtgttcagtcaagaactgcaggaccgccttccacgtgacctgtgcctttgatagagggctggagatgaaaaccattctggcggagaacgacgaagtgaaatttaagtcctattgtccaaagcatagtagccatcggaaaccggaagagagcctcggtaaaggggcagcacaggagaatggagctcccgagtgttctccacgtaatcctcttgagccgttcgccagcctggagcagaacagagaggaggctcatagggtcagcgtgagaaagcaaaagttgcagcagctagaggacgagttttacaccttcgtgaatttattggatgtcgctcgggcactgcgtctccctgaggaggtggttgattttctctaccagtattggaaactcaaaaggaaagtgaattttaacaagcccctcatcactcccaaaaaagatgaggaggacaacttggccaagcgtgagcaggatgtactttttcggcgactccagctgttcacccacctgaggcaagatttggagcgcgtacgtaatttgacttacatggtgactcggagagagaagattaaacgatccgtctgtaaggttcaggaacagatattcaatctgtataccaagctgttggaacaggaacgtgtgtcaggcgtgccaagtagttgctcatcttccagtcttgaaaacatgctgctctttaattccccttcagtggggccagatgcccctaagatagaggatcttaagtggcattccgccttttttcgaaaacagatggggacaagcctggtgcattccctcaagaaaccacacaagcgcgaccctctacaaaattcacctggctcggaaggcaagacgctattaaagcagccagacctgtgtggaaggagagaaggcatggtagttcccgaaagctttctaggcctggagaagacctttgccgaggctagacttataagtgctcagcagaagaatggcgtggtaatgcccgaccacggcaagcggagggataatcgattccactgcgatctgatcaaaggggatctcaaagataagagtttcaagcaatcacacaaacccctgagaagcactgacgtctctcagagacatctagacaatacgcgggctgccgctatatggcggttccgtgtgatctggcaaggcccagcagcgtag

SEQ ID NO: 106328 - DNA, 3000 bp, Artificial Sequence
  derived and/or modified sequence
cgcgcgtgtgtccgcgcgtgtccgcgtgtgggtccgtgtgcgcgtcccggtcccgcggcggcgacggcggcggcggcggcggcggctgcaggacgagccgagaggctcagccatatttgatggttttgttgctttgctcgggagttctcgggagtaatttaatgccgaaggtcgctgcctagtggaaataatataatacgtcattaatatggcgccaaaagattgggttctcgatctgtagcgaggagggagggaggcagccgctgagcgcagcgttactatcccaccagtaacttgggcattgccggggcgggggccggaggaggaggagaggatgatttttggatcctgagaattgatctatgttggatcagctgcctgctgtttcccggggagatcatgaaacgaggtcgccttcccagcagcagtgaggattctgacgacaatggcagcctgtcaactacttggtcccagaattcccgatcccagcataggagaagctcctgctccagacatgaagatcgaaagccttcagaggtgtttaggacagacctgatcactgccatgaagttgcatgactcctaccagctgaatccggatgagtactatgtgttggcagatccctggagacaggaatgggagaaaggggtccaggtgcctgtgagcccggggaccatccctcagcctgtggccagggttgtgtctgaagagaaatccctcatgttcatcaggcccaagaagtacatcgtgtcatcaggctctgagcctcccgagttgggctatgtggacatccggacgctggctgacagcgtgtgtcgctatgacctcaatgacatggatgctgcatggctggaactgaccaatgaagaatttaaggagatgggaatgcctgaactagatgaatacaccatggagagggtcctagaggaatttgagcagcgatgctacgacaatatgaatcatgccatagagactgaggaaggcctggggatcgaatatgatgaagatgttgtctgtgatgtctgccagtctcctgatggtgaggacggcaatgagatggtgttctgtgacaaatgcaacatctgtgtgcaccaggcctgttatggaatcctcaaggtaccagagggcagctggctgtgccggacatgtgccctgggggttcagccaaaatgtctgctgtgtccgaagaagggtggagctatgaagcccacccgtagcggaaccaagtgggtccacgttagctgtgctctgtggatccctgaggtgagcattggcagcccagagaagatggagcccatcaccaaggtgtcacacattcccagcagccggtgggcgctagtgtgcagcctctgcaatgagaagtttggggcctctatacagtgctctgtgaagaactgccgcacagccttccatgtgacctgtgcttttgaccggggcctggagatgaagaccatcttagcagagaatgatgaagtcaagttcaagtcctattgcccaaagcacagctcacataggaaacccgaggagagtcttggcaagggggctgcacaggagaatggggcccctgagtgttccccccggaatccgctggagccctttgccagccttgagcagaaccgggaggaggcccaccgggtgagtgtccgtaagcagaagctgcagcagttggaggatgagttctacaccttcgtcaacctgctggatgttgccagggctctgcggctgcctgaggaagtagtggatttcctgtaccagtactggaagttgaagaggaaggtcaacttcaacaagcccctgatcaccccaaagaaagatgaagaggacaatctagccaagcgggagcaggatgtcttatttaggaggctgcagctgttcacgcacctgcggcaggacctggagagggttcggaacctcacttacatggtgacccgcagggaaaagattaaacggtctgtgtgcaaagtccaggaacagatattcaatctttacactaagcttttggagcaagaaagagtttcaggtgtgccttcttcctgctcctcctcctcactggaaaacatgcttttgtttaacagtccttctgttggccctgatgctcccaagatagaggacttgaagtggcattctgcattcttcagaaaacaaatgggtacttccttggttcattcgctgaaaaagccccataagcgagatcctttgcagaatagccctggaagtgaaggcaaaaccctgctgaagcagccagacctgtgtggtagaagggaggggatggtggtcccagagagctttttgggtttagaaaagacctttgcagaagcacgtctcatatcagcacaacagaaaaatggtgtggtgatgccagaccatgggaaaagaagagacaatcgttttcattgtgatctcattaaaggagacttaaaggacaaatcttttaaacagagtcacaagcctctcaggtccacagatgtgtcccagaggcatctggacaacacaagagctgccacctcccctggagtggggcagtcagcacctggcacaaggaaggagatagtgcccaagtgcaatggctccctaatcaaagtaaactataatcagactgcagtcaaagtgcctacaacacctgccagcccagtgaaaaactggggaggattccggattccaaagaagggggaacggcagcagcagggagaggcccacgatggggcctgccaccagcactcagactacccatatttgggcttaggccgagttccagccaaggaaagggcaaaaagcaaattaaaatccgacaatgagaatgacgggtatgtccccgatgtggaaatgagtgactcagagagtgaggcatcagaaaagaaatgtatacacaccagcagcactatcagcagaaggacagacattatcaggagaagcatcttggcttcttgatgcaacagagatgatgcggaagccctttgggctcgtcattgggtttgctagaggagagctctgatgtggggg

SEQ ID NO: 106329 - DNA, 2775 bp, Artificial Sequence
  derived and/or modified sequence
ctgcaggacgagccgagaggctcagccatatttgatggttttgttgctttgctcgggagttctcgggagtaatttaatgccgaaggtcgctgcctagtggaaataatataatacgtcattaatatggcgccaaaagattgggttctcgatctgtagcgaggagggagggaggcagccgctgagcgcagcgttactatcccaccagtaacttgggcattgccggggcgggggccggaggaggaggagaggatgatttttggatcctgagaattgatctatgttggatcagctgcctgctgtttcccggggagatcatgaaacgaggtcgccttcccagcagcagtgaggattctgacgacaatggcagcctgtcaactacttggtcccagaattcccgatcccagcataggagaagctcctgctccagacatgaagatcgaaagccttcagaggtgtttaggacagacctgatcactgccatgaagttgcatgactcctaccagctgaatccggatgagtactatgtgttggcagatccctggagacaggaatgggagaaaggggtccaggtgcctgtgagcccggggaccatccctcagcctgtggccagggttgtgtctgaagagaaatccctcatgttcatcaggcccaagaagtacatcgtgtcatcaggctctgagcctcccgagttgggctatgtggacatccggacgctggctgacagcgtgtgtcgctatgacctcaatgacatggatgctgcatggctggaactgaccaatgaagaatttaaggagatgggaatgcctgaactagatgaatacaccatggagagggtcctagaggaatttgagcagcgatgctacgacaatatgaatcatgccatagagactgaggaaggcctggggatcgaatatgatgaagatgttgtctgtgatgtctgccagtctcctgatggtgaggacggcaatgagatggtgttctgtgacaaatgcaacatctgtgtgcaccaggcctgttatggaatcctcaaggtaccagagggcagctggctgtgccggacatgtgccctgggggttcagccaaaatgtctgctgtgtccgaagaagggtggagctatgaagcccacccgtagcggaaccaagtgggtccacgttagctgtgctctgtggatccctgaggtgagcattggcagcccagagaagatggagcccatcaccaaggtgtcacacattcccagcagccggtgggcgctagtgtgcagcctctgcaatgagaagtttggggcctctatacagtgctctgtgaagaactgccgcacagccttccatgtgacctgtgcttttgaccggggcctggagatgaagaccatcttagcagagaatgatgaagtcaagttcaagtcctattgcccaaagcacagctcacataggaaacccgaggagagtcttggcaagggggctgcacaggagaatggggcccctgagtgttccccccggaatccgctggagccctttgccagccttgagcagaaccgggaggaggcccaccgggtgagtgtccgtaagcagaagctgcagcagttggaggatgagttctacaccttcgtcaacctgctggatgttgccagggctctgcggctgcctgaggaagtagtggatttcctgtaccagtactggaagttgaagaggaaggtcaacttcaacaagcccctgatcaccccaaagaaagatgaagaggacaatctagccaagcgggagcaggatgtcttatttaggaggctgcagctgttcacgcacctgcggcaggacctggagagggttcggaacctcacttacatggtgacccgcagggaaaagattaaacggtctgtgtgcaaagtccaggaacagatattcaatctttacactaagcttttggagcaagaaagagtttcaggtgtgccttcttcctgctcctcctcctcactggaaaacatgcttttgtttaacagtccttctgttggccctgatgctcccaagatagaggacttgaagtggcattctgcattcttcagaaaacaaatgggtacttccttggttcattcgctgaaaaagccccataagcgagatcctttgcagaatagccctggaagtgaaggcaaaaccctgctgaagcagccagacctgtgtggtagaagggaggggatggtggtcccagagagctttttgggtttagaaaagacctttgcagaagcacgtctcatatcagcacaacagaaaaatggtgtggtgatgccagaccatgggaaaagaagagacaatcgttttcattgtgatctcattaaaggagacttaaaggacaaatcttttaaacagagtcacaagcctctcaggtccacagatgtgtcccagaggcatctggacaacacaagagctgctgcaatatggagatttagggtaatatggcaaggtcctgctgcttgaagcctgtgagtgggttgtggatatgggactggtggagagtgagactgttaggaaagttgtatctatgaataagggcagttgaagtagaatttttaccagtccacttgaccttcttcttccctaaccactggctcttgagccagcttgggatttccctggccattgccaatacctggccatctggcttccaatagtacagtggctactcaagttcaagcgaagaacttccagactctggtgactgttacttcccagagccaaccactagtgcatatgttagggaatctgggcttccaacatgaatggattcctt

SEQ ID NO: 106330 - DNA, 2529 bp, Artificial Sequence
  derived and/or modified sequence
atgaagcgcgggaggctcccaagcagttctgaggattctgatgataatggctccctttccaccacctggagccagaactcacgctcgcagcatcgccggagttcatgcagtaggcacgaagataggaaaccatccgaagtttttcgaaccgacctgatcacagctatgaagctgcatgatagctaccaactgaaccccgacgagtattatgttctcgccgatccttggcggcaggaatgggagaagggtgtgcaggttccggtttcaccagggaccattccccagccggttgcgagagtggtgtctgaggaaaagtcgttaatgttcatccgacccaagaagtatattgtgtcatcgggctcagaaccaccagaactggggtatgtcgacattcggacactggcggatagtgtatgtaggtacgatcttaatgatatggatgcggcatggcttgagctaactaatgaggaattcaaggaaatgggtatgcccgaattagacgaatacactatggagagagtattggaagaatttgagcagcggtgctatgataacatgaaccacgccatcgaaacagaggagggcctcggtattgagtatgacgaggacgtcgtgtgcgacgtctgccaaagccctgacggcgaggatggtaacgagatggtgttctgcgacaagtgcaacatctgcgtgcatcaggcctgctatgggattctcaaggtccccgagggttcttggctttgtcgaacatgcgcccttggggtgcagcctaagtgcctgctgtgtccaaagaagggaggggcaatgaagccaacgcggtccggaaccaaatgggtgcatgtgtcatgtgcgctatggatccctgaagtaagcatcggatcacctgaaaaaatggagcctatcacaaaggtgagccacataccttccagtagatgggccctcgtgtgctcactgtgcaatgagaaattcggagcgagtattcagtgttcggttaaaaactgcagaacggcatttcacgtgacctgcgcattcgatcggggactcgaaatgaagacaatcttagccgaaaatgacgaggtgaagttcaagagctactgtccaaaacattcctcgcaccgcaagccggaagagtccctgggcaagggagccgctcaggagaatggcgctccggagtgttcccctcggaatccgttggaaccatttgctagtctggaacagaacagagaagaggcccaccgtgtttcagtgcgtaaacagaaactccagcagttagaagacgaattttacacctttgtcaacctgttagacgtggcccgtgccctccgcctgcccgaggaagtggtggatttcttataccagtattggaagcttaaaagaaaagttaattttaacaagccactgattacccccaagaaagatgaggaagataatttagctaagagggagcaggatgtgcttttcagaagactgcaattgttcacccacctgcgccaggacctggagcgggttcgcaacctgacttatatggtgactcgccgcgagaagatcaaacggagtgtctgcaaggtgcaagagcagattttcaacctgtatacgaaattgctggagcaggagagggtcagcggggtgccttctagttgctcttcctcttctttagagaatatgctgctgttcaatagcccatcggtcgggcctgatgcacctaagattgaagacttgaagtggcacagtgccttcttccggaagcagatgggtacctccctggtgcatagcctgaagaagccccataagcgtgacccactccagaacagccccggaagcgaaggcaagactcttcttaagcagccagatctgtgtggcaggcgggaaggcatggtggtgccagaaagctttcttggactagaaaaaacatttgcggaggctagactaatctcggcacaacagaaaaatggcgttgtcatgcccgatcacgggaagagacgagacaatagattccactgcgacctcattaaaggagaccttaaggacaagtctttcaagcagagccataagccactgcggagcactgatgtttcacagcgccacctcgacaacacccgagctgctacatctccgggcgtggggcagtcggcccccgggactagaaaagaaattgtgcccaaatgcaatggaagtctgatcaaggtgaattataaccagaccgccgttaaggtgcctactactcctgcatctcccgtcaagaactggggtggctttagaatcccaaagaaaggtgaacgtcaacagcagggcgaagcacatgatggggcttgtcatcagcattcagattatccatatctggggcttgggcgagtccccgccaaagaacgggccaaatcaaaactgaaatccgacaatgagaatgatgggtatgtccccgacgttgaaatgtctgatagtgagagtgaggcatcagaaaaaaagtgtatccacacctcctcaactattagccgccgaaccgacatcatccgccggagcattctcgcatcttag

SEQ ID NO: 106331 - DNA, 2529 bp, Artificial Sequence
  derived and/or modified sequence
atgaagcggggccggctgcccagcagcagcgaggacagcgacgacaacggtagcttgagtacgacctggtcccagaatagccgcagtcagcaccgccgaagcagctgctccagacatgaggaccggaagccatctgaagttttccgtactgatttaattacagccatgaaactgcacgattcctatcaattaaaccccgatgaatattacgtcttagctgacccgtggcgccaggagtgggaaaaaggcgttcaggtgcccgtcagtcctggaaccattcctcagcctgtggctagggttgtgtctgaggaaaagtccctcatgtttataaggcccaagaagtacattgtgtcgagcggaagcgagccgccggagcttgggtatgttgatattagaaccttagctgactctgtgtgcaggtacgatctcaacgacatggatgccgcctggctcgaacttactaacgaagaatttaaagagatgggcatgcccgaactggacgagtacaccatggaacgggtgctggaggaattcgaacagcgctgctacgacaacatgaaccacgccatcgaaactgaagagggcctcggaattgaatacgatgaggacgtcgtttgtgatgtctgtcaatcccctgacggagaggacggcaacgaaatggtgttctgcgataagtgcaatatctgcgtccatcaggcgtgctatggcatcctgaaagtgccagaaggcagctggctttgcaggacctgtgccttgggtgtgcagcctaaatgccttctttgtcctaaaaagggcggtgccatgaagcctacccgatcagggacaaaatgggtccatgtgtcatgcgccttgtggattcccgaggtgagtatcggatcaccggagaagatggagcccattactaaagtttcccacattccctccagtcgttgggcgctggtgtgttcactctgcaatgaaaagtttggagcctcaatccaatgttctgtgaagaactgcagaacagctttccatgtcacgtgcgccttcgatcgcggactagagatgaagaccatccttgccgaaaatgacgaggtcaaattcaagtcctattgtccaaagcactcaagtcatcggaaaccggaagaaagcctaggtaagggagctgcccaagagaacggtgctccagagtgcagccctaggaatccactggaaccctttgccagcctagaacagaatcgggaggaagcccacagggtgagcgtccgaaaacagaagcttcagcagctggaggacgaattctacactttcgtgaatttactggatgtcgctagggcactgaggttacctgaagaagtggtagactttttgtaccagtactggaagcttaaacgtaaggtgaatttcaacaagccactgataacccctaagaaggatgaagaagataatctggcaaagagggaacaggacgttctattcaggcgactgcagttgtttacacatctccgacaggatctggagcgcgtacggaatctcacctacatggtcacccggagagaaaaaataaagcggtctgtgtgcaaggttcaggagcaaatctttaacttatatactaagctcctagaacaggaacgcgttagtggcgtcccatcttcttgtagctcgtcaagcttagagaacatgctgttattcaattctcccagtgttgggcctgatgccccaaagattgaagacctcaaatggcacagcgctttcttcaggaagcaaatgggcacgtcactcgtccacagtctgaaaaaaccccacaagagggatcccttgcagaactcccctggttcagaaggtaaaaccttgttaaaacagccagacctgtgtgggcggagggagggcatggtcgtccccgagagctttctcggactcgagaagacttttgctgaggcccgcttgatttccgctcagcagaaaaacggggttgtgatgcccgatcacggaaaacggcgcgacaaccggttccactgcgacctcatcaagggcgatctgaaggacaagtcatttaaacagtcccacaagcccctcagatctacagatgtatcacagcgccacttagacaatacccgcgccgccacctctcccggtgttggtcagtccgctcccggaacgcgaaaggaaattgtgccaaagtgtaacggaagcttgatcaaagtgaactataaccagactgctgtgaaagtacccacgactcccgcctcgcctgtgaagaactggggaggattcaggatccccaagaagggtgaacgacaacagcaaggagaggcccatgatggagcttgtcaccagcacagcgattatccctacctgggcctcgggagggtccctgctaaagagagagccaaatcgaaacttaagagcgataacgagaatgacggttatgtccctgatgttgagatgtctgacagtgaatctgaagcctctgaaaagaaatgcattcatacatcttccacaatctccaggcgaactgacatcattaggagatccattctggccagctag

SEQ ID NO: 106332 - DNA, 2529 bp, Artificial Sequence
  derived and/or modified sequence
atgaagagaggacggcttccaagtagctctgaggatagtgatgataatggaagtttatccacgacctggtcacagaattcccggtctcaacatcgcaggtcatcttgctccaggcacgaagacagaaagccctcagaagtcttccggaccgacttgattactgctatgaaactccatgactcttaccagcttaatcctgacgagtactacgttctggccgacccgtggcggcaggagtgggagaaaggggttcaggttcctgttagcccaggaacaatcccacagcctgtggctagggtcgttagcgaggaaaagtcgctcatgttcatcaggcccaagaagtatattgttagttctggctctgaacctcccgagctgggatacgttgatatcagaactctggccgactccgtttgcagatacgacctgaatgatatggacgccgcatggctcgagcttacaaatgaggagttcaaagaaatgggaatgcccgaactagacgaatacacaatggagagagtgctcgaggagttcgagcagaggtgttacgacaatatgaaccatgctattgagacagaggagggtctgggcatcgaatacgacgaggatgtggtctgcgacgtgtgccagtcccctgatggcgaagacggaaatgaaatggtgttttgcgacaagtgtaacatctgtgtccaccaggcatgctacggaatcttaaaggtcccggaaggctcctggctttgccgcacctgcgcccttggtgttcagcccaagtgcctactttgccctaagaagggaggggcaatgaagccaacaaggtcggggactaagtgggttcatgtcagttgcgctttgtggatacctgaggtgagtatcggatcccccgagaagatggaacctatcactaaggtgtctcacattccatcaagcaggtgggccttagtttgcagcctttgtaacgaaaaattcggcgcatctatacaatgctccgttaagaattgccgaacggcctttcacgttacctgcgccttcgatcgcggacttgagatgaagacaattttagccgagaacgacgaagtgaaatttaaaagctattgccccaaacattcatctcaccggaagcccgaagaatccttaggcaagggggcagcgcaggaaaatggcgcaccagaatgttcaccacgaaacccgctggaacccttcgcctccctggagcagaacagagaggaggcacatcgggttagcgtccggaagcaaaaactccagcagctcgaggacgaattttataccttcgtgaatttattggatgtcgcccgtgcactccggctacctgaggaggtcgttgatttcctgtaccagtattggaagcttaaaaggaaagtgaactttaataagcccttgatcacccccaagaaagacgaagaggataacttggctaagagagagcaggacgtgctattcaggagactccagcttttcacccacttgcgacaggatcttgaaagagtgcgaaacctgacttacatggtaacccgcagagaaaaaataaaaaggtcggtgtgtaaggtgcaggaacagatattcaacctctacaccaagctgctggagcaggaacgcgtcagcggtgtcccctcctcctgcagcagttcttcactggaaaacatgctcctgttcaactctcccagcgtgggcccagacgccccaaaaatcgaggacctgaaatggcattccgcattcttcagaaaacagatgggaacaagtttggtccacagcctcaagaagccgcataaacgagaccctctgcagaacagcccgggaagcgaaggcaagaccctcctgaagcaaccggacctctgcggacgtagggaaggtatggtagtgcccgaatcattccttggcctggagaagacttttgcagaagcgaggctgatatcggcacagcagaagaacggtgtcgtcatgcccgaccatggaaaaagaagagacaaccggttccattgcgacctgatcaaaggcgacctgaaggataaatcttttaaacagagccacaagcctttgaggtcaactgatgtgagccagcgccacctcgataacactcgcgctgctacgtcacctggagtcggccagtctgcccctggtacgaggaaggaaattgtaccgaagtgtaatggttcgctgatcaaggtcaattacaatcagactgccgtcaaagtcccaaccacccctgcctcccctgtgaagaattggggcggatttcgcatacccaaaaagggcgaaagacaacaacagggagaggcgcatgatggcgcatgccaccagcactcagattacccctatctcgggctgggccgagtgccagctaaagagcgggctaaatctaagctgaagtccgacaacgagaatgacggatacgttcctgacgttgagatgtccgactccgagtctgaggccagtgagaaaaaatgtattcacacaagttcaaccatctctcgtcgcacagacatcatcagaagatccatcttagcatcctag

SEQ ID NO: 106333 - protein, 509 aa, Artificial Sequence
  derived and/or modified sequence
MKRGRLPSSSEDSDDNGSLSTTWSQNSRSQHRRSSCSRHEDRKPSEVFRTDLITAMKLHDSYQLNPDEYYVLADPWRQEWEKGVQVPVSPGTIPQPVARVVSEEKSLMFIRPKKYIVSSGSEPPELGYVDIRTLADSVCRYDLNDMDAAWLELTNEEFKEMGMPELDEYTMERVLEEFEQRCYDNMNHAIETEEGLGIEYDEDVVCDVCQSPDGEDGNEMVFCDKCNICVHQACYGILKVPEGSWLCRTCALGVQPKCLLCPKKGGAMKPTRSGTKWVHVSCALWIPEVSIGSPEKMEPITKVSHIPSSRWALVCSLCNEKFGASIQCSVKNCRTAFHVTCAFDRGLEMKTILAENDEVKFKSYCPKHSSHRKPEESLGKGAAQENGAPECSPRNPLEPFASLEQNREEAHRVSVRKQKLQQLEDEFYTFVNLLDVARALRLPEEVVDFLYQYWKLKRKVNFNKPLITPKKDEEDNLAKREQDVLFRRLQLFTHLRQDLERVMIDTDTL

SEQ ID NO: 106334 - DNA, 1530 bp, Artificial Sequence
  derived and/or modified sequence
atgaagagaggcagactgcccagcagcagcgaggacagcgacgacaacggcagcctgagcaccacctggagccagaacagcagaagccagcacagaagaagcagctgcagcagacacgaggacagaaagcccagcgaggtgttcagaaccgacctgatcaccgccatgaagctgcacgacagctaccagctgaaccccgacgagtactacgtgctggccgacccctggagacaggagtgggagaagggcgtgcaggtgcccgtgagccccggcaccatcccccagcccgtggccagagtggtgagcgaggagaagagcctgatgttcatcagacccaagaagtacatcgtgagcagcggcagcgagccccccgagctgggctacgtggacatcagaaccctggccgacagcgtgtgcagatacgacctgaacgacatggacgccgcctggctggagctgaccaacgaggagttcaaggagatgggcatgcccgagctggacgagtacaccatggagagagtgctggaggagttcgagcagagatgctacgacaacatgaaccacgccatcgagaccgaggagggcctgggcatcgagtacgacgaggacgtggtgtgcgacgtgtgccagagccccgacggcgaggacggcaacgagatggtgttctgcgacaagtgcaacatctgcgtgcaccaggcctgctacggcatcctgaaggtgcccgagggcagctggctgtgcagaacctgcgccctgggcgtgcagcccaagtgcctgctgtgccccaagaagggcggcgccatgaagcccaccagaagcggcaccaagtgggtgcacgtgagctgcgccctgtggatccccgaggtgagcatcggcagccccgagaagatggagcccatcaccaaggtgagccacatccccagcagcagatgggccctggtgtgcagcctgtgcaacgagaagttcggcgccagcatccagtgcagcgtgaagaactgcagaaccgccttccacgtgacctgcgccttcgacagaggcctggagatgaagaccatcctggccgagaacgacgaggtgaagttcaagagctactgccccaagcacagcagccacagaaagcccgaggagagcctgggcaagggcgccgcccaggagaacggcgcccccgagtgcagccccagaaaccccctggagcccttcgccagcctggagcagaacagagaggaggcccacagagtgagcgtgagaaagcagaagctgcagcagctggaggacgagttctacaccttcgtgaacctgctggacgtggccagagccctgagactgcccgaggaggtggtggacttcctgtaccagtactggaagctgaagagaaaggtgaacttcaacaagcccctgatcacccccaagaaggacgaggaggacaacctggccaagagagagcaggacgtgctgttcagaagactgcagctgttcacccacctgagacaggacctggagagagtgatgatcgacaccgacaccctgtag

SEQ ID NO: 106335 - DNA, 390 bp, Artificial Sequence
  derived and/or modified sequence
atgaagagaggcagactgcccagcagcagcgaggacagcgacgacaacggcagcctgagcaccacctggagccagaacagcagaagccagcacagaagaagcagctgcagcagacacgaggacagaaagcccagcgaggtgttcagaaccgacctgatcaccgccatgaagctgcacgacagctaccagctgaaccccgacgagtactacgtgctggccgacccctggagacaggagtgggagaagggcgtgcaggtgcccgtgagccccggcaccatcccccagcccgtggccagagtggtgagcgaggagaagagcctgatgttcatcagacccaagaagtacatcgtgagcagcggcagcgagccccccgagctgggctacgtgtag

SEQ ID NO: 106336 - DNA, 411 bp, Artificial Sequence
  derived and/or modified sequence
atgaagagaggcagactgcccagcagcagcgaggacagcgacgacaacggcagcctgagcaccacctggagccagaacagcagaagccagcacagaagaagcagctgcagcagacacgaggacagaaagcccagcgaggtgttcagaaccgacctgatcaccgccatgaagctgcacgacagctaccagctgaaccccgacgagtactacgtgctggccgacccctggagacaggagtgggagaagggcgtgcaggtgcccgtgagccccggcaccatcccccagcccgtggccagagtggtgagcgaggagaagagcctgatgttcatcagacccaagaagtacatcgtgagcagcggcagcgagccccccgagctgggctacgtggacatcagaaccctggccgactag

SEQ ID NO: 106337 - DNA, 399 bp, Artificial Sequence
  derived and/or modified sequence
atgaagagaggcagactgcccagcagcagcgaggacagcgacgacaacggcagcctgagcaccacctggagccagaacagcagaagccagcacagaagaagcagctgcagcagacacgaggacagaaagcccagcgaggtgttcagaaccgacctgatcaccgccatgaagctgcacgacagctaccagctgaaccccgacgagtactacgtgctggccgacccctggagacaggagtgggagaagggcgtgcaggtgcccgtgagccccggcaccatcccccagcccgtggccagagtggtgagcgaggagaagagcctgatgttcatcagacccaagaagtacatcgtgagcagcggcagcgagccccccgagctgggctacgtggacatcagatag

SEQ ID NO: 106338 - DNA, 360 bp, Artificial Sequence
  derived and/or modified sequence
atgaagagaggcagactgcccagcagcagcgaggacagcgacgacaacggcagcctgagcaccacctggagccagaacagcagaagccagcacagaagaagcagctgcagcagacacgaggacagaaagcccagcgaggtgttcagaaccgacctgatcaccgccatgaagctgcacgacagctaccagctgaaccccgacgagtactacgtgctggccgacccctggagacaggagtgggagaagggcgtgcaggtgcccgtgagccccggcaccatcccccagcccgtggccagagtggtgagcgaggagaagagcctgatgttcatcagacccaagaagtacatcgtgagcagctag

SEQ ID NO: 106339 - DNA, 432 bp, Artificial Sequence
  derived and/or modified sequence
atgaagagaggcagactgcccagcagcagcgaggacagcgacgacaacggcagcctgagcaccacctggagccagaacagcagaagccagcacagaagaagcagctgcagcagacacgaggacagaaagcccagcgaggtgttcagaaccgacctgatcaccgccatgaagctgcacgacagctaccagctgaaccccgacgagtactacgtgctggccgacccctggagacaggagtgggagaagggcgtgcaggtgcccgtgagccccggcaccatcccccagcccgtggccagagtggtgagcgaggagaagagcctgatgttcatcagacccaagaagtacatcgtgagcagcggcagcgagccccccgagctgggctacgtggacatcagaaccctggccgacagcgtgtgcagatacgacctgtag

SEQ ID NO: 106340 - DNA, 1530 bp, Artificial Sequence
  derived and/or modified sequence
atgaagagaggcaggctccccagcagtagtgaggatagcgacgacaacggcagcctgagtaccacatggtcccagaacagcagaagtcagcaccgaaggtcttcttgttctcgacacgaagaccgtaaaccttccgaggtcttccgcacagatctcattacagccatgaagctccacgactcttaccagttgaatcctgacgaatactatgtcctagcagatccatggaggcaggagtgggagaaaggggtccaggtccccgtctctccaggaaccatccctcagcccgttgcgcgggtggtgagcgaggagaaaagtctcatgttcatcagaccaaagaagtatattgtatcctccggctcggagccccctgagctggggtacgtcgatattaggaccttggctgattctgtgtgtcggtacgatttaaacgacatggatgctgcgtggcttgagctgactaatgaagaattcaaagaaatgggcatgccagaattggatgagtacactatggaacgagttctggaagagtttgagcagcgctgctacgataacatgaatcacgcaatcgaaaccgaagagggccttggcatagagtacgatgaggacgtggtgtgcgacgtctgccagtccccggacggcgaggatggtaatgagatggtgttctgcgacaaatgcaatatatgcgttcaccaggcatgttatgggattctgaaggtgccggaaggctcatggctctgtcggacatgtgcactgggagtgcagcctaagtgcctgctgtgcccgaaaaagggcggggcgatgaaaccaacccggtccgggactaagtgggtgcacgtgagctgtgctctgtggatccctgaagtaagcatcggatctcccgaaaagatggaaccaattaccaaggtctctcatattccctcatcaagatgggcactggtgtgcagcctctgtaatgaaaagttcggcgcctcgatccagtgcagtgtgaagaattgccggacagccttccatgtgacgtgcgcttttgaccgcggcctcgagatgaagacaattctcgccgaaaacgatgaggtgaagttcaagagttactgccctaaacacagctcacaccgtaagcccgaggagtccctcgggaagggggctgcacaggagaacggcgctcctgaatgcagtcctcggaacccgctggaaccattcgcgtctctcgaacagaatcgggaggaggcccacagagtcagcgtgcggaagcaaaaactgcagcagctggaggatgaattttacacgtttgttaacctgttagacgtggcccgggctttaagactgcctgaggaggtggttgactttctttatcagtactggaagctgaagaggaaggtcaattttaacaaaccgctgattacaccaaagaaggatgaggaggataacttggcaaagagagagcaggatgtcctgttccgccggctccagctcttcacgcacctgagacaggacctggagagggttatgatcgacactgatacactgtag

SEQ ID NO: 106341 - DNA, 390 bp, Artificial Sequence
  derived and/or modified sequence
atgaagcgggggcggttgccatcatcgtcggaggactcagacgataacggatccttgtcaaccacttggtctcagaattctaggagtcaacatcggcgaagcagctgctcacgtcacgaggaccgcaagccttcagaggtgttccgtacagacctcattaccgccatgaaactgcatgattcatatcaactgaatcccgacgagtattacgtgcttgcggacccatggagacaggagtgggagaagggcgtccaagtgccagtcagtcccgggacaattccacaacccgttgcccgggtggtgtcagaggagaaatccctaatgttcattcgccctaagaagtatattgtgtctagcggctctgagcctcctgagctgggatatgtctag

SEQ ID NO: 106342 - DNA, 411 bp, Artificial Sequence
  derived and/or modified sequence
atgaagcgcggtcgtcttccaagctcatcagaggactccgacgataacgggtccctgagtactacatggtcacaaaatagcagatcccagcataggcgctcctcgtgttcaagacatgaggaccggaagcctagtgaggtgttcaggacagatctgattacagccatgaagctccacgattcctatcagttgaatcccgacgagtactacgttctcgcagatccctggcggcaagaatgggagaaaggcgtgcaggtccccgtatcacccgggacaatcccgcagcccgtggctagggtcgtgtccgaagaaaaatccctgatgttcattaggcccaagaagtacatagtctcttccgggtccgaaccacctgagctagggtatgtcgacatcagaaccctggcagactag

SEQ ID NO: 106343 - DNA, 399 bp, Artificial Sequence
  derived and/or modified sequence
atgaaacgcggccgattgccaagttcttccgaggattcagatgacaatggatctttgagcacgacctggagccagaactccagaagtcagcatcgcaggtcgtcttgctcgcggcacgaagatcgtaaaccgtctgaggtgtttcgcactgatcttatcaccgccatgaagctccacgactcttaccagctaaatccggacgagtactacgtgctggcggatccatggcgccaagaatgggaaaagggcgttcaagtgcccgtgagccccgggactatcccacagccagtcgcccgcgtcgtgagcgaggaaaaaagccttatgttcattagaccaaaaaaatatatcgtgagctccgggtccgagcctccagaactggggtatgtagacattcgatag

SEQ ID NO: 106344 - DNA, 360 bp, Artificial Sequence
  derived and/or modified sequence
atgaaaagaggacgcctgccgtcttctagcgaggactctgacgataatggctccctttccactacctggtcacagaacagcagatcccaacacagacgctccagctgctcacgtcatgaggatcgtaagccctctgaagtgtttaggaccgacctgattacggctatgaagctccacgacagctatcaattaaaccccgatgaatactatgtgctcgccgatccctggcggcaggagtgggaaaaaggcgtgcaagtgcccgtgtcccctggaactatcccacagcctgtggcacgggtagtgtccgaggagaaatccctgatgttcatccgccctaaaaagtacatcgtctccagttag

SEQ ID NO: 106345 - DNA, 432 bp, Artificial Sequence
  derived and/or modified sequence
atgaagcgtggaaggctacccagttcttccgaagatagtgatgataatggcagtctgtccactacttggagtcaaaatagtcggtctcagcatcggaggtcttcttgctccagacacgaggaccggaagccttccgaagtattcagaacagatctcattaccgcgatgaaactgcacgacagctaccagttgaatcccgacgagtattacgtcctggctgacccctggcgccaggaatgggagaaaggcgtccaggtgcccgtgtcacctggcacaattccacagccagttgcccgggtggtgtcggaggaaaagagccttatgttcatcaggcctaaaaaatatatcgtgtcgtcaggatccgagccccccgaacttggctacgtggacattagaacactcgccgattctgtgtgtcgctacgatctgtag

SEQ ID NO: 106346 - DNA, 1530 bp, Artificial Sequence
  derived and/or modified sequence
atgaagcgcggaaggctgccctcctcatctgaagactcagacgataacggaagcctaagtaccacctggagccagaattcaagatcccagcatcgccggagttcctgctctcggcacgaggacagaaagcccagcgaggtgtttcgcacggacctgattactgctatgaagctgcacgactcctaccagctgaaccccgacgagtactacgttctggctgacccctggcgtcaggagtgggagaagggcgttcaggtccccgtgtcccctgggacgattcctcagccagtggcccgtgttgtcagcgaggagaaatccctcatgttcattcgccccaaaaaatacattgtgtcctccgggagtgagcccccggaactgggctacgttgatatccggacactggcagatagcgtttgccggtatgatctgaacgacatggacgctgcttggcttgaactaacaaatgaagagtttaaagaaatgggaatgcctgaattggatgagtacactatggaacgcgtccttgaagaatttgaacagcgctgctatgataacatgaatcacgcgatcgagactgaggaaggcctcggcattgagtacgatgaggatgtggtatgcgacgtatgccagtctccagacggagaggacggcaacgagatggtattctgcgacaaatgtaacatctgtgtgcatcaggcctgctatggtatcctgaaagtacccgagggttcatggctgtgtcgtacgtgcgctctgggagtccagccaaaatgcctcttgtgtccgaagaaaggtggagccatgaagcccacacgaagcggcaccaaatgggtgcatgtttcatgcgccctttggattccggaggtcagtattggatcccccgaaaaaatggagcccatcaccaaggtatcccacatcccttcctctagatgggcgctagtgtgctccctatgtaacgagaaattcggagcctctattcagtgttctgtgaaaaattgtcgcacggctttccatgttacctgcgcttttgacagagggttagaaatgaaaaccatacttgccgaaaatgatgaggtgaagtttaaatcttactgtcctaagcacagtagccacagaaagccagaagaatcccttggtaagggggctgctcaggagaatggcgcccctgagtgctctcctaggaaccccctggaacccttcgcatctttagaacaaaatagagaggaggcacacagagtgtctgtgcggaaacagaagctgcaacagctggaagatgaattctacacgttcgttaatcttctggatgtggctagagccctgaggctgccggaggaggtggtagactttttataccagtactggaaacttaagcggaaagtgaactttaataagcctttgatcactcctaaaaaggacgaggaagataatttggctaaacgggaacaggatgtgctgtttagaaggctccagcttttcacacatcttcgacaggatctggagcgtgttatgatagacacagatacactgtag

SEQ ID NO: 106347 - DNA, 1530 bp, Artificial Sequence
  derived and/or modified sequence
atgaagaggggccgcctgcccagcagcagtgaagattctgatgacaatggcagcctgagcaccacctggagccagaacagccgcagccagcaccggcgcagcagctgcagcagacatgaggacaggaagcccagcgaggtgttcagaacagacctgatcacagccatgaagctgcatgacagctaccagctgaacccagatgagtactacgtgctggccgacccctggaggcaggagtgggagaagggcgtgcaggtgcctgtgtccccaggcaccatcccccagcctgtggcccgggtggtgtctgaggagaagagcctgatgttcatccggcccaagaagtacatcgtgagcagcggcagcgagcccccagagctgggctacgtggacatccgcaccctggccgacagcgtgtgccgctatgacctgaatgacatggatgctgcctggctggagctgaccaatgaggagttcaaggagatgggcatgcctgagctggatgagtacaccatggagcgggtgctggaggagtttgagcagcgctgctatgacaacatgaaccacgccatcgagacagaggagggcctgggcatcgagtatgatgaagatgtggtgtgtgatgtgtgccagagcccagatggagaagatggaaatgagatggtgttctgtgacaagtgcaacatctgtgtgcaccaggcctgctacggcatcctgaaggtgcctgagggctcctggctgtgcaggacctgtgccctgggcgtgcagcccaagtgcctgctgtgccccaagaagggcggggccatgaagcccaccaggagcggcaccaagtgggtgcacgtgtcctgtgccctgtggatccctgaggtgtccatcggcagccctgagaagatggagcccatcaccaaggtgagccacatccccagcagccgctgggccctggtgtgcagcctgtgcaatgagaagtttggagccagcatccagtgcagcgtgaagaactgcaggacagccttccacgtgacctgtgcctttgaccggggcctggagatgaagaccatcctggctgaaaatgatgaggtgaagttcaagagctactgccccaagcacagcagccacaggaagccagaggagagcctgggcaagggggccgcccaggagaatggagcccctgagtgcagccccaggaaccccctggagccctttgccagcctggagcagaaccgggaggaggcccaccgggtgtctgtgaggaagcagaagctgcagcagctggaggatgagttctacacctttgtgaacctgctggatgtggcccgggccctgcggctgcctgaggaggtggtggacttcctgtaccagtactggaagctgaagaggaaggtgaacttcaacaagcccctcatcacccccaagaaggatgaggaggacaacctggccaagcgggagcaggatgtgctcttccggcggctgcagctgttcacccacctgcggcaggacctggagcgggtgatgattgacacagacaccctgtag

SEQ ID NO: 106348 - DNA, 390 bp, Artificial Sequence
  derived and/or modified sequence
atgaagaggggccgcctgcccagcagcagtgaagattctgatgacaatggcagcctgagcaccacctggagccagaacagccgcagccagcaccggcgcagcagctgcagcagacatgaggacaggaagcccagcgaggtgttcagaacagacctgatcacagccatgaagctgcatgacagctaccagctgaacccagatgagtactacgtgctggccgacccctggaggcaggagtgggagaagggcgtgcaggtgcctgtgtccccaggcaccatcccccagcctgtggcccgggtggtgtctgaggagaagagcctgatgttcatccggcccaagaagtacatcgtgagcagcggcagcgagcccccagagctgggctacgtgtag

SEQ ID NO: 106349 - DNA, 411 bp, Artificial Sequence
  derived and/or modified sequence
atgaagaggggccgcctgcccagcagcagtgaagattctgatgacaatggcagcctgagcaccacctggagccagaacagccgcagccagcaccggcgcagcagctgcagcagacatgaggacaggaagcccagcgaggtgttcagaacagacctgatcacagccatgaagctgcatgacagctaccagctgaacccagatgagtactacgtgctggccgacccctggaggcaggagtgggagaagggcgtgcaggtgcctgtgtccccaggcaccatcccccagcctgtggcccgggtggtgtctgaggagaagagcctgatgttcatccggcccaagaagtacatcgtgagcagcggcagcgagcccccagagctgggctacgtggacatccgcaccctggccgactag

SEQ ID NO: 106350 - DNA, 399 bp, Artificial Sequence
  derived and/or modified sequence
atgaagaggggccgcctgcccagcagcagtgaagattctgatgacaatggcagcctgagcaccacctggagccagaacagccgcagccagcaccggcgcagcagctgcagcagacatgaggacaggaagcccagcgaggtgttcagaacagacctgatcacagccatgaagctgcatgacagctaccagctgaacccagatgagtactacgtgctggccgacccctggaggcaggagtgggagaagggcgtgcaggtgcctgtgtccccaggcaccatcccccagcctgtggcccgggtggtgtctgaggagaagagcctgatgttcatccggcccaagaagtacatcgtgagcagcggcagcgagcccccagagctgggctacgtggacatcagatag

SEQ ID NO: 106351 - DNA, 360 bp, Artificial Sequence
  derived and/or modified sequence
atgaagaggggccgcctgcccagcagcagtgaagattctgatgacaatggcagcctgagcaccacctggagccagaacagccgcagccagcaccggcgcagcagctgcagcagacatgaggacaggaagcccagcgaggtgttcagaacagacctgatcacagccatgaagctgcatgacagctaccagctgaacccagatgagtactacgtgctggccgacccctggaggcaggagtgggagaagggcgtgcaggtgcctgtgtccccaggcaccatcccccagcctgtggcccgggtggtgtctgaggagaagagcctgatgttcatccggcccaagaagtacatcgtgagcagctag

SEQ ID NO: 106352 - DNA, 432 bp, Artificial Sequence
  derived and/or modified sequence
atgaagaggggccgcctgcccagcagcagtgaagattctgatgacaatggcagcctgagcaccacctggagccagaacagccgcagccagcaccggcgcagcagctgcagcagacatgaggacaggaagcccagcgaggtgttcagaacagacctgatcacagccatgaagctgcatgacagctaccagctgaacccagatgagtactacgtgctggccgacccctggaggcaggagtgggagaagggcgtgcaggtgcctgtgtccccaggcaccatcccccagcctgtggcccgggtggtgtctgaggagaagagcctgatgttcatccggcccaagaagtacatcgtgagcagcggcagcgagcccccagagctgggctacgtggacatccgcaccctggccgacagcgtgtgccgctatgacctgtag

SEQ ID NO: 106353 - DNA, 1530 bp, Artificial Sequence
  derived and/or modified sequence
atgaagcggggccggctgcccagcagcagcgaggacagcgacgacaatgggagcctgagcaccacgtggagtcagaacagtaggagccagcacagaaggtcatcatgctccagacatgaagatcgcaaaccatccgaggtgttcagaacagatctcatcacagctatgaagttgcatgactcataccaactgaacccagatgaatattatgtcctcgccgatccgtggcgccaggaatgggaaaaaggtgttcaggtgcctgtgtctcctggcacaatcccccagccagttgctcgcgtagtgagtgaggagaaaagcctcatgtttatccgcccaaagaagtacatcgtctctagtggcagtgagccgcctgagctgggctatgttgacatccgtaccttggctgatagtgtgtgtaggtatgatctgaatgacatggacgcagcatggctggaactcaccaatgaggagttcaaggaaatggggatgcctgagctggatgagtatactatggagcgagtgctagaggaattcgaacaaagatgctatgacaacatgaatcatgctattgaaaccgaggaaggcctaggcatcgaatatgatgaggacgtcgtgtgtgacgtgtgtcagtctcctgatggtgaagatggcaacgagatggttttctgcgataaatgcaatatctgtgtgcaccaggcctgctacggcattttgaaggtccctgaaggcagttggctctgccgcacctgcgcactgggcgtacaacccaagtgcctgctctgccccaagaagggtggtgccatgaaaccaacccgcagtggtactaaatgggtgcacgtttcatgcgccctctggattccggaggtgagcatcgggtcaccagagaagatggaaccaatcacaaaggtcagtcacattccttcttctaggtgggctctggtgtgctctctatgcaacgagaagttcggggcgtccatccagtgtagtgtgaaaaattgtcggacagccttccatgtgacttgtgcctttgacagaggcctggagatgaagaccatcttggccgaaaatgacgaggtgaagtttaaatcctactgtcctaaacactcctctcataggaagcccgaggaaagtctggggaagggcgccgcccaggagaatggcgccccagagtgttcacctcgcaatcccctggagccttttgcatctctggagcaaaacagagaagaggcacacagagtgtccgttcggaagcagaagctacagcaactcgaggacgagttttacacctttgttaatctcctggacgtggcacgggcccttcggctgccggaagaggtcgtggattttctataccaatactggaagctcaaacggaaggtgaattttaataagcctttgatcactcccaagaaggacgaagaagataatctggcgaagagagagcaggacgtactctttcgccggttgcaactcttcacacatctgagacaggaccttgagagagtgatgattgataccgacaccctgtag

SEQ ID NO: 106354 - DNA, 390 bp, Artificial Sequence
  derived and/or modified sequence
atgaagcggggccggctgcccagcagcagcgaggacagcgacgacaatggttctctctccaccacctggtctcaaaattccaggtcgcagcatcggcggtctagctgtagtcgccacgaggatcggaagccttctgaagtttttagaacggatctgattacggccatgaaactgcatgattcataccagctaaatccggacgaatattatgtactggccgacccctggagacaggagtgggagaagggtgttcaagtccccgtgtcaccagggactatcccacagccggttgccagagtagtctccgaagagaaaagcctgatgttcatccggcccaagaaatacatagtctcttccggatctgagccacccgaacttggatatgtatag

SEQ ID NO: 106355 - DNA, 411 bp, Artificial Sequence
  derived and/or modified sequence
atgaagcggggccggctgcccagcagcagcgaggacagcgacgacaacgggagtctgtccacaacttggtcacagaactcacgttcccagcatagacgttccagctgctcacgccatgaggatcggaaaccgtctgaggtcttccgaaccgatctaatcaccgcaatgaagctgcacgattcataccagctgaacccggatgagtattatgtcctggccgatccttggcgccaggaatgggaaaagggcgtgcaggtgcctgtgtcccctggcactattccccagcctgtcgcccgcgttgtttctgaagagaagtccctcatgttcatcaggccaaagaaatacattgtgtctagcgggtctgaaccccccgagttaggctatgtcgatatcaggacacttgccgactag

SEQ ID NO: 106356 - DNA, 399 bp, Artificial Sequence
  derived and/or modified sequence
atgaagcggggccggctgcccagcagcagcgaggacagcgacgacaacggtagcctgtcaaccacttggtcccaaaacagcaggagccagcacagacggtcttcctgttcacgacacgaggaccgtaaaccaagcgaggtgttcaggacagaccttattaccgccatgaagcttcacgatagctaccaactgaatcccgatgagtactacgtccttgccgacccctggagacaagaatgggagaaaggggtgcaggtacccgtgtcaccaggtaccataccacagccggtcgctcgtgtcgtgtccgaggagaaatccctaatgtttatcaggcctaaaaaatacatagtgagcagtggtagcgagccccctgagctcgggtatgtggacattcgttag

SEQ ID NO: 106357 - DNA, 360 bp, Artificial Sequence
  derived and/or modified sequence
atgaagcggggccggctgcccagcagcagcgaggacagcgacgacaatgggagtctgtccacaacctggagccagaatagcagatcacagcatcgccgcagttcctgctccagacatgaggatcgcaagccttccgaagtctttcggaccgatcttattactgctatgaagctccatgacagctaccaattgaaccccgatgagtattatgtactcgcagatccctggcggcaggagtgggaaaagggtgtccaggtacccgtctcacccggaacaatccctcaacccgtcgctcgcgtggtgtctgaggaaaagtctcttatgtttattcgaccgaaaaaatacatcgttagcagctag

SEQ ID NO: 106358 - DNA, 432 bp, Artificial Sequence
  derived and/or modified sequence
atgaagcggggccggctgcccagcagcagcgaggacagcgacgacaacggttctctaagcaccacatggagtcagaattcccgatctcaacatcggcgatcctcatgtagcagacatgaggatcgtaagccctcagaggtgttccggaccgatcttatcactgccatgaagcttcacgattcctatcagctgaaccccgatgagtactacgtccttgcagatccgtggaggcaggaatgggaaaagggcgtacaggttccagtgagccccggtacaataccccaacctgttgcgcgggtggtttctgaagagaaatcactcatgttcatccggcccaagaaatatatcgtgagctccggaagcgaacccccagaattgggatatgtggatattcgcacattagccgatagtgtatgcagatatgacctgtag

SEQ ID NO: 106359 - DNA, 1530 bp, Artificial Sequence
  derived and/or modified sequence
atgaagcggggccggctgcccagcagcagcgaggacagcgacgacaatggcagtttaagcaccacctggagccagaattccagatcccagcacaggaggagctcttgcagtcgacatgaagatcgcaaaccgagcgaagtattcaggactgatctcatcaccgctatgaaactccacgattcataccagttaaaccccgacgaatactacgtgctcgcagacccctggcgacaggagtgggagaagggggtgcaggtccccgttagcccagggaccattccacagccagtcgccagagtggtgtccgaagagaagagtttgatgttcattcgacccaaaaagtatattgtgtcaagtggtagcgagccccctgagctgggatacgtggacatccgcaccctggcagattctgtttgtaggtacgatctgaacgacatggacgctgcttggctggagctgactaacgaggagttcaaggagatgggtatgccggagcttgatgaatacacaatggaacgggtgctggaggaatttgagcaaagatgctatgacaatatgaaccatgctattgaaacggaagagggtcttgggatagagtatgacgaagacgtcgtgtgtgatgtatgccagtctccagacggggaagatggcaatgagatggtgttttgcgacaagtgtaacatctgcgtgcaccaggcctgttatggtatcctgaaggtaccagaaggatcttggttgtgccggacttgtgctttgggggtccagcctaaatgtctgctttgtcccaagaagggcggcgcaatgaagccgacccggtctggtaccaaatgggtgcacgtttcctgtgcactctggatcccagaagtgtcaattggatcgccagaaaagatggaacccattaccaaggtctcacatatccccagcagccgatgggccctggtttgttcgttgtgcaatgagaaattcggtgcctctatacagtgttctgtgaagaactgccgtactgctttccacgtcacctgcgctttcgacagaggactcgagatgaagaccatcctggcagagaatgatgaggtcaagtttaaatcttattgccccaagcattcctctcacagaaaacccgaggagagtctcggtaagggtgccgcccaggaaaatggcgccccggagtgtagtcctaggaatccgttagagccattcgcttcattggagcagaacagagaggaggcacatagagtcagcgtgcggaagcagaagttgcagcaattagaagacgaattttacacttttgttaatctgcttgacgtcgctagggccctcaggctccccgaagaagtggtggactttttgtatcaatattggaagctaaaacgaaaggtcaatttcaataaacccctcatcaccccaaagaaagatgaagaggacaatctggctaagagagagcaagatgttttgttccgcagactgcagctgttcacccacctcagacaagatttggagagagtgatgattgacaccgacacgctatag

SEQ ID NO: 106360 - DNA, 4012 bp, Artificial Sequence
  derived and/or modified sequence
acggcacccgccagtgggggtgcctcaacttccgcgggcgtttaaatagcagcctctctcccctcccaccggtaataggctgcctgctgtttcccggggagatcatgaaacgaggtcgccttcccagcagcagtgaggattctgacgacaatggcagcctgtcaactacttggtcccagaattcccgatcccagcataggagaagctcctgctccagacatgaagatcgaaagccttcagaggtgtttaggacagacctgatcactgccatgaagttgcatgactcctaccagctgaatccggatgagtactatgtgttggcagatccctggagacaggaatgggagaaaggggtccaggtgcctgtgagcccggggaccatccctcagcctgtggccagggttgtgtctgaagagaaatccctcatgttcatcaggcccaagaagtacatcgtgtcatcaggctctgagcctcccgagttgggctatgtggacatccggacgctggctgacagcgtgtgtcgctatgacctcaatgacatggatgctgcatggctggaactgaccaatgaagaatttaaggagatgggaatgcctgaactagatgaatacaccatggagagggtcctagaggaatttgagcagcgatgctacgacaatatgaatcatgccatagagactgaggaaggcctggggatcgaatatgatgaagatgttgtctgtgatgtctgccagtctcctgatggtgaggacggcaatgagatggtgttctgtgacaaatgcaacatctgtgtgcaccaggcctgttatggaatcctcaaggtaccagagggcagctggctgtgccggacatgtgccctgggggttcagccaaaatgtctgctgtgtccgaagaagggtggagctatgaagcccacccgtagcggaaccaagtgggtccacgttagctgtgctctgtggatccctgaggtgagcattggcagcccagagaagatggagcccatcaccaaggtgtcacacattcccagcagccggtgggcgctagtgtgcagcctctgcaatgagaagtttggggcctctatacagtgctctgtgaagaactgccgcacagccttccatgtgacctgtgcttttgaccggggcctggagatgaagaccatcttagcagagaatgatgaagtcaagttcaagtcctattgcccaaagcacagctcacataggaaacccgaggagagtcttggcaagggggctgcacaggagaatggggcccctgagtgttccccccggaatccgctggagccctttgccagccttgagcagaaccgggaggaggcccaccgggtgagtgtccgtaagcagaagctgcagcagttggaggatgagttctacaccttcgtcaacctgctggatgttgccagggctctgcggctgcctgaggaagtagtggatttcctgtaccagtactggaagttgaagaggaaggtcaacttcaacaagcccctgatcaccccaaagaaagatgaagaggacaatctagccaagcgggagcaggatgtcttatttaggaggctgcagctgttcacgcacctgcggcaggacctggagagggtaatgattgacactgacaccttatagtgacttagagaagaagatgcaaagaggcgaacgctcgcccagagcaagaaatgatagccagtcatatactctcagacccttgtacacaccacagcatgaggttgtgttggttaaaaatatttatgggctggtaaactcattgtacatatgtgcaaaactgctactgagtggggagcttctttgtggtttttttttttttaaaaacactttcccattaatctttactgttttgtaagatcaaatggggtgtgtcttccccacccccattccttcattctagagctagagtgaatgagccccaagaaaatgacccaaggagttgactcaggatggtttacagactgatttagaaaaccagaacggatttcatttctaatggagggggccagagatgggaaaatttcttgttcagtccggggaaacacacctaggtgctggtgatgggcttatgaaggaagctaagcacggctgctcactggcccccactttgtttcttgggtaattcacaggggaattcccagtactgtcatggagcagagcaggcagtgggtgctgatgtgtgtgcatgagctgtatgtacacatgcatatatctgttacagaagatactcctggcagtgaggtgctaagtcatcactgaggctgtgtgtgtgtgtgtgtgtgcgcgtgcccgtgtccatccatgtctctgttgtgtgtctgtgtgcgggtatgggtgggattcctggtggacaggggtgtcagatctgtctgaggagccccagtcatgctcagcacgctacagatgtgttgtttgtcacactgagattgctgaatgtcgtggctgttggctgccgagcctcagctgctggcatttccttctgctgtttgctgcttttgtgcctcccccactttccatcacctctggagtcccgtctggacgtcccttcctgctacaggaataatgaggcgtgggctgcctcccgctagggcctcctgctccctgtaggtagtttctggctgaggcttgctaattggggatgcttcttagagcatcttccacatcaactcccctggctgctggctaccgattaaattcattagtgtgaaagaggtgggagtgaggttttctggcctgaagcagtctgcactgaaaggtacccaagtggcctgaaacagtgtagggaaagacctgggaaacactggaccaaaaaagcctgatctcatggagacctgcatggccctgttagagatggcgtagaagtgaaagtcttaaagggagcattagagatccttttaatacacgactgagtgccagcttatttgtgatgccccttcccagaccaggttaggattcctgggaaggccgcggattccggccctggaagaggcaggatcctggagcagttttgtgaggcttttgtgctcccatacgccccctggtggtgagtgtaaagaagactttgcctctcacaactacatgtatgtgtggcatttttgttagagatgagaaaaggattgagaaggataaactggaatcctggtaagaagcctttatgccagcccgacacctgctgtaattggggtgcatgagctatggagtcagatagttgttgggagggggaggacaagaagtctattgtttggactgtgtttgtctcacaatcaccacaaaataaaagtgtagaaaatgcttgtggtgtactaactcttttctgtacttaagttactcagattaacatgcacttctaattctaaacattttttttggagtcatcactgtcgctgtttaagtagaacaatgccaacgatgtatgagaaacagggaataaatcaggatttgtgtgtgtatgtgtgtggcattacttacatttactttattaaaaagcctaaggaactttaaagaatttgtattcagtttatttttattttttcaagacagagtctcactttgttgcccaggctggagtgcagtggcgtgatctcggctcactgcagcctccgcctcccgggttcaagtgattctcctgcctcggtctcatgagtagctgggattacaggcgtgcgccaccatgcctggctaatttttgtatttttagtagagacggtttcaccatgttggtcaggttggtcttgaactcctgacctcaagtgatctacctgtcttggcctcccagagtgttgggattacgccactgtacccagccttagactcagtttaaaatgggcttattgtaatgaaaaaaaatacgctacccaaaatttgccatgatgcctgtgatggtgaaggcattaaacaattgaaatctttgccttgcccagagagttgcagttatttgtaattataaacagtaagtgtatcagggcaggggtgacaataaaaaaccaatcattactacc

SEQ ID NO: 106361 - DNA, 1530 bp, Artificial Sequence
  derived and/or modified sequence
atgaagagagggaggctcccttcaagctcagaggacagcgacgacaacggatcactgagtaccacatggtcccagaacagtaggtctcagcataggagatcctcctgttcccgccatgaggatagaaaaccatccgaagtctttagaaccgacctgattacggccatgaaactgcatgatagctaccagctgaaccccgacgagtattacgtgctggccgatccatggcgccaggaatgggagaagggcgttcaggtgcctgtatcgcccggaaccatcccgcagcctgtggctcgggtggttagtgaagaaaagtctcttatgtttatccgtccaaaaaagtacattgtgtcgagcggctctgagcccccagaattggggtacgtggacattcgaaccctcgccgacagcgtctgtcgatatgacttaaatgatatggacgctgcctggctggaactgactaatgaagaattcaaagaaatgggcatgcccgagctggacgaatacactatggaacgcgtacttgaggagttcgaacagagatgctacgataatatgaatcatgctatcgagactgaggaggggttggggattgagtatgacgaagacgtggtgtgcgatgtgtgccagagccctgacggcgaggacggcaacgagatggttttttgtgacaaatgtaatatttgtgtccatcaggcgtgttatggcatacttaaggtccctgaaggatcctggctctgtcgaacttgcgcgctcggagtgcaacccaagtgcttactgtgtccaaaaaaaggaggagcaatgaagcccacacggtcgggcactaagtgggttcatgttagctgcgctctgtggattcctgaagtctcgattgggagccctgaaaagatggaacctataacaaaagtgtcgcatatcccctcgagcaggtgggccctcgtttgttccctgtgtaacgagaaattcggggcatctatccagtgtagcgtgaaaaactgtcggacagcttttcacgtgacatgcgccttcgatcgaggtctcgagatgaaaacaattctcgcagaaaacgatgaggttaagttcaagtcctactgcccaaaacattcatcccatcgtaagcctgaagagtccttagggaagggtgcggcacaggaaaacggtgctccagaatgttcgcctagaaatccgctggagccttttgctagtctggagcagaaccgggaggaggcccatagggtgtccgtccgaaagcaaaagctgcagcagttagaagatgaattctatacttttgtcaacttgctcgatgtggctagggccctgagattgcctgaagaggtggtcgattttctgtatcagtattggaagcttaaaaggaaggtgaatttcaacaaacctctaataactcctaagaaggatgaggaggacaacttggccaagcgggagcaggacgtgctattcagaaggcttcagctgtttacacatctgcgccaggatctggagagagtaatgatcgacaccgacaccctgtag

SEQ ID NO: 106362 - DNA, 390 bp, Artificial Sequence
  derived and/or modified sequence
atgaagcgcggtagactgcctagttccagcgaagatagcgacgacaacggctcactttcgacgacctggtcccagaactcacgatcccagcacagaagatcttcgtgttctcggcatgaagatcgcaagccaagcgaagtgttcagaactgatctgataaccgcaatgaaacttcacgattcttaccagctgaaccccgatgagtactatgttctcgcagacccttggcggcaggagtgggaaaagggagtgcaggtgcctgtctcccctggcaccattccccaacccgtcgcgagagtcgtgtctgaggaaaagagcctgatgttcattagacccaagaagtatatagtctcttccggctcagagccccctgagctcggatatgtgtag

SEQ ID NO: 106363 - DNA, 411 bp, Artificial Sequence
  derived and/or modified sequence
atgaaacgcggaagactcccatctagcagcgaagatagcgacgacaacggatcactcagtacaacatggtcgcagaactcccggtctcagcaccggcgttcctcttgttcgcggcacgaagatagaaagccctctgaggtttttcggacagacttgataacggcgatgaagcttcatgattcttaccaactgaaccctgacgagtactatgtgctagccgacccttggaggcaagaatgggagaaaggtgtgcaggttccagtgtcccccggaacaataccacagcctgtggcccgagttgtgagtgaggagaagagcctgatgtttatacggccaaagaagtatatagtatccagtgggtcggagcctccagagcttgggtacgtagatattcggactctagcggattag

SEQ ID NO: 106364 - DNA, 399 bp, Artificial Sequence
  derived and/or modified sequence
atgaagaggggtcgcctgccgtcctcaagcgaggattccgatgacaacggatctctgagcacgacctggagtcaaaatagccgatctcagcacaggagatccagctgctctcggcacgaggacagaaaaccctccgaggtcttccgcacggatttaatcactgccatgaaacttcacgacagctatcagctcaaccccgacgagtattatgtcctcgctgacccatggcgacaagagtgggaaaagggggtccaggtccccgtctctccaggaacaatccctcagcccgtggccagagtggtatccgaagagaagtccctgatgttcattcgcccaaagaagtatatagtatccagtgggtctgaacccccagagctgggctacgttgatattcgctag

SEQ ID NO: 106365 - DNA, 360 bp, Artificial Sequence
  derived and/or modified sequence
atgaaaaggggtcggttacctagctcaagtgaggattcggacgataacggctcgctatcaaccacttggtcgcagaactcccgtagccagcataggagatcatcctgttcacgacacgaagaccgtaaaccatccgaagtgtttagaaccgatttgatcaccgccatgaaactccacgactcctatcagctgaaccccgatgagtattacgttctagccgacccttggaggcaagagtgggagaaaggcgtacaggttcccgtcagccccggtacaatccctcagcctgtggcaagggtggtgtcagaggaaaagagccttatgtttatccggccaaagaagtacatcgtcagttcctag

SEQ ID NO: 106366 - DNA, 432 bp, Artificial Sequence
  derived and/or modified sequence
atgaaacgaggtcggctgccctcaagtagcgaagattcagatgataatggatcgttgtccaccacatggtctcagaatagcaggtcacagcaccggaggagctcctgttctcgacatgaggacagaaagcccagcgaggttttccgcacggatctgatcaccgcgatgaagcttcatgacagctatcaattaaacccagacgaatactacgtgctcgctgacccctggcgacaggagtgggagaagggagtgcaggtccctgtctcaccaggtactattccacaaccagtcgcacgcgtcgtaagcgaagagaagtctcttatgttcattcgcccaaagaaatacatcgtcagcagtggatcagagccacctgagctcggttatgttgatatccgcactctggctgatagtgtgtgccgctatgatttgtag

SEQ ID NO: 106367 - DNA, 1530 bp, Artificial Sequence
  derived and/or modified sequence
atgaagaggggtcgcctcccaagctcctcggaagattcggatgacaacgggtctcttagcacaacatggtcccagaactcccgaagccagcacagaagatcctcctgttctagacatgaggatcggaagccttctgaagtgttccggaccgacctgataactgctatgaagctgcacgatagttaccaactgaatcccgatgagtactacgtgcttgctgatccctggcgacaggaatgggagaagggggtccaagtgcccgtgtctccaggcacaataccgcagcccgtagctagggtggtctctgaagaaaagtcattgatgtttattagacccaagaaatacattgtgtcatctggatccgaacctcctgaactcggctacgtcgacattaggaccctggctgacagtgtgtgtcgctacgacctgaacgacatggatgcggcttggctggagctgaccaacgaagaattcaaagagatgggcatgcccgagctggatgaatacaccatggagcgggtcctcgaagaatttgaacaacgctgctatgacaatatgaaccatgccatagaaaccgaggaggggctggggatagagtacgacgaagacgtggtgtgcgacgtctgccagagccctgacggcgaggatgggaacgagatggtgttctgtgacaaatgcaacatatgtgtgcaccaggcctgctacggcatcctgaaggtgcccgaagggtcctggctctgccgcacatgcgctcttggcgtacagcctaaatgcctcttgtgccctaagaaaggcggagcaatgaagcctacacggtccgggactaagtgggttcacgtgagctgtgcactgtggatccccgaagtgtctattggcagcccagaaaaaatggagcccattaccaaagtctcacatattcccagcagccggtgggccctggtctgtagtctgtgcaatgagaaatttggggcatcaatccaatgctcggtgaaaaactgtaggacagcctttcatgtgacatgtgcctttgatagggggctggaaatgaaaacaatccttgccgagaacgacgaggtcaaattcaaaagctattgtccaaagcactcctctcaccgtaaacctgaagaaagtttgggtaaaggagctgctcaggagaatggcgcacccgagtgcagcccgcgtaatccgttagaaccatttgccagcctggaacagaaccgggaggaagctcatcgtgtgtcagtacggaaacagaagctgcaacagctagaggacgagttttacacatttgtgaacctacttgacgtcgcacgggcactccgcctgccagaggaggtggtggatttcctgtatcagtattggaaacttaaaaggaaagtgaattttaataagcctctgattacaccaaagaaggatgaggaagacaacctagctaaaagagaacaggacgttctgtttcgaaggctccagctcttcacacatctaaggcaggacttggaacgggtgatgattgatacagacacgttatag

SEQ ID NO: 106368 - DNA, 584 bp, Artificial Sequence
  derived and/or modified sequence
gcgcgtgtgtccgcgcgtgtccgcgtgtgggtccgtgtgcgcgtcccggtcccgcggcggcgacggcggcggcggcggcggcggctgcaggacgagccgagaggctcagccatatttgatggttttgttgctttgctcgggagttctcgggagtaatttaatgccgaaggctgcctgctgtttcccggggagatcatgaaacgaggtcgccttcccagcagcagtgaggattctgacgacaatggcagcctgtcaactacttggtcccagaattcccgatcccagcataggagaagctcctgctccagacatgaagatcgaaagccttcagaggtgtttaggacagacctgatcactgccatgaagttgcatgactcctaccagctgaatccggatgagtactatgtgttggcagatccctggagacaggaatgggagaaaggggtccaggtgcctgtgagcccggggaccatccctcagcctgtggccagggttgtgtctgaagagaaatccctcatgttcatcaggcccaagaagtacatcgtgtcatcaggctctgagcctcccgagttgggctatgtgga

SEQ ID NO: 106369 - DNA, 567 bp, Artificial Sequence
  derived and/or modified sequence
agcccagcgcctcggccgaacccctccgcagcagttcatagccctgatgaagcaagttactctgctctcctaataaatgcaagaaaatgaccttggagggcctttttaattacacatagaagtgacaatttgctgcctgctgtttcccggggagatcatgaaacgaggtcgccttcccagcagcagtgaggattctgacgacaatggcagcctgtcaactacttggtcccagaattcccgatcccagcataggagaagctcctgctccagacatgaagatcgaaagccttcagaggtgtttaggacagacctgatcactgccatgaagttgcatgactcctaccagctgaatccggatgagtactatgtgttggcagatccctggagacaggaatgggagaaaggggtccaggtgcctgtgagcccggggaccatccctcagcctgtggccagggttgtgtctgaagagaaatccctcatgttcatcaggcccaagaagtacatcgtgtcatcaggctctgagcctcccgagttgggctatgtggacatccggacgctggctgacag

SEQ ID NO: 106370 - DNA, 552 bp, Artificial Sequence
  derived and/or modified sequence
gatacacagtttccagaactgtctgggggcgggagcgggagcgggagccgagcccgctcggagctcctcgccgccgctgccgctcccatcttaaaaccgtttctcgccggcgcgcccgccccagcccgaaggctgcctgctgtttcccggggagatcatgaaacgaggtcgccttcccagcagcagtgaggattctgacgacaatggcagcctgtcaactacttggtcccagaattcccgatcccagcataggagaagctcctgctccagacatgaagatcgaaagccttcagaggtgtttaggacagacctgatcactgccatgaagttgcatgactcctaccagctgaatccggatgagtactatgtgttggcagatccctggagacaggaatgggagaaaggggtccaggtgcctgtgagcccggggaccatccctcagcctgtggccagggttgtgtctgaagagaaatccctcatgttcatcaggcccaagaagtacatcgtgtcatcaggctctgagcctcccgagttgggctatgtggacatccg

SEQ ID NO: 106371 - DNA, 504 bp, Artificial Sequence
  derived and/or modified sequence
gctaaagattcctggagtagttatagtaataatgtcacaggaatatagaaagaaacctggcatctttgggagacctactgatatgtgacttctccacccctccccctccttttttaacctggctgcctgctgtttcccggggagatcatgaaacgaggtcgccttcccagcagcagtgaggattctgacgacaatggcagcctgtcaactacttggtcccagaattcccgatcccagcataggagaagctcctgctccagacatgaagatcgaaagccttcagaggtgtttaggacagacctgatcactgccatgaagttgcatgactcctaccagctgaatccggatgagtactatgtgttggcagatccctggagacaggaatgggagaaaggggtccaggtgcctgtgagcccggggaccatccctcagcctgtggccagggttgtgtctgaagagaaatccctcatgttcatcaggcccaagaagtacatcgtgtcatca

SEQ ID NO: 106372 - DNA, 564 bp, Artificial Sequence
  derived and/or modified sequence
gctcaaagtggcggagcgcggcggcgggaggcaggtgcacggcacccgccagtgggggtgcctcaacttccgcgggcgtttaaatagcagcctctctcccctcccaccggctgcctgctgtttcccggggagatcatgaaacgaggtcgccttcccagcagcagtgaggattctgacgacaatggcagcctgtcaactacttggtcccagaattcccgatcccagcataggagaagctcctgctccagacatgaagatcgaaagccttcagaggtgtttaggacagacctgatcactgccatgaagttgcatgactcctaccagctgaatccggatgagtactatgtgttggcagatccctggagacaggaatgggagaaaggggtccaggtgcctgtgagcccggggaccatccctcagcctgtggccagggttgtgtctgaagagaaatccctcatgttcatcaggcccaagaagtacatcgtgtcatcaggctctgagcctcccgagttgggctatgtggacatccggacgctggctgacagcgtgtgtcgctatgacctc

SEQ ID NO: 106373 - DNA, 3560 bp, Artificial Sequence
  derived and/or modified sequence
cataacaagccaaacgccagaccgagagtgcctccgtgcgcgagtgcccggtgtgtgcgcgccggcgagagcaggggcccgcccggctccccgcccgccgcggcccgaactcatgcagctccgagcgagcgagcggcgcccagcccagcgcctcggccgaacccctccgcagcaggctgcctgctgtttcccggggagatcatgaaacgaggtcgccttcccagcagcagtgaggattctgacgacaatggcagcctgtcaactacttggtcccagaattcccgatcccagcataggagaagctcctgctccagacatgaagatcgaaagccttcagaggtgtttaggacagacctgatcactgccatgaagttgcatgactcctaccagctgaatccggatgagtactatgtgttggcagatccctggagacaggaatgggagaaaggggtccaggtgcctgtgagcccggggaccatccctcagcctgtggccagggttgtgtctgaagagaaatccctcatgttcatcaggcccaagaagtacatcgtgtcatcaggctctgagcctcccgagttgggctatgtggacatccggacgctggctgacagcgtgtgtcgctatgacctcaatgacatggatgctgcatggctggaactgaccaatgaagaatttaaggagatgggaatgcctgaactagatgaatacaccatggagagggtcctagaggaatttgagcagcgatgctacgacaatatgaatcatgccatagagactgaggaaggcctggggatcgaatatgatgaagatgttgtctgtgatgtctgccagtctcctgatggtgaggacggcaatgagatggtgttctgtgacaaatgcaacatctgtgtgcaccaggcctgttatggaatcctcaaggtaccagagggcagctggctgtgccggacatgtgccctgggggttcagccaaaatgtctgctgtgtccgaagaagggtggagctatgaagcccacccgtagcggaaccaagtgggtccacgttagctgtgctctgtggatccctgaggtgagcattggcagcccagagaagatggagcccatcaccaaggtgtcacacattcccagcagccggtgggcgctagtgtgcagcctctgcaatgagaagtttggggcctctatacagtgctctgtgaagaactgccgcacagccttccatgtgacctgtgcttttgaccggggcctggagatgaagaccatcttagcagagaatgatgaagtcaagttcaagtcctattgcccaaagcacagctcacataggaaacccgaggagagtcttggcaagggggctgcacaggagaatggggcccctgagtgttccccccggaatccgctggagccctttgccagccttgagcagaaccgggaggaggcccaccgggtgagtgtccgtaagcagaagctgcagcagttggaggatgagttctacaccttcgtcaacctgctggatgttgccagggctctgcggctgcctgaggaagtagtggatttcctgtaccagtactggaagttgaagaggaaggtcaacttcaacaagcccctgatcaccccaaagaaagatgaagaggacaatctagccaagcgggagcaggatgtcttatttaggaggctgcagctgttcacgcacctgcggcaggacctggagagggtaatgattgacactgacaccttatagtgacttagagaagaagatgcaaagaggcgaacgctcgcccagagcaagaaatgatagccagtcatatactctcagacccttgtacacaccacagcatgaggttgtgttggttaaaaatatttatgggctggtaaactcattgtacatatgtgcaaaactgctactgagtggggagcttctttgtggtttttttttttttaaaaacactttcccattaatctttactgttttgtaagatcaaatggggtgtgtcttccccacccccattccttcattctagagctagagtgaatgagccccaagaaaatgacccaaggagttgactcaggatggtttacagactgatttagaaaaccagaacggatttcatttctaatggagggggccagagatgggaaaatttcttgttcagtccggggaaacacacctaggtgctggtgatgggcttatgaaggaagctaagcacggctgctcactggcccccactttgtttcttgggtaattcacaggggaattcccagtactgtcatggagcagagcaggcagtgggtgctgatgtgtgtgcatgagctgtatgtacacatgcatatatctgttacagaagatactcctggcagtgaggtgctaagtcatcactgaggctgtgtgtgtgtgtgtgtgtgcgcgtgcccgtgtccatccatgtctctgttgtgtgtctgtgtgcgggtatgggtgggattcctggtggacaggggtgtcagatctgtctgaggagccccagtcatgctcagcacgctacagatgtgttgtttgtcacactgagattgctgaatgtcgtggctgttggctgccgagcctcagctgctggcatttccttctgctgtttgctgcttttgtgcctcccccactttccatcacctctggagtcccgtctggacgtcccttcctgctacaggaataatgaggcgtgggctgcctcccgctagggcctcctgctccctgtaggtagtttctggctgaggcttgctaattggggatgcttcttagagcatcttccacatcaactcccctggctgctggctaccgattaaattcattagtgtgaaagaggtgggagtgaggttttctggcctgaagcagtctgcactgaaaggtacccaagtggcctgaaacagtgtagggaaagacctgggaaacactggaccaaaaaagcctgatctcatggagacctgcatggccctgttagagatggcgtagaagtgaaagtcttaaagggagcattagagatccttttaatacacgactgagtgccagcttatttgtgatgccccttcccagaccaggttaggattcctgggaaggccgcggattccggccctggaagaggcaggatcctggagcagttttgtgaggcttttgtgctcccatacgccccctggtggtgagtgtaaagaagactttgcctctcacaactacatgtatgtgtggcatttttgttagagatgagaaaaggattgagaaggataaactggaatcctggtaagaagcctttatgccagcccgacacctgctgtaattggggtgcatgagctatggagtcagatagttgttgggagggggaggacaagaagtctattgtttggactgtgtttgtctcacaatcaccacaaaataaaagtgtagaaaatgcttgtggtgtactaactcttttctgtacttaagttactcagattaacatgcacttctaattctaaacattttttttggagtcatcactgtcgctgtttaagtagaacaatgccaacgatgtatgagaaacagggaataaatcaggatttgtgtgtgta

SEQ ID NO: 106374 - DNA, 532 bp, Artificial Sequence
  derived and/or modified sequence
atatttgatggttttgttgctttgctcgggagttctcgggagtaatttaatgccgaaggtcgctgcctagtggaaataatataatacgtcattaatatggcgccaaaagattgggttctcgatctgtagcgaggagggagggaggcagccgctgagcgcagcgttactatcccaccagtaacttgggcattgccggggcgggggccggaggaggaggagaggatgatttttggatcctgagaattgatctatgttggatcagtaagttttattatgattttttttttcaaatttggggggctgaagacttagagctatttcttcttttggatttgcgaagaacatgcggttttcagttcatagccctgatgaagcaagttactctgctctcctaataaatgcaagaaaatgaccttggagggcctttttaattacacatagaagtgacaatttgctgcctgctgtttcccggggagatcatgaaacgaggtcgccttcccagcagcagtgaggattctgacgacaatggcag

SEQ ID NO: 106375 - DNA, 453 bp, Artificial Sequence
  derived and/or modified sequence
ctgatcctggaggagcagttccccagcggcctgatcggccccctgttcaccatgaacggccacctgctgggcgacagcaaggacctgcaggacaaccacttctacgtggccgtgggcctggagaccttcaagtacttcccctactggaagagccccagagtgcccagcgaggtgcagcagagatacgccaacgtggagaagaacagccagagaaagaagaaggtggacagcaagggcaaggagccctgcaagtacgacggcatcccccccaagacccaggacagcgtgtactacgccaaggaggagaagaagaagaccctggccgagcccctggtgcagagaggcgccgagggcgacgtgtacaaggcccccacccccagcaaggagacccagggcgccctggacgtgaaggaggagcacaacgtgcagctggaggtgcccgtggaccagtag

SEQ ID NO: 106376 - DNA, 453 bp, Artificial Sequence
  derived and/or modified sequence
ttaatcctcgaggagcagttcccgtctgggctgattggtcccctcttcaccatgaatggacatttgctgggcgattccaaagacctccaggataatcacttttatgttgccgtggggctagaaacctttaagtattttccttactggaagagccctcgggtaccttcagaggtgcagcagcggtacgcaaacgttgagaagaattcccagcggaaaaagaaagtggattccaaggggaaggagccgtgcaagtacgatggcatccctccaaaaacacaggacagcgtctactatgctaaggaagagaagaaaaagactctcgccgaacctctggtccaaaggggagcagaaggcgacgtttataaagcacccacgcccagcaaagaaacacagggcgcactggatgttaaagaagagcacaatgttcaactcgaggtgcccgtggaccagtag

SEQ ID NO: 106377 - DNA, 450 bp, Artificial Sequence
  derived and/or modified sequence
ctaatcctggaagagcagttcccgtcgggtttaattggcccattatttacaatgaatgggcatcttttgggcgactcaaaggatttgcaagacaatcacttttatgttgctgtgggactggagaccttcaaatattttccttactggaagtctccaagggtgcccagtgaggtccaacaaaggtatgcgaatgttgaaaaaaactcacagagaaagaaaaaagtggactccaaaggaaaagaaccttgtaaatatgatggcataccccctaaaacacaggattctgtttattatgccaaagaagaaaagaagaaaacattggcagaacctttagtccaaaggggtgcagaaggtgacgtgtataaagcaccgactcctagcaaggaaacccaaggggcgctggacgtcaaagaggagcacaatgtgcagctggaggtgcctgtggaccag

SEQ ID NO: 106378 - DNA, 453 bp, Artificial Sequence
  derived and/or modified sequence
ctcatcctggaggagcagttccccagcggcctcatcggccccctcttcaccatgaatggccacctgctgggggacagcaaggacctgcaggacaaccacttctacgtggccgtgggcctggagaccttcaagtacttcccctactggaagagcccccgggtgcccagcgaggtgcagcagagatatgccaacgtggagaagaacagccagaggaagaagaaggtggacagcaagggcaaggagccctgcaagtatgatggcatcccccccaagacccaggacagcgtgtactatgccaaggaggagaagaagaagaccctggccgagcccctggtgcagagaggagcagaaggagatgtgtacaaggcccccacccccagcaaggagacccagggcgccctggatgtgaaggaggagcacaacgtgcagctggaggtgcctgtggaccagtag

SEQ ID NO: 106379 - DNA, 453 bp, Artificial Sequence
  derived and/or modified sequence
ctgatcctggaggagcagttccccagcggcctgatcggccccctgttcactatgaatggccatcttctgggcgattccaaagacctgcaagataaccacttttacgtggctgttggtctggagactttcaaatactttccctattggaaatcccccagagtgccgtccgaggttcagcagcgctatgcaaacgtggagaaaaacagtcagcgaaagaaaaaagtggatagcaaagggaaggaaccttgcaagtatgatggtataccccccaagacacaagactccgtctactatgctaaagaggaaaaaaaaaaaaccttagccgagcctttagttcagcgcggagccgagggtgacgtctataaggcaccaaccccttcaaaagagacgcaaggggctttggatgtgaaggaggaacataatgttcagttagaggtacctgtagatcagtag

SEQ ID NO: 106380 - DNA, 453 bp, Artificial Sequence
  derived and/or modified sequence
ctgatcctagaagagcagttccctagcggccttatcggaccactctttacaatgaatggccatctgctcggagacagcaaggatctgcaggacaaccacttctacgtcgccgtgggcctggagacattcaagtacttcccatactggaaaagcccgagagtgccgagcgaagtccaacagcgctatgcaaacgttgagaagaattcacagcgaaagaagaaggttgactcaaaggggaaggagccctgcaaatatgatggcatacctcccaaaacccaagactccgtgtactatgctaaagaagaaaaaaagaagacactggccgaacccctagtgcaaagaggtgccgaaggggacgtgtacaaggccccaacgccgagcaaggaaacccaaggtgccctggacgtgaaagaggaacacaatgtccaactggaagtcccggtggaccagtag

SEQ ID NO: 106381 - protein, 75 aa, Artificial Sequence
  derived and/or modified sequence
MERSFVWLSCLDSDSCNLTFRLGEVESHACSPSLLWNLLTQYLPPGAGHILRTYNFPVLSCVSSCHLIGGKMPEN

SEQ ID NO: 106382 - DNA, 228 bp, Artificial Sequence
  derived and/or modified sequence
atggagagaagcttcgtgtggctgagctgcctggacagcgacagctgcaacctgaccttcagactgggcgaggtggagagccacgcctgcagccccagcctgctgtggaacctgctgacccagtacctgccccccggcgccggccacatcctgagaacctacaacttccccgtgctgagctgcgtgagcagctgccacctgatcggcggcaagatgcccgagaactag

SEQ ID NO: 106383 - DNA, 586 bp, Artificial Sequence
  derived and/or modified sequence
tgagtgtgtcgctgatgccatcaccgcagcgctctgaccgccccctcggtccagcatttctcaggctcaacgagttcatggccaagattcctaatcttttgttctgtttcatttccccgttaggagttgtaagacgttcatcgccgtgttatccttgagtaaagaatgaactctggaagcccagccagggacaatgcaccttcacagagattctgcactaatctgagtgaaggtctaaggtttggaatctccccctcatggagagaagctttgtatggctgtcatgcttagacagtgattcctgcaacttgaccttcaggctgggagaggtggagagccatgcctgttctccttccttgctatggaatttgctgacacaatatcttccgcctggtgctgggcatatcctaagaacttacaactttcctgtattatcctgtgtgagcagctgtcaccttattgggggaaaaatgcctgaaaattagggggcacttcaagtagatagcttctatttcctatatttgtcttatatacaagtatttgcttttatcaaaataattccaataaagcattttaaagtaaagaa

SEQ ID NO: 106384 - DNA, 610 bp, Artificial Sequence
  derived and/or modified sequence
ttttagttctttttgcgaagtgggctcgtgggttggcagtatgagagttgtaatggcccgactgttgagtgagggggagcaggggatcccaacggcttgcgctgcctttgcgcagcagccggcgggcggccacgtcgcggcctggctggggagttgtaagacgttcatcgccgtgttatccttgagtaaagaatgaactctggaagcccagccagggacaatgcaccttcacagagattctgcactaatctgagtgaaggtctaaggtttggaatctccccctcatggagagaagctttgtatggctgtcatgcttagacagtgattcctgcaacttgaccttcaggctgggagaggtggagagccatgcctgttctccttccttgctatggaatttgctgacacaatatcttccgcctggtgctgggcatatcctaagaacttacaactttcctgtattatcctgtgtgagcagctgtcaccttattgggggaaaaatgcctgaaaattagggggcacttcaagtagatagcttctatttcctatatttgtcttatatacaagtatttgcttttatcaaaataattccaataaagcattttaaagtaaa

SEQ ID NO: 106385 - DNA, 698 bp, Artificial Sequence
  derived and/or modified sequence
ctttttgcgaagtgggctcgtgggttggcagtatgagagttgtaatggcccgactgttgagtgagggggagcaggggatcccaacggcttgcgctgcctttgcgcagcagccggcgggcccacgtcgcggcctggctggggtaggagagggcggtccccagtgcagttgggtgaactaccgttgcacactggagtttctggtgtctttgcttggaactgacctagctcgtggcagggggaactcggctagcggccccacagcccctgctgactcaaaacaactaatgaactctggaagcccagccagggacaatgcaccttcacagagattctgcactaatctgagtgaaggtctaaggtttggaatctccccctcatggagagaagctttgtatggctgtcatgcttagacagtgattcctgcaacttgaccttcaggctgggagaggtggagagccatgcctgttctccttccttgctatggaatttgctgacacaatatcttccgcctggtgctgggcatatcctaagaacttacaactttcctgtattatcctgtgtgagcagctgtcaccttattgggggaaaaatgcctgaaaattagggggcacttcaagtagatagcttctatttcctatatttgtcttatatacaagtatttgcttttatcaaaataattccaataaagcattttaaag

SEQ ID NO: 106386 - DNA, 847 bp, Artificial Sequence
  derived and/or modified sequence
ttttagttctttttgcgaagtgggctcgtgggttggcagtatgagagttgtaatggcccgactgttgagtgagggggagcaggggatcccaacggcttgcgctgcctttgcgcagcagccggcgggcggccacgtcgcggcctggctggggtaggagagggcggtccccagtgcagttgggtgaactaccgttgcacactggagtttctggtgtctttgcttggaactgacctagctcgtggcagggggaactcggctagcggccccacagcccctgctgactcaaaacaactgagttgtaagacgttcatcgccgtgttatccttgagtaaagaagcgggcttttgccatgttgtccaggctggtctctactcctgggctcaagcagtcctcctgcctcagtctcccaaagtgctggaattacagggaatgaactctggaagcccagccagggacaatgcaccttcacagagattctgcactaatctgagtgaaggtctaaggtttggaatctccccctcatggagagaagctttgtatggctgtcatgcttagacagtgattcctgcaacttgaccttcaggctgggagaggtggagagccatgcctgttctccttccttgctatggaatttgctgacacaatatcttccgcctggtgctgggcatatcctaagaacttacaactttcctgtattatcctgtgtgagcagctgtcaccttattgggggaaaaatgcctgaaaattagggggcacttcaagtagatagcttctatttcctatatttgtcttatatacaagtatttgcttttatcaaaataattccaataaagcattttaaagtaaa

SEQ ID NO: 106387 - DNA, 712 bp, Artificial Sequence
  derived and/or modified sequence
ttttagttctttttgcgaagtgggctcgtgggttggcagtatgagagttgtaatggcccgactgttgagtgagggggagcaggggatcccaacggcttgcgctgcctttgcgcagcagccggcgggcggccacgtcgcggcctggctggggtaggagagggcggtccccagtgcagttgggtgaactaccgttgcacactggagtttctggtgtctttgcttggaactgacctagctcgtggcagggggaactcggctagcggccccacagcccctgctgactcaaaacaactaatgaactctggaagcccagccagggacaatgcaccttcacagagattctgcactaatctgagtgaaggtctaaggtttggaatctccccctcatggagagaagctttgtatggctgtcatgcttagacagtgattcctgcaacttgaccttcaggctgggagaggtggagagccatgcctgttctccttccttgctatggaatttgctgacacaatatcttccgcctggtgctgggcatatcctaagaacttacaactttcctgtattatcctgtgtgagcagctgtcaccttattgggggaaaaatgcctgaaaattagggggcacttcaagtagatagcttctatttcctatatttgtcttatatacaagtatttgcttttatcaaaataattccaataaagcattttaaagtaaa

SEQ ID NO: 106388 - DNA, 1053 bp, Artificial Sequence
  derived and/or modified sequence
gctgctgggaaacggcttaggagcagcacccggctggcgctggccggccggcgccggggactttcttccgcctggccagacagatccctgttttttgtttttcaaaattcagaaagcatctccgaatatttgcccagaggagtgtgaaacatactttcctggtctttctttcactttgttttatttctgtgtggacaaacaatggggaaaatgccgcgcgtctagccaggcagataagaaaacaactatacccgtcaggcccccaacccggcgccgccataaatggccccggcctcgccattttagttctttttgcgaagtgggctcgtgggttggcagtatgagagttgtaatggcccgactgttgagtgagggggagcaggggatcccaacggcttgcgctgcctttgcgcagcagccggcgggcggccacgtcgcggcctggctggggtaggagagggcggtccccagtgcagttgggtgaactaccgttgcacactggagtttctggtgtctttgcttggaactgacctagctcgtggcagggggaactcggctagcggccccacagcccctgctgactcaaaacaactgagttgtaagacgttcatcgccgtgttatccttgagtaaagaatgaactctggaagcccagccagggacaatgcaccttcacagagattctgcactaatctgagtgaaggtctaaggtttggaatctccccctcatggagagaagctttgtatggctgtcatgcttagacagtgattcctgcaacttgaccttcaggctgggagaggtggagagccatgcctgttctccttccttgctatggaatttgctgacacaatatcttccgcctggtgctgggcatatcctaagaacttacaactttcctgtattatcctgtgtgagcagctgtcaccttattgggggaaaaatgcctgaaaattagggggcacttcaagtagatagcttctatttcctatatttgtcttatatacaagtatttgcttttatcaaaataattccaataaagcattttaaagtaaa

SEQ ID NO: 106389 - DNA, 602 bp, Artificial Sequence
  derived and/or modified sequence
ggagcagcacccggctggcgctggccggccggcgccggggactttcttccgcctggccagacagatccctgttttttgtttttcaaaattcagaaagcatctccgaatatttgcccagaggagtgtgaaacatactttcctggagttgtaagacgttcatcgccgtgttatccttgagtaaagaatgaactctggaagcccagccagggacaatgcaccttcacagagattctgcactaatctgagtgaaggtctaaggtttggaatctccccctcatggagagaagctttgtatggctgtcatgcttagacagtgattcctgcaacttgaccttcaggctgggagaggtggagagccatgcctgttctccttccttgctatggaatttgctgacacaatatcttccgcctggtgctgggcatatcctaagaacttacaactttcctgtattatcctgtgtgagcagctgtcaccttattgggggaaaaatgcctgaaaattagggggcacttcaagtagatagcttctatttcctatatttgtcttatatacaagtatttgcttttatcaaaataattccaataaagcattttaaagtaaa

SEQ ID NO: 106390 - DNA, 962 bp, Artificial Sequence
  derived and/or modified sequence
ttttgcgaagtgggctcgtgggttggcagtatgagagttgtaatggcccgactgttgagtgagggggagcaggggatcccaacggcttgcgctgcctttgcgcagcagccggcgggcggccacgtcgcggcctggctggggtaggagagggcggtccccagtgcagttgggtgaactaccgttgcacactggagtttctggtgtctttgcttggaactgacctagctcgtggcagggggaactcggctagcggccccacagcccctgctgactcaaaacaactgagttgtaagacgttcatcgccgtgttatccttgagtaaagggcgcaatgccaggatctccctgcaacatccaccgtcagggctcaagtggtctttccacctcagcttcctgggactgcaggcacgtgctaccaccacgcctggctaatttttagtttttttacagaagcgggcttttgccatgttgtccaggctggtctctactcctgggctcaagcagtcctcctgcctcagtctcccaaagtgctggaattacagggaatgaactctggaagcccagccagggacaatgcaccttcacagagattctgcactaatctgagtgaaggtctaaggtttggaatctccccctcatggagagaagctttgtatggctgtcatgcttagacagtgattcctgcaacttgaccttcaggctgggagaggtggagagccatgcctgttctccttccttgctatggaatttgctgacacaatatcttccgcctggtgctgggcatatcctaagaacttacaactttcctgtattatcctgtgtgagcagctgtcaccttattgggggaaaaatgcctgaaaattagggggcacttcaagtagatagcttctatttcctatatttgtcttatatacaagtatttgcttttatcaaaataattccaataaagcattttaaagtaaa

SEQ ID NO: 106391 - DNA, 815 bp, Artificial Sequence
  derived and/or modified sequence
taaaggctgggtaacctgactcctcccctcatttctactgcaaaataggagtacactggggcctcccagtggagctgttctctgctgttttaaattactttctactcctccctttctaacgtccactcctggactcatttgttagatcaatatatactgggactgttgtgttttctttgagtgtactagatctctttccagaagagcttcccttgatccagatctccctaattgggaatgatgatttcacagactagagtctccgatgctggtcatgatgtcaaaactaagttctgactcatttagggaactggatacttgggtctccagaagggccaatgggagggccataattctgtttattttcaaattgtcttgttttcaccttgttagaatgaactctggaagcccagccagggacaatgcaccttcacagagattctgcactaatctgagtgaaggtctaaggtttggaatctccccctcatggagagaagctttgtatggctgtcatgcttagacagtgattcctgcaacttgaccttcaggctgggagaggtggagagccatgcctgttctccttccttgctatggaatttgctgacacaatatcttccgcctggtgctgggcatatcctaagaacttacaactttcctgtattatcctgtgtgagcagctgtcaccttattgggggaaaaatgcctgaaaattagggggcacttcaagtagatagcttctatttcctatatttgtcttatatacaagtatttgcttttatcaaaataattccaataaagcattttaaagtaaagaa

SEQ ID NO: 106392 - DNA, 952 bp, Artificial Sequence
  derived and/or modified sequence
ctcgtgggttggcagtatgagagttgtaatggcccgactgttgagtgagggggagcaggggatcccaacggcttgcgctgcctttgcgcagcagccggcgggcggccacgtcgcggcctggctggggtaggagagggcggtccccagtgcagttgggtgaactaccgttgcacactggagtttctggtgtctttgcttggaactgacctagctcgtggcagggggaactcggctagcggccccacagcccctgctgactcaaaacaactgagttgtaagacgttcatcgccgtgttatccttgagtaaagacagggcgcaatgccaggatctccctgcaacatccaccgtcagggctcaagtggtctttccacctcagcttcctgggactgcaggcacgtgctaccaccacgcctggctaatttttagtttttttacagaagcgggcttttgccatgttgtccaggctggtctctactcctgggctcaagcagtcctcctgcctcagtctcccaaagtgctggaattacagggaatgaactctggaagcccagccagggacaatgcaccttcacagagattctgcactaatctgagtgaaggtctaaggtttggaatctccccctcatggagagaagctttgtatggctgtcatgcttagacagtgattcctgcaacttgaccttcaggctgggagaggtggagagccatgcctgttctccttccttgctatggaatttgctgacacaatatcttccgcctggtgctgggcatatcctaagaacttacaactttcctgtattatcctgtgtgagcagctgtcaccttattgggggaaaaatgcctgaaaattagggggcacttcaagtagatagcttctatttcctatatttgtcttatatacaagtatttgcttttatcaaaataattccaataaagcattttaaagtaaa

SEQ ID NO: 106393 - DNA, 585 bp, Artificial Sequence
  derived and/or modified sequence
tctgagtgtgtcgctgatgccatcaccgcagcgctctgaccgccccctcggtccagcatttctcaggctcaacgagttcatggccaagattcctaatcttttgttctgtttcatttccccgttaggagttgtaagacgttcatcgccgtgttatccttgagtaaagaatgaactctggaagcccagccagggacaatgcaccttcacagagattctgcactaatctgagtgaaggtctaaggtttggaatctccccctcatggagagaagctttgtatggctgtcatgcttagacagtgattcctgcaacttgaccttcaggctgggagaggtggagagccatgcctgttctccttccttgctatggaatttgctgacacaatatcttccgcctggtgctgggcatatcctaagaacttacaactttcctgtattatcctgtgtgagcagctgtcaccttattgggggaaaaatgcctgaaaattagggggcacttcaagtagatagcttctatttcctatatttgtcttatatacaagtatttgcttttatcaaaataattccaataaagcattttaaagtaaa

SEQ ID NO: 106394 - DNA, 602 bp, Artificial Sequence
  derived and/or modified sequence
ggagcagcacccggctggcgctggccggccggcgccggggactttcttccgcctggccagacagatccctgttttttgtttttcaaaattcagaaagcatctccgaatatttgcccagaggagtgtgaaacatacttccctggagttgtaagacgttcatcgccgtgttatccttgagtaaagaatgaactctggaagcccagccagggacaatgcaccttcacagagattctgcactaatctgagtgaaggtctaaggtttggaatctccccctcatggagagaagctttgtatggctgtcatgcttagacagtgattcctgcaacttgaccttcaggctgggagaggtggagagccatgcctgttctccttccttgctatggaatttgctgacacaatatcttccgcctggtgctgggcatatcctaagaacttacaactttcctgtattatcctgtgtgagcagctgtcaccttattgggggaaaaatgcctgaaaattagggggcacttcaagtagatagcttctatttcctatatttgtcttatatacaagtatttgcttttatcaaaataattccaataaagcattttaaagtaaa

SEQ ID NO: 106395 - DNA, 815 bp, Artificial Sequence
  derived and/or modified sequence
taaaggctgggtaacctgactcctcccctcatttctactgcaaaataggagtacactggggcctcccagtggagctgttctctgctgttttaaattactttctactcctccctttctaacgtccactcctggactcatttgttagatcaatatatactgggactgttgtgttttctttgagtgtactagatctctttccagaagagcttcccttgatccagatctccctaattgggaatgatgatttcacagactagagtctccgatgctggtcatgatgtcaaaactaagttctgactcatttagggaactggatacttgggtctccagaagggccaatgggagggccataattctgtttattttcaaattgtcttgttttcaccttgttagaatgaactctggaagcccagccagggacaatgcaccttcacagagattctgcactaatctgagtgaaggtctaaggtttggaatctccccctcatggagagaagctttgtatggctgtcatgcttagacagtgattcctgcaacttgaccttcaggctgggagaggtggagagccatgcctgttctccttccttgctatggaatttgctgacacaatatcttccgcctggtgctgggcatatcctaagaacttacaactttcctgtattatcctgtgtgagcagctgtcaccttattgggggaaaaatgcctgaaaattagggggcacttcaagtagatagcttctatttcctatatttgtcttatatacaagtatttgcttttatcaaaataattccaataaagcattttaaagtaaagga

SEQ ID NO: 106396 - DNA, 1053 bp, Artificial Sequence
  derived and/or modified sequence
gctgctgggaaacggcttaggagcagcacccggctggcgctggccggccggcgccggggactttcttccgcctggccagacagatccctgttttttgtttttcaaaattcagaaagcatctccgaatatttgcccagaggagtgtgaaacatacttccctggtctttctttcactttgttttatttctgtgtggacaaacaatggggaaaatgccgcgcgtctagccaggcagataagaaaacaactatacccgtcaggcccccaacccggcgccgccataaatggccccggcctcgccattttagttctttttgcgaagtgggctcgtgggttggcagtatgagagttgtaatggcccgactgttgagtgagggggagcaggggatcccaacggcttgcgctgcctttgcgcagcagccggcgggcggccacgtcgcggcctggctggggtaggagagggcggtccccagtgcagttgggtgaactaccgttgcacactggagtttctggtgtctttgcttggaactgacctagctcgtggcagggggaactcggctagcggccccacagcccctgctgactcaaaacaactgagttgtaagacgttcatcgccgtgttatccttgagtaaagaatgaactctggaagcccagccagggacaatgcaccttcacagagattctgcactaatctgagtgaaggtctaaggtttggaatctccccctcatggagagaagctttgtatggctgtcatgcttagacagtgattcctgcaacttgaccttcaggctgggagaggtggagagccatgcctgttctccttccttgctatggaatttgctgacacaatatcttccgcctggtgctgggcatatcctaagaacttacaactttcctgtattatcctgtgtgagcagctgtcaccttattgggggaaaaatgcctgaaaattagggggcacttcaagtagatagcttctatttcctatatttgtcttatatacaagtatttgcttttatcaaaataattccaataaagcattttaaagtaaa

SEQ ID NO: 106397 - DNA, 739 bp, Artificial Sequence
  derived and/or modified sequence
ctttttgcgaagtgggctcgtgggttggcagtatgagagttgtaatggcccgactgttgagtgagggggagcaggggatcccaacggcttgcgctgcctttgcgcagcagccggcgggcccacgtcgcggcctggctggggtaggagagggcggtccccagtgcagttgggtgaactaccgttgcacactggagtttctggtgtctttgcttggaactgacctagctcgtggcagggggaactcggctagcggccccacagcccctgctgactcaaaacaactgagttgtaagacgttcatcgccgtgttatccttgagtaaagaatgaactctggaagcccagccagggacaatgcaccttcacagagattctgcactaatctgagtgaaggtctaaggtttggaatctccccctcatggagagaagctttgtatggctgtcatgcttagacagtgattcctgcaacttgaccttcaggctgggagaggtggagagccatgcctgttctccttccttgctatggaatttgctgacacaatatcttccgcctggtgctgggcatatcctaagaacttacaactttcctgtattatcctgtgtgagcagctgtcaccttattgggggaaaaatgcctgaaaattagggggcacttcaagtagatagcttctatttcctatatttgtcttatatacaagtatttgcttttatcaaaataattccaataaagcattttaaag

SEQ ID NO: 106398 - DNA, 228 bp, Artificial Sequence
  derived and/or modified sequence
atggagcggagcttcgtttggctgagctgtctggattctgacagctgcaatctcacattcagactcggggaggtggaatctcatgcctgctctccctcactattgtggaaccttttaacacagtatctgccccccggtgccggccacattctacgtacctacaacttcccggtgttgtcctgtgtgagctcctgtcacctcattggaggtaaaatgcctgaaaattag

SEQ ID NO: 106399 - DNA, 228 bp, Artificial Sequence
  derived and/or modified sequence
atggagcgaagtttcgtctggttgtcctgcctggattctgactcatgtaatctcacgtttcgtctgggcgaagtcgagagtcacgcatgtagccccagcttgctttggaacctgctgacacagtacctgccgcctggcgccggccacatcctccgcacatataatttcccggtccttagctgtgtgtctagttgccatctgatcggtggtaaaatgcccgaaaactag

SEQ ID NO: 106400 - DNA, 228 bp, Artificial Sequence
  derived and/or modified sequence
atggagaggtcttttgtgtggttgtcctgtcttgactcggatagttgtaatctgaccttccgactgggagaagtcgaatctcacgcatgcagtcctagcctgctatggaatttgttaacccagtacttacctccaggggccggacacattctgaggacttacaatttccctgtgctttcctgtgtgagctcttgtcacctgatcggcggaaaaatgccagaaaattag

SEQ ID NO: 106401 - DNA, 228 bp, Artificial Sequence
  derived and/or modified sequence
atggaacggtcgttcgtgtggctttcttgcttggatagcgatagctgtaatctcactttccggctgggtgaagtggagagccatgcatgttcgccgagcctgctgtggaacctgctgacacagtatcttccccccggcgctggccacattctccgaacatacaatttcccagtgctgagctgtgtatcatcatgccatctcattgggggaaaaatgccagagaactag

SEQ ID NO: 106402 - DNA, 228 bp, Artificial Sequence
  derived and/or modified sequence
atggagcggagcttcgtctggctgtcctgcctggactccgactcttgcaatctaactttccgcctgggcgaggttgagagtcatgcatgtagcccttctctgctctggaatctgcttacacaatatctgccacctggcgccggccacatacttcgtacatacaactttcccgtgctatcttgtgtgagcagttgtcatctgattggcggcaaaatgccagaaaactag

SEQ ID NO: 106403 - DNA, 228 bp, Artificial Sequence
  derived and/or modified sequence
atggagagatcatttgtgtggctgtcctgcctggattctgacagttgtaacctgacattcaggctgggggaggtcgagtcccatgcctgttccccttcgctgttgtggaacctactgacacagtatctgccaccgggggctggacatattttacggacctacaacttccctgtgctgagttgcgtgtcttcttgccatctgatcggaggtaagatgcctgaaaattag

SEQ ID NO: 106404 - DNA, 228 bp, Artificial Sequence
  derived and/or modified sequence
atggagcggagctttgtgtggctttcctgtctcgattcagattcatgtaatctgacgttcagactgggcgaagtagagagtcatgcttgttccccaagtttactgtggaatctccttacacaatatctacctccaggcgcgggtcacattctccgcacatacaatttccccgttctgagctgcgtttcttcttgccacctcatcggaggcaagatgcctgagaattag

SEQ ID NO: 106405 - DNA, 228 bp, Artificial Sequence
  derived and/or modified sequence
atggagcggagcttcgtctggttgtcctgccttgatagtgatagttgtaacctcacttttcgactgggggaggttgaatcacacgcctgcagccctagtctgttatggaacttgttaactcagtacctgcctcccggcgcaggccacatcctgagaacctacaatttcccagttctgtcctgcgtgagcagctgtcatttaataggcggtaagatgccagaaaattag

SEQ ID NO: 106406 - DNA, 228 bp, Artificial Sequence
  derived and/or modified sequence
atggagcgatcattcgtgtggctgtcctgcctggactcagattcatgtaacttgacatttaggctgggggaagttgagtcacatgcctgttcgccttcactcctctggaacctactcacacagtacctcccgcctggggccgggcacatactgcgcacttacaattttccggtgctatcctgcgtctcttcctgccacttgataggcggtaaaatgcctgagaactag

SEQ ID NO: 106407 - DNA, 228 bp, Artificial Sequence
  derived and/or modified sequence
atggagcggagctttgtgtggttgtcctgcctcgatagcgattcttgcaatctgacatttagactcggtgaagtggagtcccatgcttgctcaccctcactgctttggaacttgttgacacagtatctcccgccaggcgctggccacatcctgaggacttacaacttccctgttctaagctgcgtgtcaagctgccatctgattggaggaaaaatgccagagaattag

SEQ ID NO: 106408 - DNA, 228 bp, Artificial Sequence
  derived and/or modified sequence
atggaaaggtctttcgtatggttgtcttgcttggacagtgattcttgcaatttgactttccggctaggcgaagtggagtcacacgcttgtagcccctccctgctgtggaacctcctgacccagtacttgcccccgggggccgggcacatactgcgcacatataacttccctgtgctctcctgtgtgtcaagctgccatctcatcggcggaaagatgccagaaaactag

SEQ ID NO: 106409 - DNA, 228 bp, Artificial Sequence
  derived and/or modified sequence
atggaacggagttttgtgtggctgagctgtctggattcagatagctgcaacttaaccttccgcctcggcgaggtggagtcacacgcctgcagcccatctttactgtggaacctgctgacccagtacttacctccaggggccggacatatccttcgaacctacaatttccctgtcctctcatgcgtgagcagctgccacctcatcgggggaaaaatgcccgaaaactag

SEQ ID NO: 106410 - DNA, 228 bp, Artificial Sequence
  derived and/or modified sequence
atggagcggtcttttgtatggctgtcctgcctggattcggattcttgtaacctaacctttagactcggcgaagttgagagccatgcctgttccccctctttgctttggaatctgctgacccagtacttgcctccaggcgccggacatatcctcaggacctacaacttcccagttctctcatgtgtttcttcttgtcatctcattggtggtaaaatgcccgaaaattag

SEQ ID NO: 106411 - DNA, 228 bp, Artificial Sequence
  derived and/or modified sequence
atggaacgcagtttcgtatggctgagctgtttggattccgattcttgcaatctgacctttcggctgggcgaagtggagtcacatgcatgttcccctagtcttttatggaacctgttaacccaatatttgccaccaggtgcgggccacatcctgcggacatacaactttcctgttctgtcctgtgtgtcaagttgccacctaataggcggaaaaatgcccgagaactag

SEQ ID NO: 106412 - DNA, 228 bp, Artificial Sequence
  derived and/or modified sequence
atggagaggtcatttgtttggctgtcctgcctcgatagtgactcatgtaacttaacattccggctgggagaagttgagtctcatgcctgctcaccttctctcctgtggaatctcctgacgcaatacttgcccccaggtgccgggcatatcctccggacctataactttccggttttaagctgtgtgagctcttgtcatttgatcggaggcaagatgcccgaaaactag

SEQ ID NO: 106413 - DNA, 228 bp, Artificial Sequence
  derived and/or modified sequence
atggaacgcagcttcgtatggttaagctgtctggattccgacagctgcaacctcacctttcgcttgggggaggtggagtcacatgcatgcagcccatctctcctgtggaatctgttgacccagtaccttcctcctggagcggggcacatcctcaggacctacaactttcctgtgttatcatgcgtctcctcatgccacttgattggagggaagatgccagagaactag

SEQ ID NO: 106414 - DNA, 228 bp, Artificial Sequence
  derived and/or modified sequence
atggagaggagcttcgtttggctgtcctgcttggactccgatagttgtaatcttacattccgcctgggggaggttgagtcacacgcctgtagtcctagcctcctgtggaatctgctgactcagtatctgccacctggcgcaggccacatcctgaggacatacaactttcccgttctgagctgcgtttcttcctgccatctcattgggggaaagatgcccgagaattag

SEQ ID NO: 106415 - DNA, 228 bp, Artificial Sequence
  derived and/or modified sequence
atggagcgctctttcgtctggctgtcatgcctcgactctgattcttgtaacctgacctttcgcttaggcgaggttgaatctcatgcgtgttctccaagcctgttatggaacctccttacccagtacctcccgccaggagccgggcatatcctccgtacctacaatttcccagtgctctcttgcgtgtcgtcttgtcacttgattggaggtaagatgcccgaaaactag

SEQ ID NO: 106416 - DNA, 228 bp, Artificial Sequence
  derived and/or modified sequence
atggagagaagtttcgtctggctctcttgcttggattcagacagctgcaatctcacctttagactaggcgaggttgaaagccacgcctgttctccctccctgctctggaatctactaacccagtatctgccaccgggagccggacacattttgcggacctataattttcccgtactctcgtgcgtatctagttgtcacctcatcgggggcaagatgccagagaattag

SEQ ID NO: 106417 - DNA, 228 bp, Artificial Sequence
  derived and/or modified sequence
atggagagatcctttgtatggctatcttgcctcgactctgacagctgtaatttaaccttcaggctaggtgaggtggaatcacacgcctgcagtccaagcctgctatggaacttgctgactcagtacctgcctcccggagccgggcacatcttacgaacatacaattttcccgtgttgtcctgtgtgagcagctgtcatttgatcggtggcaaaatgcctgagaactag

SEQ ID NO: 106418 - DNA, 228 bp, Artificial Sequence
  derived and/or modified sequence
atggagcgctcttttgtgtggttatcatgcttggactctgacagctgtaacctgacttttagattgggcgaggtagagtcccatgcgtgttctccttctctgctttggaacttacttacgcaatacttgcccccgggcgccgggcacatcttgcggacgtacaactttcctgtcctaagctgtgtctcttcatgccaccttattggtgggaagatgcccgagaactag

SEQ ID NO: 106419 - DNA, 228 bp, Artificial Sequence
  derived and/or modified sequence
atggagcgttcttttgtgtggctgtcgtgtctagactccgacagctgtaacctcacttttagacttggagaagtcgagagccacgcttgttctcccagcttgctatggaatctgttaactcaatacttacccccaggagcggggcacatcctgaggacctacaattttcctgtcctaagctgcgtgtcaagttgtcacctcataggcgggaaaatgcctgaaaactag

SEQ ID NO: 106420 - DNA, 228 bp, Artificial Sequence
  derived and/or modified sequence
atggagcgcagctttgtttggctcagttgtctagactcagactcctgtaatctgacttttcggttgggcgaggtcgagagtcatgcatgtagtccgtccctgttgtggaacctcctgactcaatacctaccgcccggagccgggcatatactgagaacatacaacttccccgtgttgtcctgcgtgtcctcatgccacctcattggtggaaagatgcccgagaattag

SEQ ID NO: 106421 - DNA, 228 bp, Artificial Sequence
  derived and/or modified sequence
atggagcgcagctttgtttggttgtcatgtttggattctgactcttgcaacttaactttcaggcttggagaagtcgagtctcacgcttgctcgcctagtctattgtggaatctgttgacacaatacctcccacctggggcgggacatatcctcagaacatataattttcccgtgctgagctgcgtctcctcttgtcacctgatcgggggcaagatgcctgaaaactag

SEQ ID NO: 106422 - DNA, 228 bp, Artificial Sequence
  derived and/or modified sequence
atggagcgttcgttcgtgtggttatcatgccttgactctgattcctgcaacttgacgttccggctcggagaggtggaatcccacgcctgctctccaagcctgctgtggaacttactcacacaataccttcccccaggcgccgggcacatcctcaggacctataacttccccgttttatcctgtgtcagtagctgccacctcattgggggcaagatgcctgagaattag

SEQ ID NO: 106423 - DNA, 228 bp, Artificial Sequence
  derived and/or modified sequence
atggagcgctcattcgtgtggctgagctgcctggactcagattcctgtaacctgacctttaggttgggtgaggtcgaaagtcatgcatgcagcccctcactgctgtggaatctcctgactcaatacttaccccccggtgctggccacattctgagaacttataattttcccgtgctgtcctgcgttagctcttgtcatctgattggaggaaagatgccggaaaattag

SEQ ID NO: 106424 - DNA, 228 bp, Artificial Sequence
  derived and/or modified sequence
atggaaaggtctttcgtgtggttgtcctgcctcgactcagacagctgtaatctcacgttccggcttggcgaggtcgaatcccacgcatgcagcccctcccttttgtggaatctcttaactcagtatctcccaccgggcgctggccatattctgagaacatataacttccctgttctgtcttgcgtttcatcatgtcatctgattgggggcaagatgcccgagaattag

SEQ ID NO: 106425 - DNA, 228 bp, Artificial Sequence
  derived and/or modified sequence
atggagcggtctttcgtttggctgagctgtctagatagcgatagctgtaatctgacgttccgtctgggtgaagtggagtcccacgcgtgtagcccaagtttattgtggaatttacttacacagtacctgcccccaggtgcaggccatatattgagaacttacaattttcctgtactgagttgtgtgtcaagctgccacctgataggcggcaagatgcccgagaactag

SEQ ID NO: 106426 - DNA, 228 bp, Artificial Sequence
  derived and/or modified sequence
atggagagaagtttcgtttggttgagctgtctcgacagcgattcatgcaatctgacttttcgtcttggagaggtcgaatcacatgcgtgctccccgtcattgttgtggaacctgctgacacaatatcttcccccaggagcaggtcatatcctgagaacttacaacttccccgtgctctcctgtgtcagtagctgccacctaatcggaggtaagatgcccgagaactag

SEQ ID NO: 106427 - DNA, 228 bp, Artificial Sequence
  derived and/or modified sequence
atggaacggtccttcgtgtggctgtcctgtctggacagtgatagctgcaacttgaccttcagactgggagaggtggaatctcatgcatgtagcccttctttgttgtggaacctcttgactcagtacctgcctcccggtgcgggacacatcctcaggacatataattttcccgttctgtcatgtgtttcttcctgccatctaattggcgggaaaatgccagagaactag

SEQ ID NO: 106428 - DNA, 228 bp, Artificial Sequence
  derived and/or modified sequence
atggaaaggagcttcgtttggctatcttgcctcgattctgattcctgtaatttaacgttccgcctgggcgaggttgagtctcacgcatgcagtccatcactgctgtggaatcttctgacccagtatcttccaccaggtgccggacatattctgcgaacttacaatttccccgtgctgagctgtgtttcgagctgtcaccttattggtggtaagatgccagagaactag

SEQ ID NO: 106429 - DNA, 228 bp, Artificial Sequence
  derived and/or modified sequence
atggagcgaagctttgtgtggctcagctgcctcgatagcgactcatgcaatctgacgtttaggctgggagaggttgagtcacacgcatgcagtccttccctcctgtggaaccttttgacacagtacttaccacccggggccggacacatcctgaggacctataacttcccggttctctcatgcgtgtcatcgtgccacctgatcggcggcaaaatgcccgaaaattag

SEQ ID NO: 106430 - DNA, 228 bp, Artificial Sequence
  derived and/or modified sequence
atggaacgatccttcgtgtggctctcgtgcttggatagtgatagctgtaaccttacattccgactgggcgaggtggaaagtcacgcgtgcagccccagtctactttggaacttactgacccagtacctgcccccgggggctggccacatactgcggacctacaatttccctgtcctgagctgtgtttcttcctgccacttaattgggggaaagatgcccgaaaactag

SEQ ID NO: 106431 - DNA, 228 bp, Artificial Sequence
  derived and/or modified sequence
atggaacgttcatttgtgtggctgagctgccttgactccgatagttgcaacctgacttttaggctgggggaggtggagtcacacgcttgttccccctccctgctgtggaacctgttgacgcaatacctcccaccgggtgctggacacattctcagaacttataattttccagttctgagttgtgtgtcctcatgtcatctaattggcggaaaaatgcccgagaattag

SEQ ID NO: 106432 - DNA, 228 bp, Artificial Sequence
  derived and/or modified sequence
atggaacggtccttcgtctggctcagctgtcttgactctgattcctgtaacctgacgtttagattgggggaagtggagagtcacgcctgttcaccatccctcctatggaacctactcacccagtatctgccaccaggggccggtcatatcctgcgaacatacaattttccagttttatcatgtgtgagcagctgccatctgattgggggaaagatgccagaaaactag

SEQ ID NO: 106433 - DNA, 228 bp, Artificial Sequence
  derived and/or modified sequence
atggagcggagctttgtctggctctcatgcctagacagtgactcctgtaacctgacgttccgattgggcgaggttgagtcccacgcttgtagccccagtctgctctggaacctcttgacccaatatctcccacccggcgctggtcacattctcaggacctataatttccccgtgctctcttgcgtaagtagctgccacctaatcgggggaaagatgcccgagaattag

SEQ ID NO: 106434 - DNA, 228 bp, Artificial Sequence
  derived and/or modified sequence
atggaaagatccttcgtatggctgtcctgccttgattccgattcctgcaatctgaccttccgccttggcgaagtggagtcacacgcgtgctctccaagtttgctgtggaaccttcttactcagtacttgccccctggcgcgggtcacatcttgcgcacatataactttcccgtgctgagctgtgtttcatcttgccacctgatcggagggaaaatgcccgagaattag

SEQ ID NO: 106435 - DNA, 228 bp, Artificial Sequence
  derived and/or modified sequence
atggaaaggagcttcgtttggttatcctgcctcgactctgactcatgtaatttgacctttaggctaggagaagtcgaaagtcacgcttgcagcccatctcttctgtggaatctattgacccagtaccttcctcctggggcaggccatatcctgagaacatataactttcctgtgctgtcatgtgtctcgtcatgtcacctgatcggcggaaagatgcctgagaactag

SEQ ID NO: 106436 - DNA, 228 bp, Artificial Sequence
  derived and/or modified sequence
atggagcgaagctttgtgtggctgagctgcctcgattctgatagctgcaatcttacattcaggctgggagaagtagagtctcacgcatgttcaccatctctgctgtggaatctgctaacccagtatttgccaccaggcgccggccatatcttgcggacttacaactttcccgtcctgagttgcgtttcaagctgccatctcatagggggtaagatgcccgaaaattag

SEQ ID NO: 106437 - DNA, 228 bp, Artificial Sequence
  derived and/or modified sequence
atggagcggagcttcgtttggctaagctgtttggatagcgatagctgtaacctcaccttcagacttggtgaggtcgagagtcatgcatgctcaccctctttactgtggaaccttcttacacaatacctccctcccggggcgggccacatcctaagaacatacaatttcccagtcctctcctgtgtgtcatcctgccacctaattgggggaaaaatgcctgaaaactag

SEQ ID NO: 106438 - DNA, 228 bp, Artificial Sequence
  derived and/or modified sequence
atggaaagaagtttcgtatggcttagctgcctcgatagcgactcttgcaatctcacttttcgactgggtgaggtggagtcacatgcctgctcaccgagtttgctgtggaacttgcttacacagtacctgcctcctggcgcagggcacattttgaggacatataattttcctgtcctaagctgcgtctctagttgtcacctgattggcggaaagatgcccgagaactag

SEQ ID NO: 106439 - DNA, 228 bp, Artificial Sequence
  derived and/or modified sequence
atggagaggtccttcgtgtggctctcctgcctggacagtgactcctgcaatctgactttccgcctgggcgaagttgaaagccacgcctgcagcccctcgctcctgtggaacctgcttactcagtacttgccccctggggcagggcatatcctgcggacttataatttccctgtgctctcctgcgtcagttcatgtcatctaatcggaggcaaaatgcctgagaattag

SEQ ID NO: 106440 - DNA, 228 bp, Artificial Sequence
  derived and/or modified sequence
atggagcggagttttgtgtggctctcctgcctcgacagtgacagttgtaatcttacatttaggttgggggaagtcgagagccacgcctgcagcccatccctgctctggaatctcctcacacagtacctccccccgggcgcggggcatattctccgaacatacaattttcctgtcctatcatgcgtttcgtcctgtcacctaattgggggtaagatgccagagaactag

SEQ ID NO: 106441 - DNA, 228 bp, Artificial Sequence
  derived and/or modified sequence
atggagagatcgtttgtgtggctgtcgtgtctagacagcgacagttgtaacttgacgttcagactgggtgaggtcgaatcccatgcctgctccccatcactcctttggaacctccttacccagtacttgcctccaggcgctgggcacatcctgaggacttataatttcccagttttgtcctgcgtgtccagctgccacctgatcggcggcaagatgccggaaaactag

SEQ ID NO: 106442 - DNA, 228 bp, Artificial Sequence
  derived and/or modified sequence
atggagaggagctttgtgtggctgagctgccttgactctgattcgtgcaatcttaccttcaggctgggtgaggtcgagtcacatgcttgttcccccagcttgctttggaatctcctgacgcagtacctgccccctggggcaggacatatcctgcggacctataactttccagtgctcagctgtgtcagtagctgccatctcattgggggtaagatgccggaaaattag

SEQ ID NO: 106443 - DNA, 228 bp, Artificial Sequence
  derived and/or modified sequence
atggagaggagctttgtgtggctgagctgcctggacagcgacagctgcaacctgaccttccggctgggggaggtggagagccacgcctgcagccccagcctgctgtggaacctgctgacccagtacctgcccccaggagctggccacatcctgcggacctacaacttccctgtgctgagctgtgtgagcagctgccacctgattggaggcaagatgcctgagaactag

SEQ ID NO: 106444 - DNA, 228 bp, Artificial Sequence
  derived and/or modified sequence
atggagcggagcttcgtgtggctgagctgcctggacagcgacagctgtaatctgaccttcaggttgggcgaggttgagtctcacgcctgcagtccatctctcctctggaacctcttgacccaatacctacctcctggcgctgggcacattctgaggacctataacttcccagtactaagttgcgtgtccagctgccacctgatcgggggcaagatgccagaaaactag

SEQ ID NO: 106445 - DNA, 228 bp, Artificial Sequence
  derived and/or modified sequence
atggagcggagcttcgtgtggctgagctgcctggacagcgacagctgcaatttgacattcagattaggggaggtcgagagccacgcatgcagcccctccttgttgtggaatctgcttacccagtatctgcccccaggtgctggccacatcctccgcacatacaatttcccggttctgtcctgcgtgtcaagctgtcacttgatcggtggcaagatgcccgaaaactag

SEQ ID NO: 106446 - DNA, 228 bp, Artificial Sequence
  derived and/or modified sequence
atggagcggagcttcgtgtggctgagctgcctggacagcgacagctgcaatttgactttccgcttgggagaggtcgagtcccacgcctgttcaccgagtctgctttggaatcttctgactcaatatttacctccaggtgccggccatattcttcggacgtataatttccccgtgctctcgtgcgtgtctagttgccatctgatcgggggcaagatgcccgagaattag

SEQ ID NO: 106447 - DNA, 228 bp, Artificial Sequence
  derived and/or modified sequence
atggagcggagcttcgtgtggctgagctgcctggacagcgacagctgtaatctgacctttcggttaggcgaagtggagtcgcacgcatgcagccccagcttgttgtggaacctgctgacgcagtatctcccaccgggcgctggtcacattttgagaacttataacttcccagtactcagttgtgtatccagctgccatctaatcggcggaaaaatgccagaaaactag

SEQ ID NO: 106448 - DNA, 228 bp, Artificial Sequence
  derived and/or modified sequence
atggagcggagcttcgtgtggctgagctgcctggacagcgacagctgtaacctaaccttccgactaggggaagtggagagtcatgcttgcagccccagtctcctgtggaatctcttgacccagtatctaccaccgggcgcaggtcacatacttagaacatacaactttcccgttctgagctgcgtgagttcttgccatctgattggaggtaagatgcccgaaaattag

SEQ ID NO: 106449 - DNA, 228 bp, Artificial Sequence
  derived and/or modified sequence
atggagcggagcttcgtgtggctgagctgcctggacagcgacagctgcaacctaactttcagattgggcgaggtcgagagtcacgcctgtagtccgtcattgctctggaatctgcttacccagtacctcccaccaggcgcaggacatattctgcggacctacaactttcctgtgctctcatgcgtaagcagttgccatttgattgggggaaaaatgcccgagaactag

SEQ ID NO: 106450 - DNA, 228 bp, Artificial Sequence
  derived and/or modified sequence
atggagcggagcttcgtgtggctgagctgcctggacagcgacagctgcaacctgacttttcggctgggagaggtcgaaagtcacgcctgctccccctctctgctgtggaatctgttaacccagtacctccctcccggggcaggtcacattcttaggacttataacttcccggtgcttagttgcgtcagttcttgtcaccttatcggcgggaagatgccagagaattag

SEQ ID NO: 106451 - DNA, 228 bp, Artificial Sequence
  derived and/or modified sequence
atggagcggagcttcgtgtggctgagctgcctggacagcgacagctgcaatcttacgttccgtttgggggaggtggaatcccatgcttgctccccgtctctgctctggaatctgctaacgcaatacctcccccccggggccggccatatattaagaacttataatttccccgtgcttagttgtgtttcttcttgtcacctgattggaggaaagatgcccgagaattag

SEQ ID NO: 106452 - DNA, 228 bp, Artificial Sequence
  derived and/or modified sequence
atggagcggagcttcgtgtggctgagctgcctggacagcgacagctgcaatcttacattccggttgggcgaagtggagtctcacgcttgctcacctagtttgctgtggaacctgctgacacagtacttacctccgggagccggccatatcctgcggacctacaattttcccgtcttgtcatgcgtttcctcatgccacttgattggtgggaagatgccagaaaactag

SEQ ID NO: 106453 - DNA, 228 bp, Artificial Sequence
  derived and/or modified sequence
atggagcggagcttcgtgtggctgagctgcctggacagcgacagctgcaacctaacctttaggcttggagaggtggaaagccatgcttgttctccatcccttctctggaacttacttacgcagtatctcccacccggggctgggcacatcctgcggacgtacaatttccccgtgctttcctgcgtgtcttcgtgtcacctcattggggggaagatgcccgagaattag

SEQ ID NO: 106454 - DNA, 228 bp, Artificial Sequence
  derived and/or modified sequence
atggagcggagcttcgtgtggctgagctgcctggacagcgacagctgtaacctgacctttcggctcggtgaagtcgagagtcatgcttgttctccgtcgctgctgtggaacctgctcactcaataccttccgcccggggcagggcatattttacgtacttacaatttccccgttctaagttgcgtgtcttcgtgccacctcattgggggcaaaatgcccgaaaactag

SEQ ID NO: 106455 - DNA, 228 bp, Artificial Sequence
  derived and/or modified sequence
atggagcggagcttcgtgtggctgagctgcctggacagcgacagctgtaacctcactttcagattaggggaggtcgagagccacgcgtgcagccccagtctgctctggaacctgctcacacagtacctgcctccgggagctggccatattctacggacttataattttccagttctctcttgcgtttcttcctgccatctgattggcggaaagatgcctgagaactag

SEQ ID NO: 106456 - DNA, 228 bp, Artificial Sequence
  derived and/or modified sequence
atggagcggagcttcgtgtggctgagctgcctggacagcgacagctgtaacctgacatttcggttgggggaagtagaatcccacgcatgttctcctagtctgttgtggaacttgcttacccagtatctgcctcccggtgcagggcatatcttgcgaacttataactttcccgttttgagttgcgtgtcctcttgccatcttattggcgggaagatgccagaaaactag

SEQ ID NO: 106457 - DNA, 228 bp, Artificial Sequence
  derived and/or modified sequence
atggagcggagcttcgtgtggctgagctgcctggacagcgacagctgcaatcttacatttcggctgggcgaagtggagtcccatgcctgtagcccgtccctattgtggaacttgctgacacagtaccttcctcccggcgcgggacacatcttaaggacttataatttcccagtgctgtcttgtgtgtcatcttgtcatttgatcgggggaaagatgcccgaaaactag

SEQ ID NO: 106458 - DNA, 228 bp, Artificial Sequence
  derived and/or modified sequence
atggagcggagcttcgtgtggctgagctgcctggacagcgacagctgcaatctgacatttcgactgggagaggtggaatcacacgcttgcagtcccagtttactgtggaacctgctcacacaatacctaccccctggggccggccacatccttcgcacatacaacttccccgttctctcatgtgtgagctcttgccatctgatagggggtaaaatgcctgaaaactag

SEQ ID NO: 106459 - DNA, 228 bp, Artificial Sequence
  derived and/or modified sequence
atggagcggagcttcgtgtggctgagctgcctggacagcgacagctgcaacctgactttccgactcggcgaggttgagtctcatgcatgctccccttcactgctctggaatctgctcacccagtatctgcctccaggggccggtcatatcctgcgtacatacaacttccctgtgttgagttgcgtttcatcctgccacctgataggagggaaaatgcccgaaaactag

SEQ ID NO: 106460 - DNA, 228 bp, Artificial Sequence
  derived and/or modified sequence
atggagcggagcttcgtgtggctgagctgcctggacagcgacagctgcaatctgaccttcaggttgggagaggtagagagtcacgcctgtagccctagtctcctttggaacctgctgactcaatatctgcctcctggcgctggacatatacttaggacctacaattttcctgtgctatcttgtgtgtcatcctgccacctgattggggggaaaatgcctgagaactag

SEQ ID NO: 106461 - DNA, 228 bp, Artificial Sequence
  derived and/or modified sequence
atggagcggagcttcgtgtggctgagctgcctggacagcgacagctgtaatctcactttccggctcggcgaggtcgagtctcacgcttgctcgccatcactgctgtggaatttgctgacccagtatctgccccctggtgccggccacatacttcgaacatataatttcccagttttgtcctgcgtgagttcgtgccacctgatcggcgggaagatgcccgaaaattag

SEQ ID NO: 106462 - DNA, 228 bp, Artificial Sequence
  derived and/or modified sequence
atggagcggagcttcgtgtggctgagctgcctggacagcgacagctgcaaccttactttcagactcggagaggtggagagccacgcatgttccccgtctctcctgtggaatttactgacccaatatcttcctcccggcgccgggcatattttacgcacatataacttccctgtcctgagttgcgtctcatcttgccacctcataggtggcaaaatgccagaaaactag

SEQ ID NO: 106463 - DNA, 228 bp, Artificial Sequence
  derived and/or modified sequence
atggagcggagcttcgtgtggctgagctgcctggacagcgacagctgcaacctcacgttcagattaggcgaagtcgaatctcacgcgtgcagccccagcttactgtggaacttgctgacccagtacctcccgcccggcgccggacatatcctccggacttataactttcccgtgctttcttgtgtgagttcctgccatctgattggcgggaagatgcctgagaattag

SEQ ID NO: 106464 - DNA, 228 bp, Artificial Sequence
  derived and/or modified sequence
atggagcggagcttcgtgtggctgagctgcctggacagcgacagctgcaatctcacatttcgccttggcgaggttgagagtcatgcctgttccccctctctgctgtggaatctgcttacccagtatctccctcccggcgccgggcacattttgagaacctacaactttccagtgctcagttgcgttagctcctgtcacctgataggtggcaagatgccagagaactag

SEQ ID NO: 106465 - DNA, 228 bp, Artificial Sequence
  derived and/or modified sequence
atggagcggagcttcgtgtggctgagctgcctggacagcgacagctgcaacctgacattcaggttaggtgaggtagaaagtcatgcttgttcgccatcccttttatggaacctgctgactcagtacctccctcctggagccggacatattctcagaacgtataattttcccgtgctcagttgcgtgagttcatgtcaccttatcggtggtaagatgcccgaaaactag

SEQ ID NO: 106466 - DNA, 228 bp, Artificial Sequence
  derived and/or modified sequence
atggagcggagcttcgtgtggctgagctgcctggacagcgacagctgcaacttgacattccggttgggcgaggtcgagagccacgcctgtagcccaagcctgctgtggaatctgctcacccagtatctcccaccaggagccggtcatatactgaggacctacaatttcccagtgctctcttgtgtgagctcatgtcatcttatcggtggaaagatgcctgagaattag

SEQ ID NO: 106467 - DNA, 228 bp, Artificial Sequence
  derived and/or modified sequence
atggagcggagcttcgtgtggctgagctgcctggacagcgacagctgtaacctgacatttcggttgggtgaagtcgagagtcacgcttgcagtccatcgctgctatggaacctcttgacccaatacctgcctccaggcgcggggcacatacttcgaacatataacttccccgtgctgagctgcgtgtcctcttgtcacctgattggaggtaaaatgcctgagaattag

SEQ ID NO: 106468 - DNA, 228 bp, Artificial Sequence
  derived and/or modified sequence
atggagcggagcttcgtgtggctgagctgcctggacagcgacagctgtaacctgacttttaggctgggtgaggtggagtcacatgcttgttcaccatccctgttatggaacctcttgacccagtatctgccaccaggcgctggacatatacttcgcacctataacttcccggtgctgtcttgcgtatcgtcttgccatttaataggaggaaagatgcccgagaattag

SEQ ID NO: 106469 - DNA, 228 bp, Artificial Sequence
  derived and/or modified sequence
atggagcggagcttcgtgtggctgagctgcctggacagcgacagctgtaacctgacattccgattgggcgaagtggagagtcacgcctgtagcccatctctcttatggaatctcctgacacagtatctcccacctggggccggccatatcctgaggacatataactttcctgttctcagttgtgtaagcagctgccacctgattggaggtaagatgccagagaactag

SEQ ID NO: 106470 - DNA, 228 bp, Artificial Sequence
  derived and/or modified sequence
atggagcggagcttcgtgtggctgagctgcctggacagcgacagctgcaatctgacattcagactcggagaagttgaatctcatgcatgttcgccatctctcctctggaatttgctcactcagtacctgcctcccggagcaggccacattttacggacttataactttcctgtcctctcttgcgtatcatcttgccacttaatcggggggaagatgcccgagaactag

SEQ ID NO: 106471 - DNA, 228 bp, Artificial Sequence
  derived and/or modified sequence
atggagcggagcttcgtgtggctgagctgcctggacagcgacagctgtaatctcaccttcagactgggagaagtcgagagccacgcttgtagcccgagcttactctggaacttactgacccagtacctgccaccgggcgcgggccatattctgcggacctacaatttccccgtcctaagttgtgtatccagctgtcatctcattggaggaaagatgccagaaaattag

SEQ ID NO: 106472 - DNA, 228 bp, Artificial Sequence
  derived and/or modified sequence
atggagcggagcttcgtgtggctgagctgcctggacagcgacagctgtaatttgacatttcggctcggggaggttgaatctcacgcctgctctccaagtctcctgtggaacctgttgacacagtacctcccacccggcgctgggcacatcttacggacatacaatttcccagttctgtcatgcgttagttcttgccacctaattggaggaaaaatgcccgaaaactag

SEQ ID NO: 106473 - DNA, 228 bp, Artificial Sequence
  derived and/or modified sequence
atggagcggagcttcgtgtggctgagctgcctggacagcgacagctgcaacctgacattcagattgggcgaagtcgagtcccacgcttgcagtccatccctgctgtggaacttgctcactcagtatttgccccccggcgcaggccacatccttagaacctacaattttcctgttctcagctgcgtgtcatcatgtcacctgataggtggaaaaatgcctgaaaattag

SEQ ID NO: 106474 - DNA, 228 bp, Artificial Sequence
  derived and/or modified sequence
atggagcggagcttcgtgtggctgagctgcctggacagcgacagctgcaacctgactttccggctcggcgaagtcgaatcacacgcatgctcccctagcctcctatggaacctgctcacccagtaccttccccccggcgcgggacatattttacgaacttacaattttcctgtgttgtcgtgtgtatcctcatgccatctcatcggagggaaaatgcctgaaaactag

SEQ ID NO: 106475 - DNA, 228 bp, Artificial Sequence
  derived and/or modified sequence
atggagcggagcttcgtgtggctgagctgcctggacagcgacagctgtaatctgacatttcgcttgggagaggtggaaagtcacgcctgctctcccagtctgctctggaatttgctgacacaatatctcccaccaggagccgggcatatattaagaacctataacttcccggtgcttagctgtgtgtcttcgtgccacttgataggtggcaagatgccagagaattag

SEQ ID NO: 106476 - DNA, 228 bp, Artificial Sequence
  derived and/or modified sequence
atggagcggagcttcgtgtggctgagctgcctggacagcgacagctgcaatttaaccttccgcctcggagaagttgaatcgcatgcttgctcccctagcctgttatggaatctcctgactcagtacctgcctcctggggccggccacatcttacggacgtacaattttccagtcctgagttgcgtgtcttcttgccacctgattggcggtaagatgccagaaaattag

SEQ ID NO: 106477 - DNA, 228 bp, Artificial Sequence
  derived and/or modified sequence
atggagcggagcttcgtgtggctgagctgcctggacagcgacagctgcaatctaaccttcagacttggagaagtcgagtcacatgcttgctctccatcactgctgtggaatttacttacgcaatacctccctcctggtgcaggacacattctgaggacatacaacttcccggtcctgtcatgcgtctcaagctgtcacttgatcggaggcaaaatgccagaaaattag

SEQ ID NO: 106478 - DNA, 228 bp, Artificial Sequence
  derived and/or modified sequence
atggagcggagcttcgtgtggctgagctgcctggacagcgacagctgcaacctgacattccggctgggcgaggttgagtcacacgcttgtagtccatctcttttgtggaatctacttacgcagtatctgccaccaggtgcgggccatattctgaggacgtataatttccctgtgctgagctgtgtgtcaagctgccacttaattggtgggaagatgcctgagaattag

SEQ ID NO: 106479 - DNA, 228 bp, Artificial Sequence
  derived and/or modified sequence
atggagcggagcttcgtgtggctgagctgcctggacagcgacagctgcaatctcacatttcggctcggagaggtggagtctcatgcctgctctccctcacttctttggaatcttctgactcagtacctgcctccaggagccggacatatcctacggacttacaattttcccgtactttcctgtgtgagttcatgtcacttgatcgggggaaagatgcctgagaactag

SEQ ID NO: 106480 - DNA, 228 bp, Artificial Sequence
  derived and/or modified sequence
atggagcggagcttcgtgtggctgagctgcctggacagcgacagctgcaatctcaccttcagactgggagaagtcgaatctcatgcctgcagccctagtctgttatggaatctgctgacccagtaccttccacccggtgccggccacattctgagaacctacaattttccggtgctttcatgcgttagcagttgtcacctgataggaggtaaaatgcccgagaactag

SEQ ID NO: 106481 - DNA, 228 bp, Artificial Sequence
  derived and/or modified sequence
atggagcggagcttcgtgtggctgagctgcctggacagcgacagctgcaatctgacattcaggctcggcgaggtggaatcccacgcgtgcagtccttccttgctatggaacttgctcactcagtatctgccacccggagcagggcatattttgcggacatataactttcccgtcctcagctgcgtcagctcgtgccacctgatcggcggaaagatgcccgaaaactag

SEQ ID NO: 106482 - DNA, 228 bp, Artificial Sequence
  derived and/or modified sequence
atggagcggagcttcgtgtggctgagctgcctggacagcgacagctgtaatcttactttccggcttggagaagtggagtctcacgcctgctctcctagcttgctgtggaatctgctcacgcaatatctgccaccaggcgccggacatatattgcggacctacaatttcccagtcctgagttgcgtgtcttcttgccacctgattggtggcaaaatgccagaaaactag

SEQ ID NO: 106483 - DNA, 228 bp, Artificial Sequence
  derived and/or modified sequence
atggagcggagcttcgtgtggctgagctgcctggacagcgacagctgtaatctgacattccgcttaggagaggtggagtcccacgcctgtagtccctctctgctgtggaaccttctcactcagtatctgcctccgggagccggccacatcctgagaacttataattttccagttttatcttgcgttagcagctgccacctaattgggggtaagatgcccgagaactag

SEQ ID NO: 106484 - DNA, 228 bp, Artificial Sequence
  derived and/or modified sequence
atggagcggagcttcgtgtggctgagctgcctggacagcgacagctgtaacctgacatttagattgggggaggtcgaatcacatgcatgttccccctcattgctttggaacctcctgacgcagtacctgcctcccggcgccggtcacatcctgagaacatacaacttccctgtgttaagctgtgtaagctcttgtcatttgatcggaggtaaaatgcctgagaattag

SEQ ID NO: 106485 - DNA, 228 bp, Artificial Sequence
  derived and/or modified sequence
atggagcggagcttcgtgtggctgagctgcctggacagcgacagctgtaatctgacctttagactaggagaagtagagtctcacgcttgttctccctccttgttgtggaaccttcttacccagtatctacccccaggcgctgggcatattcttcggacttacaattttccggttctgtcttgtgtgagttcatgtcacctgatcggcggtaaaatgccagaaaactag

SEQ ID NO: 106486 - DNA, 228 bp, Artificial Sequence
  derived and/or modified sequence
atggagcggagcttcgtgtggctgagctgcctggacagcgacagctgcaatctaacctttaggctgggagaggtcgaaagccacgcctgttctccctcactgttgtggaatctgctcacccaatacttgcctcccggagcaggacatatcctgcgcacatataacttcccggtactgagctgcgtgtcttcctgccaccttatcggaggaaaaatgccagagaactag

SEQ ID NO: 106487 - DNA, 228 bp, Artificial Sequence
  derived and/or modified sequence
atggagcggagcttcgtgtggctgagctgcctggacagcgacagctgcaatctgacctttcgcctgggcgaggtcgagtcacacgcttgctccccctccctcctgtggaacctgttgacgcagtacctccctcctggcgccggccacatactgaggacttacaatttcccagtgctgagttgtgtgagttcatgccatctgattgggggaaaaatgcccgaaaactag

SEQ ID NO: 106488 - DNA, 228 bp, Artificial Sequence
  derived and/or modified sequence
atggagcggagcttcgtgtggctgagctgcctggacagcgacagctgcaatctgaccttcaggctaggagaggtcgagtctcacgcttgctcaccttccctgctttggaacctcctgactcagtatttaccccccggagcggggcatattctacgcacctacaacttccctgtgttaagttgtgtctccagctgtcacctgattggcggaaaaatgcccgaaaactag

SEQ ID NO: 106489 - DNA, 228 bp, Artificial Sequence
  derived and/or modified sequence
atggagaggtcattcgtttggctgagttgtcttgactccgatagttgtaatttgacatttcggttgggggaagtcgagagccacgcttgctccccatctctgctgtggaacctgttgactcagtatctccccccaggtgcgggacacattctgcgtacctataatttcccggtgttaagctgcgtgtcttcctgccatttgatcgggggaaagatgccagaaaattag

SEQ ID NO: 106490 - DNA, 228 bp, Artificial Sequence
  derived and/or modified sequence
atggaacgttcatttgtctggctttcttgcctggattcagattcgtgtaatctgactttccgtctcggagaggttgagtcccacgcgtgcagcccatcactgctgtggaatctgctcactcagtatttgccacctggtgccggacacatactgcgaacatataattttcccgtcctgtcgtgcgtctcctcttgccatctgatcggaggaaagatgcctgagaactag

SEQ ID NO: 106491 - DNA, 228 bp, Artificial Sequence
  derived and/or modified sequence
atggaacgtagcttcgtgtggctgtcctgtctagacagcgactcgtgcaatcttacatttagactaggcgaagtggagtcacacgcctgcagtccctcactcctctggaacttgttaactcaatatttgcctcccggagctggacacattctgcggacttacaactttcccgtcctatcgtgcgtctcctcgtgccatttgatcgggggtaaaatgccagaaaactag

SEQ ID NO: 106492 - DNA, 228 bp, Artificial Sequence
  derived and/or modified sequence
atggagcggagtttcgtgtggcttagttgccttgacagtgatagctgtaacctcacgtttagactgggggaggtcgagagccacgcctgttcaccttcgctgctgtggaacttgctcactcaataccttccacctggcgctggacacatcttgcgaacatataatttcccagtactctcctgcgtctcttcctgtcacctgatcgggggtaaaatgccagagaactag

SEQ ID NO: 106493 - DNA, 228 bp, Artificial Sequence
  derived and/or modified sequence
atggagagaagtttcgtgtggctgagctgtcttgattcagattcctgcaatttgacttttcggctaggggaggtcgaaagccatgcgtgttccccatctctattgtggaatctgctgacacagtatctgcccccaggcgcaggccacatactccgtacttataattttccggtgctgtcttgtgtgtcctcatgccatctcataggtggaaagatgcccgagaactag

SEQ ID NO: 106494 - DNA, 228 bp, Artificial Sequence
  derived and/or modified sequence
atggagagatcgttcgtgtggctgagctgtctcgactctgactcttgcaacctgacatttcgccttggagaggtggaatcgcatgcttgcagtcctagcctgctttggaatttgctgacccagtacttaccacctggtgcaggtcatatcctccgtacatataacttccctgtcctcagctgcgtatcttcttgtcatttgattggaggcaagatgcccgaaaattag

SEQ ID NO: 106495 - DNA, 228 bp, Artificial Sequence
  derived and/or modified sequence
atggaacgtagcttcgtgtggctgtcctgcctcgattccgattcatgcaacctaacatttaggcttggagaggtggagtctcacgcatgttccccttcattgctgtggaatctccttactcagtatctccctccaggggctgggcatatactgagaacgtataactttcctgtcctgtcgtgtgtgagtagctgccacctgatcggaggcaagatgccagaaaactag

SEQ ID NO: 106496 - DNA, 228 bp, Artificial Sequence
  derived and/or modified sequence
atggaaagatcgtttgtttggctgagttgtttggattccgatagctgcaatctgacattcaggttaggagaagtggaatcccacgcttgctcacctagcttactttggaaccttttgacgcagtatctaccacctggtgcaggccacatcctcaggacctacaactttcctgtcctcagttgtgtcagctcgtgccacctcattggcggtaaaatgcccgagaactag

SEQ ID NO: 106497 - DNA, 228 bp, Artificial Sequence
  derived and/or modified sequence
atggagcgttcattcgtctggctgtcatgtcttgattccgactcatgcaatctgactttccgcttgggagaagtagaaagccacgcctgttccccctcactcctgtggaacctgttgactcaatatctgccaccaggcgctggccatatcttaagaacttacaactttccagtgctgtcatgtgtgtccagctgtcacctgattggcggtaagatgccagagaattag

SEQ ID NO: 106498 - DNA, 228 bp, Artificial Sequence
  derived and/or modified sequence
atggagcgctcctttgtgtggctgtcctgtctggattcagatagctgtaatcttaccttcaggctgggcgaggtggaatctcatgcctgctctccttcccttctatggaaccttctcacacagtacctgcctcccggagccggtcacattcttcgtacctataactttccagtccttagttgtgtgtcatcatgccatctgatcggaggaaagatgccggagaactag

SEQ ID NO: 106499 - DNA, 228 bp, Artificial Sequence
  derived and/or modified sequence
atggaacgtagcttcgtgtggcttagctgtctcgactctgatagctgtaacctcacattccggctcggggaggtggagagtcatgcatgcagcccttcccttctgtggaacctcttaacacagtatcttccacctggcgctggacacattcttcggacttacaactttcctgtattgtcttgtgtgtcctcgtgccatctaataggcggtaagatgccggagaactag

SEQ ID NO: 106500 - DNA, 228 bp, Artificial Sequence
  derived and/or modified sequence
atggagcgctccttcgtgtggctcagttgcctcgacagcgatagctgcaacttgacattccgattgggagaggtggaatcccatgcctgttctccttccctgctctggaatctgctgacccagtacttaccccctggggcaggtcatatcctaaggacttacaatttccccgtgctgagttgcgtatcatcatgccacctcattggtgggaaaatgccagagaattag

SEQ ID NO: 106501 - DNA, 228 bp, Artificial Sequence
  derived and/or modified sequence
atggagaggtcgttcgtgtggctctcatgcctggacagcgatagctgtaatttgacatttcggttgggtgaagtcgagtcccacgcctgtagcccgagcttgctgtggaacctgttaacgcagtacttgcctcccggtgctggccacattctacgaacctacaactttcctgtcttgtcctgcgtgtcatcttgccacttgatcggtgggaagatgcccgagaattag

SEQ ID NO: 106502 - DNA, 228 bp, Artificial Sequence
  derived and/or modified sequence
atggagaggtccttcgtctggctatcttgcctggacagtgattcctgtaacctcacatttagattgggagaggtcgagtctcacgcttgctccccgagtcttctgtggaatctcctcacccaataccttcccccaggagcaggacatattctgcgaacctacaacttcccggtgctgagctgcgtgagctcgtgtcacttgattggtggaaaaatgcctgagaactag

SEQ ID NO: 106503 - DNA, 228 bp, Artificial Sequence
  derived and/or modified sequence
atggagcgtagttttgtatggctgtcttgcctggactctgactcttgcaaccttacctttcgcctgggggaagtggagtcacatgcctgttcccccagcctgctgtggaacctgctaactcagtatttaccacccggagcgggacacattttacgcacttacaatttcccagttctctcatgtgttagttcatgtcacttgatcggcggaaaaatgcccgagaactag

SEQ ID NO: 106504 - DNA, 228 bp, Artificial Sequence
  derived and/or modified sequence
atggagcggagcttcgtatggctaagctgcctggacagcgatagctgcaatctgactttcaggctgggagaagtagaaagtcacgcctgtagcccatccctgttgtggaatctgctcactcagtatctgccacccggagccggacatattctgcgtacctacaactttccagtcctgtcctgtgtttcaagctgccacctgatcggtggcaagatgccagagaactag

SEQ ID NO: 106505 - DNA, 228 bp, Artificial Sequence
  derived and/or modified sequence
atggaacggtcttttgtgtggctgtcctgtctcgacagcgattcgtgcaacctcacgtttcgtttgggagaagtcgaatcccacgcttgcagcccaagtttgctttggaatctgctaacacagtacctgccacctggagcaggccacatcctgagaacttacaacttcccagttttgagctgcgtgtcttcatgtcatctcattgggggaaagatgcccgagaactag

SEQ ID NO: 106506 - DNA, 228 bp, Artificial Sequence
  derived and/or modified sequence
atggaacgcagtttcgtttggctttcatgtctggactccgacagttgtaatctgaccttccgattaggggaggtagagtcccacgcatgcagccccagtctactgtggaacctcctgacgcagtacctccccccaggagctggccacattttgcgtacctataactttcctgttctaagttgtgtctccagttgtcaccttattggcggaaagatgcccgaaaactag

SEQ ID NO: 106507 - DNA, 228 bp, Artificial Sequence
  derived and/or modified sequence
atggaacgcagctttgtgtggctctcttgtttggattccgactcctgcaatctgacattccgcttaggagaggttgagtcgcacgcttgttctcccagcctgttgtggaacctgctgacccagtatctgccacccggagcagggcatattctacgcacgtacaacttcccagtgctgtcttgtgtttcaagttgtcaccttatcgggggaaagatgccggaaaactag

SEQ ID NO: 106508 - DNA, 228 bp, Artificial Sequence
  derived and/or modified sequence
atggaaagatcttttgtgtggctatcgtgcctggatagcgactcatgcaatctgacattccgactgggagaagtggagtctcatgcctgctctccttcgctcctctggaacttgcttacccagtatttacccccaggcgcaggacacattctcaggacctataatttcccagtgctgagctgtgtttctagttgccatctgatcggcggaaaaatgccggagaactag

SEQ ID NO: 106509 - DNA, 228 bp, Artificial Sequence
  derived and/or modified sequence
atggagcgctccttcgtgtggctctcttgtttggatagcgattcgtgtaatctgacattccgcctgggtgaggtggaaagtcacgcatgctctccatcgctcctttggaatctgctgacacagtatttaccacccggtgcaggccatatcctgagaacttataatttccctgtgctgtcatgtgtcagtagctgtcaccttattggcggaaagatgccggagaactag

SEQ ID NO: 106510 - DNA, 228 bp, Artificial Sequence
  derived and/or modified sequence
atggaacgttccttcgtttggctgagttgcctagatagtgattcctgcaacctcactttcaggctgggcgaggttgagtcacacgcttgttcgcccagcctgctgtggaatcttctgacccaatacttgcctccaggcgctgggcatatacttcggacatataactttccagtgctgtcatgtgtgtcctcctgccatttaatcggaggcaagatgcccgagaattag

SEQ ID NO: 106511 - DNA, 228 bp, Artificial Sequence
  derived and/or modified sequence
atggaacggtcctttgtttggctttcttgcttggattcagattcgtgcaatctgacattccggctaggcgaagtagaaagccacgcttgttccccgtctcttctttggaacctgctaactcagtatcttccacccggtgctggccatatccttcggacttataacttcccggtcttgtcctgcgtctctagctgccacctaataggcggaaagatgcccgaaaactag

SEQ ID NO: 106512 - DNA, 228 bp, Artificial Sequence
  derived and/or modified sequence
atggagcggtctttcgtgtggctgagttgcttggactctgattcgtgcaatttgacatttaggttgggagaagtcgaaagccacgcctgctcgccgtcgctgctgtggaatcttttaacccagtacctacctcctggagccggacacatcctgaggacctacaattttccagtgctgtcgtgcgtgtcctcctgtcacttgattgggggaaagatgcccgagaattag

SEQ ID NO: 106513 - DNA, 228 bp, Artificial Sequence
  derived and/or modified sequence
atggagcgctcctttgtgtggttaagttgccttgacagcgacagctgcaacctgactttcaggctcggggaggttgagtctcacgcctgcagtcctagtctcctttggaatctgctgactcagtacctacctccaggcgctggccacattcttcgcacgtataatttccccgtactttcctgtgtctccagttgtcacctcatcggcggaaagatgcccgagaattag

SEQ ID NO: 106514 - DNA, 228 bp, Artificial Sequence
  derived and/or modified sequence
atggaaagatcattcgtgtggctctcctgtctggacagtgactcctgtaacttaaccttccgactgggggaggtcgagagccacgcttgtagcccgtctctgctgtggaacctcctgacacagtaccttccacccggagcaggccacattttgaggacctataactttccagtcctgtcatgcgtctcatcctgtcatctgatcggaggtaagatgcctgagaactag

SEQ ID NO: 106515 - DNA, 228 bp, Artificial Sequence
  derived and/or modified sequence
atggaaaggtcttttgtgtggttgtcttgcctagactcagactcatgcaatctgacattccgtttgggcgaggtggagtctcacgcatgcagtccctccctgctgtggaatctgctgacccagtacctacccccaggagcgggacacatattgaggacctacaattttcccgtcctgagctgcgtttcctcctgccacctgataggagggaaaatgcccgaaaattag

SEQ ID NO: 106516 - DNA, 228 bp, Artificial Sequence
  derived and/or modified sequence
atggagagatctttcgtgtggctttcttgtctggatagtgattcttgcaacttgacgtttcgcctaggagaggtcgagagccacgcctgttctccttctctgctctggaatctcctgactcaatatctccctcccggagctgggcacatactgcgcacttataactttcccgtcttaagctgcgtgagctcatgtcatctgatcggaggaaaaatgcccgagaattag

SEQ ID NO: 106517 - DNA, 228 bp, Artificial Sequence
  derived and/or modified sequence
atggaacgttcattcgtgtggctgagttgtctagacagtgatagctgcaatctcacgttcaggctcggcgaagtcgaatcacatgcgtgctctccctctttactctggaatcttctgactcagtatctgccccctggcgcaggtcacatcctgaggacttataatttccccgtgttgagctgtgtctcctcatgtcacctgattggaggaaagatgcctgagaattag

SEQ ID NO: 106518 - DNA, 228 bp, Artificial Sequence
  derived and/or modified sequence
atggagaggagttttgtgtggttgagctgtctggatagcgacagctgcaatctaacattcagactgggggaggtggagtcgcatgcttgctcccccagccttctttggaatttacttacccagtacctgccaccgggtgccggacacattctgcggacttataactttcctgtgctctcatgtgtgagctcttgtcacctgataggaggaaagatgcctgagaattag

SEQ ID NO: 106519 - DNA, 228 bp, Artificial Sequence
  derived and/or modified sequence
atggagcggtcatttgtgtggctttcctgtcttgacagtgatagctgtaatctgacatttcgtttgggcgaggtagaatcccacgcatgtagtccatccctattatggaacctgctgactcagtatctcccccctggcgctggacacatccttaggacttataacttccctgtactgtcttgtgtctcttcatgccacttgataggcggaaaaatgcctgagaattag

SEQ ID NO: 106520 - DNA, 228 bp, Artificial Sequence
  derived and/or modified sequence
atggaacggtccttcgtgtggctctcttgcttggacagcgactcttgcaacctaaccttcaggctaggcgaagtggagtctcacgcctgctctccttcgctactttggaatctcctaacacagtacctgccccctggggcaggccacattctccgaacgtacaacttccctgtgctgtcctgcgtgtcatcgtgtcacctgatcggcggtaagatgccggagaactag

SEQ ID NO: 106521 - DNA, 228 bp, Artificial Sequence
  derived and/or modified sequence
atggaacgtagctttgtctggctctcatgtttggactcagactcctgcaacctcacttttcggctcggagaggtcgagtctcacgcctgctccccctcactgctgtggaatctcttgacacagtacttaccacctggagcaggccacatcctgagaacgtacaactttcccgtgctgtcctgcgtgtcctcttgtcacttaatcggcggaaagatgcctgaaaattag

SEQ ID NO: 106522 - DNA, 228 bp, Artificial Sequence
  derived and/or modified sequence
atggagcgttcatttgtgtggctgagctgccttgatagtgacagctgcaacctcactttcagacttggagaggtggaaagtcacgcttgtagccccagcttgttgtggaatctccttacccagtacctgcctccgggtgctggccacattctgcgtacctacaacttcccagtcctttcatgcgtgtcttcctgtcacctgattggcggaaaaatgccagaaaactag

SEQ ID NO: 106523 - DNA, 228 bp, Artificial Sequence
  derived and/or modified sequence
atggaacgcagctttgtttggctgtcgtgcctagattctgactcatgcaatttaacctttaggctcggcgaggtcgagtcacacgcctgttctccctcgctcctgtggaacctactcactcaatacctaccgcctggagcaggacatatcctgcgaacatacaatttcccagttttatcctgcgtatccagttgtcatctgatcggaggtaaaatgcccgagaactag

SEQ ID NO: 106524 - DNA, 228 bp, Artificial Sequence
  derived and/or modified sequence
atggagcggtccttcgtgtggctctcatgtttggatagcgactcatgcaacttgaccttccgcctgggcgaggtggagtcgcacgcttgcagccctagtttgctgtggaacctgctcactcaatatctgcccccaggcgctggacacattctccgcacgtataattttcccgtactgagttgcgtgagcagctgccatttaatcggtggaaagatgcccgagaactag

SEQ ID NO: 106525 - DNA, 228 bp, Artificial Sequence
  derived and/or modified sequence
atggagcgcagctttgtttggctcagttgcctagattccgactcttgtaacttgactttcaggctgggagaagtcgagagtcacgcctgctcaccttccctgttgtggaacctcctgacgcaatatctgcccccaggtgcaggccatattcttcggacatataattttcccgtattgtcgtgtgtgagctcttgccatttaataggtggcaagatgcctgagaattag

SEQ ID NO: 106526 - DNA, 228 bp, Artificial Sequence
  derived and/or modified sequence
atggagaggtcatttgtgtggctgagctgtctagacagcgactcctgtaacctcaccttcagactaggcgaggtagagtcacacgcttgcagcccctcactgctgtggaatcttttgacccagtacctgccgcctggcgcaggccatattttaagaacttataacttcccagtacttagctgtgtgagctcatgccacctcattggagggaaaatgcccgagaattag

SEQ ID NO: 106527 - DNA, 228 bp, Artificial Sequence
  derived and/or modified sequence
atggaacgaagcttcgtgtggctgagctgtctcgactcagattcatgcaatctgacattccggctgggagaggtggaaagccacgcatgctctccttccctgctgtggaacctgctaacacagtatctccccccaggggcaggccacattttgcggacttacaatttccctgttctctcctgtgtaagctcttgtcacctgatcggaggaaagatgcccgagaattag

SEQ ID NO: 106528 - DNA, 228 bp, Artificial Sequence
  derived and/or modified sequence
atggagcggagctttgtatggctgtcgtgcctcgattccgatagctgtaacctgacattccggttaggcgaagtggagagccacgcttgcagcccttccctgttgtggaatctcctgacacagtatctgccccctggcgctggacacatcctgcggacctacaatttccctgtgctatcctgtgtgtcctcctgtcatctcatcggcggaaaaatgccagaaaactag

SEQ ID NO: 106529 - DNA, 228 bp, Artificial Sequence
  derived and/or modified sequence
atggagcggagttttgtatggctgtcgtgtttagatagcgatagctgcaatttaacattcagactgggggaggtcgaatcacacgcttgttctccttcattactctggaacctgttgactcaatatctacctccgggtgccggtcacattttgagaacttataacttccccgtgttgtcatgtgttagcagctgtcatttgatcgggggtaagatgcccgagaattag

SEQ ID NO: 106530 - DNA, 228 bp, Artificial Sequence
  derived and/or modified sequence
atggagcgcagcttcgtttggttgtcgtgtctggacagtgattcatgcaatcttacttttagattaggagaagtggaaagtcacgcttgctccccaagcttgctgtggaacctgctgacccagtacctgcccccaggggctggccatattcttagaacatacaacttccccgtgctgtcctgcgtttcatcatgccacctaattggtggcaaaatgccagagaactag

SEQ ID NO: 106531 - DNA, 228 bp, Artificial Sequence
  derived and/or modified sequence
atggagcggagttttgtgtggctgtcctgtcttgacagtgactcctgcaaccttactttccgcttaggagaggtggagagtcacgcctgtagccccagcttattatggaacttactaacacaatatctgccccctggagctggtcacatactgagaacgtataactttccagtcctcagttgtgtaagcagctgtcacctaattggaggaaagatgccggaaaattag

SEQ ID NO: 106532 - DNA, 228 bp, Artificial Sequence
  derived and/or modified sequence
atggagcgatctttcgtgtggctgtcctgcctggatagcgactcgtgtaacttgaccttcaggctgggagaggtggagtcacacgcatgctccccttcactgctttggaatttgctgactcagtacttgcctccgggagccggtcacatccttcgcacctacaacttcccggtgctcagctgcgtctccagttgccacctgatcggcggaaagatgccagagaattag

SEQ ID NO: 106533 - DNA, 228 bp, Artificial Sequence
  derived and/or modified sequence
atggagcgatccttcgtatggctgtcctgcttggatagtgattcctgtaacctgacttttcgcctcggagaagttgagtcccacgcttgcagtcccagcttgctctggaacctgttgactcagtaccttcctcctggggctgggcatattctgcgcacctacaattttccagtactgagttgcgtcagtagctgccatctgattgggggtaagatgcccgaaaactag

SEQ ID NO: 106534 - protein, 1084 aa, Artificial Sequence
  derived and/or modified sequence
MNSTGSGKSSGTVSSVSELLELYEEDPEEILYNLGFGRDEPDIASKIPSRFFNSSSFAKGIDIKVFLSAQMQRMEVENPNYALTSRFRQIEVLTTVANAFSSLYSQVSGTPLQRIGSMSSVTSNKETDPPPPLTRSNTANRLMKTLSKLNLCVDKTEKGESSSPSPSAEKGKILNVSVIEESGNKNDQKSQKIMKKKESSSMLATVKEEVSGSSAAVTENADSDRISDEANSNFNQGTENEQSKETQSHESKLGEESGIVESKLDSDFNISSHSELENSSELKSVHISTPEKEPCAPLTIPSIRNIMTQQKDSFEMEEVQSTEGEAPHVPATYQLGLTKSKRDHLLRTASQHSDSSGFAEDSTDCLSLNHLQVQESLQAMGSSADSCDSETTVTSLGEDLATPTAQDQPYFNESEEESLVPLQKGLEKAAAVADKRKSGSQDFPQCNTIENTGTKQSTCSPGDHIIEITEVEEDLFPAETVELLREASAESDVGKSSESEFTQYTTHHILKSLASIEAKCSDMSSENTTGPPSSMDRVNTALQRAQMKVCSLSNQRMGRSLLKSKDLLKQRYLFAKAGYPLRRSQSLPTTLLSPVRVVSSVNVRLSPGKETRCSPPSFTYKYTPEEEQELEKRVMEHDGQSLVKSTIFISPSSVKKEEAPQSEAPRVEECHHGRTPTCSRLAPPPMSQSTCSLHSIHSEWQERPLCEHTRTLSTHSVPNISGATCSAFASPFGCPYSHRHATYPYRVCSVNPPSAIEMQLRRVLHDIRNSLQNLSQYPMMRGPDPAAAPYSTQKSSVLPLYENTFQELQVMRRSLNLFRTQMMDLELAMLRQQTMVYHHMTEEERFEVDQLQGLRNSVRMELQDLELQLEERLLGLEEQLRAVRMPSPFRSSALMVTELMQEQSYLKSELGLGLGEMGFEIPPGESSESVFSQATSESSSVCSGPSHANRRTGVPSTASVGKSKTPLVARKKVFRASVALTPTAPSRTGSVQTPPDLESSEEVDAAEGAPEVVGPKSEVEEGHGKLPSMPAAEEMHKNVEQDELQQVIREIKESIVGEIRREIVSGLLAAVSSSKASNSKQDYH

SEQ ID NO: 106535 - DNA, 3772 bp, Artificial Sequence
  derived and/or modified sequence
acagaagcgacgacgcaggacgaggaggaggacgaggaggaggacctccccggcgcgcagctgccggcagcggggggaagaggaaacgtgcccaacgagaagatcgcgatatggctcaaggactgccggtgtgcttgtgagaaatggaggaagttttgaagatgatttgtcattgggagctgaagccaaccacctccatgaaagtgatgctcaaattgaaaactgcaataatatcttggccaaagagagaagattacagtttcatcagaaagggagaagtatgaattccactggatctgggaaaagtagtgggacagtttcaagtgtttcagaattgttggaactttatgaggaagatcctgaagaaattctttataatcttggatttggacgtgatgaaccagatattgcttctaaaattccttccagattttttaattcatcatcctttgccaaagggatagatattaaagtatttttgagtgctcagatgcaacggatggaagtagaaaacccaaattatgctttaacaagccgttttcgtcaaattgaagtgcttactactgtggccaatgcgttttcttctttatattctcaagtctccgggacgcccctgcagagaattggaagtatgtcctcagtgacctctaacaaggagacagacccacctccacctttaactcgaagtaacactgcaaatcgtttaatgaaaacactctcaaaactgaatttatgtgttgataaaacagagaaaggagaaagtagtagtccttctccatcagctgaaaaaggaaagattctaaatgtttcagtgattgaagaaagtggcaataaaaacgatcaaaagtctcaaaaaattatgaagaagaaagagtcatcttctatgttggctacagttaaagaagaagtctctggtagttcagcagctgttacggagaatgctgatagtgatagaatttctgatgaagcaaatagtaattttaaccaaggaactgaaaatgaacaaagtaaagaaactcaaagtcatgagagtaaactgggtgaggaatctggtattgtagaatccaaattagatagtgatttcaacatatccagccacagtgagctggaaaatagcagtgagctgaaaagtgtccatatatccacacctgaaaaagagccttgtgcaccactgacaataccatccataagaaatataatgacacagcagaaggactccttcgaaatggaagaggttcaaagtacggagggagaagctcctcatgttccagccacttaccagctaggtcttacgaagtcgaaaagagatcatctgttacgtactgcaagtcagcattccgatagcagtggttttgctgaagattctacagactgcctatcccttaatcatcttcaggttcaggagtccttgcaggctatggggagtagtgctgatagttgtgacagtgagacaacagttacgtcacttggtgaagaccttgccacaccaacagcacaagaccagccttattttaatgaatcagaggaggagtctcttgtccctcttcagaagggactagagaaggcagcagcagttgcagacaaaagaaaatcaggtagccaggatttccctcagtgcaacaccattgagaatacaggaactaaacagtccacctgtagtccaggggatcatatcattgaaattactgaagtggaagaggatttgtttccagcagagacagtagagctactgagggaagcaagtgctgaaagtgatgtgggtaaaagcagtgaaagtgaatttactcagtataccacacaccatattctgaaatcattggcttctattgaagctaaatgcagtgatatgagctctgaaaatacaactgggcctccctcttccatggacagagttaatacagctttgcaaagagctcaaatgaaggtttgcagtctgtctaatcaaaggatggggcgtagcctgctaaaatcaaaagatttgttaaaacaaaggtacttatttgcaaaagctggctatcctctaagaaggtctcagtctttaccaaccaccttattgagcccagtaagggttgtgtcctctgtcaatgttcgattatctccaggaaaagagaccagatgcagcccaccttccttcacctataagtacacacctgaagaggagcaggaattggaaaagcgggtgatggaacatgatggtcagtctttagttaaatcgaccattttcatctctccatcatctgtgaagaaagaagaagccccccagagtgaggcgccgcgggtggaggaatgccatcatggaaggactcctacctgttcacggcttgctccaccaccaatgtctcagtctacctgttcccttcattccatccactctgagtggcaagaaaggcccctgtgtgagcacacaagaactctgagcactcacagtgttcccaacatatcaggggctacttgtagtgccttcgcttcccctttcgggtgtccttactcacatagacatgccacctacccttaccgagtgtgctctgtgaatcctccttcagccatagaaatgcagttgcgaagagtattacatgatattagaaactcactgcagaatctttcacagtaccctatgatgagaggacctgatcctgctgctgctccatatagtactcagaaatcatctgttctacctctttatgaaaatacttttcaggagctccaggtaatgaggcggagcctgaatttgtttagaacacaaatgatggatttagaattggcaatgctgcgtcagcaaaccatggtttatcatcatatgactgaggaggagaggtttgaagttgatcagctccagggtttgagaaattcagtccgaatggaacttcaggacctggaactgcagctggaggagcgcctgctgggcctggaggagcagcttcgtgctgtgcgcatgccttcacccttccgctcctccgcactcatggtcactgaactgatgcaggagcagtcatacctgaagtctgaattgggcctgggacttggagaaatgggatttgaaattcctcctggagaaagctcagaatctgttttttcccaagcaacatcagaatcatcttctgtatgttctggtccctctcatgctaacagaagaactggagtaccttctactgcctcagtgggcaaatccaaaaccccattagtggcaaggaagaaagtgttccgagcatcggtggctctaacgccaacagctccttctagaacaggctctgtgcagacacctccagatttggaaagttctgaggaagttgatgcagctgaaggagccccagaagttgtaggacctaaatctgaagtggaagaagggcatggaaaactcccatcaatgccagctgctgaggaaatgcataaaaatgtggagcaagatgagttgcagcaagtcatacgggagattaaagagtctattgttggggaaatcagacgggaaattgtaagtggacttttggcagcagtatcttcaagtaaagcgtctaattctaagcaagattatcattaaacagaaattataggttggcatggatcctattagctgtgtaatactggaattatcaatgatatgcactggtggaggtgttatttgtgctttagaagatacttgctgttgagctgggctactgtatacagtgtacaatgtgtatttcttcaaccatatattttaaaaagacgtacatagaaacttaggcactttgctatttcttttctaaactatcaaaaactctagcagtttgaaaag

SEQ ID NO: 106536 - DNA, 3255 bp, Artificial Sequence
  derived and/or modified sequence
atgaacagcaccggcagcggcaagagcagcggcaccgtgagcagcgtgagcgagctgctggagctgtacgaggaggaccccgaggagatcctgtacaacctgggcttcggcagagacgagcccgacatcgccagcaagatccccagcagattcttcaacagcagcagcttcgccaagggcatcgacatcaaggtgttcctgagcgcccagatgcagagaatggaggtggagaaccccaactacgccctgaccagcagattcagacagatcgaggtgctgaccaccgtggccaacgccttcagcagcctgtacagccaggtgagcggcacccccctgcagagaatcggcagcatgagcagcgtgaccagcaacaaggagaccgacccccccccccccctgaccagaagcaacaccgccaacagactgatgaagaccctgagcaagctgaacctgtgcgtggacaagaccgagaagggcgagagcagcagccccagccccagcgccgagaagggcaagatcctgaacgtgagcgtgatcgaggagagcggcaacaagaacgaccagaagagccagaagatcatgaagaagaaggagagcagcagcatgctggccaccgtgaaggaggaggtgagcggcagcagcgccgccgtgaccgagaacgccgacagcgacagaatcagcgacgaggccaacagcaacttcaaccagggcaccgagaacgagcagagcaaggagacccagagccacgagagcaagctgggcgaggagagcggcatcgtggagagcaagctggacagcgacttcaacatcagcagccacagcgagctggagaacagcagcgagctgaagagcgtgcacatcagcacccccgagaaggagccctgcgcccccctgaccatccccagcatcagaaacatcatgacccagcagaaggacagcttcgagatggaggaggtgcagagcaccgagggcgaggccccccacgtgcccgccacctaccagctgggcctgaccaagagcaagagagaccacctgctgagaaccgccagccagcacagcgacagcagcggcttcgccgaggacagcaccgactgcctgagcctgaaccacctgcaggtgcaggagagcctgcaggccatgggcagcagcgccgacagctgcgacagcgagaccaccgtgaccagcctgggcgaggacctggccacccccaccgcccaggaccagccctacttcaacgagagcgaggaggagagcctggtgcccctgcagaagggcctggagaaggccgccgccgtggccgacaagagaaagagcggcagccaggacttcccccagtgcaacaccatcgagaacaccggcaccaagcagagcacctgcagccccggcgaccacatcatcgagatcaccgaggtggaggaggacctgttccccgccgagaccgtggagctgctgagagaggccagcgccgagagcgacgtgggcaagagcagcgagagcgagttcacccagtacaccacccaccacatcctgaagagcctggccagcatcgaggccaagtgcagcgacatgagcagcgagaacaccaccggcccccccagcagcatggacagagtgaacaccgccctgcagagagcccagatgaaggtgtgcagcctgagcaaccagagaatgggcagaagcctgctgaagagcaaggacctgctgaagcagagatacctgttcgccaaggccggctaccccctgagaagaagccagagcctgcccaccaccctgctgagccccgtgagagtggtgagcagcgtgaacgtgagactgagccccggcaaggagaccagatgcagcccccccagcttcacctacaagtacacccccgaggaggagcaggagctggagaagagagtgatggagcacgacggccagagcctggtgaagagcaccatcttcatcagccccagcagcgtgaagaaggaggaggccccccagagcgaggcccccagagtggaggagtgccaccacggcagaacccccacctgcagcagactggcccccccccccatgagccagagcacctgcagcctgcacagcatccacagcgagtggcaggagagacccctgtgcgagcacaccagaaccctgagcacccacagcgtgcccaacatcagcggcgccacctgcagcgccttcgccagccccttcggctgcccctacagccacagacacgccacctacccctacagagtgtgcagcgtgaacccccccagcgccatcgagatgcagctgagaagagtgctgcacgacatcagaaacagcctgcagaacctgagccagtaccccatgatgagaggccccgaccccgccgccgccccctacagcacccagaagagcagcgtgctgcccctgtacgagaacaccttccaggagctgcaggtgatgagaagaagcctgaacctgttcagaacccagatgatggacctggagctggccatgctgagacagcagaccatggtgtaccaccacatgaccgaggaggagagattcgaggtggaccagctgcagggcctgagaaacagcgtgagaatggagctgcaggacctggagctgcagctggaggagagactgctgggcctggaggagcagctgagagccgtgagaatgcccagccccttcagaagcagcgccctgatggtgaccgagctgatgcaggagcagagctacctgaagagcgagctgggcctgggcctgggcgagatgggcttcgagatcccccccggcgagagcagcgagagcgtgttcagccaggccaccagcgagagcagcagcgtgtgcagcggccccagccacgccaacagaagaaccggcgtgcccagcaccgccagcgtgggcaagagcaagacccccctggtggccagaaagaaggtgttcagagccagcgtggccctgacccccaccgcccccagcagaaccggcagcgtgcagaccccccccgacctggagagcagcgaggaggtggacgccgccgagggcgcccccgaggtggtgggccccaagagcgaggtggaggagggccacggcaagctgcccagcatgcccgccgccgaggagatgcacaagaacgtggagcaggacgagctgcagcaggtgatcagagagatcaaggagagcatcgtgggcgagatcagaagagagatcgtgagcggcctgctggccgccgtgagcagcagcaaggccagcaacagcaagcaggactaccactag

SEQ ID NO: 106537 - DNA, 3255 bp, Artificial Sequence
  derived and/or modified sequence
atgaatagcaccggcagcgggaagagctccggcaccgtgtctagtgtgtccgagcttcttgaactgtatgaagaggacccagaggaaatcctctataatctaggtttcggcagagatgaaccggatatcgcttcaaagatcccctctcgcttcttcaatagtagcagctttgcaaaagggatcgacatcaaggtattccttagcgcacaaatgcagagaatggaagtcgagaatcccaactacgctctgacatcccggttccgccagatcgaagtgctgacaactgttgccaatgccttttcctcactatacagccaggtgtcgggcacgcccctgcaaagaatcgggagcatgtccagcgttactagcaacaaggagactgacccacctccccccttgacccgctccaatacagctaatagactgatgaagacattgtcaaagcttaacctgtgtgtggataagaccgagaagggagaaagtagttctccctctccttcggccgagaaaggtaaaatccttaatgtctcagtgatcgaggaaagcggcaacaaaaacgaccagaagtcccagaagatcatgaaaaagaaagagtcaagttccatgctggcaacagtcaaggaagaggtaagtgggtccagtgctgcagtcaccgagaacgcggactccgaccggatcagtgatgaagcaaactccaacttcaatcagggcaccgaaaatgaacaatcaaaagagacccagagccatgagtctaaactgggagaggaaagcggcatcgttgagagtaagttagatagcgacttcaatatttcttcccatagtgaactggaaaatagctctgaactgaaatctgtgcacattagcacacccgagaaggagccatgcgctccactcacaattcccagcataagaaacattatgacccagcagaaagatagctttgaaatggaggaggtacagtcaaccgagggcgaagctccgcatgtaccagctacttaccagctcggactgactaaatctaaaagggaccacctcctgcgaactgcctctcagcacagtgattccagcggtttcgcagaggatagtacagattgcctcagtctgaatcatctacaagtgcaagaatcactgcaggccatgggatcctctgccgacagttgcgacagcgagacaacagtgacctctctgggagaggatctggccacccctacggcacaggatcaaccctattttaatgagtctgaagaggaatcgctagttcccttgcagaaaggactcgaaaaagctgccgcagtagccgacaagcgtaaatctgggtcacaggacttcccgcagtgcaacacaattgagaacaccggaactaaacagtcaacttgttccccaggagaccacatcattgaaatcacggaagtcgaggaggacttgttccccgccgaaactgtggagttgcttcgcgaagcgtccgccgaaagcgacgtgggaaaatcctccgaatctgaatttacccagtatacgacccaccacattcttaaatccttggcaagtattgaggccaaatgctctgatatgagctcggagaacactactggcccccccagtagtatggacagagtaaatacggccttgcagcgggcccagatgaaggtctgttctctgagcaatcaaaggatgggaaggtctctgctcaagtccaaggatttgctcaagcaacggtatctttttgccaaagctgggtacccactcaggcggagccagtccctgcctaccaccctcctttccccagtgagagtggtgtcaagtgtcaatgttagactcagcccaggaaaggaaacccgatgtagccctcctagcttcacctacaaatatacccccgaggaagaacaagagctggaaaagcgcgtgatggaacacgacgggcagtccctggtgaaaagcacaattttcatctcaccatcctccgtcaaaaaggaggaagcccctcagagcgaagccccgcgggtggaggagtgccaccacgggcgcactccgacctgctcccgattggcccctccccctatgagccaaagtacttgttcactgcattctatacattctgaatggcaggagaggcctctctgcgagcacacacgcacgcttagtacgcacagcgtccccaatatcagtggtgccacctgctcagctttcgcaagcccttttggatgtccatatagccacaggcacgcaacatatccataccgggtatgcagcgtcaatcctccgtcagctattgagatgcagttaaggcgtgtgctgcatgatatccgcaactctttgcagaacctctcccaataccccatgatgcgcggtccagatcccgccgccgctccatacagtactcaaaagtcctctgtgctgcctttatacgagaatactttccaggaactgcaggtcatgaggcggtcactgaatctttttcgcactcaaatgatggatcttgaattggctatgctgagacaacagacgatggtatatcatcacatgactgaagaagagaggtttgaggtggaccagctgcagggcttgcgcaatagtgttagaatggagctgcaggatctagaacttcagctggaggagaggttgctgggtctcgaggagcagttacgcgccgtgaggatgccttcgcctttcagaagcagcgcgctgatggtcaccgaactgatgcaggaacagagctacttaaaatcggaattgggattaggtctgggagaaatgggttttgagattcctcccggcgaatcttcagaaagtgtgttttcccaagccactagcgaaagtagttcagtctgctcaggaccgagccatgctaatcgtcgcaccggcgtgccttctaccgcttccgttggaaagtcaaaaacacccttggtggcccgtaaaaaagtctttcgcgcgagcgtcgctcttacccctacagcccctagtagaacgggctccgtccaaacccccccagatctggagtccagtgaggaagtggatgccgccgaaggtgctcctgaggtcgtgggccccaagtcagaggtggaggagggacatggaaagttaccgtctatgccggcggcagaggaaatgcacaagaatgtggaacaagatgagctgcagcaagtgatccgggaaattaaagagagtattgtgggtgagatccgtcgcgagatcgtgagcggactgctagccgcagtgtcctcatcaaaagcaagcaatagtaagcaggattatcactag

SEQ ID NO: 106538 - DNA, 3255 bp, Artificial Sequence
  derived and/or modified sequence
atgaacagcacaggcagcggcaagagcagcggcaccgtgtcctctgtgtctgagctgctggagctgtatgaagaagatcctgaggagatcctgtacaacctgggcttcggcagagatgagccagacatcgccagcaagatccccagccgcttcttcaacagcagcagctttgccaagggcatcgacatcaaggtgttcctgagcgcccagatgcagaggatggaggtggagaaccccaactatgccctgaccagccgcttccggcagatcgaggtgctgaccaccgtggccaatgccttcagcagcctgtacagccaggtgtctggcacccccctgcagagaattggctccatgagctctgtgaccagcaacaaggagacagatcctcctccacccctgaccaggagcaacacagccaaccggctgatgaagaccctgagcaagctgaacctgtgtgtggacaagacagagaagggggagagcagcagccccagccccagcgctgagaagggcaagatcctgaatgtgtctgtgattgaggagagcggcaacaagaatgaccagaagagccagaagatcatgaagaagaaggagagcagctccatgctggccaccgtgaaggaggaggtgtctggcagcagcgctgctgtgacagaaaatgctgacagcgaccgcatcagtgatgaggccaacagcaacttcaaccagggcacagaaaatgagcagagcaaggagacccagagccatgagagcaagctgggggaggagagcggcatcgtggagagcaagctggacagcgacttcaacatcagcagccacagcgagctggagaacagcagcgagctgaagtctgtgcacatcagcaccccagagaaggagccctgtgcccccctgaccatccccagcatccggaacatcatgacccagcagaaggacagctttgagatggaggaggtgcagagcacagaaggagaggccccccacgtgcctgccacctaccagctgggcctgaccaagagcaagagggaccacctgctgaggacagccagccagcacagcgacagcagcggctttgctgaggacagcacagactgcctgagcctgaaccacctgcaggtgcaggagagcctgcaggccatgggcagcagcgctgacagctgtgacagcgagaccaccgtgaccagcctgggggaggacctggccacccccacagcccaggaccagccctacttcaatgaaagtgaggaggagagcctggtgcccctgcagaagggcctggagaaggctgctgctgtggccgacaagaggaagagcggcagccaggacttcccccagtgcaacaccatcgagaacacaggcaccaagcagagcacctgcagccctggggaccacatcatcgagatcacagaggtggaggaggacctcttccctgctgagaccgtggagctgctgcgggaggccagcgctgagagtgatgtgggcaagagcagcgagagcgagttcacccagtacaccacccaccacatcctgaagagcctggccagcattgaggccaagtgcagcgacatgagcagcgagaacaccactggaccacccagctccatggacagagtgaacacagccctgcagagggcccagatgaaggtgtgcagcctgagcaaccagaggatgggccgcagcctgctgaagagcaaggacctgctgaagcagcgctacctgtttgccaaggccggctaccccctgcggcgcagccagagcctgcccaccaccctgctgagccctgtgcgggtggtgtcctctgtgaatgtgcggctgagccctgggaaggagacccgctgcagccccccatccttcacctacaagtacaccccagaggaggagcaggagctggagaagagggtgatggagcatgatggccagagcctggtgaagagcaccatcttcatcagccccagctctgtgaagaaggaggaggccccccagagcgaggccccccgggtggaggagtgccaccacggccgcacccccacctgcagccggctggcccccccacccatgagccagagcacctgcagcctgcacagcatccacagcgagtggcaggagcggcccctgtgtgagcacaccaggaccctgagcacccacagcgtgcccaacatcagcggggccacctgcagcgcctttgccagccccttcggctgcccctacagccacagacatgccacctacccctacagagtgtgcagcgtgaacccccccagcgccatcgagatgcagctgcggcgggtgctgcatgacatccggaacagcctgcagaacctgagccagtaccccatgatgaggggccctgaccctgctgctgccccctacagcacccagaagagctctgtgctgcccctgtatgagaacaccttccaggagctgcaggtgatgaggaggagcctgaacctcttccgcacccagatgatggacctggagctggccatgctgcggcagcagaccatggtgtaccaccacatgacagaggaggagagatttgaggtggaccagctgcagggcctgagaaattctgtgaggatggagctgcaggacctggagctgcagctggaggagcggctgctgggcctggaggagcagctgcgggctgtgaggatgcccagccccttccgcagcagcgccctgatggtgacagagctgatgcaggagcagagctacctgaagtctgagctgggcctgggcctgggggagatgggctttgagatccccccaggagagagcagcgagagcgtcttcagccaggccaccagcgagagcagctctgtgtgcagcggccccagccacgccaacagaagaactggagtgcccagcacagcctctgtgggcaagagcaagacccccctggtggccaggaagaaggtgttccgggcctctgtggccctgacccccacagcccccagcaggacaggctctgtgcagaccccaccagacctggagagcagcgaggaggtggatgctgctgagggcgcccctgaggtggtgggccccaagtctgaggtggaggagggccacggcaagctgcccagcatgcctgctgctgaggagatgcacaagaatgtggagcaggatgagctgcagcaggtgatccgggagatcaaggagagcatcgtgggggagatccggcgggagatcgtgtctggcctgctggccgctgtgagcagcagcaaggccagcaacagcaagcaggactaccactag

SEQ ID NO: 106539 - DNA, 3255 bp, Artificial Sequence
  derived and/or modified sequence
atgaacagcaccggcagcggcaagagcagcggcaccgtgagcagcgtgtcagagttactcgagctttatgaggaggacccagaggaaatcctgtataatttaggatttgggagagacgagccagacattgcaagcaagatcccatcaaggttcttcaatagctcctccttcgccaagggtattgatataaaggttttcctctcagcccagatgcaacgcatggaggtggagaatccaaattacgctcttactagccgatttcgtcaaatcgaggttttaaccactgtggctaacgcgttctcctctctttattcacaagtgtccggtactccgcttcagcgcatcgggtctatgtcgtctgtcaccagtaataaggaaacagatccacctcctccacttacaagatcaaacactgctaaccgcttgatgaaaaccctttctaaactcaacctgtgtgtggacaaaaccgaaaaaggggaaagctctagcccaagcccttccgctgagaagggtaagatcttaaacgtatctgtaattgaggagagcggaaacaagaatgatcagaagtcccagaaaattatgaaaaagaaggagagttcgagcatgctcgcgaccgtgaaggaagaagtgagtggatcttcagcagccgttacagaaaatgcagactcagatcgaatatccgacgaggcaaactccaatttcaatcagggcacggagaacgagcagtccaaagagacgcagtcccacgaaagcaaattgggggaagaaagtgggatcgtggaatccaaactagatagtgattttaatatcagcagtcattcggagctggaaaacagctcagagctgaaatccgtgcatataagcaccccggagaaagaaccatgcgcccctctgaccattccaagcattaggaatatcatgactcagcagaaggatagctttgaaatggaggaggtacagtccactgaaggcgaagcaccccatgtgccagcaacctaccagttgggactgacgaagtcaaaaagggatcatctgctgagaacagcctcacagcactcagatagtagcggatttgcagaggacagcaccgattgcctttctttgaaccatctccaggtgcaagagagcctccaagcgatgggatccagtgccgattcttgcgactccgagactacagtcaccagcttgggggaggaccttgcaacccctacggctcaagatcaaccttacttcaacgagagcgaagaagaatccctggtcccactacagaagggactcgaaaaagcagcagctgtcgccgacaaaaggaaatccggcagtcaggatttcccccaatgcaacactatcgagaatacaggaacaaaacagtccacttgttctccaggggaccatatcattgagatcaccgaagtggaggaggatctgtttcccgctgaaaccgtcgagctgctacgagaggctagcgcggagtcagatgtgggtaagtcctctgagtccgagttcactcagtacaccactcaccatatactcaagtctcttgccagcatcgaagccaagtgtagcgatatgagctccgagaacacgactggacctccatcttcaatggatcgggtgaacacagcccttcaacgggctcagatgaaagtgtgcagtctctccaaccagcggatgggccggagcctgcttaagtccaaggatcttctgaaacagcgttacctgttcgctaaagccggctaccctctgcggagatcacagagcctccccactaccctcctgtctcctgttcgcgtggtgtcgtccgtgaatgtacggctgagccccggaaaagagaccagatgtagtcccccatcattcacatataagtatacaccagaggaggaacaggagctcgagaagcgcgtaatggagcatgacggacagtcacttgtcaagtccacaatttttataagtccctcgtctgtgaaaaaagaagaagcaccacagagcgaagcccccagggtggaagagtgccaccacggacggaccccaacttgcagtcgcctggcccccccccctatgagccagagtacatgctctctccactcaatccatagtgaatggcaggagagaccactctgtgaacacactcgaacattaagcacacacagtgtcccaaatatcagtggcgccacctgttctgcattcgcttccccctttggctgcccatactctcataggcacgctacctacccttaccgggtgtgttcagtgaatccccctagcgcaatcgagatgcagttgaggagagtattacatgacatacgcaattctttgcagaatctgagtcaatacccaatgatgagaggaccggatcccgctgccgctccttacagcacacaaaagtcgtcggtgctaccgctttacgagaacacttttcaggaattgcaggtgatgcgcaggtctcttaatctgtttcgaacacagatgatggatctcgaacttgcgatgcttaggcaacagactatggtttaccaccacatgaccgaggaggaaaggttcgaggtcgaccaactgcagggactgagaaattctgtgcgtatggagctgcaagatcttgagcttcagctggaggagcgtttacttggacttgaagaacagctgcgggctgtcaggatgccttccccatttcgcagctccgccctgatggtgaccgagcttatgcaagaacagtcttatctcaagagtgagttagggctgggtcttggcgagatggggtttgaaatccctcccggcgaatccagcgagtctgtttttagccaagccacttcagaaagttcttccgtgtgttccggcccctcacacgccaaccgtaggactggggtgccttcaacggcatccgtggggaagtccaaaacacctctcgtggcacgaaagaaggtattccgtgcttctgtcgcgctaactccaacggctccaagccgaaccggttcggtacagacacctcccgacttagaatcatcagaagaggtggacgccgcagaaggcgcaccagaggtcgtcggacctaaaagtgaggtcgaagaaggccatggtaagctaccttcaatgcccgccgcagaggagatgcacaaaaatgtggagcaagatgaactccagcaggttattcgggagattaaggaatcaattgtgggtgaaatccggcgcgaaattgttagtgggctgttggcagctgtcagttcttctaaggcctctaactctaaacaagattaccactag

SEQ ID NO: 106540 - DNA, 3255 bp, Artificial Sequence
  derived and/or modified sequence
atgaattctacaggctcagggaaatctagtggcactgttagttcggtcagcgagctgctggagctgtacgaggaggaccctgaggagattctttataacctgggtttcggtagggacgagcccgatatcgctagcaaaatccctagccgattcttcaactcaagctcttttgctaaggggatcgatatcaaggtgtttttgagcgcccagatgcagaggatggaggtggagaaccctaactatgctttgacatcccgtttccgacagatagaagtgctcacaacagtggccaatgccttctcctctttgtattctcaggtttcaggaacacccttgcagcgaattgggagcatgtcttctgtgacatccaataaggaaactgatccccctccacccctcactcggtccaatactgccaaccggctgatgaagactctctctaagcttaatctctgtgtggataagaccgaaaaaggagagagtagctccccgtccccctccgcggagaagggcaaaattttgaatgtgtctgtcattgaagagtctggcaacaagaacgaccagaagtcccagaaaatcatgaagaagaaggaaagcagttcaatgctcgctaccgtcaaggaggaggtctctggaagtagcgccgctgtgacagaaaacgcagactcagaccggatatctgacgaggctaatagtaatttcaaccagggaacagaaaatgagcagtctaaggaaacacagtcccacgaatccaagttaggcgaggaatctggtatagtagaatctaagctggacagtgattttaatatctccagccatagtgagctggaaaactctagtgagctgaagtccgtacatatcagcactccagagaaggaaccgtgcgccccactcaccattccctctataagaaacatcatgacacagcagaaggactctttcgagatggaggaagtacagagtaccgagggcgaagcaccccacgtccctgctacatatcaactgggactgacgaagagtaaacgggaccatctcctgaggaccgcaagccagcactctgattccagtggcttcgccgaagactcaacggactgtttaagtcttaatcacctgcaggtccaggagtccctgcaagccatgggctccagcgctgatagttgcgattccgagacaactgtgacctctcttggcgaagatcttgccacacccaccgcgcaggaccagccgtactttaatgagagcgaggaggagtcattagttccccttcagaagggactggaaaaagccgctgccgtcgcagacaagcgtaaatcaggcagccaagacttcccacagtgcaataccatcgagaacacgggaaccaagcagtcaacatgcagccccggagatcatatcatcgagatcaccgaagtagaggaggatctcttccccgcagaaaccgtagaactgttgagagaggcgtctgccgaatctgacgtcggcaagagtagcgaatctgagtttacacagtacacaactcaccacattctaaagtcactggccagtattgaagccaagtgctccgatatgagcagtgaaaataccacagggcctccatcctcgatggaccgggtaaacaccgctcttcaacgcgcacaaatgaaagtctgcagtctgagcaaccagaggatggggagatctttattaaagagtaaagatctgctgaagcaaagatacctcttcgcaaaggccggatatcccttaaggagatctcagtccctgcccacaaccctactgtccccagtgagagtcgtaagcagtgtcaacgtgcggctgtctcctggtaaggagacaaggtgctctcctccaagcttcacttacaagtacacgccagaggaagagcaggagctagagaagagggtgatggaacatgacgggcagagtctggtcaagtcaactatttttatctctccatcttcggttaagaaagaagaagcccctcagagtgaagcaccaagggtagaggaatgtcaccacggacgtaccccgacctgttctcgattagcaccaccacctatgagccagagcacctgttctctccactctatacattcagaatggcaagaacggcctctctgcgagcatacccggaccctgtcaacccattcagtgccaaacataagcggagccacctgctccgcctttgcctcccctttcggatgcccctacagccatcgacacgccacttacccctaccgcgtgtgctcagtgaatcccccttctgcgatcgaaatgcagctgagaagggttcttcacgacattagaaatagtttacagaatctgagtcagtatcccatgatgcgaggtcctgatccagcagctgccccttactcgactcaaaaatcatcggtacttcccctgtatgaaaatacatttcaggaactgcaggtgatgagacgtagccttaacctttttcgcacccaaatgatggacttagaattggctatgcttcgacagcagaccatggtgtaccaccacatgactgaagaagagcgctttgaagtcgaccaattacaggggctgcgcaactctgtacgcatggagctgcaggacctggagcttcagctggaagagaggctgttgggccttgaagaacagctccgcgctgtccgcatgcccagcccctttcgctcttctgctctcatggtgactgagctcatgcaggaacagtcctacctgaaatcagagctgggcctagggttaggcgaaatgggcttcgaaattccacccggagagtctagcgagtcagtgttttctcaggccacctcggagtcctctagtgtttgtagcggaccatctcatgctaatcgacgaacgggggtgccatctacagcgtcagtaggaaaatcgaagaccccgttggtcgcacgtaaaaaggtgtttcgcgctagtgtggccctaacccctacagcgccaagcagaaccggtagcgtgcagacacctccagacctggagagcagtgaggaggtggacgcagcagaaggggcacctgaggtggtcggcccaaaatccgaggtggaggaggggcacggcaaactcccctcaatgcctgccgctgaagaaatgcacaaaaacgttgagcaggacgagctccaacaagtgattagagaaattaaagagtcgatcgttggcgagattagaagggagatcgtaagcggcctcttggccgctgtaagttcaagcaaggcatctaattctaagcaggattaccactag

SEQ ID NO: 106541 - protein, 516 aa, Artificial Sequence
  derived and/or modified sequence
MHSETPKSQVGTLLFRSRSRLTHLSLSRRASESSLSSESSESSDAGLCMDSPSPMDPHMAEQTFEQAIQAASRIIRNEQFAIRRFQSMPVRLLGHSPVLRNITNSQAPDGRRKSEAGSGAASSSGEDKENDGFVFKMPWKPTHPSSTHALAEWASRREAFAQRPSSAPDLMCLSPDRKMEVEELSPLALGRFSLTPAEGDTEEDDGFVDILESDLKDDDAVPPGMESLISAPLVKTLEKEEEKDLVMYSKCQRLFRSPSMPCSVIRPILKRLERPQDRDTPVQNKRRRSVTPPEEQQEAEEPKARVLRSKSLCHDEIENLLDSDHRELIGDYSKAFLLQTVDGKHQDLKYISPETMVALLTGKFSNIVDKFVIVDCRYPYEYEGGHIKTAVNLPLERDAESFLLKSPIAPCSLDKRVILIFHCEFSSERGPRMCRFIRERDRAVNDYPSLYYPEMYILKGGYKEFFPQHPNFCEPQDYRPMNHEAFKDELKTFRLKTRSWAGERSRRELCSRLQDQ

SEQ ID NO: 106542 - DNA, 1551 bp, Artificial Sequence
  derived and/or modified sequence
atgcattctgaaacccccaagtcccaggtggggaccctcctgtttcgaagccgcagcagattgacccacctcagtttatctagacgcgcaagtgaaagttctctgtcgagcgagtcctctgaaagttctgatgcgggcctttgcatggacagtccctccccaatggacccgcacatggctgaacagacttttgaacaggccatccaggcagcctcaagaataattaggaacgaacagttcgcaattcgccgctttcagagtatgccagtgcgcctgctgggccattcacctgtgctccgaaacattactaatagtcaagcacctgacggcagacgaaagtccgaagccggcagtggcgccgcttctagcagtggcgaggataaagagaatgacgggttcgtcttcaagatgccctggaagcctacacacccctcatctactcacgccctagccgaatgggccagccgccgcgaagcttttgctcaaagaccaagcagtgcccctgacctgatgtgtctgagccccgatagaaagatggaagtggaagagctttctcctttggcactgggacgcttttctctcacgcctgccgagggggatacagaggaggatgatggcttcgtcgacatcctggagagcgacctgaaggacgacgacgctgtgcccccaggcatggaatctttaatatcggctcccctggttaaaacccttgaaaaggaggaagagaaagacctggtcatgtattcaaaatgccagagactatttaggtcccctagcatgccctgctcggtcatcagacctattttgaagagactcgagcgtccacaagatagggatacccccgttcaaaataagcgtaggcgatcagtgacccctccagaggagcagcaggaagcggaggagcctaaggctcgcgttttgaggtcaaaaagcctctgtcacgacgagatcgaaaaccttctggatagcgaccaccgcgaactgattggagattatagtaaggctttcttgctgcagaccgttgacgggaaacaccaggacctcaagtatatcagccctgaaacgatggtggcgttgttgacaggaaagttctctaatattgtcgataaattcgtcattgtcgattgtagatatccttacgagtatgagggcggccacatcaagacagccgtgaacctaccgctggaacgcgacgctgagtccttcctcctaaaaagtcctatcgctccatgctctctcgataagagggtgatcctgatttttcactgcgagtttagctcagaacgagggccacggatgtgtcgtttcatacgtgagcgagaccgtgccgtaaatgactacccgtccctgtactatccagaaatgtatatactcaaaggggggtataaagaattcttccctcagcaccccaacttctgtgagccacaagactatcggcctatgaatcacgaagctttcaaagatgaacttaagactttcaggctgaaaaccagatcttgggccggagaacgcagcagacgcgaactgtgctcgaggttacaggaccaatag

SEQ ID NO: 106543 - DNA, 1551 bp, Artificial Sequence
  derived and/or modified sequence
atgcacagcgagacccccaagagccaggtgggcaccctgctcttccgcagccgcagccggctgacccacctgagcctgagccggcgggccagcgagagcagcctgagcagcgagagcagcgagagcagtgatgctggcctgtgcatggacagccccagccccatggacccccacatggccgagcagacctttgagcaggccatccaggccgccagccgcatcatcagaaatgagcagtttgccatccgccgcttccagagcatgcctgtgcggctgctgggccacagccctgtgctgaggaacatcaccaacagccaggccccagatggaagaaggaagtctgaggccggcagcggggccgccagcagcagcggggaggacaaggaaaatgatggctttgtgttcaagatgccctggaagcccacccaccccagcagcacccacgccctggccgagtgggccagccggcgggaggcctttgcccagaggcccagcagcgccccagacctgatgtgcctgagcccagacaggaagatggaggtggaggagctgagccccctggccctgggccgcttcagcctgaccccagctgagggggacacagaagaagatgatggctttgtggacatcctggagagtgacctgaaggatgatgatgctgtgcccccaggcatggagagcctcatcagcgcccccctggtgaagaccctggagaaggaggaggagaaggacctggtgatgtacagcaagtgccagaggctcttccgcagccccagcatgccctgcagcgtcatccggcccatcctgaagaggctggagcggccccaggaccgggacacccctgtgcagaacaagagaagaagatctgtgaccccacctgaggagcagcaggaggccgaggagcccaaggcccgggtgctgcggagcaagagcctgtgccatgatgaaattgagaacctgctggacagcgaccaccgggagctgattggagactacagcaaggccttcctgctgcagacagtggatggcaagcaccaggacctgaagtacatcagccctgagaccatggtggccctgctgaccgggaagttcagcaacatcgtggacaagtttgtgattgtggactgccgctacccctatgaatatgagggcggccacatcaagacagctgtgaacctgcccctggagagagatgctgagagcttcctgctgaagagccccatcgccccctgcagcctggacaagagggtcatcctgatcttccactgtgagttcagcagcgagcggggccccaggatgtgccgcttcatccgggagcgggacagagctgtgaatgactaccccagcctgtactacccagagatgtacatcctgaagggcggctacaaggagttcttcccccagcaccccaacttctgtgagccccaggactaccggcccatgaaccacgaggccttcaaggatgagctgaagaccttccggctgaagaccaggtcctgggccggggagaggagccggcgggagctgtgcagccggctgcaggaccagtag

SEQ ID NO: 106544 - DNA, 1551 bp, Artificial Sequence
  derived and/or modified sequence
atgcacagcgagacccccaagagccaggtgggcaccctgctgttcagaagccgcagcagactgactcacctgtccctcagtcgtcgggcaagtgaatcctcgctgtcctctgagagttcagagagttccgacgctggactctgtatggattctccctcccctatggacccccacatggcagagcagacatttgaacaggccatacaggcagcttccaggatcatcaggaatgagcagttcgctattcgtaggtttcaaagcatgccagttcgcctactgggacattccccagttctaaggaatattactaattctcaggccccggatggtcggaggaaatccgaagctggttccggggcggcatcttcctcaggagaggataaggaaaatgatgggttcgtgttcaagatgccatggaaaccaacacatcccagctctacacacgccctggctgagtgggcgagtagaagagaggcatttgcgcagagaccatcgagcgctcctgacctgatgtgtctgtcacctgaccgtaagatggaagtggaggagctgtcacctctggccctggggaggttttctctcactccagctgaaggtgacactgaagaggacgacggtttcgtggacattctggagtctgaccttaaggatgatgacgcggtgccacccggcatggaatccctaatctctgcacccttagtgaagacactggaaaaggaagaagagaaggacctggttatgtattcaaagtgtcagaggctgttccgcagcccttcaatgccctgttccgtcatcaggcccattctcaaacggctggagagacctcaggatagggacacacccgttcagaataagcggcgccggtccgtgaccccccccgaggaacaacaagaggctgaggaaccaaaggcgcgggtgttgcggtcgaaatccctgtgccacgacgagatcgagaacctactggatagcgaccaccgggaattaatcggcgattactccaaggcttttctgctgcagactgttgacgggaaacatcaagaccttaaatatatctcgcctgaaaccatggtagccttactgactgggaaattttctaacatagtggacaaattcgtgattgtggactgccggtacccctatgagtacgagggaggacacatcaagaccgctgtgaacttaccgctggaaagagacgcagaatccttcctgctgaagtcccccattgcaccctgctctctggataagagagtcatcctgatatttcactgtgagttttcaagtgaacgcggcccacgtatgtgtcgcttcatcagggaacgcgatcgcgccgtcaatgactaccctagcctgtactatcctgagatgtatatcctcaaaggcggatacaaggagttctttccacagcatccgaacttctgcgagccacaggattatcggccaatgaatcatgaagcatttaaggatgagcttaagaccttccgcttaaaaaccagatcttgggctggagagaggagtcggagagaactgtgttctagactgcaggatcaatag

SEQ ID NO: 106545 - DNA, 1551 bp, Artificial Sequence
  derived and/or modified sequence
atgcacagtgaaacccccaagtcacaggttggcacactgctctttaggtcacggagcagacttacccacttgtctctgtctcggagagcaagcgagtccagcctgagttcagagtcttctgagtcatccgacgcagggctgtgcatggattcaccgagccctatggaccctcatatggctgaacagacttttgagcaggccatccaagctgcttccagaataatcaggaacgagcagtttgctatccgcaggttccagtcaatgccagtgagactgctcgggcactcccctgtgctgcgaaatataacgaatagccaggccccagacgggagacgcaaatctgaggctggtagcggggcagcaagctcttctggagaggacaaagagaacgatggatttgtgttcaaaatgccctggaaacccactcacccaagctccacccacgccttagcggagtgggcgagtaggagagaggctttcgcccagaggccatcgagcgctcccgatttaatgtgtctttcaccagatcggaaaatggaagtggaggaattatcgcccttagccttaggcaggttcagtctgacaccagctgagggcgacactgaggaggacgatgggttcgttgacatattggagtccgaccttaaagacgatgacgcagtgccccctggaatggaatccttaatcagcgcacctctcgtgaaaaccctggagaaagaagaagagaaagatctcgtgatgtactccaagtgccaacggttgttcaggagtccatccatgccctgctctgtgatacgcccaatcctcaaacgcctggagcggccacaggatagagacactcccgtacagaacaagcgacggaggagcgtcacaccacccgaggaacagcaggaagctgaagagcctaaagcaagagtgctgcggtctaagtccctgtgccacgatgagatcgaaaatctgcttgacagtgaccatcgcgaactgatcggtgactattctaaagcatttcttcttcagaccgtagacggcaaacaccaggacttgaagtatatctctcccgaaacaatggttgccttgctaaccgggaaattctcaaacattgtggataagttcgtcatcgtggattgccggtacccctacgaatacgaaggcggacacataaagacagctgttaatcttccactcgagagggacgccgagtctttcttactcaaaagccctattgctccttgcagtcttgacaagcgagtgatcctcatcttccactgcgagttctcgtccgagcgagggcctagaatgtgccgcttcatcagagagagagatcgcgctgttaacgattacccctctctctactaccccgaaatgtacatactaaaagggggttataaggaattcttcccacagcaccccaatttctgcgagccccaggattacaggcccatgaatcatgaggcattcaaagacgaattgaaaacgtttcggctgaagacccggtcctgggctggggaacgatcccggcgagagctgtgtagtagactgcaagaccagtag

SEQ ID NO: 106546 - DNA, 2291 bp, Artificial Sequence
  derived and/or modified sequence
gacccggcagcgacgcgggcggggacgcggtgcatcgctactgcgcccggcggacagcgacttgctgctcaaaaagaataagaaccagggtttttgtttgttttttttttttttaattaaggtaaaaataacgcacttttttttttgcggaacctgaaaaattcaagaagttgaaaaacgcttttcacgtcacctggagagatgcacagcgaaaccccaaagagtcaggtagggaccctgctcttccgcagccgcagccgcctgacgcacctatccctgtctcgacgggcatccgaatcctccctgtcgtctgaatcctccgaatcttctgatgcaggtctctgcatggattcccccagccctatggacccccacatggcggagcagacgtttgaacaggccatccaggcagccagccggatcattcgaaacgagcagtttgccatcagacgcttccagtctatgccggtgaggctgctgggccacagccccgtgcttcggaacatcaccaactcccaggcgcccgacggccggaggaagagcgaggcgggcagtggagctgccagcagctctggggaagacaaggagaatgatggatttgtcttcaagatgccatggaagcccacacatcccagctccacccatgctctggcagagtgggccagccgcagggaagcctttgcccagagacccagctcggcccccgacctgatgtgtctcagtcctgaccggaagatggaagtggaggagctcagccccctggccctaggtcgcttctctctgacccctgcagagggggatactgaggaagatgatggatttgtggacatcctagagagtgacttaaaggatgatgatgcagttcccccaggcatggagagtctcattagtgccccactggtcaagaccttggaaaaggaagaggaaaaggacctcgtcatgtacagcaagtgccagcggctcttccgctctccgtccatgccctgcagcgtgatccggcccatcctcaagaggctggagcggccccaggacagggacacgcccgtgcagaataagcggaggcggagcgtgacccctcctgaggagcagcaggaggctgaggaacctaaagcccgcgtcctccgctcaaaatcactgtgtcacgatgagatcgagaacctcctggacagtgaccaccgagagctgattggagattactctaaggccttcctcctacagacagtagacggaaagcaccaagacctcaagtacatctcaccagaaacgatggtggccctattgacgggcaagttcagcaacatcgtggataagtttgtgattgtagactgcagatacccctatgaatatgaaggcgggcacatcaagactgcggtgaacttgcccctggaacgcgacgccgagagcttcctactgaagagccccatcgcgccctgtagcctggacaagagagtcatcctcattttccactgtgaattctcatctgagcgtgggccccgcatgtgccgtttcatcagggaacgagaccgtgctgtcaacgactaccccagcctctactaccctgagatgtatatcctgaaaggcggctacaaggagttcttccctcagcacccgaacttctgtgaaccccaggactaccggcccatgaaccacgaggccttcaaggatgagctaaagaccttccgcctcaagactcgcagctgggctggggagcggagccggcgggagctctgtagccggctgcaggaccagtgaggggcctgcgccagtcctgctacctcccttgcctttcgaggcctgaagccagctgccctatgggcctgccgggctgagggcctgctggaggcctcaggtgctgtccatgggaaagatggtgtgggtgtcctgcctgtctgccccagcccagattcccctgtgtcatcccatcattttccatatcctggtgccccccacccctggaagagcccagtctgttgagttagttaagttgggttaataccagcttaaaggcagtattttgtgtcctccaggagcttcttgtttccttgttagggttaacccttcatcttcctgtgtcctgaaacgctcctttgtgtgtgtgtcagctgaggctgggggagagccgtggtccctgaggatgggtcagagctaaactccttcctggcctgagagtcagctctctgccctgtgtacttcccgggccagggctgcccctaatctctgtaggaaccgtggtatgtctgccatgttgcccctttctcttttcccctttcctgtcccaccatacgagcacc

SEQ ID NO: 106547 - DNA, 1551 bp, Artificial Sequence
  derived and/or modified sequence
atgcacagcgagacccccaagagccaggtgggcaccctgctgttcagaagcagaagcagactgacccacctgagcctgagcagaagagccagcgagagcagcctgagcagcgagagcagcgagagcagcgacgccggcctgtgcatggacagccccagccccatggacccccacatggccgagcagaccttcgagcaggccatccaggccgccagcagaatcatcagaaacgagcagttcgccatcagaagattccagagcatgcccgtgagactgctgggccacagccccgtgctgagaaacatcaccaacagccaggcccccgacggcagaagaaagagcgaggccggcagcggcgccgccagcagcagcggcgaggacaaggagaacgacggcttcgtgttcaagatgccctggaagcccacccaccccagcagcacccacgccctggccgagtgggccagcagaagagaggccttcgcccagagacccagcagcgcccccgacctgatgtgcctgagccccgacagaaagatggaggtggaggagctgagccccctggccctgggcagattcagcctgacccccgccgagggcgacaccgaggaggacgacggcttcgtggacatcctggagagcgacctgaaggacgacgacgccgtgccccccggcatggagagcctgatcagcgcccccctggtgaagaccctggagaaggaggaggagaaggacctggtgatgtacagcaagtgccagagactgttcagaagccccagcatgccctgcagcgtgatcagacccatcctgaagagactggagagaccccaggacagagacacccccgtgcagaacaagagaagaagaagcgtgaccccccccgaggagcagcaggaggccgaggagcccaaggccagagtgctgagaagcaagagcctgtgccacgacgagatcgagaacctgctggacagcgaccacagagagctgatcggcgactacagcaaggccttcctgctgcagaccgtggacggcaagcaccaggacctgaagtacatcagccccgagaccatggtggccctgctgaccggcaagttcagcaacatcgtggacaagttcgtgatcgtggactgcagatacccctacgagtacgagggcggccacatcaagaccgccgtgaacctgcccctggagagagacgccgagagcttcctgctgaagagccccatcgccccctgcagcctggacaagagagtgatcctgatcttccactgcgagttcagcagcgagagaggccccagaatgtgcagattcatcagagagagagacagagccgtgaacgactaccccagcctgtactaccccgagatgtacatcctgaagggcggctacaaggagttcttcccccagcaccccaacttctgcgagccccaggactacagacccatgaaccacgaggccttcaaggacgagctgaagaccttcagactgaagaccagaagctgggccggcgagagaagcagaagagagctgtgcagcagactgcaggaccagtag

SEQ ID NO: 106548 - protein, 489 aa, Artificial Sequence
  derived and/or modified sequence
MHSETPKSQVGTLLFRSRSRLTHLSLSRRASESSLSSESSESSDAGLCMDSPSPMDPHMAEQTFEQAIQAASRIIRNEQFAIRRFQSMPVRLLGHSPVLRNITNSQAPDGRRKSEAGSGAASSSGEDKENDGFVFKMPWKPTHPSSTHALAEWASRREAFAQRPSSAPDLMCLSPDRKMEVEELSPLALGRFSLTPAEGDTEEDDGFVDILESDLKDLVMYSKCQRLFRSPSMPCSVIRPILKRLERPQDRDTPVQNKRRRSVTPPEEQQEAEEPKARVLRSKSLCHDEIENLLDSDHRELIGDYSKAFLLQTVDGKHQDLKYISPETMVALLTGKFSNIVDKFVIVDCRYPYEYEGGHIKTAVNLPLERDAESFLLKSPIAPCSLDKRVILIFHCEFSSERGPRMCRFIRERDRAVNDYPSLYYPEMYILKGGYKEFFPQHPNFCEPQDYRPMNHEAFKDELKTFRLKTRSWAGERSRRELCSRLQDQ

SEQ ID NO: 106549 - DNA, 1470 bp, Artificial Sequence
  derived and/or modified sequence
atgcatagcgagacgccgaaaagccaggtgggaactctgttattccggagccgtagtaggctgacacatttgagcctgagccgcagggcctctgagagtagcttgtcgtcagaatcgtcagagtcttctgatgccggcctgtgcatggattccccatctccgatggatccccacatggctgaacaaacctttgagcaggctattcaggccgcttccaggatcattcgtaatgaacagtttgccattcggcggtttcaaagtatgcccgtccgtcttctgggacattccccagtccttcgcaacataaccaactctcaagccccggacggcaggagaaagagcgaggctggctctggcgctgcctccagctcaggtgaggataaggagaatgatggtttcgtattcaagatgccttggaagccaactcacccaagctccacccatgcattagcggaatgggcatcacgaagagaagcctttgcccaacgtccatcttctgcgcccgatttaatgtgccttagccccgaccgtaagatggaggtcgaagagctgagtcctctcgccctgggccggttttcattgaccccagccgagggggatactgaggaggatgacggatttgtcgatattctcgagagtgaccttaaggacctcgttatgtactctaaatgtcagcgactgttccgctccccgagcatgccttgctcggtgatcagacccatccttaagcggctcgaacggccccaggacagggatactccagtgcagaataagcggaggaggagtgtgaccccccctgaggagcagcaagaagctgaggagcctaaggcgagagtcttgcggtcaaaatctttgtgtcatgatgagatagagaatctgctggattctgatcatagggagctcattggggactactcgaaagcgttcctcctgcaaactgtagatgggaaacaccaggacctcaaatatatctcaccggagacaatggtggccctgcttacaggtaagtttagcaatatcgtggataagtttgttattgtggattgtcggtacccttatgagtacgagggaggacatatcaaaaccgccgtcaacctcccattggagcgggacgcagagtccttcttgctcaagtcccctattgccccgtgtagtctagacaaacgcgtcatcttgattttccattgtgaatttagctcagaacgagggccccgcatgtgcagatttatcagggaaagggacagggccgtgaatgattacccaagtctgtattaccccgaaatgtacattcttaagggaggatacaaggagtttttcccccagcacccaaatttttgcgagcctcaggattatcgacctatgaatcacgaggctttcaaagacgagctgaaaacattcagactgaaaaccaggtcctgggcgggtgaaaggtcacgaagggaactctgttctcggctgcaggaccagtag

SEQ ID NO: 106550 - DNA, 1470 bp, Artificial Sequence
  derived and/or modified sequence
atgcacagcgagacccccaagagccaggtgggcaccctgctcttccgcagccgcagccggctgacccacctgagcctgagccggcgggccagcgagagcagcctgagcagcgagagcagcgagagcagtgatgctggcctgtgcatggacagccccagccccatggacccccacatggccgagcagacctttgagcaggccatccaggccgccagccgcatcatcagaaatgagcagtttgccatccgccgcttccagagcatgcctgtgcggctgctgggccacagccctgtgctgaggaacatcaccaacagccaggccccagatggaagaaggaagtctgaggccggcagcggggccgccagcagcagcggggaggacaaggaaaatgatggctttgtgttcaagatgccctggaagcccacccaccccagcagcacccacgccctggccgagtgggccagccggcgggaggcctttgcccagaggcccagcagcgccccagacctgatgtgcctgagcccagacaggaagatggaggtggaggagctgagccccctggccctgggccgcttcagcctgaccccagctgagggggacacagaagaagatgatggctttgtggacatcctggagagtgacctgaaggacctggtgatgtacagcaagtgccagaggctcttccgcagccccagcatgccctgcagcgtcatccggcccatcctgaagaggctggagcggccccaggaccgggacacccctgtgcagaacaagagaagaagatctgtgaccccacctgaggagcagcaggaggccgaggagcccaaggcccgggtgctgcggagcaagagcctgtgccatgatgaaattgagaacctgctggacagcgaccaccgggagctgattggagactacagcaaggccttcctgctgcagacagtggatggcaagcaccaggacctgaagtacatcagccctgagaccatggtggccctgctgaccgggaagttcagcaacatcgtggacaagtttgtgattgtggactgccgctacccctatgaatatgaaggaggccacatcaagacagctgtgaacctgcccctggagagagatgctgagagcttcctgctgaagagccccatcgccccctgcagcctggacaagagggtcatcctgatcttccactgtgagttcagcagcgagcggggccccaggatgtgccgcttcatccgggagcgggacagagctgtgaatgactaccccagcctgtactacccagagatgtacatcctgaagggcggctacaaggagttcttcccccagcaccccaacttctgtgagccccaggactaccggcccatgaaccacgaggccttcaaggatgagctgaagaccttccggctgaagaccaggtcctgggccggggagaggagcagaagagagctgtgcagccggctgcaggaccagtag

SEQ ID NO: 106551 - DNA, 1470 bp, Artificial Sequence
  derived and/or modified sequence
atgcacagcgagacccccaagagccaggtgggcaccctgctgttccgcagtcgttctcgcctgacccacctgagtctctcaagacgggctagcgaaagcagcctctcttccgaatctagcgagtcttcagacgcaggcctttgtatggacagtcccagccccatggaccctcatatggcagaacagacctttgaacaggcaatccaggccgcttcacggatcatcagaaacgaacagtttgctattcggcggttccagtctatgcctgtgaggttgctgggtcatagccccgtcctacgcaacatcacgaacagccaagcaccagacggcagaagaaaatcagaggccggctcgggagccgccagtagtagtggcgaagataaagaaaatgacggcttcgtttttaagatgccatggaaacctacccacccaagtagtacacacgccctagcagagtgggcttctagaagagaggccttcgcccagagaccgtcttctgcgcccgatctcatgtgtttatcccccgacagaaagatggaggttgaagagttgtccccattggctctcggacggttctccctcacccccgctgagggagatacagaggaggacgacggttttgtcgatatacttgagtccgatctgaaggatctggtgatgtacagcaaatgtcagaggctctttcgcagcccaagcatgccttgctctgttattagacctatactcaaaaggctggagaggccccaagaccgtgacacccctgtccagaacaagcggagaagaagcgttacacccccagaagaacaacaggaggccgaggaacccaaggctcgggtactcagatcgaagtcgctctgtcatgacgagatcgagaatctccttgactccgatcatagggaactgatcggagactattcaaaagcttttttgttgcagacggtcgacgggaagcatcaggatctgaagtacatctcccccgagaccatggtcgcgctgctgaccgggaaattcagcaatatagtagataaattcgtgattgtggactgtaggtacccatacgaatacgagggtggccacataaagactgcagtcaacctgccactggagcgtgacgccgagagctttttactaaaatccccaattgctccctgtagcctggataagcgcgtgatcctgatttttcattgcgaatttagctcagagaggggaccacgcatgtgtagattcattagagagagggacagagccgtgaacgactatcctagcctgtactaccccgagatgtatattctgaagggcggatataaagaatttttcccacagcatccaaacttttgtgaacctcaggattatcgcccaatgaaccacgaagcttttaaagatgaactgaaaacctttaggctcaaaaccagatcatgggccggagaacgttctcgcagagaactgtgtagccgcctccaggatcagtag

SEQ ID NO: 106552 - DNA, 1470 bp, Artificial Sequence
  derived and/or modified sequence
atgcatagcgaaacaccaaaaagccaggtcggcacacttcttttcagatccaggtcaagattgacacacctgtccttgagtcggcgtgcatcagagtccagtctgtccagcgaatctagtgaatcttccgacgccggattgtgcatggattccccaagtccaatggatccacatatggccgaacagaccttcgagcaggcaatccaggctgcttccaggattattcggaatgagcaattcgcaatccggaggttccagtccatgcccgttaggctcctcggccactcccccgttctgagaaacataacaaattcccaagctcctgacgggcgtaggaaatctgaggcgggaagcggcgctgcgagtagttctggtgaggacaaagaaaacgacggttttgtcttcaaaatgccatggaaaccaacccacccatcatcaacccacgccctggccgaatgggccagtagacgggaggccttcgcacaacgaccctctagcgccccagatctgatgtgtctatcaccggatcgaaagatggaggtcgaggaattgtcccctctggctttgggacgattctcactgacgcccgcagaaggtgatacagaagaggacgatggtttcgtggacatcttggagagcgaccttaaagatctggtcatgtacagtaagtgccagaggctgtttaggtccccaagcatgccctgttcagtgataaggccaatcctgaaacgcctcgagcgccctcaggacagggatacgccggtgcagaataagcgcaggcgctcggtcactccccctgaggagcaacaggaagccgaagaaccaaaggccagagttttgagaagcaaaagcttatgtcatgatgagatcgagaatcttctcgatagcgatcatcgtgaactgattggagattattcaaaagcttttctgctgcagactgtggacgggaaacaccaagacctcaagtatataagtcccgagaccatggtcgcattacttacaggcaagttttctaacatcgtggacaaatttgttattgtagactgcaggtacccatacgaatatgaaggcggacacatcaaaaccgctgttaacctgcctcttgaaagggacgccgaaagcttcctgctgaagtccccaattgcaccctgctcccttgataagagagtaatcctaattttccattgtgaattctcaagtgaacgcggtccgcgtatgtgccgatttatcagggagcgagatagagcagtcaacgattatccctccctttattacccggagatgtacattttgaagggcggatataaagaattcttccctcagcatccgaatttttgcgaaccgcaggactaccggccaatgaaccacgaggcctttaaggatgagctcaagacttttcggttgaaaacaaggagttgggcaggggaacggtccagacgggagttatgtagcaggttacaggatcagtag

SEQ ID NO: 106553 - DNA, 1756 bp, Artificial Sequence
  derived and/or modified sequence
gctactgcgcccggcggacagcgacttgctgctcaaaaagaataagaaccagggtttttgtttgttttttttttttttaattaaggtaaaaataacgcacttttttttttgcggaacctgaaaaattcaagaagttgaaaaacgcttttcacgtcacctggagagatgcacagcgaaaccccaaagagtcaggtagggaccctgctcttccgcagccgcagccgcctgacgcacctatccctgtctcgacgggcatccgaatcctccctgtcgtctgaatcctccgaatcttctgatgcaggtctctgcatggattcccccagccctatggacccccacatggcggagcagacgtttgaacaggccatccaggcagccagccggatcattcgaaacgagcagtttgccatcagacgcttccagtctatgccggtgaggctgctgggccacagccccgtgcttcggaacatcaccaactcccaggcgcccgacggccggaggaagagcgaggcgggcagtggagctgccagcagctctggggaagacaaggagaatgatggatttgtcttcaagatgccatggaagcccacacatcccagctccacccatgctctggcagagtgggccagccgcagggaagcctttgcccagagacccagctcggcccccgacctgatgtgtctcagtcctgaccggaagatggaagtggaggagctcagccccctggccctaggtcgcttctctctgacccctgcagagggggatactgaggaagatgatggatttgtggacatcctagagagtgacttaaaggacctcgtcatgtacagcaagtgccagcggctcttccgctctccgtccatgccctgcagcgtgatccggcccatcctcaagaggctggagcggccccaggacagggacacgcccgtgcagaataagcggaggcggagcgtgacccctcctgaggagcagcaggaggctgaggaacctaaagcccgcgtcctccgctcaaaatcactgtgtcacgatgagatcgagaacctcctggacagtgaccaccgagagctgattggagattactctaaggccttcctcctacagacagtagacggaaagcaccaagacctcaagtacatctcaccagaaacgatggtggccctattgacgggcaagttcagcaacatcgtggataagtttgtgattgtagactgcagatacccctatgaatatgaaggcgggcacatcaagactgcggtgaacttgcccctggaacgcgacgccgagagcttcctactgaagagccccatcgcgccctgtagcctggacaagagagtcatcctcattttccactgtgaattctcatctgagcgtgggccccgcatgtgccgtttcatcagggaacgagaccgtgctgtcaacgactaccccagcctctactaccctgagatgtatatcctgaaaggcggctacaaggagttcttccctcagcacccgaacttctgtgaaccccaggactaccggcccatgaaccacgaggccttcaaggatgagctaaagaccttccgcctcaagactcgcagctgggctggggagcggagccggcgggagctctgtagccggctgcaggaccagtgaggggcctgcgccagtcctgctacctcccttgcctttcgaggcctgaagccagctgccctatgggcctgccgggctgagggcctgctggaggcctcaggtgctgtccatgggaaagatggtg

SEQ ID NO: 106554 - DNA, 1470 bp, Artificial Sequence
  derived and/or modified sequence
atgcacagcgagacccccaagagccaggtgggcaccctgctgttcagaagcagaagcagactgacccacctgagcctgagcagaagagccagcgagagcagcctgagcagcgagagcagcgagagcagcgacgccggcctgtgcatggacagccccagccccatggacccccacatggccgagcagaccttcgagcaggccatccaggccgccagcagaatcatcagaaacgagcagttcgccatcagaagattccagagcatgcccgtgagactgctgggccacagccccgtgctgagaaacatcaccaacagccaggcccccgacggcagaagaaagagcgaggccggcagcggcgccgccagcagcagcggcgaggacaaggagaacgacggcttcgtgttcaagatgccctggaagcccacccaccccagcagcacccacgccctggccgagtgggccagcagaagagaggccttcgcccagagacccagcagcgcccccgacctgatgtgcctgagccccgacagaaagatggaggtggaggagctgagccccctggccctgggcagattcagcctgacccccgccgagggcgacaccgaggaggacgacggcttcgtggacatcctggagagcgacctgaaggacctggtgatgtacagcaagtgccagagactgttcagaagccccagcatgccctgcagcgtgatcagacccatcctgaagagactggagagaccccaggacagagacacccccgtgcagaacaagagaagaagaagcgtgaccccccccgaggagcagcaggaggccgaggagcccaaggccagagtgctgagaagcaagagcctgtgccacgacgagatcgagaacctgctggacagcgaccacagagagctgatcggcgactacagcaaggccttcctgctgcagaccgtggacggcaagcaccaggacctgaagtacatcagccccgagaccatggtggccctgctgaccggcaagttcagcaacatcgtggacaagttcgtgatcgtggactgcagatacccctacgagtacgagggcggccacatcaagaccgccgtgaacctgcccctggagagagacgccgagagcttcctgctgaagagccccatcgccccctgcagcctggacaagagagtgatcctgatcttccactgcgagttcagcagcgagagaggccccagaatgtgcagattcatcagagagagagacagagccgtgaacgactaccccagcctgtactaccccgagatgtacatcctgaagggcggctacaaggagttcttcccccagcaccccaacttctgcgagccccaggactacagacccatgaaccacgaggccttcaaggacgagctgaagaccttcagactgaagaccagaagctgggccggcgagagaagcagaagagagctgtgcagcagactgcaggaccagtag

SEQ ID NO: 106555 - protein, 554 aa, Artificial Sequence
  derived and/or modified sequence
MGPLTFRDVKIEFSLEEWQCLDTAQRNLYRDVMLENYRNLVFLVMCSHFAQDVWPEHSIKDSFQKVILRTYGKYGHENLQLRKDHKSVDACKVYKGGYNGLNQCLTTTDSKIFQCDKYVKVFHKFPNVNRNKIRHTGKKPFKCKNRGKSFCMLSQLTQHKKIHTREYSYKCEECGKAFNWSSTLTKHKIIHTGEKPYKCEECGKAFNRSSNLTKHKIIHTGEKPYKCEECGKAFNRSSTLTKHKRIHTEEKPYKCEECGKAFNQFSILNKHKRIHMEDKPYKCEECGKAFRVFSILKKHKIIHTGEKPYKCEECGKAFNQFSNLTKHKIIHTGEKPYKCDECGKAFNQSSTLTKHKRIHTGEKPYKCEECGKAFKQSSTLTEHKIIHTGEKPYKCEKCGKAFSWSSAFTKHKRNHMEDKPYKCEECGKAFSVFSTLTKHKIIHTREKPYKCEECGKAFNQSSIFTKHKIIHTEGKSYKCEKCGNAFNQSSNLTARKIIYTGEKPYKYEECDKAFNKFSTLITHQIIYTGEKPCKHECGRAFNKSSNYTKEKLQT

SEQ ID NO: 106556 - DNA, 582 bp, Artificial Sequence
  derived and/or modified sequence
gaattccgataaaggctcgccgctgtgaccctgttacctgcaagaacttggaggttcacagctaagacgccaggaccccctggaagcctagaaatgggaccactgacatttagggatgtgaaaatagaattctctctagaggaatggcaatgcttggacactgcgccaggaaatttatatagagatgtgatgttagagaactacagaaacctggtcttccttgttatgtgttctcattttgcccaagatgtttggccagagcacagcataaaagattctttccaaaaagtgatactgagaacatatggaaaatatggacatgagaatttacagctaagaaaagaccataaaagtgtggatgcatgtaaggtgtacaaaggaggttataatggacttaaccagtgtttgacaactactgacagcaagatatttcagtgtgataaatatgtgaaagtctttcataaatttccaaatgtaaatagaaataagataagacatactggaaagaaacctttcaaatgtaaaaaccgtggcaaatcattttgcatgctttcacaattaactcaacataagaaaattcat

SEQ ID NO: 106557 - DNA, 1665 bp, Artificial Sequence
  derived and/or modified sequence
atgggccccctgaccttcagagacgtgaagatcgagttcagcctggaggagtggcagtgcctggacaccgcccagagaaacctgtacagagacgtgatgctggagaactacagaaacctggtgttcctggtgatgtgcagccacttcgcccaggacgtgtggcccgagcacagcatcaaggacagcttccagaaggtgatcctgagaacctacggcaagtacggccacgagaacctgcagctgagaaaggaccacaagagcgtggacgcctgcaaggtgtacaagggcggctacaacggcctgaaccagtgcctgaccaccaccgacagcaagatcttccagtgcgacaagtacgtgaaggtgttccacaagttccccaacgtgaacagaaacaagatcagacacaccggcaagaagcccttcaagtgcaagaacagaggcaagagcttctgcatgctgagccagctgacccagcacaagaagatccacaccagagagtacagctacaagtgcgaggagtgcggcaaggccttcaactggagcagcaccctgaccaagcacaagatcatccacaccggcgagaagccctacaagtgcgaggagtgcggcaaggccttcaacagaagcagcaacctgaccaagcacaagatcatccacaccggcgagaagccctacaagtgcgaggagtgcggcaaggccttcaacagaagcagcaccctgaccaagcacaagagaatccacaccgaggagaagccctacaagtgcgaggagtgcggcaaggccttcaaccagttcagcatcctgaacaagcacaagagaatccacatggaggacaagccctacaagtgcgaggagtgcggcaaggccttcagagtgttcagcatcctgaagaagcacaagatcatccacaccggcgagaagccctacaagtgcgaggagtgcggcaaggccttcaaccagttcagcaacctgaccaagcacaagatcatccacaccggcgagaagccctacaagtgcgacgagtgcggcaaggccttcaaccagagcagcaccctgaccaagcacaagagaatccacaccggcgagaagccctacaagtgcgaggagtgcggcaaggccttcaagcagagcagcaccctgaccgagcacaagatcatccacaccggcgagaagccctacaagtgcgagaagtgcggcaaggccttcagctggagcagcgccttcaccaagcacaagagaaaccacatggaggacaagccctacaagtgcgaggagtgcggcaaggccttcagcgtgttcagcaccctgaccaagcacaagatcatccacaccagagagaagccctacaagtgcgaggagtgcggcaaggccttcaaccagagcagcatcttcaccaagcacaagatcatccacaccgagggcaagagctacaagtgcgagaagtgcggcaacgccttcaaccagagcagcaacctgaccgccagaaagatcatctacaccggcgagaagccctacaagtacgaggagtgcgacaaggccttcaacaagttcagcaccctgatcacccaccagatcatctacaccggcgagaagccctgcaagcacgagtgcggcagagccttcaacaagagcagcaactacaccaaggagaagctgcagacctag

SEQ ID NO: 106558 - DNA, 1665 bp, Artificial Sequence
  derived and/or modified sequence
atgggacctttaacgtttcgcgatgtgaagattgagttctccctggaggaatggcagtgtctagacacagcccagcgaaatctgtaccgcgacgtgatgctcgaaaattacaggaacctggtgtttctggtgatgtgttcacattttgcacaggatgtatggccagaacacagcatcaaggattcctttcagaaggtgattcttaggacatatggcaaatacggccatgagaatcttcagctgcggaaggaccacaagtcggtagacgcctgcaaagtgtacaagggcggctacaatggtctaaaccagtgcctgactaccacggacagcaagatttttcagtgcgataagtacgtgaaggtgtttcataagttccctaatgtcaaccgcaataaaattcgtcatacgggaaagaaacccttcaagtgcaagaatcgcggcaagagtttttgtatgttgagccaactcacccagcacaagaaaatacacactagagagtactcatacaagtgtgaagaatgcgggaaggctttcaactggagttccacattaaccaagcacaaaataattcatactggcgaaaagccttacaaatgtgaggagtgcggaaaagcattcaaccgatcctctaacctgacgaaacataagatcattcacaccggggaaaagccatacaagtgcgaggaatgcgggaaagcattcaatagaagttctactcttactaaacataagcgaattcacaccgaagagaagccatataaatgcgaagaatgcggaaaggctttcaaccagttttcaattttgaataagcacaagcgtattcatatggaggacaagccctacaaatgtgaggagtgcgggaaggcttttcgcgtcttcagcatccttaagaagcataaaataattcacacaggagagaagccctacaagtgcgaggaatgtggtaaggcatttaatcagttcagcaacctaacaaaacacaagatcatccatactggtgagaagccctacaaatgtgatgaatgtggcaaggcatttaatcagtcttcaaccctaacaaagcataaacggattcatacaggcgaaaagccctacaagtgtgaagaatgcggcaaggctttcaagcaatcatcaaccttgacagaacataaaattattcataccggagagaagccgtacaagtgtgagaagtgcggcaaagcgttctcttggtcttctgcctttacgaagcacaagcgcaatcatatggaggataagccctataagtgtgaggaatgcggaaaagcattctccgtgttcagcactcttacaaagcacaaaattatccacacccgtgagaagccctacaagtgcgaggagtgcggaaaagcatttaaccaatcctctatctttaccaagcacaaaattatccacactgaaggcaagagctacaaatgtgagaagtgtggtaacgcattcaaccaaagcagcaacctaacagcacgaaagattatctataccggtgaaaagccatataaatacgaggaatgtgataaggcatttaataaattcagtaccctgattacgcatcagattatatatactggggaaaagccatgtaaacatgagtgcggtagggcttttaacaaatccagcaactatactaaagagaaactgcagacttag

SEQ ID NO: 106559 - DNA, 1665 bp, Artificial Sequence
  derived and/or modified sequence
atgggccccctgaccttcagagatgtgaagattgagttcagcctggaggagtggcagtgcctggacacagcccagaggaacctgtacagagatgtgatgctggagaactacagaaacctggtgttcctggtgatgtgcagccactttgcccaggatgtgtggccagagcacagcatcaaggacagcttccagaaggtgatcctgcggacctacggcaagtatggccacgagaacctgcagctgaggaaggaccacaagtctgtggatgcctgcaaggtgtacaagggcggctacaacggcctgaaccagtgcctgaccaccacagacagcaagatcttccagtgtgacaagtatgtgaaggtgttccacaagttccccaacgtgaacagaaacaagatccgccacacaggcaagaagcccttcaagtgcaagaacagaggcaagagcttctgcatgctgagccagctgacccagcacaagaagatccacacccgggagtacagctacaagtgtgaagaatgtgggaaggccttcaactggagcagcaccctgaccaagcacaagatcatccacactggagagaagccctacaagtgtgaagaatgtgggaaggccttcaacagaagcagcaacctgaccaagcacaagatcatccacactggagagaagccctacaagtgtgaagaatgtgggaaggccttcaacagaagcagcaccctgaccaagcacaagaggatccacacagaggagaagccctacaagtgtgaagaatgtgggaaggccttcaaccagttcagcatcctgaacaagcacaagaggatccacatggaggacaagccctacaagtgtgaagaatgtgggaaggccttccgggtcttcagcatcctgaagaagcacaagatcatccacactggagagaagccctacaagtgtgaagaatgtgggaaggccttcaaccagttcagcaacctgaccaagcacaagatcatccacactggagagaagccctacaagtgtgatgaatgtgggaaggccttcaaccagagcagcaccctgaccaagcacaagaggatccacactggagagaagccctacaagtgtgaagaatgtgggaaggccttcaagcagagcagcaccctgacagagcacaagatcatccacactggagagaagccctacaagtgtgagaagtgtgggaaggccttctcctggagcagcgccttcaccaagcacaagaggaaccacatggaggacaagccctacaagtgtgaagaatgtgggaaggccttctctgtgttcagcaccctgaccaagcacaagatcatccacacccgggagaagccctacaagtgtgaagaatgtgggaaggccttcaaccagagcagcatcttcaccaagcacaagatcatccacacagagggcaagagctacaagtgtgagaagtgtggaaatgccttcaaccagagcagcaacctgacagccaggaagatcatctacaccggggagaagccctacaagtatgaagaatgtgacaaggccttcaacaagttcagcaccctcatcacccaccagatcatctacaccggggagaagccctgcaagcatgaatgtggccgggccttcaacaagagcagcaactacaccaaggagaagctgcagacctag

SEQ ID NO: 106560 - DNA, 1665 bp, Artificial Sequence
  derived and/or modified sequence
atgggccccctgaccttccgggacgtgaagatcgagttcagcctggaagagtggcaatgtcttgacacagcccaaaggaacctttatcgggatgttatgctcgagaactacagaaacctcgtttttctggtcatgtgcagccactttgcgcaggatgtttggcccgaacactcgattaaggacagttttcagaaagtgatcctcagaacatacggcaaatatggtcatgagaatctgcagttacggaaagaccataagtccgtggacgcctgtaaggtatacaagggtgggtataatggtctcaaccaatgtctaaccacgactgattccaagatttttcaatgtgacaaatatgttaaagtgttccataagtttcccaatgtgaacagaaataagatccgccacacaggcaagaaaccttttaagtgcaaaaaccgaggcaagagtttctgcatgctatcccaattgacccagcacaaaaaaatacatactagggaatattcttataagtgtgaggagtgcggtaaggcatttaattggtcatccaccctgacgaagcataaaattattcacactggcgagaaaccatacaaatgcgaagaatgcggcaaagctttcaacagatcctccaacctgaccaagcacaagatcatccacacaggagagaagccctacaaatgtgaagaatgtgggaaggcattcaaccggagttctacattgaccaagcataaacgcatccatacagaggagaagccatataaatgtgaggagtgcggaaaggctttcaatcagttctccattctcaacaaacacaagcggatccatatggaggataaaccttacaagtgtgaagagtgcggcaaggcttttagagtgttttccatcctcaagaaacacaaaatcatccacacaggtgagaagccatataagtgtgaagagtgtggaaaggcttttaaccagtttagtaacctcaccaagcacaagataatacatacaggcgagaagccatacaagtgtgatgaatgcgggaaagccttcaatcagtcctcaaccctgactaagcacaagaggattcacaccggcgagaagccctataagtgcgaggaatgcgggaaagctttcaagcagtcttcaacactgacagaacataaaatcatccatacaggtgagaagccttacaaatgcgagaagtgcggcaaggccttcagctggtcctccgcattcactaaacataaacggaatcatatggaagataaaccatacaagtgtgaggagtgtggtaaagctttctcagtgttctccactctgaccaagcataagatcatccacacccgcgagaaaccatataagtgcgaagaatgtggcaaagccttcaaccagagttcgatatttactaaacataagatcattcatacggagggaaagtcctacaaatgcgagaagtgcgggaatgcttttaatcagtcttccaacttgacggcacggaaaatcatttacactggagagaagccatacaagtatgaggaatgcgacaaagcctttaacaagttctccacactgattacacatcagattatttacactggagagaaaccgtgcaagcatgagtgcggccgggcgttcaataagtcatccaattatacaaaggaaaagctccagacgtag

SEQ ID NO: 106561 - DNA, 1665 bp, Artificial Sequence
  derived and/or modified sequence
atgggacccttgacatttcgggatgtaaagattgaatttagtctggaggagtggcagtgtctggatacagcacagcggaacctgtacagagacgtgatgctggagaattatcgcaatttggtattcctggtcatgtgcagccatttcgctcaggatgtttggcctgagcattcgatcaaggattcttttcagaaggtaatcttgagaacctacgggaagtacggacacgaaaacctgcagctcaggaaagaccacaaaagcgttgacgcctgcaaggtttacaagggcggatacaacggactcaatcagtgtttgacaaccaccgatagcaagatcttccagtgcgataagtatgtcaaggtgttccacaaatttcccaacgtgaacaggaacaagatccgccacactgggaagaaacctttcaaatgcaagaaccggggaaaatctttttgcatgctgagtcagttaacacagcacaaaaagatccacactagagagtacagttataaatgcgaggagtgcggcaaggccttcaattggtcttcaaccctcacgaagcataagattattcatactggagaaaagccctataaatgcgaagagtgcgggaaggctttcaacaggagttctaacctgactaagcacaaaatcatccacaccggagagaagccatacaagtgcgaggaatgcgggaaagcttttaataggtcctcaacgctgactaagcataagaggatccacaccgaggaaaagccctacaaatgcgaggagtgtgggaaggcttttaaccagttcagcatacttaataagcacaaacgtattcatatggaggacaaaccatataagtgcgaagaatgtggaaaggccttcagggtcttttctatattaaagaaacataaaatcatacacaccggggagaagccttataagtgcgaggagtgtggtaaggcatttaaccagttctcaaatttgacgaaacacaagattatccacacaggagaaaagccatacaagtgcgacgagtgcggaaaggcctttaaccaatcttcaacactcacgaaacataaacgaatccacactggcgagaaaccttacaagtgtgaagaatgcggtaaagcatttaaacagtccagcacgctgacggagcataaaataatccacactggggagaaaccttacaagtgcgaaaagtgtgggaaggctttttcttggtcatcagctttcacgaagcataaacgaaaccacatggaggataagccttataagtgcgaagagtgcggtaaggcttttagtgtgttcagtacattgaccaagcacaagatcattcacactagggagaaaccatacaagtgtgaggaatgtggaaaggcttttaatcagagctctatctttaccaaacacaaaatcattcacactgaaggaaaaagttataagtgtgagaaatgcggtaacgccttcaatcagtccagcaatctcaccgcccgaaaaatcatatacaccggtgagaaaccttacaagtacgaggaatgtgacaaagcattcaataaattttctaccttgataactcaccagatcatctacacgggcgaaaagccttgtaagcatgagtgcgggagagcctttaacaagtctagtaattacactaaggaaaagctgcagacctag

SEQ ID NO: 106562 - DNA, 3017 bp, Artificial Sequence
  derived and/or modified sequence
gtctctcgctgcagccggcgctccacgtctagtcttcactgctctgcgtcctgtgctgataaaggctcgccgctgtgaccctgttacctgcaagaacttggaggttcacagctaagacgccaggaccccctggaagcctagaaatgggaccactgacatttagggatgtgaaaatagaattctctctagaggaatggcaatgcctggacactgcgcagcggaatttatatagagatgtgatgttagagaactacagaaacctggtcttccttgttatgtgttctcattttgcccaagatgtttggccagagcacagcataaaagattctttccaaaaagtgatactgagaacatatggaaaatatggacatgagaatttacagctaagaaaagaccataaaagtgtggatgcatgtaaggtgtacaaaggaggttataatggacttaaccagtgtttgacaactactgacagcaagatatttcagtgtgataaatatgtgaaagtctttcataaatttccaaatgtaaatagaaataagataagacatactggaaagaaacctttcaaatgtaaaaaccgtggcaaatcattttgcatgctttcacaattaactcaacataagaaaattcatactagagagtattcttacaaatgtgaagaatgtggtaaagcctttaactggtcctcaacccttactaaacataagataattcatactggagaaaaaccctacaaatgtgaagaatgtggcaaagcttttaaccggtcctcaaatcttactaaacataaaataattcatactggagagaaaccctacaaatgtgaagaatgtggcaaagcttttaaccggtcctcaacccttactaaacataaaagaattcatacagaagagaaaccctacaaatgtgaagaatgtggcaaggcctttaaccagttctcgattcttaataaacataagagaattcatatggaagataaaccctacaaatgtgaagaatgtggcaaagcctttagagtattctcaattcttaaaaaacataagataatccatactggggaaaaaccatacaaatgtgaagaatgtggcaaagcctttaaccagttctcaaaccttactaaacataagataattcatactggagagaaaccctacaaatgtgatgaatgtggcaaagcctttaaccagtcctcaacccttactaaacataaaagaattcatacgggagaaaaaccctacaaatgtgaagaatgtggcaaagcttttaaacagtcctcaacccttactgaacataagataattcatactggagagaaaccctacaaatgtgaaaaatgtggcaaggcctttagctggtcctcagcttttactaaacataagagaaatcatatggaagataaaccctacaaatgtgaagaatgtggcaaagcctttagtgtattctcaacccttactaaacataaaataattcatactagagaaaaaccctacaaatgtgaagaatgtggcaaagcctttaaccagtcctcaatttttactaaacataagataattcacactgaagggaaatcctacaaatgtgaaaaatgtggcaatgcttttaaccagtcctcaaaccttactgcacgtaagataatttatactggagagaaaccctacaaatatgaagaatgtgacaaagcctttaacaagttctcaacccttattacacatcagataatttatactggagagaaaccctgcaaacatgaatgtggcagagcctttaacaaatcctcaaattatactaaagagaaactacaaacctgaaagatgtgacaatgattttcactacacctcaaacttttctaaacataaaccatattggtgccctagaaatgtgaggaatatgacaaggactttaaatggttgtcacgcttgattgtaggtaagataatttatattggagaaaaatcctccaagtatgaagaatgtggcaaacttttaaccaatcctcacaccttattgcacaggaaagcatttatacttgagaaaaattgtataaagaatatggaaaagccatttatatctgctcacatgtaaaaacatcagttcatacttaataaaatgcaattaccgtcaaatctttcagaaaatataagcctttaatacgaggaagagtattcttaagatgaacattacaaatagaaagagggttgtagtacctttagttttatgatagatcttattgtacacattttgtaccagaggaaaaccctaaagcattagttgctcaaactttgttcgacatcagggaatttgtattggagaaaaaccctgcaaatgtaataaatatggaaaaacattttttcaaaaactacagcttggaaaacatcagagagttcatactaaaatatatttttgcagatgcagtaaatatgaaaaatatttaatcccaaattaagtctatgtaaatatcagaattcacagtagaaatcataaggcataaggcactgatacttcagacattacactaaattagagtgttgagtataggagatccaaaactaaaattgttaggtaagttatttatatataactttaaaagaagtagaagattttttggagatttataattacattcaaagtatacttttttcttgaaaaaaattacagattttttgaaaagcaattgatgtaatttaactctcaaattcatgtttttcttcattcctattatattcacatgtgaaagcaagtgatctgttgttgctgaatcagagatatgagagattcttttttataggtgggcattatttatgcccctttctgtggaagagtaagaaaattaaaatacaagatgcatgaggaaaatgtagagatgctctttgtgattaacttagaatattaagtgctacttgaggtacatgttcagactaacattcttttgcagtatagtgagaaaaaaacattttaaaattaattatcattttgttgattgtgcttttatgtaataaaatgcagtactttaaaacattt

SEQ ID NO: 106563 - protein, 443 aa, Artificial Sequence
  derived and/or modified sequence
MSTELFSSTREEGSSGSGPSFRSNQRKMLNLLLERDTSFTVCPDVPRTPVGKFLGDSANLSILSGGTPKRCLDLSNLSSGEITATQLTTSADLDETGHLDSSGLQEVHLAGMNHDQHLMKCSPDNGNLVDSEMKYLGSPITTVPKLDKNPNLGEDQAEEISDELMEFSLKDQEAKVSRSGLYRSPSMPENLNRPRLKQVEKFKDNTIPDKVKKKYFSGQGKLRKGLCLKKTVSLCDITITQMLEEDSNQGHLIGDFSKVCALPTVSGKHQDLKYVNPETVAALLSGKFQGLIEKFYVIDCRYPYEYLGGHIQGALNLYSQEELFNFFLKKPIVPLDTQKRIIIVFHCEFSSERGPRMCRCLREEDRSLNQYPALYYPELYILKGGYRDFFPEYMELCEPQSYCPMHHQDHKTELLRCRSQSKVQEGERQLREQIALLVKDMSP

SEQ ID NO: 106564 - protein, 249 aa, Artificial Sequence
  derived and/or modified sequence
MSTELFSSTREEGSSGSGPSFRSNQRKMLNLLLERDTSFTVCPDVPRTPVGKFLGDSANLSILSGGTPKRCLDLSNLSSGEITATQLTTSADLDETGHLDSSGLQEVHLAGMNHDQHLMKCSPAQLLCSTPNGLDRGHRKRDAMCSSSANKENDNGNLVDSEMKYLGSPITTVPKLDKNPNLGEDQAEEISDELMEFSLKDQEAKVSRSGLYRSPSMPENLNRPRLKQVEKFKDNTIPDKVKKKYFSGQ

SEQ ID NO: 106565 - DNA, 1332 bp, Artificial Sequence
  derived and/or modified sequence
atgagcaccgagctgttcagcagcaccagagaggagggcagcagcggcagcggccccagcttcagaagcaaccagagaaagatgctgaacctgctgctggagagagacaccagcttcaccgtgtgccccgacgtgcccagaacccccgtgggcaagttcctgggcgacagcgccaacctgagcatcctgagcggcggcacccccaagagatgcctggacctgagcaacctgagcagcggcgagatcaccgccacccagctgaccaccagcgccgacctggacgagaccggccacctggacagcagcggcctgcaggaggtgcacctggccggcatgaaccacgaccagcacctgatgaagtgcagccccgacaacggcaacctggtggacagcgagatgaagtacctgggcagccccatcaccaccgtgcccaagctggacaagaaccccaacctgggcgaggaccaggccgaggagatcagcgacgagctgatggagttcagcctgaaggaccaggaggccaaggtgagcagaagcggcctgtacagaagccccagcatgcccgagaacctgaacagacccagactgaagcaggtggagaagttcaaggacaacaccatccccgacaaggtgaagaagaagtacttcagcggccagggcaagctgagaaagggcctgtgcctgaagaagaccgtgagcctgtgcgacatcaccatcacccagatgctggaggaggacagcaaccagggccacctgatcggcgacttcagcaaggtgtgcgccctgcccaccgtgagcggcaagcaccaggacctgaagtacgtgaaccccgagaccgtggccgccctgctgagcggcaagttccagggcctgatcgagaagttctacgtgatcgactgcagatacccctacgagtacctgggcggccacatccagggcgccctgaacctgtacagccaggaggagctgttcaacttcttcctgaagaagcccatcgtgcccctggacacccagaagagaatcatcatcgtgttccactgcgagttcagcagcgagagaggccccagaatgtgcagatgcctgagagaggaggacagaagcctgaaccagtaccccgccctgtactaccccgagctgtacatcctgaagggcggctacagagacttcttccccgagtacatggagctgtgcgagccccagagctactgccccatgcaccaccaggaccacaagaccgagctgctgagatgcagaagccagagcaaggtgcaggagggcgagagacagctgagagagcagatcgccctgctggtgaaggacatgagcccctag

SEQ ID NO: 106566 - DNA, 1293 bp, Artificial Sequence
  derived and/or modified sequence
atgagcaccgagctgttcagcagcaccagagaggagggcagcagcggcagcggccccagcttcagaagcaaccagagaaagatgctgaacctgctgctggagagagacaccagcttcaccgtgtgccccgacgtgcccagaacccccgtgggcaagttcctgggcgacagcgccaacctgagcatcctgagcggcagccccggcttcttcagaaccagcggcagcgccttcagctgggacgcccagctgctgtgcagcacccccaacggcctggacagaggccacagaaagagagacgccatgtgcagcagcagcgccaacaaggagaacgacaacggcaacctggtggacagcgagatgaagtacctgggcagccccatcaccaccgtgcccaagctggacaagaaccccaacctgggcgaggaccaggccgaggagatcagcgacgagctgatggagttcagcctgaaggaccaggaggccaaggtgagcagaagcggcctgtacagaagccccagcatgcccgagaacctgaacagacccagactgaagcaggtggagaagttcaaggacaacaccatccccgacaaggtgaagaagaagtacttcagcggccagggcaagctgagaaagggcctgtgcctgaagaagaccgtgagcctgtgcgacatcaccatcacccagatgctggaggaggacagcaaccagggccacctgatcggcgacttcagcaaggtgtgcgccctgcccaccgtgagcggcaagcaccaggacctgaagtacgtgaaccccgagaccgtggccgccctgctgagcggcaagttccagggcctgatcgagaagttctacgtgatcgactgcagatacccctacgagtacctgggcggccacatccagggcgccctgaacctgtacagccaggaggagctgttcaacttcttcctgaagaagcccatcgtgcccctggacacccagaagagaatcatcatcgtgttccactgcgagttcagcagcgagagaggccccagaatgtgcagatgcctgagagaggaggacagaagcctgaaccagtaccccgccctgtactaccccgagctgtacatcctgaagggcggctacagagacttcttccccgagtacatggagctgtgcgagccccagagctactgccccatgcaccaccaggaccacaagaccgagctgctgagatgcagaagccagagcaaggtgcaggagggcgagagacagctgagagagcagatcgccctgctggtgaaggacatgagcccctag

SEQ ID NO: 106567 - DNA, 750 bp, Artificial Sequence
  derived and/or modified sequence
atgagcaccgagctgttcagcagcaccagagaggagggcagcagcggcagcggccccagcttcagaagcaaccagagaaagatgctgaacctgctgctggagagagacaccagcttcaccgtgtgccccgacgtgcccagaacccccgtgggcaagttcctgggcgacagcgccaacctgagcatcctgagcggcggcacccccaagagatgcctggacctgagcaacctgagcagcggcgagatcaccgccacccagctgaccaccagcgccgacctggacgagaccggccacctggacagcagcggcctgcaggaggtgcacctggccggcatgaaccacgaccagcacctgatgaagtgcagccccgcccagctgctgtgcagcacccccaacggcctggacagaggccacagaaagagagacgccatgtgcagcagcagcgccaacaaggagaacgacaacggcaacctggtggacagcgagatgaagtacctgggcagccccatcaccaccgtgcccaagctggacaagaaccccaacctgggcgaggaccaggccgaggagatcagcgacgagctgatggagttcagcctgaaggaccaggaggccaaggtgagcagaagcggcctgtacagaagccccagcatgcccgagaacctgaacagacccagactgaagcaggtggagaagttcaaggacaacaccatccccgacaaggtgaagaagaagtacttcagcggccagtag

SEQ ID NO: 106568 - DNA, 1332 bp, Artificial Sequence
  derived and/or modified sequence
atgtctactgaactcttctcctctacccgggaagaggggtcctctggtagtggtccctctttccggagcaaccagcggaaaatgctcaatctgcttctggagcgggacaccagcttcactgtgtgtcccgacgtgccacggaccccagtcggcaagttccttggcgactctgccaatcttagtatactgtctggcgggactccaaaacgttgtctcgatcttagcaatctgagctccggagagatcactgccacccaattgactacgagtgccgatcttgatgagactgggcacctggactccagtggattgcaggaagtgcacctcgccggcatgaatcatgatcagcatctgatgaagtgcagccctgataatggcaatctggttgattcggagatgaagtatttaggctcacccattaccacagtccccaagctggacaagaaccctaacctgggtgaggaccaggccgaggaaatcagcgacgagctaatggaatttagcctgaaagaccaggaagccaaggtgtcacgtagcggcttgtatcggagtcctagtatgcccgaaaacttgaatcgccctcggctcaaacaggtggaaaagtttaaagataatacgatacccgacaaagtcaaaaagaagtacttcagtggacagggaaaactgcggaagggcctctgccttaagaagacagtgtctctgtgcgacatcaccattacccagatgctggaagaggactcaaaccagggccacctcattggagatttttccaaagtgtgcgccttaccaaccgtgtccggcaaacaccaagaccttaagtacgtgaacccagaaactgtggcagcactcctgagtggtaaattccagggtcttattgaaaagttttacgtgatcgactgcagatacccgtatgagtaccttggaggccacattcaaggcgctttaaatctgtatagccaagaagagttattcaatttcttcttgaaaaagcccatcgtcccattagatacccagaagaggattatcattgtatttcattgcgaattctctagcgaacgagggccccggatgtgccgctgtcttagagaggaagacaggagcttgaaccaataccccgcactctattatcccgagttatatatcctgaagggcgggtaccgagatttcttcccagagtacatggagctgtgtgagccgcaatcctactgcccaatgcatcatcaggaccataagaccgaactgctccgctgcagaagtcaatctaaagttcaggagggtgaacgtcaacttagagagcagatagcgcttcttgtgaaagacatgagtccatag

SEQ ID NO: 106569 - DNA, 1293 bp, Artificial Sequence
  derived and/or modified sequence
atgtccaccgagctcttctcctcgactcgggaagaaggatctagtggatccggaccatccttccgttccaatcagagaaagatgctcaacctcctactggagagggacaccagtttcaccgtgtgccccgatgtgccccgtacccctgtgggcaaatttttaggggattcagccaatctgtccatactgagcggcagccccgggttcttcaggacctccggcagcgcattctcttgggacgctcagttgctttgttctactccaaatgggttagaccgcgggcatagaaaacgggacgcaatgtgctcctcctctgctaataaggagaatgacaacggaaacctggtcgatagcgagatgaaataccttggctcccctatcaccaccgtgccgaagctagacaagaatccgaacctcggagaggatcaggcagaggagatcagcgacgagctgatggaattcagcctgaaagatcaggaggcaaaagtttcacgcagcggtctatacagaagcccaagtatgccagagaacttgaatcgaccccggctgaagcaggtggagaagtttaaagataacacaattcccgataaggtcaaaaaaaaatatttttctgggcaggggaagctgcgaaagggactgtgcctgaagaaaacggtgtctctctgtgacatcacgattacccagatgctggaagaagactctaatcaaggacatcttatcggagatttctctaaggtgtgcgcgcttcccactgtttccggcaagcatcaggatctgaagtacgtcaaccctgaaaccgtggcggcactgcttagcggtaagtttcaggggctgattgaaaaattctatgtcatagattgtcgctatccatatgagtatttgggcgggcatatccaaggcgctctaaacctctatagtcaggaggagcttttcaacttcttcttgaaaaagcccatcgttccactcgatacccagaagcgcataatcatagtgtttcactgcgaattttcatctgagcgcggccccagaatgtgccgctgcctacgcgaggaagaccgttctctgaatcagtatcccgctctctactaccctgagctgtatatcctcaaaggtggctatagggatttcttccctgaatatatggagctgtgtgaaccgcaatcttactgccccatgcatcaccaagatcacaagacagaactgctgcgctgccgctctcagtctaaggtccaggaaggggagaggcagttacgagaacagatagccctcttggtgaaggacatgtctccttag

SEQ ID NO: 106570 - DNA, 750 bp, Artificial Sequence
  derived and/or modified sequence
atgtctacagaacttttctcctcaacacgagaggagggatcaagcggatccggcccatcgtttcgttccaatcaacgaaaaatgcttaatctactcctagaacgtgatactagcttcactgtgtgccccgacgtgccaaggacacctgtgggaaagtttctcggcgattcagctaacttatcgatcctgtccggaggaaccccaaaaagatgcctcgacctgtctaacctgtctagtggtgaaataaccgccacccagctcacgacgagcgcggacttagacgagaccggacacttggattctagtggccttcaagaagttcacttagccggtatgaatcacgaccagcatttaatgaagtgctctccagctcaactactttgttcaaccccaaatggactcgatagggggcaccggaaacgtgatgctatgtgctcttccagcgccaataaggaaaacgataacggtaatctggtagattcggagatgaagtacctggggagccccatcactacagttccaaaattggacaaaaacccaaatctaggggaagaccaggctgaggagatcagtgacgagcttatggaattcagccttaaagaccaggaagcgaaagtttcaaggtcaggactgtacagatctccaagtatgcctgaaaaccttaatcgtccccgcctgaaacaggtggagaagtttaaggacaacaccatccctgacaaggtgaaaaagaagtacttctccgggcagtag

SEQ ID NO: 106571 - DNA, 1332 bp, Artificial Sequence
  derived and/or modified sequence
atgagcacagagctgttcagcagcacccgggaggagggcagcagcggcagcggccccagcttccgcagcaaccagaggaagatgctgaacctgctgctggagcgggacaccagcttcaccgtgtgcccagatgtgcccaggacccctgtgggcaagttcctgggggacagcgccaacctgagcatcctgagcggcggcacccccaagcgctgcctggacctgagcaacctgagcagtggagagatcacagccacccagctgaccaccagcgctgacctggatgagaccggccacctggacagcagcggcctgcaggaggtgcacctggccggcatgaaccacgaccagcacctgatgaagtgcagcccagacaatggaaacctggtggacagcgagatgaagtacctgggcagccccatcaccaccgtgcccaagctggacaagaaccccaacctgggggaggaccaggccgaggagatcagtgatgagctgatggagttcagcctgaaggaccaggaggccaaggtgagccgcagcggcctgtaccgcagccccagcatgcctgagaacctgaaccggccccggctgaagcaggtggagaagttcaaggacaacaccatcccagacaaggtgaagaagaagtacttcagcggccagggcaagctgaggaagggcctgtgcctgaagaagacagtgtccctgtgtgacatcaccatcacccagatgctggaggaggacagcaaccagggccacctgattggagacttcagcaaggtgtgtgccctgcccaccgtgtctgggaagcaccaggacctgaagtatgtgaaccctgagaccgtggccgccctgctgagcggcaagttccagggcctcatcgagaagttctacgtgattgactgccgctacccctatgagtacctgggcggccacatccagggcgccctgaacctgtacagccaggaggagctgttcaacttcttcctgaagaagcccatcgtgcccctggacacccagaagaggatcatcatcgtgttccactgtgagttcagcagcgagcggggccccaggatgtgccgctgcctgcgggaggaggacaggagcctgaaccagtacccagccctgtactacccagagctgtacatcctgaagggcggctacagagacttcttccctgagtacatggagctgtgtgagccccagagctactgccccatgcaccaccaggaccacaagacagagctgctgcgctgccgcagccagagcaaggtgcaggagggggagcggcagctgcgggagcagatcgccctgctggtgaaggacatgagcccctag

SEQ ID NO: 106572 - DNA, 1293 bp, Artificial Sequence
  derived and/or modified sequence
atgagcacagagctgttcagcagcacccgggaggagggcagcagcggcagcggccccagcttccgcagcaaccagaggaagatgctgaacctgctgctggagcgggacaccagcttcaccgtgtgcccagatgtgcccaggacccctgtgggcaagttcctgggggacagcgccaacctgagcatcctgagcggcagccctggcttcttccgcaccagcggcagcgccttctcctgggatgcccagctgctgtgcagcaccccaaatggcctggaccggggccacaggaagagagatgccatgtgcagcagcagcgccaacaaggaaaatgacaatggaaacctggtggacagcgagatgaagtacctgggcagccccatcaccaccgtgcccaagctggacaagaaccccaacctgggggaggaccaggccgaggagatcagtgatgagctgatggagttcagcctgaaggaccaggaggccaaggtgagccgcagcggcctgtaccgcagccccagcatgcctgagaacctgaaccggccccggctgaagcaggtggagaagttcaaggacaacaccatcccagacaaggtgaagaagaagtacttcagcggccagggcaagctgaggaagggcctgtgcctgaagaagacagtgtccctgtgtgacatcaccatcacccagatgctggaggaggacagcaaccagggccacctgattggagacttcagcaaggtgtgtgccctgcccaccgtgtctgggaagcaccaggacctgaagtatgtgaaccctgagaccgtggccgccctgctgagcggcaagttccagggcctgattgagaagttctacgtgattgactgccgctacccctatgagtacctgggcggccacatccagggcgccctgaacctgtacagccaggaggagctgttcaacttcttcctgaagaagcccatcgtgcccctggacacccagaagaggatcatcatcgtgttccactgtgagttcagcagcgagcggggccccaggatgtgccgctgcctgcgggaggaggacaggagcctgaaccagtacccagccctgtactacccagagctgtacatcctgaagggcggctacagagacttcttccctgagtacatggagctgtgtgagccccagagctactgccccatgcaccaccaggaccacaagacagagctgctgcgctgccgcagccagagcaaggtgcaggagggggagcggcagctgcgggagcagatcgccctgctggtgaaggacatgagcccctag

SEQ ID NO: 106573 - DNA, 750 bp, Artificial Sequence
  derived and/or modified sequence
atgagcacagagctgttcagcagcacccgggaggagggcagcagcggcagcggccccagcttccgcagcaaccagaggaagatgctgaacctgctgctggagcgggacaccagcttcaccgtgtgcccagatgtgcccaggacccctgtgggcaagttcctgggggacagcgccaacctgagcatcctgagcggcggcacccccaagcgctgcctggacctgagcaacctgagcagtggagagatcacagccacccagctgaccaccagcgctgacctggatgagaccggccacctggacagcagcggcctgcaggaggtgcacctggccggcatgaaccacgaccagcacctgatgaagtgcagccctgcccagctgctgtgcagcacccccaacggcctggaccggggccacaggaagagagatgccatgtgcagcagcagcgccaacaaggaaaatgacaatggaaacctggtggacagcgagatgaagtacctgggcagccccatcaccaccgtgcccaagctggacaagaaccccaacctgggggaggaccaggccgaggagatcagtgatgagctgatggagttcagcctgaaggaccaggaggccaaggtgagccgcagcggcctgtaccgcagccccagcatgcctgagaacctgaaccggccccggctgaagcaggtggagaagttcaaggacaacaccatcccagacaaggtgaagaagaagtacttcagcggccagtag

SEQ ID NO: 106574 - DNA, 1332 bp, Artificial Sequence
  derived and/or modified sequence
atgagcaccgagctgttcagcagcacccgggaggagggcagcagcggatccggcccctctttcagatcgaatcagaggaaaatgctcaacctccttcttgagcgggacaccagcttcacagtgtgtccagacgttccacgcaccccagtggggaagtttctgggagatagtgccaatctctccattttgtctggcggcacccccaagagatgcctcgatctaagtaatctgtcttctggggaaatcaccgccacgcagctcacaactagcgccgacctggacgagaccggccatctcgattcctctggcctgcaggaagtgcatctggccggaatgaaccacgaccagcacctaatgaaatgtagccctgacaacggaaacctggttgacagcgaaatgaagtaccttggcagccccatcaccaccgtacctaaattggacaagaaccctaacctgggcgaggatcaggcggaggaaatatctgacgaactcatggagttttcactgaaagaccaagaagcaaaggtgtccaggagtgggctctacaggtcaccttccatgccagagaacttgaaccgacctcgcctcaagcaggtcgaaaaattcaaggacaataccatacccgacaaagtgaagaaaaaatactttagcggccaaggtaagcttcggaagggcctctgtctgaaaaagactgtgtcgttatgtgatattacgatcacccaaatgctggaggaagattccaatcagggacatctcataggtgacttcagcaaggtctgcgcactccccacagtgtctggtaagcatcaagatctgaagtatgttaatccagagaccgtagctgcactgttatcaggaaagttccaggggctgatcgagaagttctacgtaatcgattgccgatacccatacgaataccttggagggcacattcaaggggccctgaacctgtatagtcaggaggaactttttaatttttttttaaagaagccaatcgtgcccctggacacacagaagcgtatcatcatagtgtttcactgcgagttttcgtcagagcgtgggcccagaatgtgtaggtgcctcagggaagaagaccgatctttgaaccaatatccagccctctattatcctgaactctacatcttaaaaggagggtaccgagatttcttcccagagtacatggaactgtgcgagccccaatcttactgccctatgcaccaccaggaccacaagaccgagctgctgaggtgccggtcacaatctaaagtgcaagagggggagagacagctgcgcgagcagattgcgctgctagtcaaggacatgagtccctag

SEQ ID NO: 106575 - DNA, 1293 bp, Artificial Sequence
  derived and/or modified sequence
atgagcaccgagctgttcagcagcacccgggaggagggcagcagcggcagcggaccttcatttcgaagcaaccagcgtaagatgttgaatcttttgttggagagagacacgtctttcaccgtgtgcccagacgtgcctagaacccctgttggcaagtttctgggagattctgccaacctgtccatcctttctggcagcccagggttctttcggacatcgggctctgccttttcttgggatgcgcagttgctctgctctaccccaaacggactggatcgcgggcaccgaaagcgtgacgccatgtgttctagctctgcgaataaagagaacgacaacggcaacctggtcgactcggagatgaaatatctgggctcccctatcactacagtacccaagctggataagaaccccaacctgggtgaagaccaggccgaggaaatttcagacgaacttatggaattttcattgaaggaccaagaggccaaggtgagccgctctggcctgtaccgctccccatctatgcctgagaatctaaaccggccccggctgaaacaggtcgagaagtttaaggacaataccatccctgataaagtcaagaaaaagtatttcagtgggcagggaaagcttaggaaggggttatgccttaaaaagactgtcagtctctgcgatatcaccatcacccagatgttggaggaggatagcaaccagggacatctgattggcgatttcagcaaagtgtgcgcactgcccaccgtttccgggaagcatcaggacctgaagtatgtaaaccccgagactgtagcagcccttctgtcaggcaaatttcagggtttgattgagaagttctatgtcatcgactgccgatacccttacgagtacctcggaggccatatccagggggcgctcaacctgtatagccaggaggagctgttcaactttttcttgaagaagcccattgtgccacttgatacccaaaaacggatcattatcgtgtttcattgcgaattttcaagtgagagggggcctagaatgtgccggtgtctgcgtgaagaagaccggagtttgaatcagtacccagccctttactatccagagctctatattcttaaggggggatatagggatttttttcccgagtatatggagctatgtgagcctcagagctattgcccaatgcatcaccaagaccacaaaacagagctcctgcgttgccgatctcagtctaaggtgcaggaaggagaacgccagctccgcgagcagatcgcccttctagtgaaggatatgtctccctag

SEQ ID NO: 106576 - DNA, 750 bp, Artificial Sequence
  derived and/or modified sequence
atgagcaccgagctgttcagcagcacccgggaggagggcagcagcggatcgggacccagtttccgctccaatcagcgcaagatgctgaacctgcttttggagcgtgacacttcttttaccgtctgtcccgacgttcctcgtactcctgtcggcaaattcctgggagatagcgcaaacctctccatcctaagtggcgggacaccaaaaaggtgcctggacctctccaacctgagctcaggcgaaataacggctacccagctaactacaagtgccgaccttgatgagaccgggcatctggactcctctggtctgcaggaagtgcatctggccgggatgaaccacgaccagcacctgatgaaatgcagtcccgcacagctcttgtgtagcactcccaacggattagaccgtggacataggaaacgtgacgccatgtgcagctcttccgccaataaagagaacgacaatgggaacttggtggacagtgaaatgaaatatctgggatcaccgattacaacagtccccaaacttgacaagaatcccaatctcggagaggaccaggcagaggagatctctgatgaactgatggagttctccctcaaggatcaggaggccaaagtctcacgaagcggactttaccggtccccctccatgccggaaaacctgaatcgcccaagactcaagcaggtcgaaaaattcaaggacaatacaataccagacaaggttaagaaaaagtacttctccggccaatag

SEQ ID NO: 106577 - DNA, 1332 bp, Artificial Sequence
  derived and/or modified sequence
atgtctaccgagctcttctccagcacacgggaggagggaagttccggctccggcccttccttcaggtcaaaccagaggaagatgcttaacctgctcctcgagagggacacatcattcaccgtttgcccagacgtgccaagaacccccgtcgggaaattcctgggggacagtgccaacctctccatactgagcggcggaacaccaaaaagatgcttggatctgagcaatctgtcctccggcgagatcacagctactcagctgacaacgagcgctgacttggatgagaccggccatctcgacagctctggactgcaggaagtgcacctggccggtatgaaccacgatcagcatctgatgaagtgttccccagacaacggcaacctagtagattccgaaatgaagtatcttgggtctcccatcaccacagtgcccaagctggacaagaaccccaacctgggggaggatcaggcggaagaaattagtgatgaattaatggaattcagtctgaaggaccaagaagcaaaagtatctagatccggcctctataggtccccttctatgcccgagaaccttaataggccccgattgaagcaggtggagaagtttaaagataataccattcctgacaaagtgaagaaaaagtacttctcaggtcagggtaagttgcgtaaagggctgtgtctcaaaaaaactgtaagcctctgtgacatcaccataacacaaatgctggaggaagattccaatcagggacatctcatcggagatttttccaaggtgtgcgccctcccaacagtgagcgggaaacaccaggatctgaagtacgttaaccccgagacggtcgcggctctgttatcaggcaaatttcaaggactaatcgagaaattctacgttattgattgccgctacccttatgagtatttgggcggtcatatccaaggggcactcaacctttacagccaggaagaactgtttaatttctttctaaaaaaacccatcgtgcccctggacacccaaaaaagaatcatcatcgtcttccactgcgaatttagctctgagagaggacccaggatgtgtaggtgtctgcgagaagaggacagaagcctaaatcagtaccctgcactctactaccctgaactctacatcctaaaggggggttaccgtgactttttcccggagtacatggagctatgtgagcctcagagctactgtccaatgcaccatcaggatcacaagactgagctactgaggtgccgatcccaaagtaaggtacaagaaggagaaagacagcttagggagcagatcgccttactggtgaaagacatgtccccatag

SEQ ID NO: 106578 - DNA, 1293 bp, Artificial Sequence
  derived and/or modified sequence
atgagcacggaactgttcagttccaccagagaggagggaagttccggcagtgggccatcattcaggtctaaccagcgcaagatgctgaacctgctgctggagagagatacctctttcaccgtctgtcccgacgtgcctcgaacacccgtgggcaaatttttgggggactctgccaacctgagtatcctgtcaggttcacctggcttctttagaaccagcggttccgccttcagctgggatgcgcaactcctttgctctactcctaatgggctggatcggggacaccgtaagagagacgccatgtgcagctcttccgccaataaagagaacgataacggtaatctcgtggacagtgagatgaagtatcttggcagccctattaccacagtgccaaagctagacaaaaaccccaaccttggagaagaccaggctgaagaaatatcagatgaactcatggaattttcactgaaggaccaggaggccaaggtttctcggagtggcttgtatcggtccccgtcaatgccagaaaacttaaaccggccacggctcaagcaggtggagaagttcaaagacaacacgattcccgacaaggtgaaaaagaagtacttctcaggccaggggaagctccgcaagggcctatgcctcaagaagaccgtcagcctctgtgatatcaccattacacagatgctggaagaggactccaatcaaggacacctcataggggatttttcaaaagtgtgcgcactcccaacagtgagtggcaagcaccaagatctgaagtatgtgaatcctgagaccgtggccgcactcctgtccggcaaatttcagggactgattgaaaagttctatgttatcgactgtaggtacccctatgagtacctgggcggacatattcagggcgcactcaatctgtatagtcaggaagagctgtttaactttttcctgaaaaaacctatagtaccacttgacacccaaaaacgcatcatcattgtgtttcattgtgaattctcatctgagcggggtccaaggatgtgtcggtgcctgcgggaggaagaccgatccctgaaccagtaccctgcactgtattatccagagctatatatcctgaaaggcggatacagggatttctttccagagtatatggagctatgtgaaccgcagtcatattgtcctatgcatcatcaggatcacaagaccgaactcctcaggtgtaggagccagtcaaaggtgcaggaaggagaacgccagctgcgggagcagattgctctgttggtaaaagatatgagcccgtag

SEQ ID NO: 106579 - DNA, 750 bp, Artificial Sequence
  derived and/or modified sequence
atgagcaccgagctcttctcatcgacccgggaagaaggcagttctggctctggcccatcttttcgctctaatcaacggaagatgctgaacctactgttggagcgggacacctcttttactgtctgtcctgatgttccccgaactcccgtcggcaagttcctaggagattctgcgaacctgtctatcttgagtggcggtactcctaagaggtgtttagatcttagcaatctgagttcaggcgagatcacggccacacagctgactacttccgccgatctcgatgagacgggccacttagactcctcaggactccaggaggtgcatctagcgggtatgaatcatgatcaacacttgatgaaatgttctccagcgcagcttctgtgctctacaccaaacggactcgaccgtggccacaggaaaagggatgccatgtgtagctcctctgccaacaaggagaacgataatggcaacctggtggactcggaaatgaagtacttagggagccctattactactgttcccaaattagataagaaccccaacctaggagaggatcaagccgaagagatttccgatgagctgatggaattttcactcaaagaccaggaagccaaggtgtctcggagcggtctgtatagatctcccagcatgcctgagaacctcaatcgtcctaggttgaaacaggtggagaagttcaaggataacaccattcccgacaaggttaaaaaaaagtattttagcggacagtag

SEQ ID NO: 106580 - protein, 473 aa, Artificial Sequence
  derived and/or modified sequence
MSTELFSSTREEGSSGSGPSFRSNQRKMLNLLLERDTSFTVCPDVPRTPVGKFLGDSANLSILSGGTPKRCLDLSNLSSGEITATQLTTSADLDETGHLDSSGLQEVHLAGMNHDQHLMKCSPAQLLCSTPNGLDRGHRKRDAMCSSSANKENDNGNLVDSEMKYLGSPITTVPKLDKNPNLGEDQAEEISDELMEFSLKDQEAKVSRSGLYRSPSMPENLNRPRLKQVEKFKDNTIPDKVKKKYFSGQGKLRKGLCLKKTVSLCDITITQMLEEDSNQGHLIGDFSKVCALPTVSGKHQDLKYVNPETVAALLSGKFQGLIEKFYVIDCRYPYEYLGGHIQGALNLYSQEELFNFFLKKPIVPLDTQKRIIIVFHCEFSSERGPRMCRCLREEDRSLNQYPALYYPELYILKGGYRDFFPEYMELCEPQSYCPMHHQDHKTELLRCRSQSKVQEGERQLREQIALLVKDMSP

SEQ ID NO: 106581 - DNA, 1422 bp, Artificial Sequence
  derived and/or modified sequence
atgagcaccgagctgttcagcagcaccagagaggagggcagcagcggcagcggccccagcttcagaagcaaccagagaaagatgctgaacctgctgctggagagagacaccagcttcaccgtgtgccccgacgtgcccagaacccccgtgggcaagttcctgggcgacagcgccaacctgagcatcctgagcggcggcacccccaagagatgcctggacctgagcaacctgagcagcggcgagatcaccgccacccagctgaccaccagcgccgacctggacgagaccggccacctggacagcagcggcctgcaggaggtgcacctggccggcatgaaccacgaccagcacctgatgaagtgcagccccgcccagctgctgtgcagcacccccaacggcctggacagaggccacagaaagagagacgccatgtgcagcagcagcgccaacaaggagaacgacaacggcaacctggtggacagcgagatgaagtacctgggcagccccatcaccaccgtgcccaagctggacaagaaccccaacctgggcgaggaccaggccgaggagatcagcgacgagctgatggagttcagcctgaaggaccaggaggccaaggtgagcagaagcggcctgtacagaagccccagcatgcccgagaacctgaacagacccagactgaagcaggtggagaagttcaaggacaacaccatccccgacaaggtgaagaagaagtacttcagcggccagggcaagctgagaaagggcctgtgcctgaagaagaccgtgagcctgtgcgacatcaccatcacccagatgctggaggaggacagcaaccagggccacctgatcggcgacttcagcaaggtgtgcgccctgcccaccgtgagcggcaagcaccaggacctgaagtacgtgaaccccgagaccgtggccgccctgctgagcggcaagttccagggcctgatcgagaagttctacgtgatcgactgcagatacccctacgagtacctgggcggccacatccagggcgccctgaacctgtacagccaggaggagctgttcaacttcttcctgaagaagcccatcgtgcccctggacacccagaagagaatcatcatcgtgttccactgcgagttcagcagcgagagaggccccagaatgtgcagatgcctgagagaggaggacagaagcctgaaccagtaccccgccctgtactaccccgagctgtacatcctgaagggcggctacagagacttcttccccgagtacatggagctgtgcgagccccagagctactgccccatgcaccaccaggaccacaagaccgagctgctgagatgcagaagccagagcaaggtgcaggagggcgagagacagctgagagagcagatcgccctgctggtgaaggacatgagcccctag

SEQ ID NO: 106582 - DNA, 1422 bp, Artificial Sequence
  derived and/or modified sequence
atgagcactgaactgtttagcagtactcgggaggaagggagttccgggagcggacctagtttcaggtcgaatcagcgcaagatgctgaatctcctgctcgaacgcgatacctcatttaccgtttgccctgacgtccctaggacgcccgtggggaagttcctgggcgacagtgcaaatctgagtattctttccgggggtactcctaaacggtgtcttgacctcagtaacctatccagcggggagattactgcgactcagctaacaacctccgctgacctcgacgagaccgggcacctcgactcgtcaggtctgcaggaggtgcatctcgccggaatgaatcatgatcagcatctgatgaagtgttctccagcacagctgctgtgctccactcctaatggattggatcgcggtcaccggaagagggatgctatgtgtagctcttccgccaataaagagaacgataatggaaaccttgttgacagcgaaatgaagtacctgggatctcctatcaccacagtgccaaagttagacaaaaaccctaacctgggcgaggatcaggcagaggagatttccgatgagctgatggagttttccctcaaggaccaggaggccaaggtatcgcggtcaggcctctaccgaagtccatctatgccagagaacctgaatcgtccacggttgaaacaggtagagaagttcaaggataacaccattccagacaaggtcaagaagaaatattttagcggacaagggaaattgagaaaagggctgtgtctgaaaaaaacagtcagtctgtgtgacatcaccatcacacagatgctagaggaagactccaatcaaggacacttgataggcgactttagcaaggtgtgcgcactgccaaccgtgagtgggaaacatcaggatctgaagtatgtgaatcctgagaccgtcgccgccctgctctccggaaagttccagggcctgatcgaaaaattctatgtgattgattgtcgatatccgtacgaatacctgggtgggcacattcagggtgccctgaacctttactcccaggaagagctctttaatttctttttgaagaagccaatcgtgcctttggacacacagaagaggattatcatcgtgttccattgcgagttttcatccgagcgcgggcctagaatgtgtagatgcctgagagaggaggacagaagcctgaaccagtatccagccttgtactacccagagctctacattcttaaggggggctacagagatttcttccccgaatacatggagctgtgtgagcctcagagttactgccccatgcaccatcaagaccataagacagagctgctgcgctgtcggtctcaaagtaaggtccaagagggcgaacgccagctccgggaacagattgccctgttggtaaaagacatgtctccgtag

SEQ ID NO: 106583 - DNA, 1422 bp, Artificial Sequence
  derived and/or modified sequence
atgtcaaccgaactcttttcgtctacccgcgaagagggttcttctgggtccggtccttcttttaggtcaaatcagaggaaaatgctgaatctgctcttggagcgagatacaagcttcaccgtttgtccagacgtgccacggactccagttgggaagttcctaggagattctgctaatctgtcaatcctctcagggggaacaccgaagaggtgcctggacctgagtaatctgtccagcggagagatcacagctacacagctgacgactagcgccgacctcgatgagaccggccatctcgatagctcaggcctgcaagaagtccacctggccggcatgaatcacgatcagcatttgatgaaatgctcccctgcacagctgctgtgtagcactccaaatggcttagaccgggggcaccgcaaacgtgacgccatgtgctcttccagcgcaaataaagagaacgacaacggaaatcttgtagactccgagatgaaatatttggggtcccccatcacgacagttcctaaattagacaaaaaccccaacctcggcgaggatcaagccgaagaaatcagtgacgaacttatggaattcagtctgaaggaccaggaagccaaagtatcccgcagcggcctctaccgcagcccctctatgcccgaaaatctgaacagaccaagacttaagcaggtagagaaattcaaagacaacacgatccccgataaggtcaagaaaaagtacttcagcgggcaaggtaaactccgcaaagggctatgcctgaagaagaccgtgagcctgtgtgacatcaccattacacagatgctggaagaagattccaaccagggccacctcattggtgacttctccaaggtatgcgcccttcccaccgtttcaggcaagcaccaagacctgaaatacgtgaaccccgagactgtggccgcccttttgagcgggaagtttcagggactcatcgaaaaattttatgtgatcgattgtcggtatccttatgaataccttggcggccatatccagggcgcattaaacctgtacagccaggaagaattatttaatttcttccttaagaaacccatcgttcccttggacactcagaaacggatcattatagtctttcactgcgagttcagcagtgaaagaggcccaaggatgtgtcggtgcctcagagaagaggatcggagcctaaaccagtaccccgccttgtactatccggaactgtatatcctgaagggcgggtatcgtgacttcttcccagagtacatggagctctgcgaaccccagtcctactgtcctatgcaccatcaggaccacaaaaccgagcttctgcgctgccgatctcagagcaaggtgcaggagggcgaacggcagttgagagagcagattgccctgcttgtcaaggacatgtccccctag

SEQ ID NO: 106584 - DNA, 1422 bp, Artificial Sequence
  derived and/or modified sequence
atgagcacagagctgttcagcagcacccgggaggagggcagcagcggcagcggccccagcttccgcagcaaccagaggaagatgctgaacctgctgctggagcgggacaccagcttcaccgtgtgcccagatgtgcccaggacccctgtgggcaagttcctgggggacagcgccaacctgagcatcctgagcggcggcacccccaagcgctgcctggacctgagcaacctgagcagtggagagatcacagccacccagctgaccaccagcgctgacctggatgagaccggccacctggacagcagcggcctgcaggaggtgcacctggccggcatgaaccacgaccagcacctgatgaagtgcagccctgcccagctgctgtgcagcacccccaacggcctggaccggggccacaggaagagagatgccatgtgcagcagcagcgccaacaaggaaaatgacaatggaaacctggtggacagcgagatgaagtacctgggcagccccatcaccaccgtgcccaagctggacaagaaccccaacctgggggaggaccaggccgaggagatcagtgatgagctgatggagttcagcctgaaggaccaggaggccaaggtgagccgcagcggcctgtaccgcagccccagcatgcctgagaacctgaaccggccccggctgaagcaggtggagaagttcaaggacaacaccatcccagacaaggtgaagaagaagtacttcagcggccagggcaagctgaggaagggcctgtgcctgaagaagacagtgtccctgtgtgacatcaccatcacccagatgctggaggaggacagcaaccagggccacctgattggagacttcagcaaggtgtgtgccctgcccaccgtgtctgggaagcaccaggacctgaagtatgtgaaccctgagaccgtggccgccctgctgagcggcaagttccagggcctcatcgagaagttctacgtgattgactgccgctacccctatgagtacctgggcggccacatccagggcgccctgaacctgtacagccaggaggagctgttcaacttcttcctgaagaagcccatcgtgcccctggacacccagaagaggatcatcatcgtgttccactgtgagttcagcagcgagcggggccccaggatgtgccgctgcctgcgggaggaggacaggagcctgaaccagtacccagccctgtactacccagagctgtacatcctgaagggcggctacagagacttcttccctgagtacatggagctgtgtgagccccagagctactgccccatgcaccaccaggaccacaagacagagctgctgcgctgccgcagccagagcaaggtgcaggagggggagcggcagctgcgggagcagatcgccctgctggtgaaggacatgagcccctag

SEQ ID NO: 106585 - DNA, 1422 bp, Artificial Sequence
  derived and/or modified sequence
atgagcaccgagctgttcagcagcacccgggaggagggcagcagcggttcaggaccctcatttcgtagcaatcagaggaaaatgttaaatcttctgctcgagcgcgatacatcttttaccgtgtgtccggatgtgccaaggacccctgttgggaagttcttgggtgatagtgccaacctgagcatcctcagtgggggtactcccaaaaggtgcctcgatctgagtaatctgagctcaggggagataacggcaacacaactgacaacgtctgccgatctcgatgagactggtcatctagacagctcagggctacaagaggtccacctggctggtatgaatcatgaccagcatctgatgaagtgcagcccagcccagctgctgtgttctaccccaaatggattggatcgcggtcataggaaacgcgatgcgatgtgctcttcatcagccaacaaggagaatgataacggaaatctcgttgactccgaaatgaagtatctgggatctcctattacgacagtgccaaagctcgacaagaacccaaaccttggagaggaccaggccgaagaaataagtgacgagctgatggagttttcccttaaagaccaggaggcaaaggtgtctagatctggcctgtatcgctccccttctatgccggaaaatctgaatcggccaaggctgaaacaagtagaaaaattcaaagacaacaccattcccgacaaagtgaagaaaaaatattttagtggccaaggcaaactgagaaaggggctatgcctgaaaaaaacagttagtctgtgcgacatcactattacccagatgctggaggaagactcaaatcagggccatcttatcggggacttcagcaaggtatgcgccctgcccacggtgtcgggaaaacatcaggacctgaaatacgtgaacccagaaaccgtggctgcactgctgtccggcaagtttcaagggctgattgagaagttctatgtcatcgactgccggtatccctatgaatacctcgggggacatatccaaggcgcactgaacttgtacagtcaggaagaacttttcaattttttcctcaagaagccgatcgttcccctagatacccagaagagaattatcattgtgttccactgcgaattcagtagcgaaagagggccgcggatgtgtcgctgtttgcgggaggaagaccgaagtttaaaccaataccccgcactatattaccccgagctatatattctgaagggcggatatcgggacttttttccagagtacatggaattgtgcgaaccccagtcctactgtcccatgcaccaccaggaccacaagacagagttactcaggtgccgatctcagagcaaagtgcaggagggcgagaggcagctgagggaacaaatcgcgctcctggtgaaggatatgagtccatag

SEQ ID NO: 106586 - DNA, 1422 bp, Artificial Sequence
  derived and/or modified sequence
atgagcaccgagctgttcagcagcacccgggaggagggcagcagcgggagcgggccaagttttcggtcgaatcagcgtaagatgctaaacctcttgctcgagcgtgacaccagcttcaccgtttgcccagatgtcccaaggaccccagtgggcaaatttctgggagatagtgctaatttgtcaattctgtcaggcggcaccccgaaacgatgcctcgacctgagcaatctgtcaagcggtgagattacggcgacccagctcacaacctctgcagatcttgatgagacaggtcatcttgacagctccggtttacaggaggttcacctggctggcatgaatcacgaccagcacctcatgaagtgctctcctgcccaactgctatgttcaacacccaatggcctcgaccggggccaccggaagcgcgacgctatgtgtagcagctcagcaaacaaagaaaatgacaacgggaacctcgtggacagcgaaatgaaatacctgggctctcccatcacgacggtgcccaaactggacaagaatcctaacttgggagaagatcaggcagaagagatcagtgatgagcttatggaattctctctcaaagatcaggaggctaaggtctccaggtccggcctctaccggtcacctagtatgcctgaaaatttgaatagaccgagattaaaacaggtggagaaattcaaggacaacaccattcccgacaaagtcaagaagaaatacttttcggggcagggcaagctcaggaagggcctctgtctgaagaaaaccgtgtctttgtgtgacatcactatcactcagatgctcgaagaagattccaaccaaggtcatttgatcggcgatttcagtaaggtatgtgcacttcccacagtgtccgggaagcatcaggacctaaagtacgtcaaccctgagacagtggccgctctcctctccgggaagttccagggactcatcgaaaagttttatgttatcgactgccggtacccatatgagtacctgggaggacacatccagggggcgcttaatctctacagtcaggaggagctcttcaatttttttctcaaaaagccaatcgtaccactggatacccagaagcggattatcatcgtgttccattgtgaattcagctcagaacggggtccacgtatgtgcagatgtctgcgtgaggaggaccgatccttgaatcaataccctgcgctttactaccccgagctatacattctgaaaggcgggtaccgcgatttctttcctgagtacatggagctgtgcgaaccccagtcttattgtccgatgcaccaccaggaccataaaaccgagctgctaaggtgtagatcccagtctaaagtccaagaaggggagaggcagctgcgggaacagattgccctcctcgtgaaggacatgtcgccatag

SEQ ID NO: 106587 - DNA, 1422 bp, Artificial Sequence
  derived and/or modified sequence
atgtccacggagctgttctcttcaacgcgagaagagggctcgagtgggagcggcccttccttcaggtcaaatcagaggaagatgttgaatctcctgttggagcgagacacatccttcaccgtgtgcccggatgttcccagaacccccgttggcaagtttctgggtgacagcgcaaacctttctattctcagtggcggaactcctaaaagatgtctggatctaagcaacttgtcatccggcgagattactgccacacaattgacgacctcagcagacctggatgaaaccggacaccttgattcatcaggactacaggaggtgcacttagccggaatgaatcatgatcaacacctcatgaaatgctcacccgctcagttactatgcagcactccaaacgggcttgatcggggtcatcgcaaacgtgatgccatgtgctctagcagtgccaacaaggaaaacgacaacggtaacctggttgattctgaaatgaaatacctgggatcacccatcacgactgtgcctaagctcgacaagaaccccaacctgggagaagatcaggctgaagagattagtgacgaactgatggagttctccctgaaagatcaggaagctaaggtctcgaggtcgggcctgtacagaagtccgagtatgcccgagaacttgaataggccacgattgaagcaggttgagaaattcaaggacaatactatccctgacaaagtgaagaagaaatatttctcaggccaaggcaagttaagaaagggtctgtgtttgaagaagaccgtctccctgtgtgatattactattacacagatgcttgaggaggacagcaaccagggacaccttattggagacttctccaaggtgtgcgctctgcctacggtatcagggaagcatcaggatctgaaatacgttaatccagaaacagtcgcagctttgttgtccgggaagtttcagggccttatcgagaagttttacgtgattgattgccggtacccttatgagtacctgggtggacatatccagggcgctctcaacttgtatagccaggaagaactgtttaacttctttctgaaaaagcccatcgtcccactggatacacaaaaacggattataatagtgtttcattgtgagttcagttcagaaaggggccctcggatgtgccggtgcctgagagaagaggaccgctctttaaaccagtatccagcactgtactacccagaactctatatcctcaagggcggatatagagacttttttccagagtacatggaactgtgtgagccgcagagctactgccctatgcaccaccaggaccataaaacagagctgcttagatgtcgctcacagagcaaggtacaggagggggagcggcagcttcgggagcagatagcactgctggttaaagatatgtccccatag

SEQ ID NO: 106588 - DNA, 1422 bp, Artificial Sequence
  derived and/or modified sequence
atgtccactgagctattttcctcaacacgcgaggaaggatcatctggatctggaccatcttttcggtccaaccagagaaagatgttaaacttactactagagcgcgacacctccttcaccgtgtgcccagacgttcctaggacacccgtggggaaatttcttggtgacagcgccaacttgtcaattctaagcggaggtacaccaaagagatgtctggacctgtctaacctcagcagcggcgagattacggccacgcagttaacaacttctgcagacctggacgaaaccgggcatctggattcttctggactgcaggaggtccacctggcgggaatgaaccatgaccagcacctgatgaagtgtagcccagcgcagctcctgtgttccacacctaatggactggaccggggacacagaaagagagacgccatgtgctcctccagtgcaaacaaggagaatgataacggtaaccttgttgatagcgagatgaaatatctgggtagcccaataacaaccgtgcctaaattggacaagaaccccaaccttggcgaggaccaagctgaagagattagcgacgagttgatggaattttcgctgaaggaccaggaggcgaaggtcagtaggagcggattgtaccggtcacccagcatgcccgagaatctaaatagaccaagattgaagcaggtcgagaagttcaaagataatacgatacctgataaggtgaaaaaaaaatacttctcggggcaagggaagctacgaaaggggctgtgtcttaagaagactgtcagtttgtgtgatataacaatcacccaaatgctagaagaggacagtaaccagggccacctcataggcgattttagcaaggtgtgtgcgttacccactgtgtccggaaagcaccaggacctgaagtatgtaaaccccgagactgtagcagccctcctatctggcaaattccaggggctaatagagaagttttacgtgatcgattgcagatacccttatgagtacctggggggtcacattcaaggagccctgaacctgtatagccaagaggagctatttaacttctttttaaaaaagcccattgtccccctcgatactcagaagcgcattatcatagttttccactgtgagtttagctccgaacgcggtcccagaatgtgtcggtgccttcgagaagaggacaggtcgctcaaccagtacccagccctctattacccagagttatacatcctgaagggaggataccgcgatttcttccctgagtacatggagctgtgcgaaccgcagtcgtattgcccaatgcaccaccaagaccataaaaccgagcttttacgctgccgcagtcaatcaaaggtgcaagagggtgaaaggcagctgcgcgaacagatcgccctgctcgtgaaggatatgtctccctag

SEQ ID NO: 106589 - DNA, 2128 bp, Artificial Sequence
  derived and/or modified sequence
gtttgaatggtcaacgcctgcggctgttgatattcttgctcagaggccgtaactttggccttctgctcagggaagactctgagtccgacgttggcctacccagtcggaaggcagagctgcaatctagttaactacctcctttcccctagatttcctttcattctgctcaagtcttcgcctgtgtccgatccctatctactttctctcctcttgtaggcaagcctcagactccaggcttgagctaggttttgtttttctcctggtgagaattcgaagaccatgtctacggaactcttctcatccacaagagaggaaggaagctctggctcaggacccagttttaggtctaatcaaaggaaaatgttaaacctgctcctggagagagacacttcctttaccgtctgtccagatgtccctagaactccagtgggcaaatttcttggtgattctgcaaacctaagcattttgtctggaggaaccccaaaacgttgcctcgatctttcgaatcttagcagtggggagataactgccactcagcttaccacttctgcagaccttgatgaaactggtcacctggattcttcaggacttcaggaagtgcatttagctgggatgaatcatgaccagcacctaatgaaatgtagcccagcacagcttctttgtagcactccgaatggtttggaccgtggccatagaaagagagatgcaatgtgtagttcatctgcaaataaagaaaatgacaatggaaacttggtggacagtgaaatgaaatatttgggcagtcccattactactgttccaaaattggataaaaatccaaacctaggagaagaccaggcagaagagatttcagatgaattaatggagttttccctgaaagatcaagaagcaaaggtgagcagaagtggcctatatcgctccccgtcgatgccagagaacttgaacaggccaagactgaagcaggtggaaaaattcaaggacaacacaataccagataaagttaaaaaaaagtatttttctggccaaggaaagctcaggaagggcttatgtttaaagaagacagtctctctgtgtgacattactatcactcagatgctggaggaagattctaaccaggggcacctgattggtgatttttccaaggtatgtgcgctgccaaccgtgtcagggaaacaccaagatctgaagtatgtcaacccagaaacagtggctgccttactgtcggggaagttccagggtctgattgagaagttttatgtcattgattgtcgctatccatatgagtatctgggaggacacatccagggagccttaaacttatatagtcaggaagaactgtttaacttctttctgaagaagcccatcgtccctttggacacccagaagagaataatcatcgtgttccactgtgaattctcctcagagaggggcccccgaatgtgccgctgtctgcgtgaagaggacaggtctctgaaccagtatcctgcattgtactacccagagctatatatccttaaaggcggctacagagacttctttccagaatatatggaactgtgtgaaccacagagctactgccctatgcatcatcaggaccacaagactgagttgctgaggtgtcgaagccagagcaaagtgcaggaaggggagcggcagctgcgggagcagattgcccttctggtgaaggacatgagcccatgataacattccagccactggctgctaacaagtcaccaaaagacactgcagaaaccctgagcagaaagaggccttctggatggccaaacccaagattattaaaagatgtctctgcaaaccaacaggctaccaacttgtatccaggcctgggaatggattaggtttcagcagagctgaaagctggtggcagagtcctggagctggctctataaggcagccttgagttgcatagagatttgtattggttcagggaactctggcattccttttcccaactcctcatgtcttctcacaagccagccaactctttctctctgggcttcgggctatgcaagagcgttgtctaccttctttctttgtattttccttctttgtttccccctctttcttttttaaaaatggaaaaataaacactacagaatgagaggtg

SEQ ID NO: 106590 - DNA, 1968 bp, Artificial Sequence
  derived and/or modified sequence
gaggtgcccgccccgaggccccagcgccacctgccctccaccacctaccgcggttcctccagctcccagggccgcggccggagcagctctgagcgctcggttcgccccacggtgcccttaaaaggcgctggcgcgaaccaacgagtccctgaggagagtagggggacagctccggctcgcagaatccccccaagccacccatggagggcgcagctccgtgtcgtgtctctctcaaagtgtctctcggacagcgctgttgggaacgagcctggcgctttgatttagggatgggggtggtttcctcactaacgagtcaccccctccaaaatatcgcagaaagtggacggccccagttggaggcacatcttgaaacccgcgggggaggccatgtcggaagaaggttttgtttttctcctggtgagaattcgaagaccatgtctacggaactcttctcatccacaagagaggaaggaagctctggctcaggacccagttttaggtctaatcaaaggaaaatgttaaacctgctcctggagagagacacttcctttaccgtctgtccagatgtccctagaactccagtgggcaaatttcttggtgattctgcaaacctaagcattttgtctggaggaaccccaaaacgttgcctcgatctttcgaatcttagcagtggggagataactgccactcagcttaccacttctgcagaccttgatgaaactggtcacctggattcttcaggacttcaggaagtgcatttagctgggatgaatcatgaccagcacctaatgaaatgtagcccagcacagcttctttgtagcactccgaatggtttggaccgtggccatagaaagagagatgcaatgtgtagttcatctgcaaataaagaaaatgacaatggaaacttggtggacagtgaaatgaaatatttgggcagtcccattactactgttccaaaattggataaaaatccaaacctaggagaagaccaggcagaagagatttcagatgaattaatggagttttccctgaaagatcaagaagcaaaggtgagcagaagtggcctatatcgctccccgtcgatgccagagaacttgaacaggccaagactgaagcaggtggaaaaattcaaggacaacacaataccagataaagttaaaaaaaagtatttttctggccaaggaaagctcaggaagggcttatgtttaaagaagacagtctctctgtgtgacattactatcactcagatgctggaggaagattctaaccaggggcacctgattggtgatttttccaaggtatgtgcgctgccaaccgtgtcagggaaacaccaagatctgaagtatgtcaacccagaaacagtggctgccttactgtcggggaagttccagggtctgattgagaagttttatgtcattgattgtcgctatccatatgagtatctgggaggacacatccagggagccttaaacttatatagtcaggaagaactgtttaacttctttctgaagaagcccatcgtccctttggacacccagaagagaataatcatcgtgttccactgtgaattctcctcagagaggggcccccgaatgtgccgctgtctgcgtgaagaggacaggtctctgaaccagtatcctgcattgtactacccagagctatatatccttaaaggcggctacagagacttctttccagaatatatggaactgtgtgaaccacagagctactgccctatgcatcatcaggaccacaagactgagttgctgaggtgtcgaagccagagcaaagtgcaggaaggggagcggcagctgcgggagcagattgcccttctggtgaaggacatgagcccatgataacattccagccactggctgctaacaagtcaccaaaagacactgcagaaaccctgagcagaaagaggccttctggatggccaaacccaagattattaaaagatgtctctgc

SEQ ID NO: 106591 - protein, 309 aa, Artificial Sequence
  derived and/or modified sequence
MMLGSPTSPKPGVNAQFLPGFLMGDLPAPVTPQPRSISGPSVGVMEMRSPLLAGGSPPQPVVPAHKDKSGAPPVRSIYDDISSPGLGSTPLTSRRQPNISVMQSPLVGVTSTPGTGQSMFSPASIGQPRKTTLSPAQLDPFYTQGDSLTSEDHLDDSWVTVFGFPQASASYILLQFAQYGNILKHVMSNTGNWMHIRYQSKLQARKALSKDGRIFGESIMIGVKPCIDKSVMESSDRCALSSPSLAFTPPIKTLGTPTQPGSTPRISTMRPLATAYKASTSDYQVISDRQTPKKDESLVSKAMEYMFGW

SEQ ID NO: 106592 - DNA, 930 bp, Artificial Sequence
  derived and/or modified sequence
atgatgttaggctcaccgacctcaccaaaacctggagtcaacgctcaatttctacccggcttcctcatgggtgatttacccgctccggtgaccccccagcctaggagtattagcggtccctctgtcggcgttatggagatgaggtcacccctactagcaggaggaagtcctccccagccagtcgttcccgctcataaggataaatctggtgccccccccgtgcgtagcatatatgacgatatttcttcccctggattaggctctacccccctaacatcccgacggcagcccaacattagcgtgatgcagtcgcctctggtgggggtgacatcaaccccagggacaggccagagtatgttttcacctgcatctattggacagccgagaaagactacattgagtcctgcacagttggatcccttttacacccagggagatagcctcacaagcgaggaccacctggatgattcttgggtgaccgtgttcggattcccacaggccagcgcgtcttacatcctgctgcaattcgcccagtatgggaacattctgaaacacgtgatgtccaatactggcaattggatgcatatacggtaccaatctaagttgcaggccagaaaggctctgtctaaggacggcagaattttcggagagagtattatgataggagttaaaccctgtatcgataagtcagtaatggagtcaagtgatcgatgtgctctatcaagcccctctctcgcgttcactcccccaataaagacactgggaacacctactcagcctggatcaacaccacggatctcaacgatgagacccctggcaaccgcctataaggcctccactagcgactatcaagttatcagtgaccgacagacgccaaagaaagacgaatcattggtgtcgaaggcgatggaatatatgttcgggtggtag

SEQ ID NO: 106593 - DNA, 930 bp, Artificial Sequence
  derived and/or modified sequence
atgatgctgggcagccccaccagccccaagccaggagtgaatgcccagttcctgcccggcttcctgatgggagacctgcctgcccctgtgaccccccagcccaggagcatcagcggccccagcgtgggcgtgatggagatgaggagccccctgctggccggcggcagccccccccagcctgtggtgcctgcccacaaggacaagagcggggcccctcctgtgcgcagcatctatgatgacatcagcagccctggcctgggcagcacccccctgaccagccggcggcagcccaacatctctgtgatgcagagccccctggtgggcgtgaccagcaccccaggcaccggccagagcatgttcagccctgccagcatcggccagcccaggaagaccaccctgagccctgcccagctggaccccttctacacccagggcgacagcctgaccagcgaggaccacctggatgacagctgggtgacagtgtttggcttcccccaggccagcgccagctacatcctgctgcagtttgcccagtatggcaacatcctgaagcacgtgatgagcaacacaggcaactggatgcacatccgctaccagagcaagctgcaggccaggaaggccctgagcaaggatggccgcatctttggagagagcatcatgattggagtgaagccctgcatcgacaagtctgtgatggagagcagtgacagatgtgccctgagcagccccagcctggccttcaccccacccatcaagaccctgggcacccccacccagcccggcagcaccccccgcatcagcaccatgaggcccctggccacagcctacaaggccagcaccagtgactaccaggtgatcagtgaccggcagacccccaagaaggatgagagcctggtgtccaaggccatggagtacatgtttggctggtag

SEQ ID NO: 106594 - DNA, 930 bp, Artificial Sequence
  derived and/or modified sequence
atgatgctgggcagccccaccagccccaagcccggcgtgaacgcccagttcctgcccggctttttgatgggcgatctacctgctccagtaaccccacaaccgaggtcaataagcggacctagcgtgggagtcatggaaatgcgttctcctctcctcgccggagggagtccacctcagcccgtcgtgcccgctcacaaagacaagagcggagcacctccagtgcggtctatatacgatgatattagttcccccggattaggaagtacaccactgacctcaaggagacaaccgaatatctctgtgatgcagtctccactcgtcggtgtgactagcacccccggaacaggacagagcatgttttcccccgccagtatcggacaaccccgcaagaccacactcagcccagcccagcttgaccctttttacactcagggtgatagtttaacgagtgaggatcacctggatgacagttgggttactgtgttcggtttcccccaggcatccgcatcctatatcctcctacaatttgcccagtacgggaatattttgaagcacgtgatgtccaacactggaaattggatgcatatcagataccagagcaaactgcaggctcgcaaagccttgtccaaagacggacgtattttcggagagtctattatgatcggcgtgaagccctgtatcgacaagagcgtgatggagtcaagcgacagatgcgcactctcttccccctccttggcattcacccccccaattaagacgctgggaacccccacccagccaggaagcacccccagaatatcgactatgagaccactcgccacggcgtataaggccagcacctcagattatcaagtaatttccgaccggcaaacccctaaaaaggatgagagtttggtctcaaaggccatggagtatatgtttgggtggtag

SEQ ID NO: 106595 - DNA, 930 bp, Artificial Sequence
  derived and/or modified sequence
atgatgctggggtcacccaccagtcctaagccaggggtgaacgcccagttccttcctggctttctaatgggcgatctgcctgcgccagtgactccgcagccacgcagtatctcagggccttctgtcggcgtgatggagatgcggtcgcctctcttggctggaggatctcctcctcagccagtggtgcctgctcacaaagacaagtcaggtgccccacctgtcaggtccatttacgacgacatcagctcccctgggttgggatcaacaccactgacgtcccgtaggcagcccaatataagtgtcatgcagtcaccactcgtgggcgtcactagtacccccggaacgggtcagtcaatgttctcaccggctagcatcggacagccacgaaaaactactttatccccagcacagctcgaccctttctacacacaaggggattccctgacttctgaagaccacctcgacgactcttgggtcacagtgttcggatttccccaagccagcgcctcctatatcttgctgcagtttgcgcagtacggcaatattttgaaacacgtgatgtctaataccgggaattggatgcatattcgttatcaatcgaagctgcaggcgaggaaggctctgtctaaggatggcaggatcttcggggagagtatcatgataggggttaaaccttgtatcgataagtctgttatggagagctcagatcgatgtgctctgtcttccccatcccttgccttcactcccccaatcaaaacgctaggaacacccacccagcccggaagcactccccgtatatctacaatgcggcctctggctactgcctataaagcttctacatcagattaccaggttatctccgatagacagacccccaaaaaggacgaaagccttgtgagcaaggcgatggagtatatgttcgggtggtag

SEQ ID NO: 106596 - DNA, 930 bp, Artificial Sequence
  derived and/or modified sequence
atgatgctgggcagccccaccagccccaagcccggcgtgaacgcccagttcctgcccggcttcctgatgggcgacctgcccgcccccgtgaccccccagcccagaagcatcagcggccccagcgtgggcgtgatggagatgagaagccccctgctggccggcggcagccccccccagcccgtggtgcccgcccacaaggacaagagcggcgccccccccgtgagaagcatctacgacgacatcagcagccccggcctgggcagcacccccctgaccagcagaagacagcccaacatcagcgtgatgcagagccccctggtgggcgtgaccagcacccccggcaccggccagagcatgttcagccccgccagcatcggccagcccagaaagaccaccctgagccccgcccagctggaccccttctacacccagggcgacagcctgaccagcgaggaccacctggacgacagctgggtgaccgtgttcggcttcccccaggccagcgccagctacatcctgctgcagttcgcccagtacggcaacatcctgaagcacgtgatgagcaacaccggcaactggatgcacatcagataccagagcaagctgcaggccagaaaggccctgagcaaggacggcagaatcttcggcgagagcatcatgatcggcgtgaagccctgcatcgacaagagcgtgatggagagcagcgacagatgcgccctgagcagccccagcctggccttcaccccccccatcaagaccctgggcacccccacccagcccggcagcacccccagaatcagcaccatgagacccctggccaccgcctacaaggccagcaccagcgactaccaggtgatcagcgacagacagacccccaagaaggacgagagcctggtgagcaaggccatggagtacatgttcggctggtag

SEQ ID NO: 106597 - DNA, 576 bp, Artificial Sequence
  derived and/or modified sequence
atgttcagcccagctagcatcggacagcctagaaaaaccactctcagccccgcacagcttgatcccttctatacacaaggcgacagcctgacctccgaagaccacctggacgatagttgggtcacggtttttgggttcccccaggcttctgcgagctacatcctcttgcaattcgcgcaatacggcaatatactaaaacatgtgatgagcaataccggaaactggatgcatattaggtatcagagtaaacttcaggcacggaaggccctgtctaaagatggtaggatcttcggcgagagtatcatgatcggtgtaaaaccatgcattgacaagtccgtcatggaatctagcgatagatgcgctctgagctcaccctcccttgcctttactccccccattaagactctggggacaccaacacagcccggcagcacacctaggatttctaccatgcggccgctggccacagcttacaaggccagtaccagcgactaccaagttatcagcgatcgccagaccccgaaaaaggatgagagcctggtcagtaaggccatggaatacatgttcgggtggtag

SEQ ID NO: 106598 - DNA, 576 bp, Artificial Sequence
  derived and/or modified sequence
atgttcagccctgccagcatcggccagcccaggaagaccaccctgagccctgcccagctggaccccttctacacccagggcgacagcctgaccagcgaggaccacctggatgacagctgggtgacagtgtttggcttcccccaggccagcgccagctacatcctgctgcagtttgcccagtatggcaacatcctgaagcacgtgatgagcaacacaggcaactggatgcacatccgctaccagagcaagctgcaggccaggaaggccctgagcaaggatggccgcatctttggagagagcatcatgattggagtgaagccctgcatcgacaagtctgtgatggagagcagtgacagatgtgccctgagcagccccagcctggccttcaccccacccatcaagaccctgggcacccccacccagcccggcagcaccccccgcatcagcaccatgaggcccctggccacagcctacaaggccagcaccagtgactaccaggtgatcagtgaccggcagacccccaagaaggatgagagcctggtgtccaaggccatggagtacatgtttggctggtag

SEQ ID NO: 106599 - DNA, 576 bp, Artificial Sequence
  derived and/or modified sequence
atgttcagccccgccagcatcggccagccccggaagaccaccctgtcgcccgctcagctcgatcctttttatacgcaaggggactctcttacgtccgaagatcaccttgacgattcttgggtcacagtttttggtttcccccaagcatcagcatcttatattttgcttcaatttgctcagtacggtaacatcttgaagcatgtgatgtccaataccggcaactggatgcacataaggtaccagtcaaaattgcaggcaagaaaagccctgtccaaggatggcagaatattcggcgagagcattatgatcggggtcaaaccctgcattgataaaagcgtcatggaatcgtcggaccgctgtgcactaagcagcccaagtctggcatttacaccacccataaaaactctagggaccccaacccaacctggatcaaccccccgaatatctaccatgcgtcccctcgccacggcctataaggcaagtacctctgactaccaggtgatctcggataggcagacccccaaaaaggatgagagtctcgtgtccaaagcaatggagtatatgtttggctggtag

SEQ ID NO: 106600 - DNA, 576 bp, Artificial Sequence
  derived and/or modified sequence
atgttcagccccgctagcattgggcagcccagaaaaactacactgtcaccagctcaattagatcctttttatacgcaaggagattccctgacctcggaagatcaccttgacgactcttgggtcaccgtgttcgggtttcctcaggcatctgcttcatacatcctcctgcagttcgcccagtatggtaacattctgaaacatgtcatgagcaacaccggtaactggatgcatattagatatcagtctaagctccaggctaggaaagcgctttctaaggatgggcgtatctttggggaaagcatcatgataggcgttaaaccttgcattgataaaagtgtcatggagtcttccgatcgatgcgctctctcctctcctagtctggctttcacaccacccattaagaccctcggcacccccacacagcccggttccacaccccgaatttcaacgatgcggccactcgctacagcgtacaaggcttcaacctctgactatcaggtgatcagcgaccgccagacgccaaagaaagacgaaagcctggtcagcaaggcaatggagtatatgttcgggtggtag

SEQ ID NO: 106601 - DNA, 576 bp, Artificial Sequence
  derived and/or modified sequence
atgttcagccccgccagcatcggccagcccagaaagaccaccctgagccccgcccagctggaccccttctacacccagggcgacagcctgaccagcgaggaccacctggacgacagctgggtgaccgtgttcggcttcccccaggccagcgccagctacatcctgctgcagttcgcccagtacggcaacatcctgaagcacgtgatgagcaacaccggcaactggatgcacatcagataccagagcaagctgcaggccagaaaggccctgagcaaggacggcagaatcttcggcgagagcatcatgatcggcgtgaagccctgcatcgacaagagcgtgatggagagcagcgacagatgcgccctgagcagccccagcctggccttcaccccccccatcaagaccctgggcacccccacccagcccggcagcacccccagaatcagcaccatgagacccctggccaccgcctacaaggccagcaccagcgactaccaggtgatcagcgacagacagacccccaagaaggacgagagcctggtgagcaaggccatggagtacatgttcggctggtag

SEQ ID NO: 106602 - protein, 156 aa, Artificial Sequence
  derived and/or modified sequence
MEELGPQAHANDPECGQRPVPALSHHGSQRVVLLQTATLLGVLLLGYGYFWLLVPNPEARLQQLGLFCSVFTISMYLSPLADLAKVIQTKSTQCLSYPLTIATLLTSASWCLYGFRLRDPYIMVSNFPGIVTSFIRFWLFWKYPQEQDRNYWLLQT

SEQ ID NO: 106603 - DNA, 471 bp, Artificial Sequence
  derived and/or modified sequence
atggaggagctgggcccccaggcccacgccaacgaccccgagtgcggccagagacccgtgcccgccctgagccaccacggcagccagagagtggtgctgctgcagaccgccaccctgctgggcgtgctgctgctgggctacggctacttctggctgctggtgcccaaccccgaggccagactgcagcagctgggcctgttctgcagcgtgttcaccatcagcatgtacctgagccccctggccgacctggccaaggtgatccagaccaagagcacccagtgcctgagctaccccctgaccatcgccaccctgctgaccagcgccagctggtgcctgtacggcttcagactgagagacccctacatcatggtgagcaacttccccggcatcgtgaccagcttcatcagattctggctgttctggaagtacccccaggagcaggacagaaactactggctgctgcagacctag

SEQ ID NO: 106604 - DNA, 471 bp, Artificial Sequence
  derived and/or modified sequence
atggaggagctggggccccaagcccatgcgaacgacccagaatgcggccagcgccccgtccccgcactttctcaccatggatctcaaagagttgtcctgttacaaacagcaactcttctcggggtgttactattagggtacgggtatttttggcttctggtcccgaaccccgaggcacggctgcagcagcttggactcttttgttccgtgtttactatctcaatgtatctctcacccttggcagacctggccaaggtaatacagactaaatctacccagtgtcttagctatcctctgacgattgccacgctcctcacctccgccagctggtgtctgtatggcttccggttacgggatccttacattatggtaagcaactttcctggaatcgtaacatctttcatccgattctggctgttttggaaatacccacaagagcaggatcgaaactactggctcttgcagacctag

SEQ ID NO: 106605 - DNA, 471 bp, Artificial Sequence
  derived and/or modified sequence
atggaggagctgggcccccaggcccacgccaatgaccctgaatgtggccagaggcctgtgcctgccctgagccaccacggcagccagagggtggtgctgctgcagacagccaccctgctgggcgtgctgctgctgggctacggctacttctggctgctggtgcccaaccctgaggcccggctgcagcagctgggcctcttctgcagcgtcttcaccatctccatgtacctgagccccctggccgacctggccaaggtgatccagaccaagagcacccagtgcctgagctaccccctgaccatcgccaccctgctgaccagcgcctcctggtgcctgtatggcttccggctgcgggacccctacatcatggtgagcaacttccctggcatcgtgaccagcttcatccgcttctggctgttctggaagtacccccaggagcaggacaggaactactggctgctgcagacctag

SEQ ID NO: 106606 - DNA, 471 bp, Artificial Sequence
  derived and/or modified sequence
atggaggagctgggcccccaggcccacgccaacgaccccgagtgcggacagcgtccagtgccagccctatcccaccacggtagtcaaagagtcgtgctgctacagaccgctactctgctgggcgtgctgcttcttggctatggttatttctggctgctggtgcccaaccccgaagctcgtctgcagcagttgggcctgttctgctctgtctttacaatttctatgtatctcagtccacttgccgatctcgctaaggtgattcaaactaaatcaacgcagtgcctctcataccctctgactatcgccacgttactgacatctgcgtcatggtgtctatatggattccggctgcgagacccctatataatggtgtctaattttccaggaatagtgacatcctttattaggttctggctattttggaaataccctcaggagcaggatcgaaactactggctcctgcaaacctag

SEQ ID NO: 106607 - DNA, 471 bp, Artificial Sequence
  derived and/or modified sequence
atggaagagctggggccacaggcgcacgccaatgatcccgaatgcgggcagcgccctgtgccggcattgtcccatcatgggtctcagcgagtcgttttgttgcagaccgcaaccctgttaggtgtcctgcttctcggatacggctacttttggctgttagtaccgaatcctgaggcgagactgcaacagctggggcttttctgcagtgtgttcactatctccatgtaccttagccctttagcagacctagctaaggtgattcaaacgaagagcacacagtgtctgtcttacccactgactatagctaccctgctgacaagcgctagctggtgcctatatggtttccgtttacgagacccctacataatggtgtccaactttcctgggatcgtgacaagcttcatccggttctggctgttctggaagtaccctcaggagcaggacaggaattactggctgctccagacatag

SEQ ID NO: 106608 - DNA, 886 bp, Artificial Sequence
  derived and/or modified sequence
cgagagggagggcaaaagaggaaggcttggtgattcctggtaatgtgttattttgagaaaaagcttcggcagcacactccagaaaaaaacttcccaaaccctgggcaactgaggttctgatgtggagctctggatggaaagcgtgctgaagtcttgttaaactagcaagcttttgtttggaggtccaccgccgaaggcgcacaggcctgtgggaacacgagcgttgagactgggggcgtctagatgatccaaggggtaggcagagtgtgagcagcggcaggtatcggggacacacccgcggagccctaggaaggggactgaccgggacatggaagagctcggacctcaggcacatgcgaatgacccggagtgtggacaacgtccagttcctgccctttctcaccacggaagtcaacgtgttgtgctcctacagactgcaaccctgctaggggtccttctcctgggttatggctacttttggctcctggtacccaaccctgaggcccggcttcagcagttgggcctcttctgcagtgtcttcaccatcagcatgtacctctcaccactggctgacttggctaaggtgattcaaactaaatcaacccaatgtctctcctacccactcaccattgctacccttctcacctctgcctcctggtgcctctatgggtttcgactcagagatccctatatcatggtgtccaactttccaggaatcgtcaccagctttatccgcttctggcttttctggaagtacccccaggagcaagacaggaactactggctcctgcaaacctgaggctgctcatctgaccactgggcaccttagtgccaacctgaaccaaagagacctccttgtttcagctgggcctgctgtccagcttcc

SEQ ID NO: 106609 - protein, 166 aa, Artificial Sequence
  derived and/or modified sequence
MGANTSRKPPVFDENEDVNFDHFEILRAIGKGSFGKVCIVQKNDTKKMYAMKYMNKQKCVERNEVRNVFKELQIMQGLEHPFLVNLWYSFQDEEDMFMVVDLLLGGDLRYHLQQNVHFKEETVKLFICELVMALDYLQNQRIIHRDMKPDNILLDEHVQQYTLKSH

SEQ ID NO: 106610 - protein, 417 aa, Artificial Sequence
  derived and/or modified sequence
MEFVKCLGHPEEFYNLVRFRIGGKRKVMPKMDQDSLSSSLKTCYKYLNQTSRSFAAVIQALDGEMRNAVCIFYLVLRALDTLEDDMTISVEKKVPLLHNFHSFLYQPDWRFMESKEKDRQVLEDFPTISLEFRNLAEKYQTVIADICRRMGIGMAEFLDKHVTSEQEWDKYCHYVAGLVGIGLSRLFSASEFEDPLVGEDTERANSMGLFLQKTNIIRDYLEDQQGGREFWPQEVWSRYVKKLGDFAKPENIDLAVQCLNELITNALHHIPDVITYLSRLRNQSVFNFCAIPQVMAIATLAACYNNQQVFKGAVKIRKGQAVTLMMDATNMPAVKAIIYQYMEEIYHRIPDSDPSSSKTRQIISTIRTQNLPNCQLISRSHYSPIYLSFVMLLAALSWQYLTTLSQVTEDYVQTGEH

SEQ ID NO: 106611 - protein, 374 aa, Artificial Sequence
  derived and/or modified sequence
MEFVKCLGHPEEFYNLVRFRIGGKRKVMPKMDQDSLSSSLKTCYKYLNQTSRSFAAVIQALDGEMRNAVCIFYLVLRALDTLEDDMTISVEKKVPLLHNFHSFLYQPDWRFMESKEKDRQVLEDFPTYCHYVAGLVGIGLSRLFSASEFEDPLVGEDTERANSMGLFLQKTNIIRDYLEDQQGGREFWPQEVWSRYVKKLGDFAKPENIDLAVQCLNELITNALHHIPDVITYLSRLRNQSVFNFCAIPQVMAIATLAACYNNQQVFKGAVKIRKGQAVTLMMDATNMPAVKAIIYQYMEEIYHRIPDSDPSSSKTRQIISTIRTQNLPNCQLISRSHYSPIYLSFVMLLAALSWQYLTTLSQVTEDYVQTGEH

SEQ ID NO: 106612 - protein, 332 aa, Artificial Sequence
  derived and/or modified sequence
MTISVEKKVPLLHNFHSFLYQPDWRFMESKEKDRQVLEDFPTISLEFRNLAEKYQTVIADICRRMGIGMAEFLDKHVTSEQEWDKYCHYVAGLVGIGLSRLFSASEFEDPLVGEDTERANSMGLFLQKTNIIRDYLEDQQGGREFWPQEVWSRYVKKLGDFAKPENIDLAVQCLNELITNALHHIPDVITYLSRLRNQSVFNFCAIPQVMAIATLAACYNNQQVFKGAVKIRKGQAVTLMMDATNMPAVKAIIYQYMEEIYHRIPDSDPSSSKTRQIISTIRTQNLPNCQLISRSHYSPIYLSFVMLLAALSWQYLTTLSQVTEDYVQTGEH

SEQ ID NO: 106613 - protein, 410 aa, Artificial Sequence
  derived and/or modified sequence
MEFVKCLGHPEEFYNLVRFRIGGKRKDSLSSSLKTCYKYLNQTSRSFAAVIQALDGEMRNAVCIFYLVLRALDTLEDDMTISVEKKVPLLHNFHSFLYQPDWRFMESKEKDRQVLEDFPTISLEFRNLAEKYQTVIADICRRMGIGMAEFLDKHVTSEQEWDKYCHYVAGLVGIGLSRLFSASEFEDPLVGEDTERANSMGLFLQKTNIIRDYLEDQQGGREFWPQEVWSRYVKKLGDFAKPENIDLAVQCLNELITNALHHIPDVITYLSRLRNQSVFNFCAIPQVMAIATLAACYNNQQVFKGAVKIRKGQAVTLMMDATNMPAVKAIIYQYMEEIYHRIPDSDPSSSKTRQIISTIRTQNLPNCQLISRSHYSPIYLSFVMLLAALSWQYLTTLSQVTEDYVQTGEH

SEQ ID NO: 106614 - protein, 353 aa, Artificial Sequence
  derived and/or modified sequence
MRNAVCIFYLVLRALDTLEDDMTISVEKKVPLLHNFHSFLYQPDWRFMESKEKDRQVLEDFPTISLEFRNLAEKYQTVIADICRRMGIGMAEFLDKHVTSEQEWDKYCHYVAGLVGIGLSRLFSASEFEDPLVGEDTERANSMGLFLQKTNIIRDYLEDQQGGREFWPQEVWSRYVKKLGDFAKPENIDLAVQCLNELITNALHHIPDVITYLSRLRNQSVFNFCAIPQVMAIATLAACYNNQQVFKGAVKIRKGQAVTLMMDATNMPAVKAIIYQYMEEIYHRIPDSDPSSSKTRQIISTIRTQNLPNCQLISRSHYSPIYLSFVMLLAALSWQYLTTLSQVTEDYVQTGEH

SEQ ID NO: 106615 - protein, 306 aa, Artificial Sequence
  derived and/or modified sequence
MESKEKDRQVLEDFPTISLEFRNLAEKYQTVIADICRRMGIGMAEFLDKHVTSEQEWDKYCHYVAGLVGIGLSRLFSASEFEDPLVGEDTERANSMGLFLQKTNIIRDYLEDQQGGREFWPQEVWSRYVKKLGDFAKPENIDLAVQCLNELITNALHHIPDVITYLSRLRNQSVFNFCAIPQVMAIATLAACYNNQQVFKGAVKIRKGQAVTLMMDATNMPAVKAIIYQYMEEIYHRIPDSDPSSSKTRQIISTIRTQNLPNCQLISRSHYSPIYLSFVMLLAALSWQYLTTLSQVTEDYVQTGEH

SEQ ID NO: 106616 - DNA, 2176 bp, Artificial Sequence
  derived and/or modified sequence
aatcagcgcccgtcagcccaccccacgaggccgcagctagccccgctggcggccgaggccggttgaagtgggcggagcggcgggcggggcgtcgccgtactaggcctgccccctgtccggccagcccctcgaagcacctactccacaggtccagccggccggtgagcgcctggggaccgcagaggtgagagtcgcgcccgggagtccgccgcctgcgccaggatggagttcgtgaaatgccttggccaccccgaagagttctacaacctggtgcgcttccggatcgggggcaagcggaaggtgatgcccaagatggaccaggactcgctcagcagcagcctgaaaacttgctacaagtatctcaatcagaccagtcgcagtttcgcagctgttatccaggcgctggatggggaaatgcgcaacgcagtgtgcatattttatctggttctccgagctctggacacactggaagatgacatgaccatcagtgtggaaaagaaggtcccgctgttacacaactttcactctttcctttaccaaccagactggcggttcatggagagcaaggagaaggatcgccaggtgctggaggacttcccaacgatctcccttgagtttagaaatctggctgagaaataccaaacagtgattgccgacatttgccggagaatgggcattgggatggcagagtttttggataagcatgtgacctctgaacaggagtgggacaagtactgccactatgttgctgggctggtcggaattggcctttcccgtcttttctcagcctcagagtttgaagaccccttagttggtgaagatacagaacgtgccaactctatgggcctgtttttgcagaaaacaaacatcatccgtgactatctggaagaccagcaaggaggaagagagttctggcctcaagaggtttggagcaggtatgttaagaagttaggggattttgctaagccggagaatattgacttggccgtgcagtgcctgaatgaacttataaccaatgcactgcaccacatcccagatgtcatcacctacctttcgagactcagaaaccagagtgtgtttaacttctgtgctattccacaggtgatggccattgccactttggctgcctgttataataaccagcaggtgttcaaaggggcagtgaagattcggaaagggcaagcagtgaccctgatgatggatgccaccaatatgccagctgtcaaagccatcatatatcagtatatggaagagatttatcatagaatccccgactcagacccatcttctagcaaaacaaggcagatcatctccaccatccggacgcagaatcttcccaactgtcagctgatttcccgaagccactactcccccatctacctgtcgtttgtcatgcttttggctgccctgagctggcagtacctgaccactctctcccaggtaacagaagactatgttcagactggagaacactgatcccaaatttgtccatagctgaagtccaccataaagtggatttactttttttctttaaggatggatgttgtgttctctttatttttttcctactactttaatccctaaaagaacgctgtgtggctgggacctttaggaaagtgaaatgcaggtgagaagaacctaaacatgaaaggaaagggtgcctcatcccagcaacctgtccttgtgggtgatgatcactgtgctgcttgtggctcatggcagagcattcagtgccacggtttaggtgaagtcgctgcatatgtgactgtcatgagatcctacttagtatgatcctggctagaatgataattaaaagtatttaatttgaagcaccatttgaatgttcgtaatagtagaaaatgatgtgaattttctttctgttcggctcctatttttctcatcattttgttttctttaattgggttgaatggagtagatagaaatatttatggtttaggtaacagttagatgtttcctaagaatgcaaactgccttttccacacaaaggctgggaataaaattctgggtattctcgtattctcatttaaaggagtttagctttcagagagaaacagcaggattgcttttgaccttttagaagattggtctccagtaaaggtggacatttttgagatttttataataaagaatttaattgctctgcatttgtcaagta

SEQ ID NO: 106617 - DNA, 1393 bp, Artificial Sequence
  derived and/or modified sequence
tcgaagcacctactccacaggtccagccggccggtgagcgcctggggaccgcagaggtgagagtcgcgcccgggagtccgccgcctgcgccaggatggagttcgtgaaatgccttggccaccccgaagagttctacaacctggtgcgcttccggatcgggggcaagcggaaggtgatgcccaagatggaccaggactcgctcagcagcagcctgaaaacttgctacaagtatctcaatcagaccagtcgcagtttcgcagctgttatccaggcgctggatggggaaatgcgcaacgcagtgtgcatattttatctggttctccgagctctggacacactggaagatgacatgaccatcagtgtggaaaagaaggtcccgctgttacacaactttcactctttcctttaccaaccagactggcggttcatggagagcaaggagaaggatcgccaggtgctggaggacttcccaacgtactgccactatgttgctgggctggtcggaattggcctttcccgtcttttctcagcctcagagtttgaagaccccttagttggtgaagatacagaacgtgccaactctatgggcctgtttttgcagaaaacaaacatcatccgtgactatctggaagaccagcaaggaggaagagagttctggcctcaagaggtttggagcaggtatgttaagaagttaggggattttgctaagccggagaatattgacttggccgtgcagtgcctgaatgaacttataaccaatgcactgcaccacatcccagatgtcatcacctacctttcgagactcagaaaccagagtgtgtttaacttctgtgctattccacaggtgatggccattgccactttggctgcctgttataataaccagcaggtgttcaaaggggcagtgaagattcggaaagggcaagcagtgaccctgatgatggatgccaccaatatgccagctgtcaaagccatcatatatcagtatatggaagagatttatcatagaatccccgactcagacccatcttctagcaaaacaaggcagatcatctccaccatccggacgcagaatcttcccaactgtcagctgatttcccgaagccactactcccccatctacctgtcgtttgtcatgcttttggctgccctgagctggcagtacctgaccactctctcccaggtaacagaagactatgttcagactggagaacactgatcccaaatttgtccatagctgaagtccaccataaagtggatttactttttttctttaaggatggatgttgtgttctctttatttttttcctactactttaatccctaaaagaacgctgtgtggctgggacctttaggaaagtgaaatgcaggtgagaagaacctaaacatgaaa

SEQ ID NO: 106618 - DNA, 1596 bp, Artificial Sequence
  derived and/or modified sequence
cggccggtgagcgcctggggaccgcagaggtgagagtcgcgcccgggagtccgccgcctgcgccaggatggagttcgtgaaatgccttggccaccccgaagagttctacaacctggtgcgcttccggatcgggggcaagcggaaggactcgctcagcagcagcctgaaaacttgctacaagtatctcaatcagaccagtcgcagtttcgcagctgttatccaggcgctggatggggaaatgcgcaacgcagtgtgcatattttatctggttctccgagctctggacacactggaagatgacatgaccatcagtgtggaaaagaaggtcccgctgttacacaactttcactctttcctttaccaaccagactggcggttcatggagagcaaggagaaggatcgccaggtgctggaggacttcccaacgatctcccttgagtttagaaatctggctgagaaataccaaacagtgattgccgacatttgccggagaatgggcattgggatggcagagtttttggataagcatgtgacctctgaacaggagtgggacaagtactgccactatgttgctgggctggtcggaattggcctttcccgtcttttctcagcctcagagtttgaagaccccttagttggtgaagatacagaacgtgccaactctatgggcctgtttttgcagaaaacaaacatcatccgtgactatctggaagaccagcaaggaggaagagagttctggcctcaagaggtttggagcaggtatgttaagaagttaggggattttgctaagccggagaatattgacttggccgtgcagtgcctgaatgaacttataaccaatgcactgcaccacatcccagatgtcatcacctacctttcgagactcagaaaccagagtgtgtttaacttctgtgctattccacaggtgatggccattgccactttggctgcctgttataataaccagcaggtgttcaaaggggcagtgaagattcggaaagggcaagcagtgaccctgatgatggatgccaccaatatgccagctgtcaaagccatcatatatcagtatatggaagagatttatcatagaatccccgactcagacccatcttctagcaaaacaaggcagatcatctccaccatccggacgcagaatcttcccaactgtcagctgatttcccgaagccactactcccccatctacctgtcgtttgtcatgcttttggctgccctgagctggcagtacctgaccactctctcccaggtaacagaagactatgttcagactggagaacactgatcccaaatttgtccatagctgaagtccaccataaagtggatttactttttttctttaaggatggatgttgtgttctctttatttttttcctactactttaatccctaaaagaacgctgtgtggctgggacctttaggaaagtgaaatgcaggtgagaagaacctaaacatgaaaggaaagggtgcctcatcccagcaacctgtccttgtgggtgatgatcactgtgctgcttgtggctcatggcagagcattcagtgccacggtttaggtgaagtcgctgcatatgtgactgtcat

SEQ ID NO: 106619 - DNA, 2013 bp, Artificial Sequence
  derived and/or modified sequence
atctggggcaaggggcgcggcgagcagggccgacgcctgggtgttcccgtccccctttcctcgagccttccccctgtagggcccgggtggacgcggccgtcctggctgacctgtccctgcccccgcaagccgccctgggcatgagcgacttttgcgtggttcccggtggttgcgctccccgtttcgtcccctccgtgagcatcggcgcttaccggtattttaacccgagggttacacatctgaggcaatgtgggtgggttacgcgggagaggacgagtgagttttttggtaagcggaatgaactatgcagataacatcacatgaaggccgtttctggaatgaagtctgactcctccagtttcaccacctcttccggagctctccccgccttgctgccttccatcgcttcatcctcggtgcttcctgagttttaaaatcgcctatctacgcttccaagttccaatgagttatctaacgtctatggattagctaggtggttggtggaaggactcgctcagcagcagcctgaaaacttgctacaagtatctcaatcagaccagtcgcagtttcgcagctgttatccaggcgctggatggggaaatgcgcaacgcagtgtgcatattttatctggttctccgagctctggacacactggaagatgacatgaccatcagtgtggaaaagaaggtcccgctgttacacaactttcactctttcctttaccaaccagactggcggttcatggagagcaaggagaaggatcgccaggtgctggaggacttcccaacgatctcccttgagtttagaaatctggctgagaaataccaaacagtgattgccgacatttgccggagaatgggcattgggatggcagagtttttggataagcatgtgacctctgaacaggagtgggacaagtactgccactatgttgctgggctggtcggaattggcctttcccgtcttttctcagcctcagagtttgaagaccccttagttggtgaagatacagaacgtgccaactctatgggcctgtttttgcagaaaacaaacatcatccgtgactatctggaagaccagcaaggaggaagagagttctggcctcaagaggtttggagcaggtatgttaagaagttaggggattttgctaagccggagaatattgacttggccgtgcagtgcctgaatgaacttataaccaatgcactgcaccacatcccagatgtcatcacctacctttcgagactcagaaaccagagtgtgtttaacttctgtgctattccacaggtgatggccattgccactttggctgcctgttataataaccagcaggtgttcaaaggggcagtgaagattcggaaagggcaagcagtgaccctgatgatggatgccaccaatatgccagctgtcaaagccatcatatatcagtatatggaagagatttatcatagaatccccgactcagacccatcttctagcaaaacaaggcagatcatctccaccatccggacgcagaatcttcccaactgtcagctgatttcccgaagccactactcccccatctacctgtcgtttgtcatgcttttggctgccctgagctggcagtacctgaccactctctcccaggtaacagaagactatgttcagactggagaacactgatcccaaatttgtccatagctgaagtccaccataaagtggatttactttttttctttaaggatggatgttgtgttctctttatttttttcctactactttaatccctaaaagaacgctgtgtggctgggacctttaggaaagtgaaatgcaggtgagaagaacctaaacatgaaaggaaagggtgcctcatcccagcaacctgtccttgtgggtgatgatcactgtgctgcttgtggctcatggcagagcattcagtgccacggtttaggtgaagtcgctgcatatgtgactgtcatgagatcctacttagtatgatcctggctagaatgataattaaaagtatttaatttg

SEQ ID NO: 106620 - DNA, 1761 bp, Artificial Sequence
  derived and/or modified sequence
aattgatggcgggggagccggatgtcagtggatggaaaattattacgaggaaacacaggggtgtgcattcttgctgaaggcaggccagagttatcagacatcacctgagggatggagggggatgtggaacctaatcggctgtctagggtgatcagatactgaagttgggggattctggtcaaatcaatttagcaggattcttggtaaaactgggcgatgcaaagacagatgcgttgagtacaaagtccaggccttattgggaagaggatttcagcggagcccgagtagagtttggtctagggagactctgtcactgggaggacgagcgagccgctcggaagtgcgctgggttcccttagcggccagtgggttctggactcgctcagcagcagcctgaaaacttgctacaagtatctcaatcagaccagtcgcagtttcgcagctgttatccaggcgctggatggggaaatgcgcaacgcagtgtgcatattttatctggttctccgagctctggacacactggaagatgacatgaccatcagtgtggaaaagaaggtcccgctgttacacaactttcactctttcctttaccaaccagactggcggttcatggagagcaaggagaaggatcgccaggtgctggaggacttcccaacgatctcccttgagtttagaaatctggctgagaaataccaaacagtgattgccgacatttgccggagaatgggcattgggatggcagagtttttggataagcatgtgacctctgaacaggagtgggacaagtactgccactatgttgctgggctggtcggaattggcctttcccgtcttttctcagcctcagagtttgaagaccccttagttggtgaagatacagaacgtgccaactctatgggcctgtttttgcagaaaacaaacatcatccgtgactatctggaagaccagcaaggaggaagagagttctggcctcaagaggtttggagcaggtatgttaagaagttaggggattttgctaagccggagaatattgacttggccgtgcagtgcctgaatgaacttataaccaatgcactgcaccacatcccagatgtcatcacctacctttcgagactcagaaaccagagtgtgtttaacttctgtgctattccacaggtgatggccattgccactttggctgcctgttataataaccagcaggtgttcaaaggggcagtgaagattcggaaagggcaagcagtgaccctgatgatggatgccaccaatatgccagctgtcaaagccatcatatatcagtatatggaagagatttatcatagaatccccgactcagacccatcttctagcaaaacaaggcagatcatctccaccatccggacgcagaatcttcccaactgtcagctgatttcccgaagccactactcccccatctacctgtcgtttgtcatgcttttggctgccctgagctggcagtacctgaccactctctcccaggtaacagaagactatgttcagactggagaacactgatcccaaatttgtccatagctgaagtccaccataaagtggatttactttttttctttaaggatggatgttgtgttctctttatttttttcctactactttaatccctaaaagaacgctgtgtggctgggacctttaggaaagtgaaatgcaggtgagaagaacctaaacatgaaaggaaagggtgcctcatcccagcaacctgtccttgtgggtgatgatcactgtgctgct

SEQ ID NO: 106621 - DNA, 1952 bp, Artificial Sequence
  derived and/or modified sequence
aaaaacggtggcaacacgctgggtttgctttacaacgcttgggaagctttgttgtttgcaataaattttaatacttgtctgtttcggtctgcactgcctttatgagctgtaacactcacagggtaggtttgcagcttcactcctgaagccagtaagacaacgaacccactgggagaaacaaacaactccagacgcgccgacttaagagctgtaatactcgctgtgacggtctgcagcttcactcctgagccagcgagaccacgaacccaccagaaggaagaaactccgaacacatctgaacatcagaaggaacagactccggacacgccgcctttaagaactgtaacactcaccgcgagggtgggcggtttcattcctgaagtcagtgagaccaagaaccaaccaattccggacacacttggactcgacagactctaaggactcgctcagcagcagcctgaaaacttgctacaagtatctcaatcagaccagtcgcagtttcgcagctgttatccaggcgctggatggggaaatgcgcaacgcagtgtgcatattttatctggttctccgagctctggacacactggaagatgacatgaccatcagtgtggaaaagaaggtcccgctgttacacaactttcactctttcctttaccaaccagactggcggttcatggagagcaaggagaaggatcgccaggtgctggaggacttcccaacgatctcccttgagtttagaaatctggctgagaaataccaaacagtgattgccgacatttgccggagaatgggcattgggatggcagagtttttggataagcatgtgacctctgaacaggagtgggacaagtactgccactatgttgctgggctggtcggaattggcctttcccgtcttttctcagcctcagagtttgaagaccccttagttggtgaagatacagaacgtgccaactctatgggcctgtttttgcagaaaacaaacatcatccgtgactatctggaagaccagcaaggaggaagagagttctggcctcaagaggtttggagcaggtatgttaagaagttaggggattttgctaagccggagaatattgacttggccgtgcagtgcctgaatgaacttataaccaatgcactgcaccacatcccagatgtcatcacctacctttcgagactcagaaaccagagtgtgtttaacttctgtgctattccacaggtgatggccattgccactttggctgcctgttataataaccagcaggtgttcaaaggggcagtgaagattcggaaagggcaagcagtgaccctgatgatggatgccaccaatatgccagctgtcaaagccatcatatatcagtatatggaagagatttatcatagaatccccgactcagacccatcttctagcaaaacaaggcagatcatctccaccatccggacgcagaatcttcccaactgtcagctgatttcccgaagccactactcccccatctacctgtcgtttgtcatgcttttggctgccctgagctggcagtacctgaccactctctcccaggtaacagaagactatgttcagactggagaacactgatcccaaatttgtccatagctgaagtccaccataaagtggatttactttttttctttaaggatggatgttgtgttctctttatttttttcctactactttaatccctaaaagaacgctgtgtggctgggacctttaggaaagtgaaatgcaggtgagaagaacctaaacatgaaaggaaagggtgcctcatcccagcaacctgtccttgtgggtgatgatcactgtgctgcttgtggctcatggcagagcattcagtgccacggtttaggtgaagtcgctgcatatgtgactgtcatgagatcctacttagtatgatcctggctagaatgataattaaaagtatttaatttgaagcacc

SEQ ID NO: 106622 - DNA, 1254 bp, Artificial Sequence
  derived and/or modified sequence
atggaatttgtaaaatgccttgggcatccagaagagttctacaaccttgtgcgctttcgtataggggggaagcgtaaggtgatgccaaagatggaccaggactccctgtcttcatccttgaagacatgctacaagtacttgaaccagacctctcgctccttcgccgctgtaatacaggctcttgacggggaaatgcgcaacgccgtgtgcattttttacttagtgctgcgcgcgctggataccctagaggatgatatgactataagcgtggaaaaaaaagtacctctgctgcacaacttccactcctttctgtatcaacccgactggagatttatggagagtaaagagaaagatcggcaggtacttgaggacttccctaccatctccttagagttcaggaacctggccgagaagtatcaaacagtcatcgcagacatttgtcgcagaatggggataggcatggcggagtttctggacaagcacgtaacatcagaacaagagtgggataaatattgtcactatgtggcaggactagttggtatcggtttgtccagactgttctctgcatcagagttcgaagatccactggttggtgaagacacggaacgggcaaactccatgggactgtttctgcagaagacaaatataatccgggactatctcgaggatcagcagggcggacgagagttttggccccaggaggtgtggagccgttacgtgaaaaagctaggcgattttgctaagcctgaaaacattgatctggccgtccaatgcctgaatgagctcatcacaaacgccctacaccatatccccgacgttatcacatacctttccaggttgcgaaaccagtcagttttcaatttttgcgccatccctcaagtgatggctattgccaccctggctgcctgttacaataatcagcaggtgttcaaaggcgcagtgaaaatccgaaaggggcaggccgtgacgctgatgatggacgccaccaatatgcccgctgttaaagccattatctaccagtacatggaagagatctatcatcgcatacccgactcggatcctagcagctctaagactcggcagataataagcacaatcagaacacagaatctccccaattgccagttgatatcccggtctcactactctcctatctacctgagtttcgtgatgttactggctgccttaagttggcagtacctgacgaccttaagtcaggtgaccgaggactacgtgcagacaggcgagcactag

SEQ ID NO: 106623 - DNA, 1125 bp, Artificial Sequence
  derived and/or modified sequence
atggaattcgtgaagtgcttgggacacccggaggaattctacaacctcgtccggttccggattggcggcaagcggaaagtgatgccaaagatggatcaggactccctgtcctcttcactcaagacttgctacaaatatctcaaccaaacaagcagaagctttgccgccgttattcaggctctcgatggcgaaatgaggaatgctgtctgcatcttttaccttgtgctaagagcactggacactctggaggacgatatgactatctccgtcgaaaaaaaagtcccgctgctgcataattttcactccttcttataccagcccgattggcggtttatggaaagtaaggagaaagaccgacaagttctggaagacttcccgacgtattgtcactacgtagctggcctggtgggtattggactctcccggcttttcagtgcaagcgagtttgaagatcctctggtgggggaggacaccgagagagctaacagcatgggtttgttcctgcagaaaaccaatataattcgcgactacctagaggatcaacagggcggccgggaattttggcctcaggaggtgtggagtagatatgtgaaaaagctgggcgacttcgcaaaacccgagaacatagacctggcagtccagtgtttgaacgaattgattaccaatgcactgcaccatatccccgacgtgattacctacctgtcgcggcttcggaaccagtctgttttcaacttctgcgctattccacaggtgatggccattgcaacgctggcagcctgctacaataaccagcaggtctttaaaggcgctgtgaaaattcgtaagggccaggccgtgactttaatgatggacgccactaatatgcccgcagtcaaggccatcatctaccagtatatggaggaaatctatcacaggattccggactcggatccatctagctctaagactaggcagatcatttcaacaatcaggacacagaacctcccaaactgtcagctgataagccgaagccactacagtcccatctacctgtcttttgtaatgctactcgcagcactgtcctggcagtaccttaccaccctgagtcaggtgactgaagactacgttcagactggcgagcattag

SEQ ID NO: 106624 - DNA, 1233 bp, Artificial Sequence
  derived and/or modified sequence
atggagttcgtaaaatgccttggacaccccgaagagttttacaatctggtaaggtttcggattggtggaaagcgaaaagactccttgtcaagctccctcaagacgtgttataaatacctgaatcagacatctcgttcgtttgctgcggtcattcaggccctcgatggagagatgagaaatgctgtgtgcatattttacctcgttttaagggccctggacactctggaggacgatatgacgatttccgtggagaagaaggttccccttcttcacaactttcacagcttcttgtatcagccagattggcggttcatggaaagtaaggaaaaagacaggcaggtgctggaggacttccctactatcagcctggagtttcggaacctagcagagaaataccagacagtaatagccgacatttgcaggcgtatgggtatcgggatggcggagtttctggacaaacacgttacgtcagagcaagagtgggacaagtattgccactatgtcgcagggcttgtcggtatcggcttgtcccggctgtttagcgccagcgaattcgaggatcctctggtgggagaggacaccgaaagggcaaatagcatgggtttgttcctgcagaagactaacatcatccgggactacctggaagatcaacagggcggacgggagttctggccccaagaggtgtggagtcgttatgtgaaaaagctcggggattttgccaagccagaaaacattgacctggccgtccagtgcctaaatgagctgattaccaacgctctgcaccacattccagatgtaattacctacctctctagattaaggaatcagtccgtatttaatttttgtgccattccccaggtgatggccattgccactctagccgcatgttacaataatcagcaggtgttcaagggggccgtgaagatcagaaaagggcaagcagtcactctcatgatggacgctaccaatatgccagcagtcaaggctattatttatcagtacatggaggagatctaccacaggatcccggactccgatccaagtagcagcaagacacgtcagattatttcaacaattagaacccaaaacctgcccaattgtcagcttatcagcagatctcactatagccccatctacctctcatttgtaatgttactcgctgctctctcttggcagtatctgacgacgcttagccaggtcaccgaagattacgtgcagactggagagcattag

SEQ ID NO: 106625 - DNA, 1254 bp, Artificial Sequence
  derived and/or modified sequence
atggagtttgtgaagtgcctgggccaccctgaggagttctacaacctggtgcgcttcagaattggaggcaagaggaaggtgatgcccaagatggaccaggacagcctgagcagcagcctgaagacctgctacaagtacctgaaccagaccagccgcagctttgctgctgtgatccaggccctggatggagagatgagaaatgctgtgtgcatcttctacctggtgctgcgggccctggacaccctggaggatgacatgaccatctctgtggagaagaaggtgcccctgctgcacaacttccacagcttcctgtaccagcctgactggaggttcatggagagcaaggagaaggaccggcaggtgctggaggacttccccaccatcagcctggagttcaggaacctggccgagaagtaccagacagtgattgctgacatctgcaggaggatgggcatcggcatggccgagttcctggacaagcacgtgaccagcgagcaggagtgggacaagtactgccactacgtggccggcctggtgggcatcggcctgagccgcctcttcagcgccagcgagtttgaggaccccctggtgggggaggacacagagcgggccaacagcatgggcctcttcctgcagaagaccaacatcatccgggactacctggaggaccagcagggcggccgggagttctggccccaggaggtgtggagccgctacgtgaagaagctgggggactttgccaagccagagaacatcgacctggccgtgcagtgcctgaatgagctgatcaccaatgccctgcaccacatcccagatgtgatcacctacctgagccggctgaggaaccagagcgtcttcaacttctgtgccatcccccaggtgatggccatcgccaccctggccgcctgctacaacaaccagcaggtgttcaagggagctgtgaagatcaggaagggccaggccgtgaccctgatgatggatgccaccaacatgcctgctgtgaaggccatcatctaccagtacatggaggagatctaccaccgcatcccagacagcgaccccagcagcagcaagacccggcagatcatcagcaccatccgcacccagaacctgcccaactgccagctgatcagccgcagccactacagccccatctacctgagctttgtgatgctgctggccgccctgtcctggcagtacctgaccaccctgagccaggtgacagaagattatgtgcagacaggagagcactag

SEQ ID NO: 106626 - DNA, 1125 bp, Artificial Sequence
  derived and/or modified sequence
atggagtttgtgaagtgcctgggccaccctgaggagttctacaacctggtgcgcttcagaattggaggcaagaggaaggtgatgcccaagatggaccaggacagcctgagcagcagcctgaagacctgctacaagtacctgaaccagaccagccgcagctttgctgctgtgatccaggccctggatggagagatgagaaatgctgtgtgcatcttctacctggtgctgcgggccctggacaccctggaggatgacatgaccatctctgtggagaagaaggtgcccctgctgcacaacttccacagcttcctgtaccagcctgactggaggttcatggagagcaaggagaaggaccggcaggtgctggaggacttccccacctactgccactacgtggccggcctggtgggcatcggcctgagccgcctcttcagcgccagcgagtttgaggaccccctggtgggggaggacacagagcgggccaacagcatgggcctcttcctgcagaagaccaacatcatccgggactacctggaggaccagcagggcggccgggagttctggccccaggaggtgtggagccgctacgtgaagaagctgggggactttgccaagccagaaaatattgacctggccgtgcagtgcctgaatgaactcatcaccaatgccctgcaccacatcccagatgtgatcacctacctgagccggctgaggaaccagagcgtcttcaacttctgtgccatcccccaggtgatggccatcgccaccctggccgcctgctacaacaaccagcaggtgttcaagggagctgtgaagatcaggaagggccaggccgtgaccctgatgatggatgccaccaacatgcctgctgtgaaggccatcatctaccagtacatggaggagatctaccaccgcatcccagacagcgaccccagcagcagcaagacccggcagatcatcagcaccatccgcacccagaacctgcccaactgccagctgatcagccgcagccactacagccccatctacctgagctttgtgatgctgctggccgccctgtcctggcagtacctgaccaccctgagccaggtgacagaggactatgtgcagacaggagagcactag

SEQ ID NO: 106627 - DNA, 1233 bp, Artificial Sequence
  derived and/or modified sequence
atggagtttgtgaagtgcctgggccaccctgaggagttctacaacctggtgcgcttcagaattggaggcaagaggaaggacagcctgagcagcagcctgaagacctgctacaagtacctgaaccagaccagccgcagctttgctgctgtgatccaggccctggatggagagatgagaaatgctgtgtgcatcttctacctggtgctgcgggccctggacaccctggaggatgacatgaccatctctgtggagaagaaggtgcccctgctgcacaacttccacagcttcctgtaccagcctgactggaggttcatggagagcaaggagaaggaccggcaggtgctggaggacttccccaccatcagcctggagttcaggaacctggccgagaagtaccagacagtgattgctgacatctgcaggaggatgggcatcggcatggccgagttcctggacaagcacgtgaccagcgagcaggagtgggacaagtactgccactacgtggccggcctggtgggcatcggcctgagccgcctcttcagcgccagcgagtttgaggaccccctggtgggggaggacacagagcgggccaacagcatgggcctcttcctgcagaagaccaacatcatccgggactacctggaggaccagcagggcggccgggagttctggccccaggaggtgtggagccgctacgtgaagaagctgggggactttgccaagccagaaaatattgacctggccgtgcagtgcctgaatgaactcatcaccaatgccctgcaccacatcccagatgtgatcacctacctgagccggctgaggaaccagagcgtcttcaacttctgtgccatcccccaggtgatggccatcgccaccctggccgcctgctacaacaaccagcaggtgttcaagggagctgtgaagatcaggaagggccaggccgtgaccctgatgatggatgccaccaacatgcctgctgtgaaggccatcatctaccagtacatggaggagatctaccaccgcatcccagacagcgaccccagcagcagcaagacccggcagatcatcagcaccatccgcacccagaacctgcccaactgccagctgatcagccgcagccactacagccccatctacctgagctttgtgatgctgctggccgccctgtcctggcagtacctgaccaccctgagccaggtgacagaggactatgtgcagacaggagagcactag

SEQ ID NO: 106628 - DNA, 1254 bp, Artificial Sequence
  derived and/or modified sequence
atggagttcgtgaagtgcctgggccaccccgaggagttctacaaccttgtcaggttccggatcggaggaaagaggaaagttatgcctaagatggatcaagatagcctgtctagttctctgaagacttgttataaatatctgaatcaaacctcaagaagttttgcagctgttatacaggctctcgatggagagatgcgcaatgccgtatgtatattttacctggttctccgcgctttggatacactggaggatgatatgactatcagtgttgagaagaaagtgcccttgctccacaattttcattcctttctgtatcagcccgactggcgatttatggaatctaaagaaaaggatcggcaagtgctggaggactttcctacaatatccctggaatttcggaatctcgccgagaagtaccaaacagtcatcgcagacatatgtagaagaatggggattggaatggcagaattcttggacaagcatgtgacctccgagcaggagtgggacaaatattgccactatgtggcggggcttgtggggatcggactgtctcgcctattcagtgcttctgaatttgaggatccgctggtgggagaggacacggagagagctaatagcatgggtctcttcctgcagaaaactaacatcattcgtgactatcttgaggatcagcagggtggccgcgaattctggcctcaggaggtctggtctagatacgtgaagaagctgggtgatttcgctaaacctgagaacatcgacctggcggtgcagtgtctgaacgagctaattactaatgctctgcatcacattccagacgtaattacatacctctccagattgagaaaccaatcagtatttaatttctgtgctatccctcaggtgatggctatcgccactcttgctgcctgctacaataaccaacaggtctttaagggggccgtgaaaatccggaaaggccaggcggtgacattgatgatggacgctacaaatatgcccgcagttaaagccataatataccagtatatggaggaaatctaccatagaatcccagacagcgatccctcaagctcaaagacgcggcagataattagtacgatcagaacccagaaccttccaaactgccaactgatctctagaagccactacagccctatctacctgtccttcgtgatgctgttggcagctctgagctggcaatatcttacgaccctttcccaagtgaccgaggattatgtgcaaacgggggagcattag

SEQ ID NO: 106629 - DNA, 1125 bp, Artificial Sequence
  derived and/or modified sequence
atggagttcgtgaagtgcctgggccaccccgaggagttctacaacctggtcaggtttaggattggaggcaaacgaaaggtaatgcccaaaatggaccaagacagcctgtctagcagtctcaagacttgttacaagtatctgaaccagacaagtaggtccttcgccgccgtgattcaggccctcgatggcgagatgcgaaacgccgtttgcatcttttatctggttcttagggcgctagacactctagaggatgacatgacgattagcgtggaaaagaaggtgccactcctccataactttcacagcttcctttaccagcctgattggagatttatggaatccaaagaaaaggaccggcaggtgctggaggacttccccacatactgccattatgttgccggactggtaggaattggcctgtcccgcctgttctccgcaagtgaatttgaggaccctcttgtcggtgaggacactgaaagagccaattctatgggcctgttcttacagaaaacaaacatcattcgagattatctcgaggatcaacagggtggtcgtgaattttggccacaagaggtctggagtagatatgtcaagaagctgggcgatttcgccaaacccgagaatatcgatctcgccgtgcagtgtctgaatgagcttattactaatgctcttcatcatattccagacgtcataacctatttaagtcgcttgcgcaaccagagtgttttcaacttttgtgccatccctcaggttatggccatcgccactctcgctgcatgttataataatcagcaggtctttaagggagccgtgaagatcagaaagggccaggcagtgaccctcatgatggatgctaccaacatgccggctgtgaaagctattatctatcagtatatggaagaaatctatcatcgcattcctgactcagatccctctagctcaaagactaggcagatcattagtactatcaggactcagaacttgcctaactgccagcttatctctcgatctcactattcccccatctatttgtcatttgtcatgctgcttgctgcattaagttggcaatatctcactacactttcacaggtcacagaggattatgtccaaacgggcgaacattag

SEQ ID NO: 106630 - DNA, 1233 bp, Artificial Sequence
  derived and/or modified sequence
atggagttcgtgaagtgcctgggccaccccgaggagttctacaacctagttagattccggatcggcgggaagagaaaggattcgctcagtagttccttaaagacatgctataagtatctgaaccagacatcgaggagcttcgcggccgttattcaggccctcgatggggaaatgaggaatgccgtgtgtattttctacctggtactgagagcgctagataccttagaggatgatatgacaatcagcgtcgagaaaaaagttccccttctgcataatttccatagcttcctttaccagcccgattggcgatttatggaatccaaagaaaaagatcggcaggtactcgaagacttcccgactatttcgctcgagtttcggaacttggctgagaagtaccaaactgtgatcgccgacatctgtcgccggatgggaatcggcatggccgagttcctggacaaacacgttacaagcgaacaggaatgggacaagtactgccactacgtcgccggcctggtggggataggcctcagtcggttattctcggccagcgagttcgaagatcctctagttggtgaggacactgaaagagctaattctatgggtctttttctgcagaagacaaacataattcgggattacctggaggaccagcaggggggtcgggaattttggccacaggaagtgtggtctcgatatgttaaaaaactgggcgatttcgctaaaccagaaaacattgacctggccgtgcagtgccttaacgagctgattaccaatgccttgcaccatattcctgacgtgatcacgtatctcagcagactgagaaatcagagcgtcttcaatttctgcgccataccgcaagtaatggccatcgcaaccctcgccgcatgctacaataaccagcaggtcttcaaaggcgccgtcaaaatccgcaaaggacaggcagtgacactcatgatggatgcgactaacatgccggccgtcaaggctatcatctaccagtatatggaggagatttaccaccggattcccgatagtgacccatctagtagcaaaactcgacaaataatttccacgatccggacgcagaatcttccgaattgtcagctgatttctcgcagtcactactctcctatttatctgagtttcgtgatgttgctcgctgctttgtcgtggcaatacctcaccacattgagccaggtgaccgaggattacgtacagacgggtgaacattag

SEQ ID NO: 106631 - DNA, 1254 bp, Artificial Sequence
  derived and/or modified sequence
atggagttcgtcaagtgcctgggtcaccccgaagaattttacaatctagtgaggttccgcataggaggaaagcggaaagtaatgccgaaaatggaccaagactcgctatcgagtagcctgaagacatgctacaaatacctgaatcaaacttcccggtcgtttgccgcagttatccaggctttagacggagagatgagaaacgccgtgtgtatcttttaccttgtactgagagccctcgacacgctggaggatgatatgaccattagcgtggagaaaaaggtccccctgttgcataactttcactcctttctttatcagcccgactggcggttcatggaatccaaggagaaagatcgccaggtgctggaggattttcctaccattagcttggagttcagaaacttggctgagaaatatcaaacagtgatcgccgacatttgtcggaggatgggaataggaatggccgagtttctggacaagcacgtgaccagcgaacaagagtgggacaagtattgccactatgtcgccggtttagtgggtattggcctgtccaggctgttctccgcttcagagtttgaagaccctctggtgggcgaagacacagagagggccaatagtatgggcttgttcctccagaagacaaacattatacgggactatttggaggatcagcaaggcggacgggaattctggcctcaggaggtatggagccggtatgtgaaaaagcttggagactttgccaaacctgagaatatcgatttggctgtacagtgcttgaacgaactaatcaccaatgcactgcaccacataccggacgtaattacatacctgagccggctgagaaaccagtcagtgtttaacttctgcgctatccctcaggttatggccatagcaacgcttgccgcttgttataataaccagcaggtgtttaagggcgctgtgaagatccggaagggtcaggctgtaacacttatgatggacgcaaccaacatgcctgcagtgaaggctattatctatcagtacatggaggagatctaccacaggatccctgacagtgatccctctagctcaaagacccgacagataatatccactataagaacccagaacctgcccaattgtcaactgattagccgcagccactactcacccatctatctgtcattcgtcatgctgctggctgccctctcgtggcagtacctgactacgctgtcgcaggtgaccgaagactacgtgcaaaccggggagcactag

SEQ ID NO: 106632 - DNA, 1125 bp, Artificial Sequence
  derived and/or modified sequence
atggagttcgtgaaatgtctgggccaccctgaggaattctacaacctcgtacggttcaggattggaggaaagcgtaaggtgatgccaaagatggatcaggacagccttagttcatcactgaagacgtgctataagtatctcaaccaaacctcgaggagcttcgctgcggtgatccaggcattggacggcgagatgaggaatgcggtgtgcatcttctacctggtgctcagggcactcgacacactcgaagatgacatgaccatcagcgttgagaagaaagtgccactccttcacaactttcattcattcctctatcagccagattggcgcttcatggagtcaaaggagaaagaccgccaagtgctggaggacttccccacatattgtcactatgtggcaggcttagttgggatcggcctgagccgtctgtttagtgccagcgaattcgaagaccccctcgtaggcgaggatactgaacgagccaattcaatgggactttttctgcaaaaaactaacattattcgagactatctggaggaccagcagggtggtcgagaattctggccgcaagaagtctggtcacgttatgtgaaaaaactgggtgacttcgcgaagcccgagaatatcgatctggctgtacagtgcctaaacgaactgattacgaacgccttgcatcacattcccgacgttatcacctatcttagcaggttacgcaatcagtcggtgtttaatttctgcgcgattcctcaggttatggccattgccaccttagccgcttgttataacaatcagcaggtgttcaaaggcgctgtgaagatacgaaaagggcaggctgtgaccttgatgatggacgccaccaacatgcccgcagtcaaagctatcatctaccagtatatggaagaaatttaccatcggattcctgacagtgatccaagctctagtaaaactcggcagattatctccaccatccgtactcagaaccttcctaactgtcaactcatctctaggagccactattcaccaatctacctctcttttgtcatgctgctcgcagcgctgagctggcagtatctgactactcttagccaggtgactgaagattacgtgcagaccggtgagcactag

SEQ ID NO: 106633 - DNA, 1233 bp, Artificial Sequence
  derived and/or modified sequence
atggaattcgtgaaatgcctcggacaccctgaagagttctataacttagtacgattccggataggcggtaaacgcaaagacagcttgtcttcctcgcttaagacctgttataagtatctgaaccagaccagtcgctcattcgccgcagtaattcaggccctcgacggagaaatgcggaacgcagtgtgcatattttacttggtccttcgcgcactcgatactctggaggacgacatgacaattagcgtggaaaaaaaggtcccactcttgcataattttcactcgtttctgtatcagccagattggcggttcatggagtccaaagagaaggacagacaggtcctggaggacttcccgacaatttctttggaattcaggaacctagctgaaaaataccagaccgtgattgctgacatctgcagacgtatggggatcgggatggccgagtttctggacaagcatgtaacctcggagcaggaatgggacaagtactgccactacgtagccggtttagtcgggatcggcctctctcggttgttttcagccagtgagtttgaggaccccctggtcggtgaggataccgagcgggcaaactccatgggtctcttcctgcagaagacaaacatcatccgcgactatttggaggaccaacagggtgggagagagttttggccacaggaggtgtggtcaagatatgtgaagaagctgggagatttcgcaaagccggagaacattgacctcgccgttcagtgtttgaatgaattgataactaacgctctgcaccacatacctgacgtgatcacatacctgagtcgtctcaggaatcaatccgtcttcaatttttgtgccataccgcaagtcatggctatagctacactggccgcatgctataataaccaacaagtattcaaaggcgctgtaaaaattaggaagggccaagccgtgaccttgatgatggacgcaaccaatatgcctgctgtcaaggctatcatataccaatacatggaagaaatttatcaccgaataccggacagtgacccctcaagttctaaaacaaggcagatcatctccactattaggacccagaacctgcccaactgtcagttgatcagccgttcccactactcaccaatttacttatcctttgtcatgctgctcgcggcattgagctggcagtacctgacaaccctgtcccaggtaactgaagactatgtgcaaactggagagcactag

SEQ ID NO: 106634 - DNA, 1254 bp, Artificial Sequence
  derived and/or modified sequence
atggagttcgtgaagtgcctgggccaccccgaggagttctacaacctggtgagattcagaatcggcggcaagagaaaggtgatgcccaagatggaccaggacagcctgagcagcagcctgaagacctgctacaagtacctgaaccagaccagcagaagcttcgccgccgtgatccaggccctggacggcgagatgagaaacgccgtgtgcatcttctacctggtgctgagagccctggacaccctggaggacgacatgaccatcagcgtggagaagaaggtgcccctgctgcacaacttccacagcttcctgtaccagcccgactggagattcatggagagcaaggagaaggacagacaggtgctggaggacttccccaccatcagcctggagttcagaaacctggccgagaagtaccagaccgtgatcgccgacatctgcagaagaatgggcatcggcatggccgagttcctggacaagcacgtgaccagcgagcaggagtgggacaagtactgccactacgtggccggcctggtgggcatcggcctgagcagactgttcagcgccagcgagttcgaggaccccctggtgggcgaggacaccgagagagccaacagcatgggcctgttcctgcagaagaccaacatcatcagagactacctggaggaccagcagggcggcagagagttctggccccaggaggtgtggagcagatacgtgaagaagctgggcgacttcgccaagcccgagaacatcgacctggccgtgcagtgcctgaacgagctgatcaccaacgccctgcaccacatccccgacgtgatcacctacctgagcagactgagaaaccagagcgtgttcaacttctgcgccatcccccaggtgatggccatcgccaccctggccgcctgctacaacaaccagcaggtgttcaagggcgccgtgaagatcagaaagggccaggccgtgaccctgatgatggacgccaccaacatgcccgccgtgaaggccatcatctaccagtacatggaggagatctaccacagaatccccgacagcgaccccagcagcagcaagaccagacagatcatcagcaccatcagaacccagaacctgcccaactgccagctgatcagcagaagccactacagccccatctacctgagcttcgtgatgctgctggccgccctgagctggcagtacctgaccaccctgagccaggtgaccgaggactacgtgcagaccggcgagcactag

SEQ ID NO: 106635 - DNA, 1125 bp, Artificial Sequence
  derived and/or modified sequence
atggagttcgtgaagtgcctgggccaccccgaggagttctacaacctggtgagattcagaatcggcggcaagagaaaggtgatgcccaagatggaccaggacagcctgagcagcagcctgaagacctgctacaagtacctgaaccagaccagcagaagcttcgccgccgtgatccaggccctggacggcgagatgagaaacgccgtgtgcatcttctacctggtgctgagagccctggacaccctggaggacgacatgaccatcagcgtggagaagaaggtgcccctgctgcacaacttccacagcttcctgtaccagcccgactggagattcatggagagcaaggagaaggacagacaggtgctggaggacttccccacctactgccactacgtggccggcctggtgggcatcggcctgagcagactgttcagcgccagcgagttcgaggaccccctggtgggcgaggacaccgagagagccaacagcatgggcctgttcctgcagaagaccaacatcatcagagactacctggaggaccagcagggcggcagagagttctggccccaggaggtgtggagcagatacgtgaagaagctgggcgacttcgccaagcccgagaacatcgacctggccgtgcagtgcctgaacgagctgatcaccaacgccctgcaccacatccccgacgtgatcacctacctgagcagactgagaaaccagagcgtgttcaacttctgcgccatcccccaggtgatggccatcgccaccctggccgcctgctacaacaaccagcaggtgttcaagggcgccgtgaagatcagaaagggccaggccgtgaccctgatgatggacgccaccaacatgcccgccgtgaaggccatcatctaccagtacatggaggagatctaccacagaatccccgacagcgaccccagcagcagcaagaccagacagatcatcagcaccatcagaacccagaacctgcccaactgccagctgatcagcagaagccactacagccccatctacctgagcttcgtgatgctgctggccgccctgagctggcagtacctgaccaccctgagccaggtgaccgaggactacgtgcagaccggcgagcactag

SEQ ID NO: 106636 - DNA, 1233 bp, Artificial Sequence
  derived and/or modified sequence
atggagttcgtgaagtgcctgggccaccccgaggagttctacaacctggtgagattcagaatcggcggcaagagaaaggacagcctgagcagcagcctgaagacctgctacaagtacctgaaccagaccagcagaagcttcgccgccgtgatccaggccctggacggcgagatgagaaacgccgtgtgcatcttctacctggtgctgagagccctggacaccctggaggacgacatgaccatcagcgtggagaagaaggtgcccctgctgcacaacttccacagcttcctgtaccagcccgactggagattcatggagagcaaggagaaggacagacaggtgctggaggacttccccaccatcagcctggagttcagaaacctggccgagaagtaccagaccgtgatcgccgacatctgcagaagaatgggcatcggcatggccgagttcctggacaagcacgtgaccagcgagcaggagtgggacaagtactgccactacgtggccggcctggtgggcatcggcctgagcagactgttcagcgccagcgagttcgaggaccccctggtgggcgaggacaccgagagagccaacagcatgggcctgttcctgcagaagaccaacatcatcagagactacctggaggaccagcagggcggcagagagttctggccccaggaggtgtggagcagatacgtgaagaagctgggcgacttcgccaagcccgagaacatcgacctggccgtgcagtgcctgaacgagctgatcaccaacgccctgcaccacatccccgacgtgatcacctacctgagcagactgagaaaccagagcgtgttcaacttctgcgccatcccccaggtgatggccatcgccaccctggccgcctgctacaacaaccagcaggtgttcaagggcgccgtgaagatcagaaagggccaggccgtgaccctgatgatggacgccaccaacatgcccgccgtgaaggccatcatctaccagtacatggaggagatctaccacagaatccccgacagcgaccccagcagcagcaagaccagacagatcatcagcaccatcagaacccagaacctgcccaactgccagctgatcagcagaagccactacagccccatctacctgagcttcgtgatgctgctggccgccctgagctggcagtacctgaccaccctgagccaggtgaccgaggactacgtgcagaccggcgagcactag

SEQ ID NO: 106637 - DNA, 1472 bp, Artificial Sequence
  derived and/or modified sequence
gcacattacacccatgaacttagaccagttgcctttatgtatgatcgtatttatactgagaagttactgtgttttttgactttcttttctatttgctacatattagttcggtctaaacgtttggtcttctggtctccatagttctacattggttaaatgcaactcacttctgggagtagtggtgacattcaactagtaggctttttaataaactacagaagttcattactctcatgtaaggaaggaaaactaatgtaactttcgttaagtatgaaaagcgttggatatccttatagttctttagagttaagggtgagatgggtttagaaagtggccaggcacaagttattttaaaataaaaaatctttggctgtttgttccaatatattaatagttttcccttttttacagcaacgcagtgtgcatattttatctggttctccgagctctggacacactggaagatgacatgaccatcagtgtggaaaagaaggtcccgctgttacacaactttcactctttcctttaccaaccagactggcggttcatggagagcaaggagaaggatcgccaggtgctggaggacttcccaacgatctcccttgagtttagaaatctggctgagaaataccaaacagtgattgccgacatttgccggagaatgggcattgggatggcagagtttttggataagcatgtgacctctgaacaggagtgggacaagtactgccactatgttgctgggctggtcggaattggcctttcccgtcttttctcagcctcagagtttgaagaccccttagttggtgaagatacagaacgtgccaactctatgggcctgtttttgcagaaaacaaacatcatccgtgactatctggaagaccagcaaggaggaagagagttctggcctcaagaggtttggagcaggtatgttaagaagttaggggattttgctaagccggagaatattgacttggccgtgcagtgcctgaatgaacttataaccaatgcactgcaccacatcccagatgtcatcacctacctttcgagactcagaaaccagagtgtgtttaacttctgtgctattccacaggtgatggccattgccactttggctgcctgttataataaccagcaggtgttcaaaggggcagtgaagattcggaaagggcaagcagtgaccctgatgatggatgccaccaatatgccagctgtcaaagccatcatatatcagtatatggaagagatttatcatagaatccccgactcagacccatcttctagcaaaacaaggcagatcatctccaccatccggacgcagaatcttcccaactgtcagctgatttcccgaagccactactcccccatctacctgtcgtttgtcatgcttttggctgccctgagctggcagtacctgaccactctctcccaggtaacagaagactatgttcagactggagaacactgatccc

SEQ ID NO: 106638 - DNA, 1909 bp, Artificial Sequence
  derived and/or modified sequence
cttggcagctgaacctgcctgtgagcaggtcgtgtatttctcggcttcccttatccaactttgcatttctatttctagcatattgggttgattcttttgaagctgcctctgtgcacattacacccatgaacttagaccagttgcctttatgtatgatcgtatttatactgagaagttactgtgttttttgactttcttttctatttgctacatattagttcggtctaaacgtttggtcttctggtctccatagttctacattggttaaatgcaactcacttctgggagtagtggtgacattcaactagtaggctttttaataaactacagaagttcattactctcatcaacgcagtgtgcatattttatctggttctccgagctctggacacactggaagatgacatgaccatcagtgtggaaaagaaggtcccgctgttacacaactttcactctttcctttaccaaccagactggcggttcatggagagcaaggagaaggatcgccaggtgctggaggacttcccaacgatctcccttgagtttagaaatctggctgagaaataccaaacagtgattgccgacatttgccggagaatgggcattgggatggcagagtttttggataagcatgtgacctctgaacaggagtgggacaagtactgccactatgttgctgggctggtcggaattggcctttcccgtcttttctcagcctcagagtttgaagaccccttagttggtgaagatacagaacgtgccaactctatgggcctgtttttgcagaaaacaaacatcatccgtgactatctggaagaccagcaaggaggaagagagttctggcctcaagaggtttggagcaggtatgttaagaagttaggggattttgctaagccggagaatattgacttggccgtgcagtgcctgaatgaacttataaccaatgcactgcaccacatcccagatgtcatcacctacctttcgagactcagaaaccagagtgtgtttaacttctgtgctattccacaggtgatggccattgccactttggctgcctgttataataaccagcaggtgttcaaaggggcagtgaagattcggaaagggcaagcagtgaccctgatgatggatgccaccaatatgccagctgtcaaagccatcatatatcagtatatggaagagatttatcatagaatccccgactcagacccatcttctagcaaaacaaggcagatcatctccaccatccggacgcagaatcttcccaactgtcagctgatttcccgaagccactactcccccatctacctgtcgtttgtcatgcttttggctgccctgagctggcagtacctgaccactctctcccaggtaacagaagactatgttcagactggagaacactgatcccaaatttgtccatagctgaagtccaccataaagtggatttactttttttctttaaggatggatgttgtgttctctttatttttttcctactactttaatccctaaaagaacgctgtgtggctgggacctttaggaaagtgaaatgcaggtgagaagaacctaaacatgaaaggaaagggtgcctcatcccagcaacctgtccttgtgggtgatgatcactgtgctgcttgtggctcatggcagagcattcagtgccacggtttaggtgaagtcgctgcatatgtgactgtcatgagatcctacttagtatgatcctggctagaatgataattaaaagtatttaatttgaagcaccatttgaatgttcgtaatagtagaaaatgatgtgaattttctttctgttcggctcctatttttctcatcattttgttttctttaattgggttgaatggagtagatagaaatatttatggtttaggtaacagttagatgtttcctaaga

SEQ ID NO: 106639 - DNA, 1062 bp, Artificial Sequence
  derived and/or modified sequence
atgagaaatgcagtgtgcattttttatcttgttttgagggccctggacacccttgaagatgacatgacaatcagcgttgaaaagaaagtccctctgctgcacaacttccacagtttcctctatcagcccgattggcgcttcatggagtcgaaagagaaggaccgccaggttttagaggattttcctaccatcagcctggagtttaggaacctggccgagaaatatcagaccgtcatagccgacatctgtcgccgtatgggtattggtatggcagaatttctcgacaaacacgtcacgtccgaacaagagtgggacaagtattgccattatgtcgccgggctcgttgggattggcctgtctagactttttagcgccagtgaattcgaggacccacttgtgggggaagacactgagagagcgaattccatgggcctgtttctgcagaaaactaatattatcagggactacctggaggatcagcagggcggtcgcgaattttggccacaggaggtgtggagcaggtatgtgaagaagctgggtgactttgccaaaccagaaaacattgacctggccgtgcagtgcctgaacgaactgattactaatgccctgcaccacattcctgacgtcatcacttacctttcaaggttacggaatcaaagcgtgtttaatttttgtgcgataccccaggtgatggctatcgcaaccttggccgcttgttacaataatcagcaagtgtttaagggagcagtaaaaatcagaaagggccaagccgttacattgatgatggatgcgactaacatgcctgcagtcaaggccatcatttatcagtacatggaagaaatctaccaccggatcccagattccgatccttctagttccaaaactcgtcagattattagtactataagaacacaaaaccttcctaattgccagttaatctcccggtctcactattcaccaatctacctgtcattcgtgatgctgctggctgctctttcctggcagtacctcacgaccctgagccaagtgacagaggattacgttcagaccggcgaacactag

SEQ ID NO: 106640 - DNA, 1062 bp, Artificial Sequence
  derived and/or modified sequence
atgagaaatgccgtctgcattttttacttggtgttacgtgcgctggacacactcgaagacgatatgactatcagcgtggagaaaaaggtgccgctgctccacaactttcacagcttcctctatcagcctgattggcgctttatggagtctaaagaaaaagatcgccaagtgctggaggatttccccacaataagcctggagtttaggaatttggcagagaagtaccaaacagtcatcgctgatatttgccggaggatgggtattggtatggccgaattcttggacaaacatgtaacatccgagcaggagtgggacaaatattgtcactatgtggccggcctcgtagggattggcttgagtcgcctgttctccgcctcagagtttgaagacccgctggtcggggaagataccgagcgggccaactctatggggctgtttctccagaaaacaaacattattcgggactatcttgaagaccagcagggcggccgagaattttggccacaagaggtgtggagtcgctacgtgaaaaaactgggggactttgccaagccagagaatatcgatctggctgtgcagtgcctgaacgagttgatcacaaatgccttgcatcacatcccagacgtgattacatatctgtcgagactgcgaaatcagtcagtgtttaatttctgcgcgattccgcaggtgatggctatcgccacattagcagcctgttacaataatcagcaggtcttcaaaggcgctgtcaagatccgcaaaggccaagcagtcactctcatgatggacgccaccaacatgccagccgtcaaggcaattatttaccagtatatggaggaaatctatcaccgcatcccagattctgacccgagcagctccaagacccgacagatcatctctacgatccgcactcagaacctgcctaattgccagcttatttctcgctcccattattcacccatctacctcagctttgtgatgctgttggctgccctgtcatggcagtaccttacaactttaagccaggtcacagaggattacgtccagaccggcgagcattag

SEQ ID NO: 106641 - DNA, 1062 bp, Artificial Sequence
  derived and/or modified sequence
atgagaaatgctgtgtgcatcttctacctggtgctgcgggccctggacaccctggaggatgacatgaccatctctgtggagaagaaggtgcccctgctgcacaacttccacagcttcctgtaccagcctgactggaggttcatggagagcaaggagaaggaccggcaggtgctggaggacttccccaccatcagcctggagttcaggaacctggccgagaagtaccagacagtgattgctgacatctgcaggaggatgggcatcggcatggccgagttcctggacaagcacgtgaccagcgagcaggagtgggacaagtactgccactacgtggccggcctggtgggcatcggcctgagccgcctcttcagcgccagcgagtttgaggaccccctggtgggggaggacacagagcgggccaacagcatgggcctcttcctgcagaagaccaacatcatccgggactacctggaggaccagcagggcggccgggagttctggccccaggaggtgtggagccgctacgtgaagaagctgggggactttgccaagccagagaacatcgacctggccgtgcagtgcctgaatgagctgatcaccaatgccctgcaccacatcccagatgtgatcacctacctgagccggctgaggaaccagagcgtcttcaacttctgtgccatcccccaggtgatggccatcgccaccctggccgcctgctacaacaaccagcaggtgttcaagggagctgtgaagatcaggaagggccaggccgtgaccctgatgatggatgccaccaacatgcctgctgtgaaggccatcatctaccagtacatggaggagatctaccaccgcatcccagacagcgaccccagcagcagcaagacccggcagatcatcagcaccatccgcacccagaacctgcccaactgccagctgatcagccgcagccactacagccccatctacctgagctttgtgatgctgctggccgccctgtcctggcagtacctgaccaccctgagccaggtgacagaagattatgtgcagacaggagagcactag

SEQ ID NO: 106642 - DNA, 1062 bp, Artificial Sequence
  derived and/or modified sequence
atgcggaacgccgtgtgcatcttctacctggtgctgcgggccctggacacattggaagacgacatgactattagtgtggagaaaaaggttccactcctgcacaatttccacagcttcttataccagcctgattggaggttcatggagtccaaagaaaaagataggcaggtcctagaagattttcccaccatttctctcgagtttcggaatctggcggagaaataccaaaccgtcatcgccgacatctgtaggcggatggggattgggatggcagaattcctggacaaacacgtcaccagtgaacaagagtgggacaaatactgccactacgtagcaggcctggtcggtattggcctgagtcggctcttctcagcatcggagttcgaggacccactggtcggggaggatactgaacgagccaacagcatgggcctgtttctgcaaaagacaaatattatcagagattacctcgaggatcagcaaggcgggcgggagttctggccccaagaagtatggagtaggtatgttaagaaactcggcgatttcgcgaagcccgagaatatagacctcgcagtacagtgcctaaatgaattgattaccaacgctctgcatcatattccagacgttatcacctacctgagtaggcttaggaatcagtcagtttttaacttttgtgccatcccccaagtcatggctatagccactctcgctgcttgctacaataaccagcaagtgtttaagggtgctgtaaaaatacgcaaaggacaagctgtgacgttgatgatggatgctacaaacatgcctgccgtgaaggctatcatctaccagtacatggaggaaatctatcaccggataccagacagtgacccgtcctcctcaaagacacgacagataatatccaccattcgcacccagaatctccctaattgtcagctcatctctcggtcccactacagtcctatttatctaagtttcgtgatgttgctggcagctcttagctggcagtacctcaccacattgagtcaggtgaccgaagactacgttcagaccggggagcattag

SEQ ID NO: 106643 - DNA, 1062 bp, Artificial Sequence
  derived and/or modified sequence
atgcggaacgccgtgtgcatcttctacctggtgctgcgggccctggacactttggaggacgacatgaccatctccgtggagaagaaagtacccctgctgcataactttcacagcttcctgtatcaacccgactggaggtttatggaaagtaaggagaaagatcggcaggtcctggaggactttcccactatttccctggaatttcgaaatctcgcagagaaataccagaccgtgattgctgacatttgcaggcggatgggtattggaatggctgagttcttagataaacatgttacctcagaacaggagtgggataaatactgtcattacgttgctggcttggtaggcatcggcttgtcccgcctgttcagcgcctctgagtttgaagatccacttgtcggcgaggacaccgaacgggccaatagcatgggcctgttccttcagaagacaaacatcatacgcgactatctggaggaccagcagggcggccgagaattctggccccaggaggtatggagcaggtatgtgaaaaaacttggcgactttgccaaacccgagaacatcgacctagcggtacagtgcctcaacgaattaatcaccaacgcccttcatcatattccggatgtgattacctatctgtcacggctacgaaatcagtctgtttttaacttttgtgcaatcccacaggtcatggccatcgcaacactcgcagcatgctacaacaatcagcaggtctttaaaggggcggttaagatcaggaagggccaggcggttacgcttatgatggacgcaacaaacatgccagccgtaaaggcaatcatctaccagtatatggaggaaatctaccaccgtattcccgactccgatccgagctcaagtaagacaagacagataatctcaactatcagaacccagaatctcccaaattgccaacttatttccaggagtcactactcccccatttatctcagcttcgttatgctcctagccgccctgtcctggcaatatctgactaccctgtcacaggtgacagaagactatgtgcaaacgggtgagcactag

SEQ ID NO: 106644 - DNA, 1062 bp, Artificial Sequence
  derived and/or modified sequence
atgagaaacgccgtgtgcattttctacctggtgctcagggccctggataccctcgaggacgatatgaccatatccgttgagaagaaggtgcccttgcttcacaatttccattctttcctttaccagcccgattggcgctttatggagagcaaagagaaagaccgacaggtgctagaagacttccctacaatctcgctcgagttcagaaatctcgccgaaaaataccagactgtgattgccgatatctgtcgccgtatgggcatagggatggccgagttcctggataagcatgtaacttctgaacaggaatgggataagtactgtcattacgtggccggactggtgggcattggcctgtcacgcctcttctccgctagcgaattcgaagatcctctggtgggagaagatactgagcgagctaattctatgggcctgttcttacaaaagaccaatatcatacgcgactatctggaggaccagcaaggcggtagagagttctggcctcaggaagtgtggtccaggtacgtgaagaaacttggagactttgccaaacccgagaacatcgacctggccgtccagtgcctgaatgagcttatcacaaacgcactgcaccatataccagatgtgatcacttacctgtcgaggttaaggaatcagtcggtgtttaacttttgcgccatcccacaggtaatggcaattgcaacattggcagcctgttataataaccagcaggtgttcaaaggcgctgtgaaaattaggaagggacaggctgtaacgctcatgatggatgccacaaacatgcctgccgtgaaggcaatcatctatcaatacatggaagagatctaccaccgaattcccgactctgacccctcatcatctaagacaaggcagatcatcagtaccataaggactcagaatctccctaactgtcagctgatctctcggtcacactacagccctatttatcttagtttcgtgatgctgcttgctgcactgtcctggcaatacctaactaccctctcgcaggtcactgaggactacgtgcagaccggggagcactag

SEQ ID NO: 106645 - DNA, 1062 bp, Artificial Sequence
  derived and/or modified sequence
atgcgcaacgctgtgtgcatcttttacctggtgttgcgggcattagatacgctcgaggacgatatgactatttcggtcgagaaaaaggtacccctcctacacaactttcattctttcctctatcaaccggactggcggttcatggagtctaaggagaaggatagacaggtccttgaagattttcctaccatttctttggaattccgcaatctcgccgaaaaatatcagaccgtgattgcagacatctgccgcagaatggggattggtatggctgaatttctggacaagcacgtgactagcgagcaagagtgggataaatactgtcattacgtggcgggacttgtgggcataggcctgagccggctcttctccgctagcgaattcgaagaccctctcgtgggtgaggatacggagagagctaattcaatgggcctattcctacagaagactaacataattcgggattatttagaagaccagcagggtggtcgagaattttggccccaggaggtttggtcccgctacgtgaagaaactgggggacttcgcaaagccagagaatattgatctggctgttcaatgccttaacgagttgatcacaaacgccctgcaccatataccagacgtgattacctacctgagtaggcttagaaatcagtcagtgttcaacttctgtgccatcccgcaggtaatggcaattgccaccctggctgcatgttacaataaccagcaggtgttcaagggagcagtcaaaatcaggaagggccaggctgtaacacttatgatggacgccactaacatgccagcggtaaaagctatcatctaccagtacatggaagagatatatcatcgaattcctgactcagatccctcatcttcgaagacacgccagatcatcagtacaattcgtactcaaaaccttcctaactgtcagctgattagccgctcccattacagccctatttatctgtcttttgtgatgctgctcgctgcgctgtcctggcaatatctgacaactctcagtcaggtgacagaggattacgtgcaaacaggtgagcattag

SEQ ID NO: 106646 - DNA, 1062 bp, Artificial Sequence
  derived and/or modified sequence
atgagaaacgccgtgtgcatcttctacctggtgctgagagccctggacaccctggaggacgacatgaccatcagcgtggagaagaaggtgcccctgctgcacaacttccacagcttcctgtaccagcccgactggagattcatggagagcaaggagaaggacagacaggtgctggaggacttccccaccatcagcctggagttcagaaacctggccgagaagtaccagaccgtgatcgccgacatctgcagaagaatgggcatcggcatggccgagttcctggacaagcacgtgaccagcgagcaggagtgggacaagtactgccactacgtggccggcctggtgggcatcggcctgagcagactgttcagcgccagcgagttcgaggaccccctggtgggcgaggacaccgagagagccaacagcatgggcctgttcctgcagaagaccaacatcatcagagactacctggaggaccagcagggcggcagagagttctggccccaggaggtgtggagcagatacgtgaagaagctgggcgacttcgccaagcccgagaacatcgacctggccgtgcagtgcctgaacgagctgatcaccaacgccctgcaccacatccccgacgtgatcacctacctgagcagactgagaaaccagagcgtgttcaacttctgcgccatcccccaggtgatggccatcgccaccctggccgcctgctacaacaaccagcaggtgttcaagggcgccgtgaagatcagaaagggccaggccgtgaccctgatgatggacgccaccaacatgcccgccgtgaaggccatcatctaccagtacatggaggagatctaccacagaatccccgacagcgaccccagcagcagcaagaccagacagatcatcagcaccatcagaacccagaacctgcccaactgccagctgatcagcagaagccactacagccccatctacctgagcttcgtgatgctgctggccgccctgagctggcagtacctgaccaccctgagccaggtgaccgaggactacgtgcagaccggcgagcactag

SEQ ID NO: 106647 - DNA, 999 bp, Artificial Sequence
  derived and/or modified sequence
atgactatttctgtcgaaaaaaaagttcccttactccacaacttccattcatttctgtatcaaccagattggcggtttatggaaagtaaggagaaggaccgacaggttctcgaggatttcccgaccatttccctggaattcagaaatctggccgagaaataccaaacagttattgctgatatttgtaggaggatgggaatcgggatggctgagtttctggacaaacatgtgacgagcgagcaagaatgggataagtactgtcattacgtggccggactggtaggcatcggtttgagtagactgttctcagctagcgaattcgaggaccccctagtcggagaagacacagaacgcgctaacagcatggggctatttctgcaaaaaacaaacattatcagagactatctggaggatcagcagggtggtcgggaattttggccacaggaggtctggagtcgctacgtaaagaaacttggtgatttcgccaagcccgaaaacatagacctggctgtacagtgcctcaatgaacttattactaacgcactacatcatatccctgatgtgatcacctacttgagccgccttcgcaatcagagtgtatttaacttttgcgctataccgcaggtcatggcgatcgccacgttggctgcatgctacaacaaccagcaggtgtttaaaggggctgtgaaaatccggaagggacaggctgtgacgctgatgatggatgcaactaatatgccagccgtcaaagccataatttaccagtacatggaagaaatctatcacagaatacctgattcagacccgtcctcatctaaaactaggcaaatcatctccaccataagaactcagaatctgcctaactgccagctgatctcacgctcacattatagtcctatctatcttagcttcgtgatgctcctcgctgccctgtcttggcagtacttgactacccttagccaagtgacggaggattatgtccagaccggcgaacactag

SEQ ID NO: 106648 - DNA, 999 bp, Artificial Sequence
  derived and/or modified sequence
atgactatttctgtggagaaaaaagtgccactattacacaatttccactctttcttataccagcctgactggcgcttcatggagagcaaagaaaaggaccggcaggtgttggaggactttccaaccatcagtctggaattcagaaatctcgccgaaaagtaccagaccgttatagccgatatttgcaggcggatgggaataggaatggctgaattccttgataaacacgttacatccgagcaagagtgggataaatattgtcactatgttgccggattggttgggattggcctcagccggctgttctccgcaagcgagttcgaggatcctcttgtgggggaagacactgaacgggcgaattctatgggactgtttctccagaagaccaatataattcgggattacctcgaggaccaacagggaggacgcgagttttggcctcaagaagtgtggtcccggtatgtgaagaaactgggcgactttgcaaagcccgagaatattgatctagctgtgcagtgtctgaatgagctcatcacgaatgccttacaccacattcctgacgtgatcacgtatctcagccgtcttcgcaaccagagcgtcttcaacttttgtgccatcccgcaggtcatggctattgctactttggctgcttgctataacaatcagcaagtgtttaagggagccgtaaaaatccgtaaaggacaggccgttacacttatgatggatgcgactaacatgcctgccgtaaaggccattatttatcagtacatggaggaaatataccataggatacccgattctgaccccagcagctcaaagacgaggcagatcatctccactatccggactcagaacctcccaaactgccagctgatcagcagatctcattactctcctatttatctaagttttgtgatgcttctcgcagctctatcctggcagtatctgactaccctttctcaagtcaccgaagattatgtacagactggcgaacactag

SEQ ID NO: 106649 - DNA, 921 bp, Artificial Sequence
  derived and/or modified sequence
atggaatccaaagaaaaagaccgacaggtgctggaggatttccccaccatcagcctcgagttcagaaatctcgctgaaaagtatcaaacagtaatcgctgatatctgtcgtcggatggggatcggcatggcagaatttctggacaagcatgtgacttccgagcaagaatgggataagtactgtcattacgtagccggactggtggggatcggccttagcaggctgttctccgctagtgagttcgaagatcctctggtgggcgaggatacagaacgtgcaaatagtatgggcctgttcctgcagaagacaaacattattagggactacttggaagatcagcaaggaggccgtgagttctggcctcaggaggtatggtcacgatatgttaaaaaactgggggattttgccaagccagagaatattgaccttgcagtccagtgtctgaatgagttaatcactaacgctcttcatcatatccctgacgttattacttatctcagccggttgcggaatcagtctgtgtttaacttctgcgctattcctcaagttatggctattgcaacccttgctgcgtgctacaacaaccagcaggtgtttaagggtgcagttaaaatcaggaagggccaagctgtgacactcatgatggatgccacaaatatgcccgccgtaaaagcaataatttaccagtatatggaagagatttaccacaggattcctgattccgacccaagcagttctaagactcggcagattatcagcacaattcgcacacagaatctgcctaactgccaactcattagcagatcccactattcgccaatctatctgtcattcgtgatgttgctagccgccctttcttggcaataccttaccactttgtcgcaagtgactgaggactatgtccagactggggagcattag

SEQ ID NO: 106650 - DNA, 999 bp, Artificial Sequence
  derived and/or modified sequence
atgaccatctctgtggagaagaaggtgcccctgctgcacaacttccacagcttcctgtaccagcctgactggaggttcatggagagcaaggagaaggaccggcaggtgctggaggacttccccaccatcagcctggagttcaggaacctggccgagaagtaccagacagtgattgctgacatctgcaggaggatgggcatcggcatggccgagttcctggacaagcacgtgaccagcgagcaggagtgggacaagtactgccactacgtggccggcctggtgggcatcggcctgagccgcctcttcagcgccagcgagtttgaggaccccctggtgggggaggacacagagcgggccaacagcatgggcctcttcctgcagaagaccaacatcatccgggactacctggaggaccagcagggcggccgggagttctggccccaggaggtgtggagccgctacgtgaagaagctgggggactttgccaagccagaaaatattgacctggccgtgcagtgcctgaatgaactcatcaccaatgccctgcaccacatcccagatgtgatcacctacctgagccggctgaggaaccagagcgtcttcaacttctgtgccatcccccaggtgatggccatcgccaccctggccgcctgctacaacaaccagcaggtgttcaagggagctgtgaagatcaggaagggccaggccgtgaccctgatgatggatgccaccaacatgcctgctgtgaaggccatcatctaccagtacatggaggagatctaccaccgcatcccagacagcgaccccagcagcagcaagacccggcagatcatcagcaccatccgcacccagaacctgcccaactgccagctgatcagccgcagccactacagccccatctacctgagctttgtgatgctgctggccgccctgtcctggcagtacctgaccaccctgagccaggtgacagaggactatgtgcagacaggagagcactag

SEQ ID NO: 106651 - DNA, 921 bp, Artificial Sequence
  derived and/or modified sequence
atggagagcaaggagaaggaccggcaggtgctggaggacttccccaccatcagcctggagttcaggaacctggccgagaagtaccagacagtgattgctgacatctgcaggaggatgggcatcggcatggccgagttcctggacaagcacgtgaccagcgagcaggagtgggacaagtactgccactacgtggccggcctggtgggcatcggcctgagccgcctcttcagcgccagcgagtttgaggaccccctggtgggggaggacacagagcgggccaacagcatgggcctcttcctgcagaagaccaacatcatccgggactacctggaggaccagcagggcggccgggagttctggccccaggaggtgtggagccgctacgtgaagaagctgggggactttgccaagccagaaaatattgacctggccgtgcagtgcctgaatgaactcatcaccaatgccctgcaccacatcccagatgtgatcacctacctgagccggctgaggaaccagagcgtcttcaacttctgtgccatcccccaggtgatggccatcgccaccctggccgcctgctacaacaaccagcaggtgttcaagggagctgtgaagatcaggaagggccaggccgtgaccctgatgatggatgccaccaacatgcctgctgtgaaggccatcatctaccagtacatggaggagatctaccaccgcatcccagacagcgaccccagcagcagcaagacccggcagatcatcagcaccatccgcacccagaacctgcccaactgccagctgatcagccgcagccactacagccccatctacctgagctttgtgatgctgctggccgccctgtcctggcagtacctgaccaccctgagccaggtgacagaggactatgtgcagacaggagagcactag

SEQ ID NO: 106652 - DNA, 999 bp, Artificial Sequence
  derived and/or modified sequence
atgaccatcagcgtggagaagaaggtgcccctgctgcacaacttccactctttcctgtaccagccagactggaggtttatggaaagcaaggaaaaagaccggcaggtgctggaagactttcccactatatccctcgagtttaggaacctagccgaaaaataccagaccgttatagctgacatttgccggcggatggggatcgggatggcagaatttctcgataagcacgtcacgtcagaacaggagtgggacaaatactgtcactatgtggccggtttagttggaataggcctcagccggctcttttccgcatccgagtttgaagaccctcttgtgggagaagatacagagcgggccaattccatgggattatttctccagaagacaaacattattcgggattacttggaagatcagcaggggggcagagagttctggccgcaggaggtctggtcacgctacgtaaaaaaactgggggattttgccaaacctgaaaacatagacctcgccgttcagtgtttgaacgaactcatcactaacgcgctccaccacattcccgacgtaattacttacctttctcggctccgcaaccaaagcgtgtttaacttctgtgccattcctcaggtgatggcaatcgccactctggctgcatgctacaacaaccagcaggttttcaagggagccgtgaagatcaggaagggccaagccgtgacactcatgatggatgccactaatatgccagccgtgaaggctattatctatcagtacatggaggagatctaccaccgaatcccagatagcgaccccagtagcagcaagacccggcaaataatcagcaccatacggacgcagaatctgccaaactgccagctaatctcgaggtctcactatagcccaatttacctgtcattcgttatgttattagccgccctctcctggcagtacctcacaactctgtctcaggtcacagaggactatgtgcagaccggtgaacactag

SEQ ID NO: 106653 - DNA, 999 bp, Artificial Sequence
  derived and/or modified sequence
atgaccatcagcgtggagaagaaggtgcccctgctgcacaacttccactcctttctgtaccagcccgactggcggttcatggagtccaaggagaaggaccgacaggtgttggaggactttcctaccattagcttggagtttcggaaccttgccgagaaatatcagacggtaatagcagatatttgccggcggatgggaattggcatggccgagttcttggacaaacacgttacctccgagcaggaatgggataagtattgtcactatgtcgccggactggtcgggatcggtctgtcccgcctcttttcagcttccgagtttgaggatcctttggtcggggaggacaccgagcgagcgaacagtatgggactgtttctgcagaagactaatatcatcagggactacctggaggatcagcaggggggcagggaattctggcctcaagaagtttggtcaagatatgtaaagaagctgggtgactttgcgaagcccgagaacatagacttggcagtacagtgcctgaacgagctcatcacaaatgcactccatcacatacctgacgtgataacctacctgtcacggctgcggaaccagagcgtgttcaatttctgcgccattccccaggtgatggctatagccacacttgctgcttgttataataaccagcaagtattcaagggggcagttaaaataagaaagggccaagccgtcacactcatgatggacgcgacaaatatgcccgccgtcaaagccataatctaccaatatatggaagagatttaccaccgaattccagactcggacccttccagctccaaaactaggcagatcatcagcacgatccggacgcagaacttacccaactgccagttgatttccaggagtcactactcacctatctacttgagttttgtcatgctgctggcagctctctcttggcagtacctcaccacgctgtctcaagtgaccgaagactacgtgcagacaggggagcattag

SEQ ID NO: 106654 - DNA, 921 bp, Artificial Sequence
  derived and/or modified sequence
atggagagcaaggagaaggaccggcaggtgctggaggacttccccactatctcattggagttccgcaacttggctgagaaatatcagactgtcattgcagatatctgtcgtagaatggggattgggatggctgagttcctcgacaaacacgtgacatcagagcaggagtgggataagtattgccactacgtggcagggttggtaggaatcggactgagtaggctcttttccgcatcagagtttgaagacccgctggtgggagaggatactgaacgggccaactcaatgggactctttctgcagaagactaacattattcgtgattatctagaggaccagcagggtgggagggaattctggccacaggaagtgtggagccgatatgttaaaaagcttggcgacttcgccaagcccgagaacatcgatctggcagtgcagtgtctgaatgaactaatcactaatgcccttcaccatataccagacgtaatcacatatctatccaggctgcgcaaccagagcgtcttcaatttctgtgccattccccaggtcatggccatagcgacacttgctgcttgctataacaatcagcaggtgtttaaaggcgctgtgaaaattcggaaaggacaggccgtaactctaatgatggacgctaccaacatgcccgccgtcaaagccatcatctaccagtatatggaggagatctaccacagaatcccggatagtgacccatcctcgagtaagacccggcaaatcatctccaccattcggactcagaacctacccaactgccagctcattagtcggagccactatagtcccatttacttgagttttgtgatgctgctagcggctctgagttggcaatacctgacaaccctgtcacaggtcacagaggattacgtgcagacaggggagcactag

SEQ ID NO: 106655 - DNA, 999 bp, Artificial Sequence
  derived and/or modified sequence
atgaccatatcggtcgagaagaaggtccctctgttgcacaacttccattcatttctataccaacccgattggcgatttatggaatctaaggagaaagaccgccaagtcctggaggactttccgacaataagcttggagttcaggaatttggcagaaaaataccagaccgtcatcgccgatatctgtcgtcgaatgggaatcgggatggctgagtttttggacaagcatgtcacatctgaacaggaatgggacaagtattgtcattacgtggccggactggtgggaattggtctgtcgcggctattcagtgcaagcgagtttgaagaccccctggttggagaagatacggagagagcaaattcaatgggactgttcctccagaagaccaatatcattagggactacctcgaagatcagcaggggggtagggagttttggccacaagaggtctggtcccgttacgtcaagaaactgggtgatttcgccaaacctgaaaacatagacctcgccgtgcagtgccttaacgagcttatcacgaacgccttgcatcatattcccgatgtaatcacctacctgtctaggttgaggaaccagagcgtttttaacttttgcgcaatccctcaagtgatggcaatagcaacactagctgcctgctacaataaccaacaggttttcaagggcgcagtgaaaattaggaaagggcaggcagttaccctgatgatggatgctacaaatatgcccgcagttaaagccataatttatcagtacatggaagagatctaccaccgcattcccgactctgatccctccagttccaagactcgacagataattagcacaattcggacacagaatctccccaactgtcaactcatttctagaagccattactcgccaatctacctgtcctttgtaatgttgcttgccgctctgagctggcaatacttaaccaccctgtcacaggttacggaggactatgtgcaaactggcgagcattag

SEQ ID NO: 106656 - DNA, 999 bp, Artificial Sequence
  derived and/or modified sequence
atgaccatcagtgtggagaagaaagtgcctttgctgcacaatttccactcttttttgtatcaaccagattggcgcttcatggaaagcaaagaaaaggacaggcaggtcctggaagattttccgaccatttccttggagtttcgaaacttggccgagaaatatcagactgtgatagcagatatttgcagaagaatgggtattgggatggcggaattcctggacaagcacgtcacctctgagcaagagtgggacaagtactgccattacgtcgccggtctggtggggataggtctctccaggctcttcagtgcatctgagtttgaggaccccttggtcggggaagatacagagagagctaactccatgggcctattcctacagaaaaccaatattattcgcgattacctggaagaccagcagggcggtagagagttctggccacaggaggtctggagtaggtacgtcaagaagctgggtgatttcgccaagcccgagaatatagatctcgccgtacaatgtttaaatgagctcataacaaatgcgctgcatcacatcccagacgtgatcacctacctgtccaggctgcggaatcagtccgttttcaacttttgtgctattccacaggtgatggccattgctacacttgccgcatgttataataatcagcaagtattcaagggcgctgtgaagatccgaaaagggcaggctgttacgcttatgatggacgcgactaacatgcctgcagtcaaagccataatctaccagtacatggaggaaatataccaccgtattccagacagcgatccatctagcagtaaaacgcggcagattattagcactattaggactcaaaacctcccaaactgccagctgatcagccgttcccattacagccccatctatctttcattcgtgatgctgctggccgctttgtcctggcaatatctcacaacactctctcaagtgacagaggattacgtgcagacaggcgaacactag

SEQ ID NO: 106657 - DNA, 921 bp, Artificial Sequence
  derived and/or modified sequence
atggaatctaaggaaaaagacaggcaagtgctggaggatttccccaccatctctctggaatttcgcaatctggccgagaagtatcagacagttatcgcagatatctgcaggcgaatgggcataggcatggcagagttcctggacaagcacgtaacatctgaacaggagtgggataagtactgtcactatgtggccggactggttggtatcgggttaagccgtctttttagtgcttccgagttcgaggaccctcttgtcggagaagataccgagagagccaactcaatgggcctcttcctgcagaaaactaacatcatccgggattatctggaggaccagcagggcggaagagaattttggccgcaggaggtctggagccgttacgtcaaaaagctgggcgacttcgctaagccagagaatattgacttggctgtgcagtgtttgaatgagctgatcaccaacgcgctccaccatatacctgacgtgatcacctacctgagtcgcctgcggaaccagtccgtctttaatttctgcgctattcctcaggttatggccatcgctacactagcagcctgttacaacaaccagcaggtttttaaaggtgctgtaaaaatcagaaagggacaagcggtcacattgatgatggacgccactaatatgccagcagtgaaagccataatttaccaatatatggaagaaatttaccatcgcatccctgattctgatcccagttcgtctaagacaaggcaaatcataagcaccatccggacacagaacctgcctaactgccaactaatcagtaggtcgcactattctcccatttacctcagttttgtcatgctgctggctgctcttagttggcagtaccttaccaccctctctcaagtgaccgaagactacgtccagactggtgaacattag

SEQ ID NO: 106658 - DNA, 999 bp, Artificial Sequence
  derived and/or modified sequence
atgaccatcagcgtggagaagaaggtgcccctgctgcacaacttccacagcttcctgtaccagcccgactggagattcatggagagcaaggagaaggacagacaggtgctggaggacttccccaccatcagcctggagttcagaaacctggccgagaagtaccagaccgtgatcgccgacatctgcagaagaatgggcatcggcatggccgagttcctggacaagcacgtgaccagcgagcaggagtgggacaagtactgccactacgtggccggcctggtgggcatcggcctgagcagactgttcagcgccagcgagttcgaggaccccctggtgggcgaggacaccgagagagccaacagcatgggcctgttcctgcagaagaccaacatcatcagagactacctggaggaccagcagggcggcagagagttctggccccaggaggtgtggagcagatacgtgaagaagctgggcgacttcgccaagcccgagaacatcgacctggccgtgcagtgcctgaacgagctgatcaccaacgccctgcaccacatccccgacgtgatcacctacctgagcagactgagaaaccagagcgtgttcaacttctgcgccatcccccaggtgatggccatcgccaccctggccgcctgctacaacaaccagcaggtgttcaagggcgccgtgaagatcagaaagggccaggccgtgaccctgatgatggacgccaccaacatgcccgccgtgaaggccatcatctaccagtacatggaggagatctaccacagaatccccgacagcgaccccagcagcagcaagaccagacagatcatcagcaccatcagaacccagaacctgcccaactgccagctgatcagcagaagccactacagccccatctacctgagcttcgtgatgctgctggccgccctgagctggcagtacctgaccaccctgagccaggtgaccgaggactacgtgcagaccggcgagcactag

SEQ ID NO: 106659 - DNA, 921 bp, Artificial Sequence
  derived and/or modified sequence
atggagagcaaggagaaggacagacaggtgctggaggacttccccaccatcagcctggagttcagaaacctggccgagaagtaccagaccgtgatcgccgacatctgcagaagaatgggcatcggcatggccgagttcctggacaagcacgtgaccagcgagcaggagtgggacaagtactgccactacgtggccggcctggtgggcatcggcctgagcagactgttcagcgccagcgagttcgaggaccccctggtgggcgaggacaccgagagagccaacagcatgggcctgttcctgcagaagaccaacatcatcagagactacctggaggaccagcagggcggcagagagttctggccccaggaggtgtggagcagatacgtgaagaagctgggcgacttcgccaagcccgagaacatcgacctggccgtgcagtgcctgaacgagctgatcaccaacgccctgcaccacatccccgacgtgatcacctacctgagcagactgagaaaccagagcgtgttcaacttctgcgccatcccccaggtgatggccatcgccaccctggccgcctgctacaacaaccagcaggtgttcaagggcgccgtgaagatcagaaagggccaggccgtgaccctgatgatggacgccaccaacatgcccgccgtgaaggccatcatctaccagtacatggaggagatctaccacagaatccccgacagcgaccccagcagcagcaagaccagacagatcatcagcaccatcagaacccagaacctgcccaactgccagctgatcagcagaagccactacagccccatctacctgagcttcgtgatgctgctggccgccctgagctggcagtacctgaccaccctgagccaggtgaccgaggactacgtgcagaccggcgagcactag

SEQ ID NO: 106660 - protein, 260 aa, Artificial Sequence
  derived and/or modified sequence
MLQDWKERAASVWCKWLDVNPNHHLVKAPQPDLPCPCPLSLLPGFAGSCLPRFSTMPFIYCNINEVCHYARRNDKSYWLSTTAPIPMMPVSQTQIPQYISRCSVCEAPSQAIAVHSQDITIPQCPLGWRSLWIGYSFLMHTAAGAEGGGQSLVSPGSCLEDFRATPFIECSGARGTCHYFANKYSFWLTTVEERQQFGELPVSETLKAGQLHTRVSRCQPGFTGPGIKEWKWKWHHSPSAPVIHQQNFCFLFPRHYVLLA

SEQ ID NO: 106661 - protein, 1666 aa, Artificial Sequence
  derived and/or modified sequence
MHPGLWLLLVTLCLTEELAAAGEKSYGKPCGGQDCSGSCQCFPEKGARGRPGPIGIQGPTGPQGFTGSTGLSGLKGERGFPGLLGPYGPKGDKGPMGVPGFLGINGIPGHPGQPGPRGPPGLDGCNGTQGAVGFPGPDGYPGLLGPPGLPGQKGSKGDPVLAPGSFKGMKGDPGLPGLDGITGPQGAPGFPGAVGPAGPPGLQGPPGPPGPLGPDGNMGLGFQGEKGVKGDVGLPGPAGPPPSTGELEFMGFPKGKKGSKGEPGPKGFPGISGPPGFPGLGTTGEKGEKGEKGIPGLPGPRGPMGSEGVQGPPGQQGKKGTLGFPGLNGFQGIEGQKGDIGLPGPDVFIDIDGAVISGNPGDPGVPGLPGLKGDEGIQGLRGPSGVPGLPALSGVPGALGPQGFPGLKGDQGNPGRTTIGAAGLPGRDGLPGPPGPPGPPSPEFETETLHNKESGFPGLRGEQGPKGNLGLKGIKGDSGFCACDGGVPNTGPPGEPGPPGPWGLIGLPGLKGARGDRGSGGAQGPAGAPGLVGPLGPSGPKGKKGEPILSTIQGMPGDRGDSGSQGFRGVIGEPGKDGVPGLPGLPGLPGDGGQGFPGEKGLPGLPGEKGHPGPPGLPGNGLPGLPGPRGLPGDKGKDGLPGQQGLPGSKGITLPCIIPGSYGPSGFPGTPGFPGPKGSRGLPGTPGQPGSSGSKGEPGSPGLVHLPELPGFPGPRGEKGLPGFPGLPGKDGLPGMIGSPGLPGSKGATGDIFGAENGAPGEQGLQGLTGHKGFLGDSGLPGLKGVHGKPGLLGPKGERGSPGTPGQVGQPGTPGSSGPYGIKGKSGLPGAPGFPGISGHPGKKGTRGKKGPPGSIVKKGLPGLKGLPGNPGLVGLKGSPGSPGVAGLPALSGPKGEKGSVGFVGFPGIPGLPGIPGTRGLKGIPGSTGKMGPSGRAGTPGEKGDRGNPGPVGIPSPRRPMSNLWLKGDKGSQGSAGSNGFPGPRGDKGEAGRPGPPGLPGAPGLPGIIKGVSGKPGPPGFMGIRGLPGLKGSSGITGFPGMPGESGSQGIRGSPGLPGASGLPGLKGDNGQTVEISGSPGPKGQPGESGFKGTKGRDGLIGNIGFPGNKGEDGKVGVSGDVGLPGAPGFPGVAGMRGEPGLPGSSGHQGAIGPLGSPGLIGPKGPSITGVPGPAGLPGPKGEKGYPGIGIGAPGKPGLRGQKGDRGFPGLQGPAGLPGAPGISLPSLIAGQPGDPGRPGLDGERGRPGPAGPPGPPGPSSNQGDTGDPGFPGIPGPKGPKGDQGIPGFSGLPGELGLKGMRGEPGFMGTPGKVGPPGDPGFPGMKGKAGPRGSSGLQGDPGQTPTAEAVQVPPGPLGLPGIDGIPGLTGDPGAQGPVGLQGSKGLPGIPGKDGPSGLPGPPGALGDPGLPGLQGPPGFEGAPGQQGPFGMPGMPGQSMRVGYTLVKHSQSEQVPPCPIGMSQLWVGYSLLFVEGQEKAHNQDLGFAGSCLPRFSTMPFIYCNINEVCHYARRNDKSYWLSTTAPIPMMPVSQTQIPQYISRCSVCEAPSQAIAVHSQDITIPQCPLGWRSLWIGYSFLMHTAAGAEGGGQSLVSPGSCLEDFRATPFIECSGARGTCHYFANKYSFWLTTVEERQQFGELPVSETLKAGQLHTRVSRCQVCMKSL

SEQ ID NO: 106662 - protein, 1633 aa, Artificial Sequence
  derived and/or modified sequence
MHPGLWLLLVTLCLTEELAAAGEKSYGKPCGGQDCSGSCQCFPEKGARGRPGPIGIQGPTGPQGFTGSTGLSGLKGERGFPGLLGPYGPKGDKGPMGVPGFLGINGIPGHPGQPGPRGPPGLDGCNGTQGAVGFPGPDGYPGLLGPPGLPGQKGSKGDPVLAPGSFKGMKGDPGLPGLDGITGPQGAPGFPGAVGPAGPPGLQGPPGPPGPLGPDGNMGLGFQGEKGVKGDVGLPGPAGPPPSTGELEFMGFPKGKKGSKGEPGPKGFPGISGPPGFPGLGTTGEKGEKGEKGIPGLPGPRGPMGSEGVQGPPGQQGKKGTLGFPGLNGFQGIEGQKGDIGLPGPDVFIDIDGAVISGNPGDPGVPGLPGLKGDEGIQGLRGPSGVPGLPALSGVPGALGPQGFPGLKGDQGNPGRTTIGAAGLPGRDGLPGPPGPPGPPSPEFETETLHNKESGFPGLRGEQGPKGNLGLKGIKGDSGFCACDGGVPNTGPPGEPGPPGPWGLIGLPGLKGARGDRGSGGAQGPAGAPGLVGPLGPSGPKGKKGEPILSTIQGMPGDRGDSGSQGFRGVIGEPGKDGVPGLPGLPGLPGDGGQGFPGEKGLPGLPGEKGHPGPPGLPGNGLPGLPGPRGLPGDKGKDGLPGQQGLPGSKGITLPCIIPGSYGPSGFPGTPGFPGPKGSRGLPGTPGQPGSSGSKGEPGSPGLVHLPELPGFPGPRGEKGLPGFPGLPGKDGLPGMIGSPGLPGSKGATGDIFGAENGAPGEQGLQGLTGHKGFLGDSGLPGLKGVHGKPGLLGPKGERGSPGTPGQVGQPGTPGSSGPYGIKGKSGLPGAPGFPGISGHPGKKGTRGKKGPPGSIVKKGLPGLKGLPGNPGLVGLKGSPGSPGVAGLPALSGPKGEKGSVGFVGFPGIPGLPGIPGTRGLKGIPGSTGKMGPSGRAGTPGEKGDRGNPGPVGIPSPRRPMSNLWLKGDKGSQGSAGSNGFPGPRGDKGEAGRPGPPGLPGAPGLPGIIKGVSGKPGPPGFMGIRGLPGLKGSSGITGFPGMPGESGSQGIRGSPGLPGASGLPGLKGDNGQTVEISGSPGPKGQPGESGFKGTKGRDGLIGNIGFPGNKGEDGKVGVSGDVGLPGAPGFPGVAGMRGEPGLPGSSGHQGAIGPLGSPGLIGPKGPSITGVPGPAGLPGPKGEKGYPGIGIGAPGKPGLRGQKGDRGFPGLQGPAGLPGAPGISLPSLIAGQPGDPGRPGLDGERGRPGPAGPPGPPGPSSNQGDTGDPGFPGIPGPKGPKGDQGIPGFSGLPGELGLKGSSGLQGDPGQTPTAEAVQVPPGPLGLPGIDGIPGLTGDPGAQGPVGLQGSKGLPGIPGKDGPSGLPGPPGALGDPGLPGLQGPPGFEGAPGQQGPFGMPGMPGQSMRVGYTLVKHSQSEQVPPCPIGMSQLWVGYSLLFVEGQEKAHNQDLGFAGSCLPRFSTMPFIYCNINEVCHYARRNDKSYWLSTTAPIPMMPVSQTQIPQYISRCSVCEAPSQAIAVHSQDITIPQCPLGWRSLWIGYSFLMHTAAGAEGGGQSLVSPGSCLEDFRATPFIECSGARGTCHYFANKYSFWLTTVEERQQFGELPVSETLKAGQLHTRVSRCQVCMKSL

SEQ ID NO: 106663 - DNA, 783 bp, Artificial Sequence
  derived and/or modified sequence
atgctgcaggactggaaggagagagccgccagcgtgtggtgcaagtggctggacgtgaaccccaaccaccacctggtgaaggccccccagcccgacctgccctgcccctgccccctgagcctgctgcccggcttcgccggcagctgcctgcccagattcagcaccatgcccttcatctactgcaacatcaacgaggtgtgccactacgccagaagaaacgacaagagctactggctgagcaccaccgcccccatccccatgatgcccgtgagccagacccagatcccccagtacatcagcagatgcagcgtgtgcgaggcccccagccaggccatcgccgtgcacagccaggacatcaccatcccccagtgccccctgggctggagaagcctgtggatcggctacagcttcctgatgcacaccgccgccggcgccgagggcggcggccagagcctggtgagccccggcagctgcctggaggacttcagagccacccccttcatcgagtgcagcggcgccagaggcacctgccactacttcgccaacaagtacagcttctggctgaccaccgtggaggagagacagcagttcggcgagctgcccgtgagcgagaccctgaaggccggccagctgcacaccagagtgagcagatgccagcccggcttcaccggccccggcatcaaggagtggaagtggaagtggcaccacagccccagcgcccccgtgatccaccagcagaacttctgcttcctgttccccagacactacgtgctgctggcctag

SEQ ID NO: 106664 - DNA, 4902 bp, Artificial Sequence
  derived and/or modified sequence
atgcaccccggcctgtggctgctgctggtgaccctgtgcctgaccgaggagctggccgccgccggcgagaagagctacggcaagccctgcggcggccaggactgcagcggcagctgccagtgcttccccgagaagggcgccagaggcagacccggccccatcggcatccagggccccaccggcccccagggcttcaccggcagcaccggcctgagcggcctgaagggcgagagaggcttccccggcctgctgggcccctacggccccaagggcgacaagggccccatgggcgtgcccggcttcctgggcatcaacggcatccccggccaccccggccagcccggccccagaggcccccccggcctggacggctgcaacggcacccagggcgccgtgggcttccccggccccgacggctaccccggcctgctgggcccccccggcctgcccggccagaagggcagcaagggcgaccccgtgctggcccccggcagcttcaagggcatgaagggcgaccccggcctgcccggcctggacggcatcaccggcccccagggcgcccccggcttccccggcgccgtgggccccgccggcccccccggcctgcagggcccccccggcccccccggccccctgggccccgacggcaacatgggcctgggcttccagggcgagaagggcgtgaagggcgacgtgggcctgcccggccccgccggccccccccccagcaccggcgagctggagttcatgggcttccccaagggcaagaagggcagcaagggcgagcccggccccaagggcttccccggcatcagcggcccccccggcttccccggcctgggcaccaccggcgagaagggcgagaagggcgagaagggcatccccggcctgcccggccccagaggccccatgggcagcgagggcgtgcagggcccccccggccagcagggcaagaagggcaccctgggcttccccggcctgaacggcttccagggcatcgagggccagaagggcgacatcggcctgcccggccccgacgtgttcatcgacatcgacggcgccgtgatcagcggcaaccccggcgaccccggcgtgcccggcctgcccggcctgaagggcgacgagggcatccagggcctgagaggccccagcggcgtgcccggcctgcccgccctgagcggcgtgcccggcgccctgggcccccagggcttccccggcctgaagggcgaccagggcaaccccggcagaaccaccatcggcgccgccggcctgcccggcagagacggcctgcccggcccccccggcccccccggcccccccagccccgagttcgagaccgagaccctgcacaacaaggagagcggcttccccggcctgagaggcgagcagggccccaagggcaacctgggcctgaagggcatcaagggcgacagcggcttctgcgcctgcgacggcggcgtgcccaacaccggcccccccggcgagcccggcccccccggcccctggggcctgatcggcctgcccggcctgaagggcgccagaggcgacagaggcagcggcggcgcccagggccccgccggcgcccccggcctggtgggccccctgggccccagcggccccaagggcaagaagggcgagcccatcctgagcaccatccagggcatgcccggcgacagaggcgacagcggcagccagggcttcagaggcgtgatcggcgagcccggcaaggacggcgtgcccggcctgcccggcctgcccggcctgcccggcgacggcggccagggcttccccggcgagaagggcctgcccggcctgcccggcgagaagggccaccccggcccccccggcctgcccggcaacggcctgcccggcctgcccggccccagaggcctgcccggcgacaagggcaaggacggcctgcccggccagcagggcctgcccggcagcaagggcatcaccctgccctgcatcatccccggcagctacggccccagcggcttccccggcacccccggcttccccggccccaagggcagcagaggcctgcccggcacccccggccagcccggcagcagcggcagcaagggcgagcccggcagccccggcctggtgcacctgcccgagctgcccggcttccccggccccagaggcgagaagggcctgcccggcttccccggcctgcccggcaaggacggcctgcccggcatgatcggcagccccggcctgcccggcagcaagggcgccaccggcgacatcttcggcgccgagaacggcgcccccggcgagcagggcctgcagggcctgaccggccacaagggcttcctgggcgacagcggcctgcccggcctgaagggcgtgcacggcaagcccggcctgctgggccccaagggcgagagaggcagccccggcacccccggccaggtgggccagcccggcacccccggcagcagcggcccctacggcatcaagggcaagagcggcctgcccggcgcccccggcttccccggcatcagcggccaccccggcaagaagggcaccagaggcaagaagggcccccccggcagcatcgtgaagaagggcctgcccggcctgaagggcctgcccggcaaccccggcctggtgggcctgaagggcagccccggcagccccggcgtggccggcctgcccgccctgagcggccccaagggcgagaagggcagcgtgggcttcgtgggcttccccggcatccccggcctgcccggcatccccggcaccagaggcctgaagggcatccccggcagcaccggcaagatgggccccagcggcagagccggcacccccggcgagaagggcgacagaggcaaccccggccccgtgggcatccccagccccagaagacccatgagcaacctgtggctgaagggcgacaagggcagccagggcagcgccggcagcaacggcttccccggccccagaggcgacaagggcgaggccggcagacccggcccccccggcctgcccggcgcccccggcctgcccggcatcatcaagggcgtgagcggcaagcccggcccccccggcttcatgggcatcagaggcctgcccggcctgaagggcagcagcggcatcaccggcttccccggcatgcccggcgagagcggcagccagggcatcagaggcagccccggcctgcccggcgccagcggcctgcccggcctgaagggcgacaacggccagaccgtggagatcagcggcagccccggccccaagggccagcccggcgagagcggcttcaagggcaccaagggcagagacggcctgatcggcaacatcggcttccccggcaacaagggcgaggacggcaaggtgggcgtgagcggcgacgtgggcctgcccggcgcccccggcttccccggcgtggccggcatgagaggcgagcccggcctgcccggcagcagcggccaccagggcgccatcggccccctgggcagccccggcctgatcggccccaagggccccagcatcaccggcgtgcccggccccgccggcctgcccggccccaagggcgagaagggctaccccggcatcggcatcggcgcccccggcaagcccggcctgagaggccagaagggcgacagaggcttccccggcctgcagggccccgccggcctgcccggcgcccccggcatcagcctgcccagcctgatcgccggccagcccggcgaccccggcagacccggcctggacggcgagagaggcagacccggccccgccggcccccccggcccccccggccccagcagcaaccagggcgacaccggcgaccccggcttccccggcatccccggccccaagggccccaagggcgaccagggcatccccggcttcagcggcctgcccggcgagctgggcctgaagggcagcagcggcctgcagggcgaccccggccagacccccaccgccgaggccgtgcaggtgccccccggccccctgggcctgcccggcatcgacggcatccccggcctgaccggcgaccccggcgcccagggccccgtgggcctgcagggcagcaagggcctgcccggcatccccggcaaggacggccccagcggcctgcccggcccccccggcgccctgggcgaccccggcctgcccggcctgcagggcccccccggcttcgagggcgcccccggccagcagggccccttcggcatgcccggcatgcccggccagagcatgagagtgggctacaccctggtgaagcacagccagagcgagcaggtgcccccctgccccatcggcatgagccagctgtgggtgggctacagcctgctgttcgtggagggccaggagaaggcccacaaccaggacctgggcttcgccggcagctgcctgcccagattcagcaccatgcccttcatctactgcaacatcaacgaggtgtgccactacgccagaagaaacgacaagagctactggctgagcaccaccgcccccatccccatgatgcccgtgagccagacccagatcccccagtacatcagcagatgcagcgtgtgcgaggcccccagccaggccatcgccgtgcacagccaggacatcaccatcccccagtgccccctgggctggagaagcctgtggatcggctacagcttcctgatgcacaccgccgccggcgccgagggcggcggccagagcctggtgagccccggcagctgcctggaggacttcagagccacccccttcatcgagtgcagcggcgccagaggcacctgccactacttcgccaacaagtacagcttctggctgaccaccgtggaggagagacagcagttcggcgagctgcccgtgagcgagaccctgaaggccggccagctgcacaccagagtgagcagatgccaggtgtgcatgaagagcctgtag

SEQ ID NO: 106665 - DNA, 783 bp, Artificial Sequence
  derived and/or modified sequence
atgctccaagactggaaggagcgtgccgcttctgtatggtgcaagtggttggacgttaatcccaatcatcacctggttaaagccccccaaccggacctaccatgcccatgccctctctctctcctgcccggtttcgccggctcatgcctcccacgcttctcaactatgcctttcatttattgtaacataaacgaggtgtgtcactacgctagacgaaatgacaaatcctactggctgagtactaccgcccctatccctatgatgccagtgagccagacacaaattccccagtatatatcccggtgttcagtatgcgaggcccccagtcaggcaattgctgtccattcccaggacattactattcctcagtgcccgttgggatggcgttccctatggatcggctatagcttcctcatgcataccgctgctggagcagaaggaggaggccagagtttggtttcacccggtagctgcctggaggactttcgggcgacccccttcatagagtgcagcggcgctaggggtacctgtcattattttgccaacaaatactctttttggcttacaactgttgaggagagacagcagttcggcgagctgcctgtaagtgagacactgaaggctgggcaacttcataccagagtttcacgatgccagcctggatttaccggacccggaatcaaagaatggaaatggaagtggcatcattctccatccgcacccgtgatccaccaacagaatttctgcttccttttcccacgacattatgtattgctcgcctag

SEQ ID NO: 106666 - DNA, 4902 bp, Artificial Sequence
  derived and/or modified sequence
atgcatcccggcctctggcttcttctggtgacgctgtgtctaacggaagagctggccgctgcgggcgaaaagtcttacggcaagccttgcggagggcaggactgctcagggagttgtcagtgctttcctgagaaaggagcacgaggtcgtcccggccctatcggaatccaggggcctacgggcccccaggggtttactggatctacaggtctgtcaggactgaagggcgagcgtggttttcctggactgctaggaccttatgggccaaaaggggacaagggtccaatgggcgtgccgggctttctaggtattaacggcattcccggccatcccggtcagcctggcccaaggggtccaccaggcctggacggttgcaacgggactcaaggcgctgttggattccctggaccggacggttacccgggcctgctcggccctcctggcctgccgggccagaagggctccaaaggcgaccccgtgctggcaccaggctcctttaagggaatgaagggggaccccggattgccggggctggatggcatcaccgggccccagggagctccaggatttccaggagctgtgggtcccgccgggccgcctggtctgcaaggacctccagggcctccgggcccgcttgggcccgatggaaatatggggctgggcttccagggagaaaagggcgtcaaaggggatgtcggcctccctggacccgcaggccccccaccgagtactggcgaactggaattcatgggctttcccaaaggaaagaaagggtcaaagggcgagcctggtcccaagggttttcccggcatttccggtcctcctggttttcccggactgggtacaacgggcgaaaagggtgaaaaaggcgagaaagggatcccaggtctacctgggcccagggggcccatgggctctgagggcgtccaaggtccaccaggccagcagggtaagaaaggcacactcggctttcctggtttgaatggattccaggggatcgagggacaaaagggtgacatcggcctccctgggcccgatgtgttcatcgacatcgatggggctgtgatatctggcaacccgggagatcccggggtgcccgggttgcccggtctgaagggggacgagggcattcaggggcttcgtggtccaagtggtgtacctggtctgcctgcactcagcggcgttccgggggccttggggccgcaaggattcccaggactgaaaggcgaccagggtaatcctggacggaccaccatcggcgcggctggccttccggggagagacgggctgcccggcccccctggtcctccgggccccccatcccccgaatttgagactgaaacattacataacaaggagtccgggttccccggcctacgtggcgagcaaggtcccaagggaaacctgggtcttaaaggcattaagggggattccggtttttgtgcgtgcgacggaggagtcccaaacaccggcccccccggtgagcctggcccccctgggccatggggcctaatcgggctgccaggcctgaaaggggcccgaggcgacagagggtctgggggtgcacagggcccggctggagctccaggtctggtgggtccactggggccttctggtcctaaaggcaagaaaggagagcctattctaagcaccattcagggaatgcccggcgatcgcggcgactcaggatcccaggggtttagaggggtgataggggaaccggggaaggacggcgtcccgggcttacccggtcttcctgggctgcctggggatggcggccagggttttcccggagaaaaaggcctgcctggactgccaggagagaaaggtcacccggggcctcccggcctgcctggaaatgggctgccaggtctccctgggcctaggggactgcccggagacaaaggcaaagacggtctacccgggcagcagggccttcccgggtcaaaaggcatcacattgccttgtatcatccccggctcatatggtccctccggctttcctggcacccctggcttccctggacccaaagggagtcgggggctgcccggaacccctgggcagccggggagtagcggctccaagggagagcccgggtctccaggactcgtgcaccttcccgaactgcccggatttcccgggccgcgcggcgaaaaggggctgccaggattcccggggctccctggtaaggacggcctgcccggtatgatcgggtcacccgggcttcccgggtccaaaggggctaccggagacatatttggggccgaaaacggagcacctggggagcaggggttgcagggcctgaccggacacaagggctttctcggggactccgggctaccaggtctgaagggggtacatgggaagcctgggctgcttggccccaagggagagagagggagccccggtacgcctgggcaagtcggtcagcctggtacccctgggagtagcggcccttacggaattaagggaaagagtggactccccggggctcccggcttcccagggatatcaggacacccaggaaagaaaggaacccgcggtaagaaagggcccccaggttccatagtcaagaagggattaccaggcctaaaggggctgcctggaaacccggggctcgtgggactgaaggggtcacctggcagtcccggagtcgccgggctgcctgccctcagtggccccaagggggagaagggcagcgtgggctttgtgggattccccgggatacccgggctgcctgggatacctggcacaagagggcttaaaggcatacctggatctactggaaagatggggccctctggcagggccggaactcccggcgagaaaggagatcgtgggaatccaggacccgtaggaatcccctcaccccgtcgccccatgtccaacctatggctcaagggtgataaaggatctcagggcagcgctggcagtaacggatttcccggaccaaggggcgacaagggggaggcgggccgacccgggcctcccggtctgcctggcgctccaggtctgccaggaataattaaaggcgtgtccggaaaacccggaccgccagggttcatgggaatacgaggcctgcctggtttaaagggctcctcaggtatcaccggtttccccggaatgcccggagaatccggttctcaaggtattaggggcagcccggggttgcccggggcttcaggactaccaggactgaaaggggacaacgggcaaaccgtggagatttctggctcccccggacctaaaggccaacctggcgagtctggtttcaaagggacaaagggtcgcgacggtctcataggtaacatcggatttccaggaaataagggcgaggacggaaaggttggggtgtccggtgacgtggggctccccggggctcccggctttccaggcgttgctggaatgcgcggtgagcccgggctgcctggctcaagtggccaccagggtgcaatcggtcccctgggatcgcccggccttatcggacctaaggggccgtcaatcacaggtgtgccaggccccgccggcctgccgggacccaaaggtgaaaaaggatacccaggtattggcataggtgctcccgggaagccaggactgcgaggtcagaagggagacaggggattcccaggcctgcagggcccagcgggactgcctggtgctcctgggatcagtctgccttctctaattgcaggccagcccggagaccctggtagacccgggctggacggagagagaggtcggcctggccccgcaggtccacctggcccgccggggccaagttccaaccagggcgacactggagatccgggcttccctggcattcctggacctaagggtcccaaaggcgaccaggggatacctggattttctggcctccctggagaactgggtctcaagggttcatctggtcttcagggcgatcccggtcagacccccaccgccgaagcagttcaggtgcctcctggcccactgggcctgcccggtatcgacgggattcccggccttacaggcgacccaggggcccagggaccggtgggcctccagggatccaagggacttcctggaattcccggtaaagacgggcccagcggccttcctgggcctccgggagctctgggagatcctggacttcctgggcttcagggcccgccaggctttgagggggctccaggtcagcaaggcccttttggcatgccaggaatgccaggccaatccatgcgcgttggctatacccttgtgaagcattcccaaagcgaacaggtcccgccttgtccaatcggtatgagtcagctatgggttggttactccctgttatttgtggaggggcaggagaaagcccataaccaggatttgggattcgctggctcttgccttcctcgtttctccacgatgccatttatctactgtaacatcaacgaggtctgccattacgcaagaaggaacgataaatcctactggctttctacaacggcccccattcctatgatgccagtgagtcagacacaaattcctcagtatatctcaagatgctcggtgtgtgaagccccctcacaggccatagcagtgcatagccaggacattacgatcccacagtgcccattgggatggcgttcactctggatcggctattcatttctcatgcacaccgcagctggagccgagggaggggggcaatccctggtgtctccaggaagctgtctggaagacttccgggcaaccccatttattgagtgtagcggcgcccgaggtacctgtcactatttcgcaaataaatacagcttctggctgactacggttgaagaacgccagcagtttggggagttacctgtctctgagaccctaaaggctggccagctgcatacgagggtttcacgatgccaggtgtgtatgaaatcactctag

SEQ ID NO: 106667 - DNA, 783 bp, Artificial Sequence
  derived and/or modified sequence
atgctgcaggactggaaggagagagctgcctctgtgtggtgcaagtggctggatgtgaaccccaaccaccacctggtgaaggccccccagcctgacctgccctgcccctgccccctgagcctgctgcccggctttgctggcagctgcctgccccgcttcagcaccatgcccttcatctactgcaacatcaatgaggtgtgccactacgccaggagaaatgacaagagctactggctgagcaccacagcccccatccccatgatgcctgtgtcccagacccagatcccccagtacatcagccgctgcagcgtgtgtgaggcccccagccaggccatcgctgtgcacagccaggacatcaccatcccccagtgccccctgggctggaggagcctgtggattggctacagcttcctgatgcacacagctgctggagctgagggcggcggccagagcctggtgtccccaggcagctgcctggaggacttccgggccacccccttcattgaatgttctggggcccggggcacctgccactactttgccaacaagtacagcttctggctgaccaccgtggaggagcggcagcagtttggagagctgcctgtgtctgagaccctgaaggccggccagctgcacaccagggtgagccgctgccagcccggcttcaccggccctggcatcaaggagtggaagtggaagtggcaccacagccccagcgcccctgtgatccaccagcagaacttctgcttcctgttccccaggcactacgtgctgctggcctag

SEQ ID NO: 106668 - DNA, 4902 bp, Artificial Sequence
  derived and/or modified sequence
atgcaccctggcctgtggctgctgctggtgaccctgtgcctgacagaggagctggccgctgctggggagaagagctatggcaagccctgtggcggccaggactgcagcggcagctgccagtgcttccctgagaagggggcccggggccggcccggccccatcggcatccagggccccaccggcccccagggcttcaccggcagcacaggcctgagcggcctgaagggggagcggggcttccctggcctgctgggcccctacggccccaagggggacaagggccccatgggcgtgcccggcttcctgggcatcaatggcatccctggccaccctggccagcccggcccccggggccccccaggcctggatggctgcaatggcacccagggcgctgtgggcttccctggcccagatggctacccaggcctgctgggccccccaggcctgcccggccagaagggcagcaagggggaccctgtgctggcccctggcagcttcaagggcatgaagggggaccccggcctgcccggcctggatggcatcaccggcccccagggcgcccctggcttccctggagctgtgggccctgctggccccccaggcctgcagggccccccaggccccccaggccccctgggcccagatggcaacatgggcctgggcttccagggcgagaagggcgtgaagggagatgtgggcctgcccggccctgctggccccccacccagcactggagagctggagttcatgggcttccccaagggcaagaagggcagcaagggggagcccggccccaagggcttccctggcatcagcggccccccaggcttccctggcctgggcaccactggagagaagggggagaagggggagaagggcatccctggcctgcccggcccccggggccccatgggcagcgagggcgtgcagggccccccaggccagcagggcaagaagggcaccctgggcttccctggcctgaatggcttccagggcatcgagggccagaagggggacatcggcctgcccggcccagatgtgttcattgatattgatggagctgtgatcagcggcaaccctggggaccccggggtgcccggcctgcccggcctgaagggagatgagggcatccagggcctgcggggccccagcggcgtgcccggcctgcctgccctgtctggagtgcctggggccctgggcccccagggcttccctggcctgaagggggaccagggcaaccctggccgcaccaccatcggggccgccggcctgcccggcagagatggcctgcccggccccccaggccccccaggcccccccagccctgagtttgaaacagagaccctgcacaacaaggagagcggcttccctggcctgcggggggagcagggccccaagggcaacctgggcctgaagggcatcaagggggacagcggcttctgtgcctgtgatggcggcgtgcccaacacaggccccccaggagagcccggccccccaggcccctggggcctgattggcctgcccggcctgaagggggcccggggggaccggggcagcggcggggcccagggccctgctggggcccctggcctggtgggccccctgggccccagcggccccaagggcaagaagggggagcccatcctgagcaccatccagggcatgcctggggacagaggagacagcggcagccagggcttccggggcgtgattggagagcccgggaaggatggagtgcccggcctgcccggcctgcccggcctgcctggagatggcggccagggcttccctggagagaagggcctgcccggcctgcccggggagaagggccaccctggccccccaggcctgcctggaaatggcctgcccggcctgcccggcccccggggcctgcccggggacaagggcaaggatggcctgcccggccagcagggcctgcccggcagcaagggcatcaccctgccctgcatcatccctggcagctatggccccagcggcttccctggcaccccaggcttccctggccccaagggcagccggggcctgcccggcaccccaggccagcccggcagcagcggcagcaaaggagagcccggcagccctggcctggtgcacctgcctgagctgcccggcttccctggccccagaggagagaagggcctgcccggcttccctggcctgcccgggaaggatggcctgcccggcatgattggcagccctggcctgcccggcagcaagggggccactggagacatctttggagcagaaaatggagcccctggagagcagggcctgcagggcctgaccggccacaagggcttcctgggggacagcggcctgcccggcctgaagggcgtgcacggcaagccaggcctgctgggccccaagggggagcggggcagccctggcaccccaggccaggtgggccagcccggcaccccaggcagcagcggcccctacggcatcaagggcaagagcggcctgcccggggcccctggcttccctggcatcagcggccaccctgggaagaagggcacccggggcaagaagggccccccaggcagcatcgtgaagaagggcctgcccggcctgaagggcctgcccggcaaccctggcctggtgggcctgaagggcagccctggcagccctggggtggccggcctgcctgccctgagcggccccaagggggagaagggctctgtgggctttgtgggcttccctggcatccctggcctgcccggcatccctggcacccggggcctgaagggcatccctggcagcacaggcaagatgggccccagcggccgggccggcaccccaggagagaagggggaccggggcaaccctggccctgtgggcatccccagcccccggcggcccatgagcaacctgtggctgaagggggacaagggcagccagggcagcgctggcagcaatggcttccctggccccaggggggacaagggggaggccggccggcccggccccccaggcctgcccggggcccctggcctgcccggcatcatcaagggcgtgtctgggaagccaggccccccaggcttcatgggcatccggggcctgcccggcctgaagggcagcagcggcatcaccggcttccctggcatgcctggagagagcggcagccagggcatccggggcagccctggcctgcccggggccagcggcctgcccggcctgaagggggacaatggccagacagtggagatcagcggcagccctggccccaagggccagcccggggagagcggcttcaagggcaccaagggcagagatggcctgattggcaacatcggcttccctggcaacaagggggaggatggcaaggtgggcgtgtctggagatgtgggcctgcccggggcccctggcttccctggggtggccggcatgagaggagagcccggcctgcccggcagcagcggccaccagggcgccatcggccccctgggcagccctggcctgattggccccaagggccccagcatcactggagtgcccggccctgctggcctgcccggccccaagggggagaagggctacccaggcattggaattggagcccctgggaagccaggcctgcggggccagaagggggaccggggcttccctggcctgcagggccctgctggcctgcccggggcccctggcatcagcctgcccagcctgattgctggccagcccggggaccccggccggcccggcctggatggagagcggggccggcccggccctgctggccccccaggccccccaggccccagcagcaaccagggcgacaccggggaccccggcttccctggcatccctggccccaagggccccaagggggaccagggcatccctggcttcagcggcctgcctggagagctgggcctgaagggcagcagcggcctgcagggcgaccccggccagacccccacagctgaggccgtgcaggtgcccccaggccccctgggcctgcccggcattgatggcatccctggcctgaccggggaccccggggcccagggccctgtgggcctgcagggcagcaagggcctgcccggcatccctgggaaggatggccccagcggcctgcccggccccccaggggccctgggggaccccggcctgcccggcctgcagggccccccaggctttgagggcgcccctggccagcagggccccttcggcatgcctggcatgcctggccagagcatgagggtgggctacaccctggtgaagcacagccagagcgagcaggtgcccccctgccccatcggcatgagccagctgtgggtgggctacagcctgctgtttgtggagggccaggagaaggcccacaaccaggacctgggctttgctggcagctgcctgccccgcttcagcaccatgcccttcatctactgcaacatcaatgaggtgtgccactacgccaggagaaatgacaagagctactggctgagcaccacagcccccatccccatgatgcctgtgtcccagacccagatcccccagtacatcagccgctgcagcgtgtgtgaggcccccagccaggccatcgctgtgcacagccaggacatcaccatcccccagtgccccctgggctggaggagcctgtggattggctacagcttcctgatgcacacagctgctggagctgagggcggcggccagagcctggtgtccccaggcagctgcctggaggacttccgggccacccccttcattgaatgttctggggcccggggcacctgccactactttgccaacaagtacagcttctggctgaccaccgtggaggagcggcagcagtttggagagctgcctgtgtctgagaccctgaaggccggccagctgcacaccagggtgagccgctgccaggtgtgcatgaagagcctgtag

SEQ ID NO: 106669 - DNA, 1031 bp, Artificial Sequence
  derived and/or modified sequence
ttatacagcttataaaaagattcttgttattatcaaatttccctggtgcatttaaaatagaatttgctcaacacacttcagcacatgtacaatgttacaggattggaaggagagggctgcctcagtctggtgcaagtggttggatgtaaacccaaaccaccatctcgtcaaagcccctcagccagacctcccctgcccttgcccactttctctccttccaggctttgctggctcctgtctgccccgcttcagcaccatgcccttcatctactgcaacatcaacgaggtgtgccactatgccaggcgcaatgataaatcttactggctctccactaccgcccctatccccatgatgcccgtcagccagacccagattccccagtacatcagccgctgctctgtgtgtgaggcaccctcgcaagccattgctgtgcacagccaggacatcaccatcccgcagtgccccctgggctggcgcagcctctggattgggtactctttcctcatgcacactgccgctggtgccgagggtggaggccagtccctggtctcacctggctcctgcctagaggactttcgggccactcctttcatcgaatgcagtggtgcccgaggcacctgccactactttgcaaacaagtacagtttctggttgaccacagtggaggagaggcagcagtttggggagttgcctgtgtctgaaacgctgaaagctgggcagctccacactcgagtcagtcgctgccagccaggattcacaggtccaggaatcaaggagtggaagtggaagtggcaccactcaccatcagccccagtgatccaccagcaaaatttttgcttcctgttcccccgacattacgttctgctggcctagagttcttagttccagaggaaggaatgctgccatcaggagacacaacagttccattaaactggaagttaagattgccacctggacactttgggctcctcttccctttacatcaacaggctaataagggagttacagtgttggttggggtgactgactt

SEQ ID NO: 106670 - DNA, 5987 bp, Artificial Sequence
  derived and/or modified sequence
gggccacttcgtccacctactctgttctgagtaaggaaacagcctccaagcatcagcagagcccagatgagcacgggccgcggagccgcttagcagtctcccgggacccagctccggaggagccgcaagcatgcaccctgggttgtggctgctcctggttacgttgtgcctgaccgaggaactggcagcagcgggagagaagtcttatggaaagccatgtgggggccaggactgcagtgggagctgtcagtgttttcctgagaaaggagcgagaggacgacctggaccaattggaattcaaggcccaacaggtcctcaaggattcactggctctactggtttatcgggattgaaaggagaaaggggtttcccaggccttctgggaccttatggaccaaaaggagataagggtcccatgggagttcctggctttcttggcatcaatgggattccgggccaccctggacaaccaggccccagaggcccacctggtctggatggctgtaatggaactcaaggagctgttggatttccaggccctgatggctatcctgggcttctcggaccacccgggcttcctggtcagaaaggatcaaaaggtgaccctgtccttgctccaggtagtttcaaaggaatgaagggggatcctgggctgcctggactggatggaatcactggcccacaaggagcacccggatttcctggagctgtaggacctgcaggaccaccaggattacaaggtcctccagggcctcctggtcctcttggtcctgatgggaatatggggctaggttttcaaggagagaaaggagtcaagggggatgttggcctccctggcccagcaggacctccaccatctactggagagctggaattcatgggattccccaaagggaagaaaggatccaagggtgaaccagggcctaagggttttccaggcataagtggccctccaggcttcccgggccttggaactactggagaaaagggagaaaagggagaaaagggaatccctggtttgccaggacctaggggtcccatgggttcagaaggagtccaaggccctccagggcaacagggcaagaaagggaccctgggatttcctgggcttaatggattccaaggaattgagggtcaaaagggtgacattggcctgccaggcccagatgttttcatcgatatagatggtgctgtgatctcaggtaatcctggagatcctggtgtacctggcctcccaggccttaaaggagatgaaggcatccaaggcctacgtggcccttctggtgtccctggattgccagcattatcaggtgtcccaggagccctagggcctcagggatttccagggctgaagggggaccaaggaaacccaggccgtaccacaattggagcagctggcctccctggcagagatggtttgccaggcccaccaggtccaccaggcccacctagtccagaatttgagactgaaactctacacaacaaagagtcagggttccctggtctccgaggagaacaaggtccaaaaggaaacctaggcctcaaaggaataaaaggagactcaggtttctgtgcttgtgacggtggtgttcccaacactggaccacccggggaaccaggcccacctggtccatggggtctcataggccttccaggccttaaaggagccagaggagatcgaggctctgggggtgcacagggcccagcaggggctccaggcttagttgggcctctgggtccttcaggacccaaaggaaagaagggggaaccaattctcagtacaatccaaggaatgccaggagatcggggtgattctggctcccagggcttccgtggtgtaataggagaaccaggcaaggacggagtaccaggtttaccaggtctgccaggccttccgggtgatggtggacagggcttcccaggtgaaaaggggttacctggacttcctggtgaaaaaggccatcctggtccacctggcctcccaggaaatgggttaccaggacttcctggaccccgtgggcttcctggagataaaggcaaggatggattaccgggacaacaaggccttcccggatctaagggaatcaccctgccctgtattattcctgggtcatacggtccatcaggatttccaggcactcccggattcccaggccctaaagggtctcgaggcctccctgggaccccaggccagcctgggtcaagtggaagtaaaggagagccagggagtccaggattggttcatcttcctgaattaccaggatttcctggacctcgtggggagaagggcttgcctgggtttcctgggctccctggaaaagatggcttgcctgggatgattggcagtccaggcttacctggttccaagggagccactggtgacatctttggtgctgaaaatggtgctccgggggaacaaggcctacaaggattaacagggcacaaaggatttcttggagactctggccttccaggactcaagggtgtgcacgggaagcctggcttactaggccccaaaggtgagcggggcagccctgggacaccaggacaggtgggacagccaggcaccccaggatctagtggtccatatggcatcaagggcaaatctgggctcccaggagcaccaggcttcccaggcatctcaggacatcctggaaagaaaggaacaagaggcaagaaaggtcctcctggatcaattgtaaagaaagggctgccagggctaaaaggccttcctggaaatccaggcctagtaggactgaaaggaagcccaggctctccaggggtcgctgggttgccagccctctctggacccaagggagagaaggggtctgttggattcgtaggttttccaggaataccaggtctgcctggtattcctggaacaagaggattaaaaggaattccaggatcaactggaaaaatgggaccatctggacgtgctggtactcctggtgaaaagggagacagaggcaatccggggccagtcggaatacctagtccaagacgtccaatgtcaaacctttggctcaaaggagacaaaggctctcaaggctcagccggatccaatggatttcctgggccaagaggtgacaaaggagaggctggtcgacctggaccaccaggcctacctggagctcctggcctcccaggcattatcaaaggagttagtggaaagccagggccccctggcttcatgggaatccggggcttacctggcctgaaggggtcctctgggatcacaggtttcccaggaatgccaggagaaagtggttcacaaggtatcagagggtcgcctggactcccaggagcatctggtctcccaggcctgaaaggagacaacggccagacagttgaaatttccggtagcccaggacccaagggacagcctggcgaatctggttttaaaggcacaaaaggaagagatggactaataggcaatataggcttccctggaaacaaaggtgaagatggaaaagttggtgtttctggagatgttggccttcctggagctccaggatttccaggagttgccggcatgagaggagaaccaggacttccaggttcttctggtcaccaaggggcaattgggcctctaggatcccccggattaataggacccaaaggacctagtatcaccggtgtgcctgggcctgctggtctccctggacccaaaggagaaaaaggatatccaggaattggcatcggagctccagggaagccgggcctgagagggcaaaaaggtgatcgaggtttcccaggtctccagggccctgctggtctccccggtgccccaggcatctccttgccctcactcatagcaggacagcctggtgaccccgggcgaccaggcctagatggagaacgaggccgcccaggccccgctggacccccaggtccccctgggccatcctcgaatcaaggcgacaccggagaccctggcttccctggaattcctggacctaaagggcctaagggagaccaaggaattccaggtttttctggcctccctggagagctaggactgaaaggctcttctggcctccaaggtgatcctggacaaacaccaactgcagaagctgtccaggttcctcctggacccttgggtctaccagggatcgatggcatccctggcctcactggggaccctggggctcaaggccctgtaggcctacaaggctccaaaggtttacctggcatccccggtaaagatggccccagtgggctcccaggcccacctggggctcttggtgatcctggtctgcctggactgcaaggccctccaggatttgaaggagctccagggcagcaaggccccttcgggatgcctggaatgcctggccagagcatgagagtgggctacacgttggtaaagcacagccagtcggaacaggtgcccccgtgtcccatcgggatgagccagctgtgggtggggtacagcttactgtttgtggaggggcaagagaaagcccacaaccaggacctgggctttgctggctcctgtctgccccgcttcagcaccatgcccttcatctactgcaacatcaacgaggtgtgccactatgccaggcgcaatgataaatcttactggctctccactaccgcccctatccccatgatgcccgtcagccagacccagattccccagtacatcagccgctgctctgtgtgtgaggcaccctcgcaagccattgctgtgcacagccaggacatcaccatcccgcagtgccccctgggctggcgcagcctctggattgggtactctttcctcatgcacactgccgctggtgccgagggtggaggccagtccctggtctcacctggctcctgcctagaggactttcgggccactcctttcatcgaatgcagtggtgcccgaggcacctgccactactttgcaaacaagtacagtttctggttgaccacagtggaggagaggcagcagtttggggagttgcctgtgtctgaaacgctgaaagctgggcagctccacactcgagtcagtcgctgccaggtgtgtatgaaaagcctgtagggtggcacctgccactctgccccttgccctcccctgcccctcacaacagtcacctcacaaacctgaatggtctgaagaaggaaggcctgagcccctttgcctgtcaagttgtacattggagtctcatttgggctagactaccggacactcgtcaccccagccctcgggtccatagagatgagcccaccctgctgagatctgctgtcctgtttctgtcaagctggtgctactgtttgatttggatgattgtgtgactattcatggctacctcagaaagatttgatgggccacaactgtcttagactgctagctttctccttaccgtcttgatcggaaagctcttcctaatcgctaatcagtcatttcttcatgtacagaggtcagcacacattatttggcttaaaccagaacccagtgtttccacacttaaattctctaaccgaatattcatggatggctcaagtctgcacagagcaagtcctcactcttcaaggaggcccactgtgtctaggcaggcaagagaattgaaatgaggtgccacccagtagcccagagtgagctttagctctctctagaatgagcaagactgggccccacatggcttagagaggcttgaaggccagcagctgggttgggggtggtggtcattaatggcatatggtcctagacaaaccatctcctccttgccggctccccctccagccagagacagaggatgtggcctggttcaaagtaaagcagaggatgcaacaaatgtggccaagcctatcaaaggaaatgagaatgacagccttttttcctgggccagaagtagaggggtgggtgcgtaaggatgtgtgagttttgcttttgactccaggaacaaaaaggtaaatcccacatcccagtttctcagaagtccctgtttattccaaatgccatccagatgtgtgcaatgtggcaaactgaagctgca

SEQ ID NO: 106671 - DNA, 783 bp, Artificial Sequence
  derived and/or modified sequence
atgctgcaggactggaaggagcgggccgccagcgtgtggtgcaagtggctggacgttaatcccaatcatcatctggtgaaagcccctcagcctgatctgccctgcccttgtcctttgtccctcctcccagggttcgctgggtcgtgtttgccccgattttctaccatgcctttcatttattgtaatatcaacgaagtgtgtcactacgcccgcagaaatgataagagttactggctgtctaccacagcccctatccctatgatgcccgtgagtcagacccagattcctcagtacatctcgagatgttctgtttgcgaagcaccctcacaagccatcgctgtgcattcgcaggacatcacgattccccaatgtccactgggatggcgctccctttggatcggctattcctttttgatgcataccgccgccggagctgagggaggcggacaatcacttgtcagccctggaagttgtctggaggactttagggctaccccattcatcgagtgctccggtgccaggggcacatgtcattattttgccaataaatacagtttttggctcacgactgtggaagagaggcagcagttcggagaactcccagtcagtgagactttgaaggcagggcaactccacacaagagtgtctagatgtcaaccaggctttacaggcccgggtattaaggagtggaagtggaagtggcatcatagtcccagcgctccggtcatccaccagcagaatttctgttttctgttccctcgccattatgtgctcctggcctag

SEQ ID NO: 106672 - DNA, 4902 bp, Artificial Sequence
  derived and/or modified sequence
atgcaccccggcctgtggctgctgctggtgaccctgtgcctgaccgaggagctggccgctgccggtgaaaaatcatacgggaaaccctgcgggggccaggattgcagcggctcttgccagtgttttcccgaaaagggcgctaggggcagacccggacctatagggatacaaggccctacagggcctcaagggtttacggggtctaccgggctttcaggactgaaaggagagagaggatttccaggactccttggcccctacggcccgaaaggagataagggccctatgggggtccctggcttcttaggcattaatggtatcccagggcatcccgggcaaccaggcccacgcggcccgccagggctagacggatgtaacgggacccagggcgctgttgggtttcctggaccagacggctacccggggctgctcggacccccaggcttgccgggacagaaaggctcgaagggagaccccgtgctggctcccgggtcatttaagggcatgaaaggcgatcccgggttgcccgggctagatgggattaccgggccccagggcgccccaggatttcctggggcggtcggtccagcagggcctcctggcctgcagggacctccaggtcctccaggccctctggggccagacggtaacatgggtctgggctttcagggagagaaaggcgtcaagggcgacgtgggactgccaggacccgctggcccacctcccagtaccggcgaactggagtttatgggttttcccaagggcaaaaagggatccaagggagagcctggcccaaaaggatttcctggcattagcggccccccgggattcccaggccttggaacaaccggcgagaagggcgagaaaggggagaagggcatccctggactgcccggaccccgcggcccaatgggatctgagggggtgcaaggtccgcctggccagcagggtaagaaaggtacactcggattccccgggctaaatgggtttcaggggattgaaggccaaaagggggatatcggtctgccaggaccggacgtctttattgatatagatggtgcagtgatctccggtaatccaggcgatccgggcgtgcctggccttcccggacttaaaggtgacgagggaatccagggcctgcgcggaccatctggtgtccctggcctccccgccctgtcaggagtgcctggagccttaggtccccaaggatttcctggattgaagggcgatcagggtaacccagggagaaccaccatcggtgcagcgggcctcccagggcgcgatgggttgcccggcccgccaggccccccaggaccaccaagtcccgagttcgaaaccgagacccttcacaacaaggagagtggattccctggtctgagaggggagcagggccccaaaggcaatcttggtctaaagggcattaaaggcgacagtgggttttgtgcctgtgatggaggggtgcccaacacaggaccgcctggagagcccggcccccccggcccttggggtctcatcggcttgccaggcctgaagggcgccaggggagatagaggatcaggaggggctcagggaccagccggggctccgggcttagtgggacctttaggtccgtctggtcccaagggcaaaaagggcgagccaattctgtccactatacagggcatgcccggggaccgtggggatagcggcagccagggattccgcggcgtgataggtgagcctggaaaggacggcgtccctggcctcccaggcttacctggcctgccaggggacggcggtcagggctttcccggtgagaaaggattgcctggactccctggggaaaagggccaccccggcccccctgggctgcctggtaatgggctgcccggcttgcccgggcccagaggactccctggagataaaggcaaggatgggttgcccggccagcagggcctgcctggaagcaaagggatcacactcccttgtatcatcccaggaagctacgggccctctggatttcctgggacgccggggtttcccggccccaagggatctcggggcctgccaggcaccccaggacagcctggctcaagtggctctaagggggagccaggatcacccgggctggtacacttgcccgagttgccggggtttccaggaccgcggggggagaaggggctgcctggattccctgggctccccggaaaggatggtctccccggaatgatcgggagtcctggtttgccaggctctaagggcgcgacaggcgatatattcggagcagagaacggggctcctggtgaacaggggctgcagggtcttacaggtcacaaggggtttctgggagactccggactgcccgggttgaagggcgtgcacggaaagcctggtttgctaggtccaaagggggagagggggtcgccaggcaccccagggcaggtgggacagcctgggacccccggatcaagtgggccctatggcattaagggcaaatccggccttccaggagctcctgggtttccaggcatatctggtcatccaggcaagaaagggacacgcggcaagaagggaccccccggatcaatcgtgaaaaaagggttaccaggcctgaaaggcttgcccgggaaccctggccttgtgggcctgaagggaagcccagggagcccgggggtggcagggcttcctgccctgtccggtcctaagggcgaaaaggggagcgtcgggtttgtgggcttcccagggataccgggtctacccggcatcccaggaacgcgaggcctcaagggaataccaggatcgaccggcaagatgggacccagtggtagggcgggcactcccggcgagaagggcgaccggggcaacccgggaccagtgggtatcccctctcctcgtcgcccaatgagcaatctctggctgaagggcgataaaggatcccagggcagtgccggttcaaatggatttcctggcccccggggagataagggtgaagccggtaggcccgggccccctggattaccaggtgcccctgggctgcccgggattattaaaggcgttagcggcaagccgggacctccgggtttcatggggattcgtggccttcctggcctgaaaggaagcagcggaataacaggctttcccggtatgccaggtgagtccggaagccagggaattaggggctctcccgggctccccggtgccagcggcttgcctggtttaaagggggataatggacagactgtagagataagtggatccccaggtccaaagggacaaccaggtgagtctggttttaaaggcaccaaagggcgggatggcttgatcggaaatattggctttccgggcaataagggcgaagacggcaaagtcggtgtctccggcgatgtggggctgcccggcgccccaggcttccctggtgtggctgggatgaggggtgaaccagggttgccagggagttcagggcatcagggggccatcgggccgttgggttctccgggtttgattgggcccaagggtccctccatcaccggggtccccggcccggccggactgcccggacctaagggggaaaaaggttaccctggcattggaattggggcacccggaaaaccaggccttcgtgggcagaagggggacagaggatttcctgggctgcagggcccagccgggctccccggtgcaccaggtatttccctacctagccttatcgccggacaaccaggtgaccccggaagacccggtctggatggtgaacgggggaggccgggtcccgcaggtccccccggaccgccaggaccctcaagcaaccaaggcgataccggtgaccctggatttccaggcatacctggccccaagggacccaagggggaccaggggattcccggcttcagcggtctgccaggcgagctcggactaaaggggagtagcgggctccaaggtgacccaggacagacaccgacagccgaagccgtgcaggtaccacccggtccactcggcctgccaggcattgacggcatcccgggactgaccggtgacccaggagcccagggacccgtaggactgcagggaagcaagggcctgcctggaatacctggaaaagacggacccagtggcctccccggtcctccgggcgccctgggagacccagggcttccgggcctccagggcccaccaggctttgagggcgccccagggcagcaggggccatttgggatgcccggtatgccagggcagagcatgagagtcggatacaccctggtaaagcactcacagtccgagcaggtcccgccgtgtcccatcgggatgtcccaactctgggttggttactccttactgtttgtggagggccaggagaaggcacataaccaggaccttggatttgcaggatcctgcctccctcggttttccacaatgcctttcatttattgcaatattaacgaagtgtgccattacgctaggaggaacgataagtcctactggctgtctacaactgccccaatccccatgatgccagtgtctcagacacagattccccaatacattagtaggtgttctgtctgtgaagcgccctcgcaagcaattgccgtgcattcccaagatattacaatcccacagtgccccctcggatggagaagcctttggattgggtacagtttccttatgcacacagcagccggagccgagggcggagggcagtctctagtttctcccgggtcttgtttagaagatttccgcgcgactcctttcattgaatgttctggagcgcgagggacttgccattatttcgctaacaagtattccttctggttgaccaccgtggaagaaagacagcagtttggagagctgcctgtgtcggagactttgaaagctgggcagctgcacactagagtgtcacgatgccaggtctgtatgaagagtttgtag

SEQ ID NO: 106673 - DNA, 783 bp, Artificial Sequence
  derived and/or modified sequence
atgttgcaggactggaaagagcgagcggcaagtgtctggtgtaaatggctcgacgtgaacccaaaccatcacttagttaaagcccctcaacccgacttaccttgcccttgtcccctctcactgttgcctggcttcgccggatcctgcctaccgaggttctctaccatgccttttatttactgtaacataaacgaagtgtgccattacgcaagacggaatgacaaaagctactggctatccaccacggcaccgatcccaatgatgcctgtatctcagacacaaattcctcagtatatcagtaggtgctccgtgtgcgaggctcccagccaggccattgcagttcatagtcaggatatcacgatcccgcagtgtcccctggggtggaggtctctgtggatcggttattccttcctgatgcacacagcagccggagccgaggggggtggacagtctcttgtgtccccgggaagctgcctcgaggattttcgcgctaccccctttatcgagtgttcaggagcaagggggacatgtcactattttgcaaacaagtacagtttctggctgacgaccgtcgaagagagacagcaatttggcgagctgcccgtgagcgaaactctgaaagccggtcagcttcatacacgagtgtccagatgtcagccaggctttacggggcctggcatcaaagagtggaagtggaaatggcatcatagccccagcgcccctgttatccatcaacagaacttctgcttcctgtttcccagacactatgtcttgctcgcctag

SEQ ID NO: 106674 - DNA, 4902 bp, Artificial Sequence
  derived and/or modified sequence
atgcaccctgggctttggctactgttagttaccctatgccttactgaggaactagccgctgccggtgagaagagctatgggaaaccctgcgggggacaggattgtagcggtagctgccagtgcttccctgagaaaggcgctcgtgggaggcctggccctattggtatccagggacctaccggcccacaaggatttacaggtagtaccgggctgtccggcctgaaaggggagcgcggatttcctgggttgctcggaccctatggtccaaaaggagacaagggaccgatgggagttccaggcttcctaggtattaacggcatccctggccaccctgggcagcccggtcccagaggccctcccggactggatggctgtaatggcacccagggcgctgtagggtttccgggaccggatggttacccgggattactgggaccccctggcctgccaggccagaaaggatccaaaggcgacccagtgcttgcccctggatccttcaaaggcatgaagggagatccaggtctccctggactggacggcattactgggcctcagggcgctccaggatttccaggtgcagtagggccagcgggacctcctggtctacaaggacctccagggcctccaggccctctgggccctgacggcaatatgggactcgggttccagggggagaaaggtgtgaaaggggacgtgggactgccagggcctgctggaccaccaccttccacaggggaactcgagttcatgggcttccctaagggaaagaaagggagcaagggcgagccgggaccaaaaggattccccggaatctccggccctcctggcttcccaggtctggggacgaccggggaaaaaggtgagaagggggagaaaggcattcctggtctgcccggacccagaggcccaatggggtccgaaggcgtccagggacctcctgggcagcaaggtaagaaggggacgctgggctttcctggtctgaacgggtttcagggtattgagggccagaagggcgatattgggctccccggacctgacgtgttcattgacatcgacggcgctgtgatatccgggaacccaggagacccaggggttccaggacttccaggacttaagggagacgaaggaattcaaggcttaaggggcccatccggggtccccggactgccagcgctaagcggcgtgccaggcgctcttggacctcagggttttcccggtttgaagggagaccagggtaaccctggaagaaccactatcggcgctgcaggcttacccggaagagacggcttgcctgggcctccaggcccacctggcccaccatctccagagtttgaaaccgaaactttacataacaaggagtccgggtttccaggactgcggggagaacagggacccaaagggaatctcggtctgaagggcatcaaaggtgactctggtttttgtgcatgcgatggcggagtgcctaatacgggcccaccaggagaacccggtcctcctggtccctgggggttgatcggattaccaggacttaagggggctcgaggcgaccggggatctggcggagcccaaggaccggctggcgctccagggctggttggcccactcgggccttctggcccaaagggtaagaaaggcgagccaatcctcagcacaatacaggggatgccaggtgataggggagattcaggaagtcaggggttccggggagtaattggtgagccaggcaaagacggggtgcccggtttgccaggcctccctggactgcccggtgatggtgggcagggttttcccggtgagaagggcttacccggtctccctggcgagaaaggtcaccccggtcctccaggcttgcctggtaacgggttgcccggactgccgggtcctcggggtttgcctggcgacaagggtaaggatggccttcctggtcagcagggcctgccaggcagcaaagggatcactctgccatgcatcatcccagggagttacggaccctctggttttcctggcacacctggattcccgggacctaaaggcagtcgcggtctgccgggaacaccgggtcaaccagggagtagcggcagtaagggcgaaccgggttcccctggccttgtgcacctgcctgagctgcccggttttcccggtccgagaggtgagaaggggctgccagggttccccggtctccctggaaaggacggactgccaggtatgatcggctcccctgggctgccgggatccaagggagccacaggagatatctttggcgctgagaacggtgcaccaggagaacagggactgcaggggctgacagggcacaagggcttccttggcgatagcgggctgcccggtctgaaaggggtccacggtaaaccagggctcctagggccaaagggtgagaggggctcacccggtaccccgggtcaggtcgggcagccaggcaccccaggctcttctggtccctatggcatcaaaggaaaatccggcttacctggggctccagggtttccaggtatctctgggcacccaggcaagaaaggtacaagaggaaaaaagggaccgcctggtagtatcgtcaaaaagggactaccaggactgaagggacttccaggaaaccccggactagtaggccttaagggctcccccggaagcccaggcgtggctggactgcctgccttatcaggtccaaaaggagagaagggctccgtaggcttcgtgggattcccagggatacccggacttccaggaatccccggtacacgcggactcaaggggatcccaggatctacgggcaagatgggcccttcgggcagggccggaacacccggtgagaagggagatcggggaaatccaggacccgtcggaatcccttcaccaagaaggccgatgtctaacctatggctgaagggagataaaggctcccaggggagtgctggctccaatgggttccctgggcctagaggagataagggggaagctgggagaccagggcctcccggtcttcctggcgcacctggcctgcctggtataatcaaaggcgtcagtgggaagccaggccctccgggtttcatggggattaggggactgccgggtcttaagggcagcagtgggatcacgggttttccagggatgcccggagaatccggatcgcagggtattaggggcagtcccggtctccctggcgctagcggccttccaggactcaaaggtgataatggacagaccgtggagatttccggcagtccagggcctaaaggacagcctggggagagcggattcaaaggcaccaagggacgggatggcctgattgggaacattgggttccctggaaataaaggagaagacggtaaagtgggcgtctcaggcgacgtcggactgcctggtgcccctggatttccaggtgtcgccggaatgcggggtgaaccgggactgcccggatcttctgggcatcaaggagctattggaccacttggttctccgggactcattggacccaagggcccatcaattaccggggtgccaggcccagctgggttgccaggtcccaaaggcgagaagggatatcctgggatcggaataggtgctcccggtaaaccagggttgcgcggacagaagggggatcgaggctttcccggtctgcaggggcctgccggattacccggtgcccctggaatcagcctgccaagtctgattgctggtcaaccaggagatccagggcgacccggactggacggggaaagaggacgacctggacccgctggcccacccggacctccaggcccttcatcaaatcagggggatacgggagaccctggatttcctggcataccgggtccaaagggacctaaaggtgaccagggaatacctggtttttccggactgccgggtgagctggggttgaaggggagctcggggcttcaaggagaccctggtcagacccccactgctgaagctgtccaggttccgccaggccctctagggctgcccggaattgacggaattccaggactcaccggcgatccgggagcccaggggccagtcggcttacaaggatcaaaaggactgccagggatccctggcaaagacgggccttcgggactgccaggacctcctggtgccttgggggatcccggtctgccaggattgcagggtccacccggatttgaaggggctcccggtcagcaagggccttttggaatgcccggtatgccgggacagagcatgcgggtcgggtacacgttagtaaaacactctcaatcagaacaggtgcccccatgtcccataggcatgtctcagttgtgggtgggttacagtctacttttcgtcgagggacaggagaaggcccataatcaggatctgggtttcgctggaagctgcttgcctcggtttagtaccatgccatttatctattgcaacataaacgaagtgtgtcattacgctcgcaggaacgacaagtcctattggctttcaaccacagctcctattccaatgatgcccgtctcccagacacagatcccacagtacatttctagatgctcggtgtgtgaagctccgagccaggctatcgccgtgcactcacaggacatcactatcccacagtgccctttaggctggcggagcctgtggattggatactctttcctaatgcacaccgcagccggagcagaaggtggaggccagagccttgtgtcaccaggttcttgcctggaggactttcgagccacaccgttcattgaatgctcgggggcaagaggtacgtgccactatttcgcaaataaatatagcttctggctgaccacagtggaagagaggcagcaatttggtgagctgcccgtgtcggagacattaaaagccggacagctccacactagggtctcaagatgtcaggtgtgtatgaaatccctgtag

SEQ ID NO: 106675 - protein, 185 aa, Artificial Sequence
  derived and/or modified sequence
MVKLGNNFAEKGTKQPLLEDGFDTIPLMTPLDVNQLQFPPPDKVVVKTKTEYEPDRKKGKARPPQIAEFTVSITEGVTERFKVSVLVLFALAFLTCVVFLVVYKVYKYDRACPDGFVLKNTQCIPEGLESYYAEQDSSAREKFYTVINHYNLAKQSITRSVSPWMSVLSEEKLSEQETEAAEKSA

SEQ ID NO: 106676 - protein, 146 aa, Artificial Sequence
  derived and/or modified sequence
MVKLGNNFAEKGTKQPLLEDGFDTIPLMTPLDVNQLQFPPPDKVSVLVLFALAFLTCVVFLVVYKVYKYDRACPDGFVLKNTQCIPEGLESYYAEQDSSAREKFYTVINHYNLAKQSITRSVSPWMSVLSEEKLSEQETEAAEKSA

SEQ ID NO: 106677 - DNA, 558 bp, Artificial Sequence
  derived and/or modified sequence
atggtgaagctgggcaacaacttcgccgagaagggcaccaagcagcccctgctggaggacggcttcgacaccatccccctgatgacccccctggacgtgaaccagctgcagttccccccccccgacaaggtggtggtgaagaccaagaccgagtacgagcccgacagaaagaagggcaaggccagacccccccagatcgccgagttcaccgtgagcatcaccgagggcgtgaccgagagattcaaggtgagcgtgctggtgctgttcgccctggccttcctgacctgcgtggtgttcctggtggtgtacaaggtgtacaagtacgacagagcctgccccgacggcttcgtgctgaagaacacccagtgcatccccgagggcctggagagctactacgccgagcaggacagcagcgccagagagaagttctacaccgtgatcaaccactacaacctggccaagcagagcatcaccagaagcgtgagcccctggatgagcgtgctgagcgaggagaagctgagcgagcaggagaccgaggccgccgagaagagcgcctag

SEQ ID NO: 106678 - DNA, 441 bp, Artificial Sequence
  derived and/or modified sequence
atggtgaagctgggcaacaacttcgccgagaagggcaccaagcagcccctgctggaggacggcttcgacaccatccccctgatgacccccctggacgtgaaccagctgcagttccccccccccgacaaggtgagcgtgctggtgctgttcgccctggccttcctgacctgcgtggtgttcctggtggtgtacaaggtgtacaagtacgacagagcctgccccgacggcttcgtgctgaagaacacccagtgcatccccgagggcctggagagctactacgccgagcaggacagcagcgccagagagaagttctacaccgtgatcaaccactacaacctggccaagcagagcatcaccagaagcgtgagcccctggatgagcgtgctgagcgaggagaagctgagcgagcaggagaccgaggccgccgagaagagcgcctag

SEQ ID NO: 106679 - DNA, 558 bp, Artificial Sequence
  derived and/or modified sequence
atggtgaagctgggaaacaactttgccgagaaggggactaaacagccactgctagaggatggctttgacaccataccactgatgacccctctggatgtcaaccagctccagtttccgcccccggataaagttgtggtgaagactaaaactgaatacgaacctgaccggaaaaagggaaaggcacgaccacctcaaatcgccgaattcacagtatcaattacagaaggcgtcacagagcggtttaaagtctctgtccttgttcttttcgcccttgcctttttgacctgcgtcgtgttcctggtcgtctacaaggtgtacaaatatgatcgggcctgccctgacgggtttgtgctaaaaaacactcagtgcatccctgagggacttgagtcttactacgctgaacaggattcctcagcccgcgaaaagttctacactgtgattaatcattacaacctggccaagcagtccattacacggagcgtcagtccttggatgtccgtgctcagcgaggagaagttgtcggagcaggagacggaggcagccgaaaaaagtgcctag

SEQ ID NO: 106680 - DNA, 558 bp, Artificial Sequence
  derived and/or modified sequence
atggtgaaactgggcaataactttgccgagaagggcactaaacaacccctgttggaagacggctttgacactattccactaatgacaccattggacgtgaaccagctgcagttcccgcctccagacaaagtcgttgtcaaaactaagacagagtacgagccagacagaaagaaggggaaggcaagaccgccgcagatcgctgagttcacagtgagcataacagagggggtgaccgaacgtttcaaggtaagcgtgctggttctgtttgcgcttgcgtttctcacttgtgtggttttcctggtcgtgtacaaggtctataaatacgaccgtgcatgccccgatgggtttgtactgaaaaatacacagtgcatcccagagggcctcgaatcctattacgccgaacaggactcttccgcccgagaaaaattctatactgtgatcaatcactataatttggctaaacagtctatcacccgatcagtgtccccatggatgagcgtgttatcagaagagaagctcagcgaacaagagacggaggctgctgagaagtctgcttag

SEQ ID NO: 106681 - DNA, 558 bp, Artificial Sequence
  derived and/or modified sequence
atggtgaagttggggaataattttgctgaaaagggaacaaaacagcccctgctagaggacggattcgataccatccctctcatgacaccattggatgtgaatcagctgcagtttccaccacccgataaagtggtggtcaagacaaaaaccgaatacgagcccgacagaaagaaaggaaaggctcgccccccccagattgcagagtttacagtttcaattacagagggtgtcacagaacgctttaaggtttccgtcctggtattgtttgcgctcgcgtttttgacatgcgtggtgtttttggttgtctacaaggtgtataagtacgaccgagcgtgcccagatggattcgtgctgaagaatacccagtgtatcccggagggcctggagtcatattacgccgaacaggattcctctgctagagagaaattctacactgttattaatcactacaacctcgcgaagcagagcattactcgcagtgtgagtccttggatgtcagtgctgtctgaggagaaactgtctgaacaagagacagaggcagccgaaaagtctgcctag

SEQ ID NO: 106682 - DNA, 441 bp, Artificial Sequence
  derived and/or modified sequence
atggtcaagctcggaaacaactttgctgagaaggggactaaacagccactccttgaagacgggtttgatactatccctctgatgacccccctagacgtgaaccaactgcagttccccccccctgataaggtctctgttctggtgttattcgccctcgctttcctcacttgtgtcgtgttcctcgtagtttacaaggtgtataaatacgaccgcgcatgccccgatggattcgtcctcaagaatactcagtgcattccagagggactggaatcctattacgccgaacaggatagctctgctagggaaaagttctatacagtcattaatcactataatctggcgaaacagtctataactaggtctgtttctccatggatgtcggtgttatccgaggaaaaactatcagagcaggaaacagaggccgctgagaaatcggcctag

SEQ ID NO: 106683 - DNA, 558 bp, Artificial Sequence
  derived and/or modified sequence
atggttaaactagggaataactttgccgaaaaggggactaaacagcctttactcgaggatggctttgacaccattccgctgatgacccccctggacgttaatcagctgcagttccctcccccagacaaggtcgtagtcaagacaaaaactgagtatgaacctgaccggaaaaaagggaaagcaagaccaccccagattgcggaattcacagttagtattactgagggcgtgaccgagcgatttaaagtgtccgtgcttgtcctgtttgccttagcgtttttgacatgcgtcgtgttcctggttgtttacaaagtttataagtatgacagggcctgtcctgatgggtttgtcctgaaaaatactcagtgcattcctgaagggctggagagctactacgcggagcaagactcctccgccagagagaaattctacaccgtgattaatcactataatcttgctaaacagtctatcacacgttcagtaagcccttggatgtctgtactcagcgaagaaaagcttagtgaacaggagaccgaggccgccgagaaaagcgcctag

SEQ ID NO: 106684 - DNA, 558 bp, Artificial Sequence
  derived and/or modified sequence
atggtaaaactcgggaacaacttcgccgaaaaaggcaccaagcaaccgcttttagaggacgggttcgacaccatccccctcatgactcccctcgatgtgaatcagcttcaattcccgcccccagacaaagtggtggtgaagactaaaaccgaatatgagccagacagaaaaaaagggaaagcaaggccccctcagatagctgagttcaccgtttctatcactgaaggagtgacagagcgtttcaaggtcagcgtgctcgtgctgtttgcccttgcttttttgacatgcgttgtattcctcgtggtttacaaggtgtataaatacgaccgcgcctgtccagatggatttgtgctcaagaatacgcagtgcatccccgagggcctagaatcttattacgcagagcaggatagctctgccagggaaaagttctacaccgtcatcaaccactataacctcgctaaacaaagtataactagaagcgtgtccccctggatgagtgtcttgtctgaagagaagctgtccgaacaggagaccgaggctgctgaaaagagcgcctag

SEQ ID NO: 106685 - DNA, 558 bp, Artificial Sequence
  derived and/or modified sequence
atggtcaagctggggaataacttcgcagagaaagggactaaacagcccctgctggaggacggcttcgacaccattccccttatgactcctctggacgttaatcagctccagttccctcctcctgacaaggtcgtagtgaaaaccaaaacagagtacgagcctgacagaaaaaagggcaaagcaaggccaccccagattgcggagttcacagtctcaatcacagaaggcgtcactgaaaggttcaaggtctcagtcctggttctgtttgcactggccttccttacttgcgtagttttcttggttgtctataaggtgtacaagtatgacagggcgtgcccagatggtttcgtgctcaagaacacacagtgtattccagagggcctggagagttactacgccgagcaggactccagcgcgagagagaaattctataccgttatcaatcattataacctagccaaacagagcatcaccagaagcgtgagcccatggatgtcagtgttgagcgaggagaagctctcagaacaggagaccgaagcggcagagaaaagtgcctag

SEQ ID NO: 106686 - DNA, 558 bp, Artificial Sequence
  derived and/or modified sequence
atggtgaaacttggaaacaacttcgccgagaaaggcaccaaacagccattactggaggatggatttgacactatcccgctgatgactcccctggacgtgaatcagcttcaattccctcccccagacaaagtcgttgtgaagacaaaaacggagtatgaacccgaccggaagaagggcaaagcccggccgcctcaaatcgcggaattcaccgtgtccattacagaaggcgtgactgagcgattcaaagtgagcgtgctagttctgtttgccttggcgttcctgacttgcgtcgtgtttttggtggtttacaaagtgtacaagtatgaccgtgcctgtcccgatggttttgtgctgaagaatacccaatgcatcccggagggactggaatcatattacgctgagcaggacagctcagcccgtgaaaaattttatacagtgatcaatcactacaacctggccaaacagtccattaccaggtccgttagcccatggatgagcgtgctcagtgaagagaagctttccgaacaggagacagaggcagctgagaaatctgcatag

SEQ ID NO: 106687 - DNA, 558 bp, Artificial Sequence
  derived and/or modified sequence
atggtgaagctgggcaacaactttgctgagaagggcaccaagcagcccctgctggaggatggctttgacaccatccccctgatgacccccctggatgtgaaccagctgcagtttcctcctccagacaaggtggtggtgaagaccaagacagaatatgagccagacaggaagaagggcaaggcccggcccccccagattgctgagttcaccgtgtccatcacagagggcgtgacagagcgcttcaaggtgtctgtgctggtgctgtttgccctggccttcctgacctgtgtggtgttcctggtggtgtacaaggtgtacaagtatgaccgggcctgcccagatggctttgtgctgaagaacacccagtgcatccctgagggcctggagagctactatgcagagcaggacagcagcgcccgggagaagttctacaccgtcatcaaccactacaacctggccaagcagagcatcaccaggtctgtgagcccctggatgtctgtgctgtctgaggagaagctgtctgagcaggagacagaggccgctgagaagagcgcctag

SEQ ID NO: 106688 - DNA, 441 bp, Artificial Sequence
  derived and/or modified sequence
atggtgaagctgggcaacaactttgctgagaagggcaccaagcagcccctgctggaggatggctttgacaccatccccctgatgacccccctggatgtgaaccagctgcagtttcctcctccagacaaggtgtctgtgctggtgctgtttgccctggccttcctgacctgtgtggtgttcctggtggtgtacaaggtgtacaagtatgaccgggcctgcccagatggctttgtgctgaagaacacccagtgcatccctgagggcctggagagctactatgcagagcaggacagcagcgcccgggagaagttctacaccgtcatcaaccactacaacctggccaagcagagcatcaccaggtctgtgagcccctggatgtctgtgctgtctgaggagaagctgtctgagcaggagacagaagctgctgagaagagcgcctag

SEQ ID NO: 106689 - DNA, 3124 bp, Artificial Sequence
  derived and/or modified sequence
aggatgctcgggcggcggctgcagtgggacctccaccttctctgccaaccagagcggaggaacctttccgcctccctccaagcggcgcactgagcgctctttgcctagaacgacttccctcccgctgcctggggcagcctcaccctgggcgcccacaccccagccctgggagagcgctactccgcctcccgcaccaccgaaaacctcctcctcctttacgggccgcgcctcctttacgggccgcgccccctttatacgcggacgcgccctcttttggtcgccccctccccaacccagcactaaggagcaccctgctctggtctccgccaccacccagcgcctcctggacccatccccccaaacccttgaacgtcctcaggacccccaggtgagcgcggcgcgctgcgggcggggaccctctctgcacctccccgcacccctgggggtcgctctgtccctacggtccccgcctcccctttctcctttctaagcgcctcgcgcccaggccgccgcccggggtggcgcagcccgcagccctcccgctccgggcgccctccgccgctccgagaccccctgggggcgcgtcctctcccgctcccctgttccctcccccggctcagggcgggcgcgtggtcccaggggaggctcccgcccagccccgcactcctttgtgcggccgggcgggcgctgcgtcaaggtggaggcgcggccacacgcgcgcacccacccgcgcgcacccagcccccgggagaggcaggaagggaggcggcggcgcgaggaggagggagcggccgtggagcccaatcgttcgctccccttcccgggtccgcgcgcggcgccgcctccgccattgctgcgagcaggagcaggagacgcggagctcggagcgctcagctgacctgccggagccgggcgtgggctgcagcctcggagctcccggaacgatggtgaagttggggaacaatttcgcagagaagggcaccaagcagccgctgctggaggatggcttcgacaccattcccctgatgacgcccctcgatgtcaatcagctgcagttcccgcccccggataaggtggtcgtgaaaactaagaccgagtatgaacctgaccgcaagaaagggaaagcacgtcctccccaaattgctgagttcaccgtcagcatcacggagggtgtcaccgagaggtttaaggtctccgtgttggtcctcttcgccctggccttcctcacctgcgtcgtcttcctggttgtctacaaggtgtacaagtatgaccgcgcctgccccgatgggttcgtcctcaagaacacccagtgcatcccagaaggcttggagagctactacgcggagcaagactccagtgcccgggagaaattttacacagtcataaaccactacaacctggccaagcagagcatcacgcgctccgtatcgccctggatgtcagttctgtcagaagagaagctgtccgagcaggagactgaagcggctgagaagtcagcttagcgggatgggcaagttccttacaatgtgtcacttgcaaataacaaagggactttgagggacatttcattaaatataattactgatactttagaggttactcatttacggtgcaattgcttctgtttgctaatgctgctttgcaaataaaacttgctgccgaccacccacgggcataaaatcaagtgcatttcagcattgcctaaagagctctgacaccacttttcatgttaagatcttcatttagctcctttactgggatttattggatgctgtaaaaaaataaatttacactggatatgcgaagggtttggatctcagataaatgcattttgtggaattgattttctgaaccgaccctgctgtctgcaaaccttcctccatagccatatctagagtgatctctcgctgtgctaagagcaagcctacttcgcatttcttcctcggccatcagcgggtaacagtgctgactgctgccaaggtgcactgtagtaagtaagtggcatagagaacgaggaaaaagacccccccacccctccctgtgctgactcctgagtcggggtgggacggccctgcaatgtggcaggctcggtgtggattgactactccctcccctctgactctggcatcttggtaaggagggaggggcaccacccatctgggtggagacagctggggtttgctccagtgtgtgtagactggcagagcatgtgagggagagggctgggaagagacggccctgggcccgtgaggtgcagaactctccctgcaggtagtctgtctgctctgtgatgtgctgataggaaagagcccccactggccctctggttcacttctattatgaataaatttgcaccaatagccccattagtttttaaagaaatgagctgggtgggaaaagtggaaatgtaatttctggtaagcttgagctactttaatttttattctatgaaactgatatcccttgatgtgggaaacaggcaggaaaggctgtggggtgggggtgggggactggtgtggcaccgtgcaaacaaaatgacaaatttcaactcacaatctttgtaagaaaattgttccagtttgaatcttgatattaaagtttatgtttacaaaactgccagttagatgaactaagtgtgtaaaacaaatagaaaagacattcgcagacatttcttctatgttattgaatgtgttgtttctggtgtacgtgtcaaaagtttcagttttttagatcagaaataaacgacaaatagtgtgagatgtgttgtgaacaggcatggtgaccgtggtcagcgccactcttgtttcctgaaatgtgcttctaagacagaaaatgtattttctcatcaagggtgtctggagacacagaccgtgaccttggcgcagcggtgtgcatcagaggcgtgtgctgagaagggtggtgttaagctgtggaaaatgactcaagagcaataaatcagtgccaaagcttccctgcgcatctgaatagacacaagtgaagcccgtgtgcgcacagtgcagaggccgagcctgtatttccaggtagacgtggactttattgactgtgaattcatttacatgtaacttctgacatttcactctgtgcaaataaagaacatgaggat

SEQ ID NO: 106690 - DNA, 4172 bp, Artificial Sequence
  derived and/or modified sequence
tgttttttgagacagagtcttgttctgtggcccaggctggagtgcaatggtgtaatctcagctcgccacaacctccacctcctgagttcaagcgattctcctgcctcagcctcctaagtagctgggattacaggcatgcgccaccacgcccggctaatttttgtatttttagtagagatggggtttcaccatgttggtcaggctggttttgaactcctgaccttgtgatctgctggtcttggcctcccaaagtgctggtgtgtctggaattggttacttctggtgcgttcttcgtctcgctgacttcaagaatgaagccacggaccctcgcgagttggacaggttggattatttgaaaacagcctgggttgtgagaggaaaatgagcaggccagaggaatttggagctgccagcatcttggagggcccagatacaatcagcagaggaagaaaaccacaggatgaaacagtcccaatgaccagcaccagtgaagacccaagacagcacaaaaggccagctagcagagaaacatgattgttcaccgtccatctctgggacaacctagatgcctgggcagatttctgaagtggagcaagagaaatcttctcttcttcacctgcttcagggaggcatcaaagtgccaaaaaggattctcagacggctgatggaaaacgccccggaccctccgtagtgccgcggggaagtccccggaaagggtgtgaaaaagtatcgaatttgggtgatgcctcctcctcgtccagcgcctgacagggcccagctcctggcccaggtgcccaggaggcaccgatccccgcagccggcctcctcccgcgcgggctccactcccatttcggcctcgcccccacaccccatagtctttcatccgtgagtcctgcaggcaggacgggttggaggtctgcaaacaggaccctctctgggaagccgcgacagcggctgagctcggggtttgggggcgcaggtcgggctagaaccaccccccttctctccgcgtccgggcatcgtcccagcggcccctcctctgtgcccaggatgctcgggcggcggctgcagtgggacctccaccttctctgccaaccagagcggaggaacctttccgcctccctccaagcggcgcactgagcgctctttgcctagaacgacttccctcccgctgcctggggcagcctcaccctgggcgcccacaccccagccctgggagagcgctactccgcctcccgcaccaccgaaaacctcctcctcctttacgggccgcgcctcctttacgggccgcgccccctttatacgcggacgcgccctcttttggtcgccccctccccaacccagcactaaggagcaccctgctctggtctccgccaccacccagcgcctcctggacccatccccccaaacccttgaacgtcctcaggacccccaggtgagcgcggcgcgctgcgggcggggaccctctctgcacctccccgcacccctgggggtcgctctgtccctacggtccccgcctcccctttctcctttctaagcgcctcgcgcccaggccgccgcccggggtggcgcagcccgcagccctcccgctccgggcgccctccgccgctccgagaccccctgggggcgcgtcctctcccgctcccctgttccctcccccggctcagggcgggcgcgtggtcccaggggaggctcccgcccagccccgcactcctttgtgcggccgggcgggcgctgcgtcaaggtggaggcgcggccacacgcgcgcacccacccgcgcgcacccagcccccgggagaggcaggaagggaggcggcggcgcgaggaggagggagcggccgtggagcccaatcgttcgctccccttcccgggtccgcgcgcggcgccgcctccgccattgctgcgagcaggagcaggagacgcggagctcggagcgctcagctgacctgccggagccgggcgtgggctgcagcctcggagctcccggaacgatggtgaagttggggaacaatttcgcagagaagggcaccaagcagccgctgctggaggatggcttcgacaccattcccctgatgacgcccctcgatgtcaatcagctgcagttcccgcccccggataaggtggtcgtgaaaactaagaccgagtatgaacctgaccgcaagaaagggaaagcacgtcctccccaaattgctgagttcaccgtcagcatcacggagggtgtcaccgagaggtttaaggtctccgtgttggtcctcttcgccctggccttcctcacctgcgtcgtcttcctggttgtctacaaggtgtacaagtatgaccgcgcctgccccgatgggttcgtcctcaagaacacccagtgcatcccagaaggcttggagagctactacgcggagcaagactccagtgcccgggagaaattttacacagtcataaaccactacaacctggccaagcagagcatcacgcgctccgtatcgccctggatgtcagttctgtcagaagagaagctgtccgagcaggagactgaagcggctgagaagtcagcttagcgggatgggcaagttccttacaatgtgtcacttgcaaataacaaagggactttgagggacatttcattaaatataattactgatactttagaggttactcatttacggtgcaattgcttctgtttgctaatgctgctttgcaaataaaacttgctgccgaccacccacgggcataaaatcaagtgcatttcagcattgcctaaagagctctgacaccacttttcatgttaagatcttcatttagctcctttactgggatttattggatgctgtaaaaaaataaatttacactggatatgcgaagggtttggatctcagataaatgcattttgtggaattgattttctgaaccgaccctgctgtctgcaaaccttcctccatagccatatctagagtgatctctcgctgtgctaagagcaagcctacttcgcatttcttcctcggccatcagcgggtaacagtgctgactgctgccaaggtgcactgtagtaagtaagtggcatagagaacgaggaaaaagacccccccacccctccctgtgctgactcctgagtcggggtgggacggccctgcaatgtggcaggctcggtgtggattgactactccctcccctctgactctggcatcttggtaaggagggaggggcaccacccatctgggtggagacagctggggtttgctccagtgtgtgtagactggcagagcatgtgagggagagggctgggaagagacggccctgggcccgtgaggtgcagaactctccctgcaggtagtctgtctgctctgtgatgtgctgataggaaagagcccccactggccctctggttcacttctattatgaataaatttgcaccaatagccccattagtttttaaagaaatgagctgggtgggaaaagtggaaatgtaatttctggtaagcttgagctactttaatttttattctatgaaactgatatcccttgatgtgggaaacaggcaggaaaggctgtggggtgggggtgggggactggtgtggcaccgtgcaaacaaaatgacaaatttcaactcacaatctttgtaagaaaattgttccagtttgaatcttgatattaaagtttatgtttacaaaactgccagttagatgaactaagtgtgtaaaacaaatagaaaagacattcgcagacatttcttctatgttattgaatgtgttgtttctggtgtacgtgtcaaaagtttcagttttttagatcagaaataaacgacaaatagtgtgagatgtgttgtgaacaggcatggtgaccgtggtcagcgccactcttgtttcctgaaatgtgcttctaagacagaaaatgtattttctcatcaagggtgtctggagacacagaccgtgaccttggcgcagcggtgtgcatcagaggcgtgtgctgagaagggtggtgttaagctgtggaaaatgactcaagagcaataaatcagtgccaaagcttccctgcgcatctgaatagacacaagtgaagcccgtgtgcgcacagtgcagaggccgagcctgtatttccaggtagacgtggactttattgactgtgaattcatttacatgtaacttctgacatttcactctgtgcaaataaagaacatgaggata

SEQ ID NO: 106691 - DNA, 2254 bp, Artificial Sequence
  derived and/or modified sequence
ccctccccaacccagcactaaggagcaccctgctctggtctccgccaccacccagcgcctcctggacccatccccccaaacccttgaacgtcctcaggacccccaggctgcagcctcggagctcccggaacgatggtgaagttggggaacaatttcgcagagaagggcaccaagcagccgctgctggaggatggcttcgacaccattcccctgatgacgcccctcgatgtcaatcagctgcagttcccgcccccggataaggtggtcgtgaaaactaagaccgagtatgaacctgaccgcaagaaagggaaagcacgtcctccccaaattgctgagttcaccgtcagcatcacggagggtgtcaccgagaggtttaaggtctccgtgttggtcctcttcgccctggccttcctcacctgcgtcgtcttcctggttgtctacaaggtgtacaagtatgaccgcgcctgccccgatgggttcgtcctcaagaacacccagtgcatcccagaaggcttggagagctactacgcggagcaagactccagtgcccgggagaaattttacacagtcataaaccactacaacctggccaagcagagcatcacgcgctccgtatcgccctggatgtcagttctgtcagaagagaagctgtccgagcaggagactgaagcggctgagaagtcagcttagcgggatgggcaagttccttacaatgtgtcacttgcaaataacaaagggactttgagggacatttcattaaatataattactgatactttagaggttactcatttacggtgcaattgcttctgtttgctaatgctgctttgcaaataaaacttgctgccgaccacccacgggcataaaatcaagtgcatttcagcattgcctaaagagctctgacaccacttttcatgttaagatcttcatttagctcctttactgggatttattggatgctgtaaaaaaataaatttacactggatatgcgaagggtttggatctcagataaatgcattttgtggaattgattttctgaaccgaccctgctgtctgcaaaccttcctccatagccatatctagagtgatctctcgctgtgctaagagcaagcctacttcgcatttcttcctcggccatcagcgggtaacagtgctgactgctgccaaggtgcactgtagtaagtaagtggcatagagaacgaggaaaaagacccccccacccctccctgtgctgactcctgagtcggggtgggacggccctgcaatgtggcaggctcggtgtggattgactactccctcccctctgactctggcatcttggtaaggagggaggggcaccacccatctgggtggagacagctggggtttgctccagtgtgtgtagactggcagagcatgtgagggagagggctgggaagagacggccctgggcccgtgaggtgcagaactctccctgcaggtagtctgtctgctctgtgatgtgctgataggaaagagcccccactggccctctggttcacttctattatgaataaatttgcaccaatagccccattagtttttaaagaaatgagctgggtgggaaaagtggaaatgtaatttctggtaagcttgagctactttaatttttattctatgaaactgatatcccttgatgtgggaaacaggcaggaaaggctgtggggtgggggtgggggactggtgtggcaccgtgcaaacaaaatgacaaatttcaactcacaatctttgtaagaaaattgttccagtttgaatcttgatattaaagtttatgtttacaaaactgccagttagatgaactaagtgtgtaaaacaaatagaaaagacattcgcagacatttcttctatgttattgaatgtgttgtttctggtgtacgtgtcaaaagtttcagttttttagatcagaaataaacgacaaatagtgtgagatgtgttgtgaacaggcatggtgaccgtggtcagcgccactcttgtttcctgaaatgtgcttctaagacagaaaatgtattttctcatcaagggtgtctggagacacagaccgtgaccttggcgcagcggtgtgcatcagaggcgtgtgctgagaagggtggtgttaagctgtggaaaatgactcaagagcaataaatcagtgccaaagcttccctgcgcatctgaatagacacaagtgaagcccgtgtgcgcacagtgcagaggccgagcctgtatttccaggtagacgtggactttattgactgtg

SEQ ID NO: 106692 - DNA, 980 bp, Artificial Sequence
  derived and/or modified sequence
attgctgcgagcaggagcaggagacgcggagctcggagcgctcagctgacctgccggagccgggcgtgggctgcagcctcggagctcccggaacgatggtgaagttggggaacaatttcgcagagaagggcaccaagcagccgctgctggaggatggcttcgacaccattcccctgatgacgcccctcgatgtcaatcagctgcagttcccgcccccggataaggtctccgtgttggtcctcttcgccctggccttcctcacctgcgtcgtcttcctggttgtctacaaggtgtacaagtatgaccgcgcctgccccgatgggttcgtcctcaagaacacccagtgcatcccagaaggcttggagagctactacgcggagcaagactccagtgcccgggagaaattttacacagtcataaaccactacaacctggccaagcagagcatcacgcgctccgtatcgccctggatgtcagttctgtcagaagagaagctgtccgagcaggagactgaagcggctgagaagtcagcttagcgggatgggcaagttccttacaatgtgtcacttgcaaataacaaagggactttgagggacatttcattaaatataattactgatactttagaggttactcatttacggtgcaattgcttctgtttgctaatgctgctttgcaaataaaacttgctgccgaccacccacgggcataaaatcaagtgcatttcagcattgcctaaagagctctgacaccacttttcatgttaagatcttcatttagctcctttactgggatttattggatgctgtaaaaaaataaatttacactggatatgcgaagggtttggatctcagataaatgcattttgtggaattgattttctgaaccgaccctgctgtctgcaaaccttcctccatagccatatctagagtgatctctcgctgtgctaagagcaagcctacttcgcatttcttcctcgg

SEQ ID NO: 106693 - DNA, 973 bp, Artificial Sequence
  derived and/or modified sequence
ggaagaaaaccacaggatgaaacagtcccaatgaccagcaccagtgaagacccaagacagcacaaaaggccagctagcagagaaacatgattgttcaccgtccatctctgggacaacctagatgcctgggcagatttctgaagtggagcaagagaaatcttctcttcttcacctgcttcagggaggcatcaaagtgccaaaaaggctgcagcctcggagctcccggaacgatggtgaagttggggaacaatttcgcagagaagggcaccaagcagccgctgctggaggatggcttcgacaccattcccctgatgacgcccctcgatgtcaatcagctgcagttcccgcccccggataaggtggtcgtgaaaactaagaccgagtatgaacctgaccgcaagaaagggaaagcacgtcctccccaaattgctgagttcaccgtcagcatcacggagggtgtcaccgagaggtttaaggtctccgtgttggtcctcttcgccctggccttcctcacctgcgtcgtcttcctggttgtctacaaggtgtacaagtatgaccgcgcctgccccgatgggttcgtcctcaagaacacccagtgcatcccagaaggcttggagagctactacgcggagcaagactccagtgcccgggagaaattttacacagtcataaaccactacaacctggccaagcagagcatcacgcgctccgtatcgccctggatgtcagttctgtcagaagagaagctgtccgagcaggagactgaagcggctgagaagtcagcttagcgggatgggcaagttccttacaatgtgtcacttgcaaataacaaagggactttgagggacatttcattaaatataattactgatactttagaggttactcatttacggtgcaattgcttctgtttgctaatgctgctttgcaaataaaacttgctgccgaccacccacgggcataaaatcaagtg

SEQ ID NO: 106694 - DNA, 798 bp, Artificial Sequence
  derived and/or modified sequence
cctgaccagtgggtcactctcatggcagatgcctgggcagatttctgaagtggagcaagagaaatcttctcttcttcacctgcttcagggaggcatcaaagtgccaaaaaggagcaggagacgcggagctcggagcgctcagctgacctgccggagccgggcgtgggctgcagcctcggagctcccggaacgatggtgaagttggggaacaatttcgcagagaagggcaccaagcagccgctgctggaggatggcttcgacaccattcccctgatgacgcccctcgatgtcaatcagctgcagttcccgcccccggataaggtggtcgtgaaaactaagaccgagtatgaacctgaccgcaagaaagggaaagcacgtcctccccaaattgctgagttcaccgtcagcatcacggagggtgtcaccgagaggtttaaggtctccgtgttggtcctcttcgccctggccttcctcacctgcgtcgtcttcctggttgtctacaaggtgtacaagtatgaccgcgcctgccccgatgggttcgtcctcaagaacacccagtgcatcccagaaggcttggagagctactacgcggagcaagactccagtgcccgggagaaattttacacagtcataaaccactacaacctggccaagcagagcatcacgcgctccgtatcgccctggatgtcagttctgtcagaagagaagctgtccgagcaggagactgaagcggctgagaagtcagcttagcgggatgggcaagttccttacaatgtgtcacttgcaaataacaaaggg

SEQ ID NO: 106695 - DNA, 3291 bp, Artificial Sequence
  derived and/or modified sequence
agagatggggtttcaccatgttggtcaggctggttttgaactcctgaccttgtgatctgctggtcttggcctcccaaagtgctggtgtgtctggaattggttacttctggtgcgttcttcgtctcgctgacttcaagaatgaagccacggaccctcgcgatgcctgggcagatttctgaagtggagcaagagaaatcttctcttcttcacctgcttcagggaggcatcaaagtgccaaaaaggattctcagacggctgatggaaaacgccccggaccctccgtagtgccgcggggaagtccccggaaagggtgtgaaaaagtatcgaatttgggtgatgcctcctcctcgtccagcgcctgacagggcccagctcctggcccaggtgcccaggaggcaccgatccccgcagccggcctcctcccgcgcgggctccactcccatttcggcctcgcccccacaccccatagtctttcatccgtgagtcctgcaggcaggacgggttggaggtctgcaaacaggaccctctctgggaagccgcgacagcggctgagctcggggtttgggggcgcaggtcgggctagaaccaccccccttctctccgcgtccgggcatcgtcccagcggcccctcctctgtgcccaggatgctcgggcggcggctgcagtgggacctccaccttctctgccaaccagagcggaggaacctttccgcctccctccaagcggcgcactgagcgctctttgcctagaacgacttccctcccgctgcctggggcagcctcaccctgggcgcccacaccccagccctgggagagcgctactccgcctcccgcaccaccgaaaacctcctcctcctttacgggccgcgcctcctttacgggccgcgccccctttatacgcggacgcgccctcttttggtcgccccctccccaacccagcactaaggagcaccctgctctggtctccgccaccacccagcgcctcctggacccatccccccaaacccttgaacgtcctcaggacccccaggagcaggagacgcggagctcggagcgctcagctgacctgccggagccgggcgtgggctgcagcctcggagctcccggaacgatggtgaagttggggaacaatttcgcagagaagggcaccaagcagccgctgctggaggatggcttcgacaccattcccctgatgacgcccctcgatgtcaatcagctgcagttcccgcccccggataaggtggtcgtgaaaactaagaccgagtatgaacctgaccgcaagaaagggaaagcacgtcctccccaaattgctgagttcaccgtcagcatcacggagggtgtcaccgagaggtttaaggtctccgtgttggtcctcttcgccctggccttcctcacctgcgtcgtcttcctggttgtctacaaggtgtacaagtatgaccgcgcctgccccgatgggttcgtcctcaagaacacccagtgcatcccagaaggcttggagagctactacgcggagcaagactccagtgcccgggagaaattttacacagtcataaaccactacaacctggccaagcagagcatcacgcgctccgtatcgccctggatgtcagttctgtcagaagagaagctgtccgagcaggagactgaagcggctgagaagtcagcttagcgggatgggcaagttccttacaatgtgtcacttgcaaataacaaagggactttgagggacatttcattaaatataattactgatactttagaggttactcatttacggtgcaattgcttctgtttgctaatgctgctttgcaaataaaacttgctgccgaccacccacgggcataaaatcaagtgcatttcagcattgcctaaagagctctgacaccacttttcatgttaagatcttcatttagctcctttactgggatttattggatgctgtaaaaaaataaatttacactggatatgcgaagggtttggatctcagataaatgcattttgtggaattgattttctgaaccgaccctgctgtctgcaaaccttcctccatagccatatctagagtgatctctcgctgtgctaagagcaagcctacttcgcatttcttcctcggccatcagcgggtaacagtgctgactgctgccaaggtgcactgtagtaagtaagtggcatagagaacgaggaaaaagacccccccacccctccctgtgctgactcctgagtcggggtgggacggccctgcaatgtggcaggctcggtgtggattgactactccctcccctctgactctggcatcttggtaaggagggaggggcaccacccatctgggtggagacagctggggtttgctccagtgtgtgtagactggcagagcatgtgagggagagggctgggaagagacggccctgggcccgtgaggtgcagaactctccctgcaggtagtctgtctgctctgtgatgtgctgataggaaagagcccccactggccctctggttcacttctattatgaataaatttgcaccaatagccccattagtttttaaagaaatgagctgggtgggaaaagtggaaatgtaatttctggtaagcttgagctactttaatttttattctatgaaactgatatcccttgatgtgggaaacaggcaggaaaggctgtggggtgggggtgggggactggtgtggcaccgtgcaaacaaaatgacaaatttcaactcacaatctttgtaagaaaattgttccagtttgaatcttgatattaaagtttatgtttacaaaactgccagttagatgaactaagtgtgtaaaacaaatagaaaagacattcgcagacatttcttctatgttattgaatgtgttgtttctggtgtacgtgtcaaaagtttcagttttttagatcagaaataaacgacaaatagtgtgagatgtgttgtgaacaggcatggtgaccgtggtcagcgccactcttgtttcctgaaatgtgcttctaagacagaaaatgtattttctcatcaagggtgtctggagacacagaccgtgaccttggcgcagcggtgtgcatcagaggcgtgtgctgagaagggtggtgttaagctgtggaaaatgactcaagagcaataaatcagtgccaaagcttccctgcgcatctgaatagacacaagtgaagcccgtgtgcgcacagtgcagaggccgagcctgtatttccaggtagacgtggactttattgactgtgaattcatttacatgtaacttctgacatttcactctgtgcaaataaagaacatgaggata

SEQ ID NO: 106696 - DNA, 1486 bp, Artificial Sequence
  derived and/or modified sequence
gggagcggccgtggagcccaatcgttcgctccccttcccgggtccgcgcgcggcgccgcctccgccattgctgcgagcaggagcaggagacgcggagctcggagcgctcagctgacctgccggagccgggcgtgggctgcagcctcggagctcccggaacgatggtgaagttggggaacaatttcgcagagaagggcaccaagcagccgctgctggaggatggcttcgacaccattcccctgatgacgcccctcgatgtcaatcagctgcagttcccgcccccggataaggtggtcgtgaaaactaagaccgagtatgaacctgaccgcaagaaagggaaagcacgtcctccccaaattgctgagttcaccgtcagcatcacggagggtgtcaccgagaggtttaaggtctccgtgttggtcctcttcgccctggccttcctcacctgcgtcgtcttcctggttgtctacaaggtgtacaagtatgaccgcgcctgccccgatgggttcgtcctcaagaacacccagtgcatcccagaaggcttggagagctactacgcggagcaagactccagtgcccgggagaaattttacacagtcataaaccactacaacctggccaagcagagcatcacgcgctccgtatcgccctggatgtcagttctgtcagaagagaagctgtccgagcaggagactgaagcggctgagaagtcagcttagcgggatgggcaagttccttacaatgtgtcacttgcaaataacaaagggactttgagggacatttcattaaatataattactgatactttagaggttactcatttacggtgcaattgcttctgtttgctaatgctgctttgcaaataaaacttgctgccgaccacccacgggcataaaatcaagtgcatttcagcattgcctaaagagctctgacaccacttttcatgttaagatcttcatttagctcctttactgggatttattggatgctgtaaaaaaataaatttacactggatatgcgaagggtttggatctcagataaatgcattttgtggaattgattttctgaaccgaccctgctgtctgcaaaccttcctccatagccatatctagagtgatctctcgctgtgctaagagcaagcctacttcgcatttcttcctcggccatcagcgggtaacagtgctgactgctgccaaggtgcactgtagtaaggtgtctggagacacagaccgtgaccttggcgcagcggtgtgcatcagaggcgtgtgctgagaagggtggtgttaagctgtggaaaatgactcaagagcaataaatcagtgccaaagcttccctgcgcatctgaatagacacaagtgaagcccgtgtgcgcacagtgcagaggccgagcctgtatttccaggtagacgtggactttattgactgtgaattcatttacatgtaacttctgacatttcactctgtgcaaataaagaacatgaggata

SEQ ID NO: 106697 - DNA, 558 bp, Artificial Sequence
  derived and/or modified sequence
atggtgaagctgggcaacaacttcgccgagaagggcaccaagcagcccttgctggaggacgggtttgataccatccccctgatgacacccttggacgtcaaccagctccagtttccaccgccagataaggtcgtggtgaaaaccaagacagagtacgaacccgacaggaagaaaggaaaagcgagacctcctcaaatcgccgaattcactgttagtataacagagggcgtgaccgaaagattcaaggtcagcgtgcttgtcctctttgctctggccttcctgacctgtgtggttttccttgtagtgtataaagtgtataagtacgatcgcgcctgcccagacgggtttgtcctgaaaaacacccaatgtatcccggaaggcctggaaagttactacgccgaacaggacagttctgctagagagaaattctatacagtgatcaaccactataatctcgctaaacaatccatcacaagaagcgtgtcgccttggatgagcgttttgagcgaagagaagctcagcgaacaggaaaccgaggccgctgagaagtcggcatag

SEQ ID NO: 106698 - DNA, 558 bp, Artificial Sequence
  derived and/or modified sequence
atggtgaagctgggcaacaacttcgccgagaagggcaccaagcagccattgctggaggacggatttgacacaatcccactgatgacccccctggatgtcaaccaactccaattcccccctcctgacaaggtcgtagtaaaaacgaagacggagtatgaacccgacaggaaaaaggggaaggccagaccgccccagatagccgagtttaccgtatcaatcacggagggggtgacggagcgatttaaggtctctgtgctggtattgtttgccctggctttcctcacctgcgtggtgttcttagtcgtctacaaggtctataaatatgaccgggcctgtcctgatggattcgttttaaagaacacgcagtgcattcccgagggcctcgagtcatactacgctgaacaggactcctcagccagagaaaaattctacacggttattaaccactacaatctggcaaagcaatccattactcgaagtgtctctccttggatgtcggtgctctccgaagagaaactgtccgagcaggagacagaagctgccgagaaatctgcttag

SEQ ID NO: 106699 - DNA, 558 bp, Artificial Sequence
  derived and/or modified sequence
atggtgaagctgggcaacaacttcgccgagaagggcaccaagcagccactgctggaagacgggtttgatacaatccccttgatgacacccctggatgttaaccagttacagtttccaccacctgataaggttgtcgttaaaactaaaacagagtacgagccagatcgtaagaagggaaaagcgcggcccccacagatcgccgagtttaccgttagtatcaccgagggagtgaccgagcgatttaaggtgtctgtgctggtgcttttcgccctggctttcttaacctgcgttgttttcctggtcgtgtacaaagtgtataagtacgacagagcctgccccgacgggttcgttctgaaaaatacacagtgcattccggagggattagagagttattacgctgaacaggattcatcagcacgggaaaagttctacacagtcattaatcactacaatcttgcaaagcagtccattacgcgatccgtgtcaccctggatgagtgtgttgagtgaagagaagctgtcggagcaagaaaccgaagctgccgaaaaatctgcttag

SEQ ID NO: 106700 - DNA, 441 bp, Artificial Sequence
  derived and/or modified sequence
atggtgaagctgggcaacaacttcgccgagaagggcaccaagcagcccctcctcgaagatgggttcgataccatacctctgatgacgccattagatgtcaatcaacttcagttcccgcccccagacaaggtcagcgtcctggttctgttcgctctggcctttttgacctgcgtcgtgttcctggttgtctataaggtttataagtatgaccgcgcctgcccggacgggttcgtcctgaaaaatactcagtgtatccctgagggtcttgaaagttattatgccgagcaggacagtagcgcaagggagaagttttatacggttattaaccactataacctggcaaaacagtccattacacgaagcgtttctccatggatgtcagtgctgtccgaagaaaaattatctgagcaggagacagaggcggctgaaaagagcgcttag

SEQ ID NO: 106701 - DNA, 558 bp, Artificial Sequence
  derived and/or modified sequence
atggtgaagctgggcaacaacttcgccgagaagggcaccaagcagcctctgctggaggatggctttgatacgatacctcttatgacacccctggacgtgaatcaattgcagttcccacctcctgacaaagtcgtagttaaaacaaagacggaatacgagccagatcgaaaaaaagggaaggcacgacccccccagatcgcggagttcacagtctcaattaccgagggggtcacggagaggtttaaagtgagcgttctggtgctgtttgccctcgcatttcttacgtgtgtggtgttcctggtggtgtacaaagtatacaagtacgatcgtgcttgccccgacggtttcgttctgaaaaacacacaatgtataccagaaggtttagagagttactacgcggaacaggactccagtgccagggaaaagttttacactgtgattaaccattacaacctggcgaaacagagcatcacccgctctgtgtcaccctggatgtccgtgctcagtgaagaaaaactcagcgaacaggaaacagaagctgcggagaaaagtgcctag

SEQ ID NO: 106702 - DNA, 558 bp, Artificial Sequence
  derived and/or modified sequence
atggtgaagctgggcaacaacttcgccgagaagggcaccaagcagccgctcctcgaggacggtttcgacaccatcccacttatgacaccccttgacgtcaaccagcttcagttccctccacctgataaggtagttgtgaagaccaagaccgaatatgagccagaccgtaagaaagggaaggcacgccctccacagattgctgagttcactgttagcattacggaaggcgtgaccgagagatttaaagtttcggtactcgtcctcttcgccctcgcatttctcacatgtgttgtatttctcgttgtctacaaggtgtacaaatacgacagagcctgtcccgatggcttcgtgctgaagaatactcagtgtatccctgaaggtctagaatcatactacgcagagcaagattcatcagcaagagagaaattctatactgtaataaaccactataacctggccaagcagagcattacaaggagcgtatcaccgtggatgtcagttctgtctgaggaaaagctcagcgagcaagagacagaggctgctgagaaatccgcctag

SEQ ID NO: 106703 - DNA, 558 bp, Artificial Sequence
  derived and/or modified sequence
atggtgaagctgggcaacaacttcgccgagaagggcaccaagcagcctcttctggaggatggctttgacactattccactcatgacacccttggatgttaatcagctccaattcccacctcccgacaaagtggtagtcaagactaagacagagtatgagcccgatcggaaaaagggtaaggctcggccccctcagatagccgagttcaccgtcagcataacagaaggcgtcacagagcggttcaaggtgtcagtgctggtgctcttcgcgctggccttcctgacatgtgtcgtgtttctcgtcgtgtacaaggtttacaaatacgatagggcatgccccgatggattcgtgctcaagaatacacagtgtattcccgaaggactggagagctattacgccgaacaggactcttccgccagagagaagttctataccgtgattaatcactataaccttgctaagcagagcatcaccagaagcgtttctccatggatgtctgtgctgagtgaggagaagttgagcgaacaggagacagaagcagccgagaaaagtgcctag

SEQ ID NO: 106704 - DNA, 558 bp, Artificial Sequence
  derived and/or modified sequence
atggtgaagctgggcaacaacttcgccgagaagggcaccaagcagccgctgcttgaggacggatttgacacaatcccccttatgacgccgctcgacgtcaatcagctccagtttcctcctccagacaaagtcgtcgttaagactaagacagagtacgaaccggatcggaagaaagggaaggcccgccccccccagatagctgaatttactgtcagcatcacggaaggggtgacggaaagattcaaagtgagtgtactggtgctctttgctttggcattccttacctgcgtggtttttctggtagtctataaggtatataaatatgacagggcctgcccagacggctttgtgcttaagaacacccaatgcatcccagaaggtctggagagctattacgccgaacaggactcgtccgccagagagaaattttataccgttatcaaccactacaacctggcaaagcaatctatcacaaggtccgtgtccccatggatgtccgtgcttagcgaggagaagctatcagaacaggagacagaagcagccgagaagagcgcatag

SEQ ID NO: 106705 - DNA, 558 bp, Artificial Sequence
  derived and/or modified sequence
atggtgaaattgggtaataattttgccgagaagggcaccaagcaaccactcctcgaggacggcttcgacacgattccattgatgacccccctggacgttaaccagctccagtttccccctccagataaggtcgtcgttaagacaaagacagaatacgaaccagataggaagaaaggaaaagcacgacctccacagatcgcggagttcactgtttccattaccgagggggtgacggaaaggtttaaggttagtgttctggttcttttcgcgttggcttttctcacctgcgtggtcttcttagtggtgtacaaggtctataagtacgacagggcttgcccagacggatttgtactgaagaatactcaatgcattccagagggacttgaatcctactacgccgaacaggatagttctgctcgggagaaattctacacggttatcaaccattacaatctcgctaaacagagtattactcggagtgtctccccctggatgtccgtgctctctgaggaaaagctttccgagcaggaaacggaggcagccgagaagagcgcttag

SEQ ID NO: 106706 - DNA, 558 bp, Artificial Sequence
  derived and/or modified sequence
atggtgaagttggggaacaatttcgcagagaagggaaccaaacagccgctgttggaagacggttttgataccattccactcatgactccacttgatgtaaaccagttgcaattccctccccctgacaaagtcgtcgttaaaaccaagacagaatacgaacccgacagaaagaagggcaaggcgagaccccctcagatagcagagtttaccgttagcatcaccgagggcgtgaccgagagatttaaagtgtcagtcctggttctcttcgccctagccttcctcacatgcgtggtctttctcgtggtctataaggtgtacaagtacgatcgcgcatgccctgacggattcgtgctgaaaaacacgcaatgcatccctgaagggctcgaaagctactatgctgagcaggacagctcagctcgtgagaagttctatactgttattaatcactataacctggccaaacagtcgataactcggagcgtgtccccatggatgtctgtactctcggaggaaaaactgagcgagcaagagactgaagccgctgagaagagtgcatag

SEQ ID NO: 106707 - DNA, 558 bp, Artificial Sequence
  derived and/or modified sequence
atggtgaaactcgggaataacttcgcggagaagggtactaaacaaccacttcttgaggatgggtttgatacgatccctctcatgacacctctggatgtgaatcagctccagtttccgccaccggataaggtcgtcgtgaagacaaagactgaatacgaacctgatcggaagaaagggaaggcacgaccaccacagatcgctgagtttacagtgagcattacagagggggtaacggagagattcaaggttagtgttctggtgctcttcgccctggcgttcttgacttgtgtcgtatttctagtggtgtataaagtctacaagtatgaccgtgcgtgtcccgacggctttgtgctgaaaaatacccaatgcattcctgagggattggagagctactacgctgagcaggactcttcagctcgcgaaaaattttatactgtgatcaatcattataacctcgcgaagcaatccattactcgttctgtcagtccatggatgagcgtgctgtccgaggaaaaactcagcgagcaggagacggaagctgctgaaaaatccgcctag

SEQ ID NO: 106708 - DNA, 441 bp, Artificial Sequence
  derived and/or modified sequence
atggtaaaactcggcaataatttcgccgagaaaggtaccaaacagccattgctggaggacggatttgacactatccccctcatgaccccgctggatgtgaaccagttgcagttcccaccccctgataaggtgtcagtgctggtactatttgctctcgcattcctgacctgcgtcgtgttcctcgtggtctacaaagtgtacaaatacgacagggcttgtccggatggctttgttctgaaaaatacgcagtgcattcctgagggacttgaatcttactatgctgagcaggatagctcagcccgagaaaagttttacacggtgattaatcactacaatctagcaaagcagagtatcacaagaagcgtgagcccttggatgagcgttctttcagaggagaagctgtccgagcaagagactgaggcagctgagaagtctgcctag

SEQ ID NO: 106709 - DNA, 558 bp, Artificial Sequence
  derived and/or modified sequence
atggtgaaacttggtaataacttcgcagagaagggtaccaagcagcctttactcgaggatggattcgacactatcccactgatgacgcccttagacgtgaaccagctccaattcccgcctccagataaagtggttgtgaagactaaaactgagtatgagcctgacagaaaaaagggcaaggccagaccacctcagatcgccgagtttactgtctccattacagagggcgtgactgagcgcttcaaagtgtccgtgcttgtgctgtttgccttggccttcttaacctgcgtcgtctttctcgtggtgtataaagtttataaatatgacagagcgtgtcctgatggcttcgtgttgaaaaatactcagtgcatcccggaaggattggaatcctactatgcagaacaagacagctctgcaagagagaaattttataccgtgattaatcactataatctggctaagcagagcattacacggtctgtctctccctggatgtccgtattaagtgaagagaagttaagtgaacaggagaccgaagcagctgagaagtccgcctag

SEQ ID NO: 106710 - DNA, 558 bp, Artificial Sequence
  derived and/or modified sequence
atggtgaaactgggcaacaactttgccgaaaagggaaccaagcaaccattgctggaggatggtttcgacaccataccactgatgactccccttgacgtcaatcagctgcagtttccacctccagacaaggttgtcgttaaaaccaagacagagtacgaacccgatcgcaagaaaggtaaggcaaggccccctcagatcgccgaatttaccgtgtcaatcacagagggtgttacagagaggttcaaagtgtccgtcctggtgctatttgccttagcatttctgacatgtgtggtgttcctggtggtctataaggtatataagtatgaccgggcttgccccgatgggttcgttctgaagaatacacagtgtataccagaaggactcgaaagttactacgcagagcaggattcaagtgcgcgagaaaagttctataccgtgattaaccattataacctggcaaagcagtcaatcacaagaagtgtgtcaccgtggatgagcgttctttcagaagaaaaactttcggagcaagaaactgaagctgcagagaagtccgcatag

SEQ ID NO: 106711 - DNA, 558 bp, Artificial Sequence
  derived and/or modified sequence
atggttaagttaggtaacaattttgctgagaaaggtaccaagcagcccctgcttgaggatggctttgacaccattccgcttatgactccactcgacgtcaaccaactccagtttcctccacctgacaaggttgtcgtgaagaccaaaacagagtacgagccagatcggaagaagggcaaggccagaccccctcaaattgccgagtttaccgtttccattaccgagggtgttacagaacgcttcaaagtatctgttctggtcctgttcgctctcgcgtttttgacctgtgtggtcttcctggtggtgtataaggtctataagtacgatagagcatgtccagatggcttcgtgctaaagaacacccagtgtattcccgaaggtctggagagttattacgccgagcaggatagcagtgcaagggaaaagttttatacagtgatcaaccactataacctggctaagcagtctatcacaagaagtgtgagcccatggatgagcgtgcttagcgaggagaagctgagtgagcaggagacagaggccgctgagaagagcgcctag

SEQ ID NO: 106712 - DNA, 558 bp, Artificial Sequence
  derived and/or modified sequence
atggtgaagctcggcaataacttcgctgagaaggggaccaagcagcccctcctggaagacggctttgacaccattcccctgatgacccccttagacgttaatcaactgcagttcccaccccctgataaggtagttgtaaagaccaagacagaatatgagccggaccgaaagaaaggcaaagcaagacctccccaaatcgccgagtttacggtctctattaccgagggggtgaccgagaggtttaaggtgtctgtgctggtactgttcgcgttagcatttttaacttgcgtggtctttctggtcgtttacaaggtatacaagtatgacagagcatgtcctgatggcttcgtgttgaagaatacacagtgcattcctgaaggcttggaatcctactacgccgaacaggactcctcagccagggagaaattttacaccgtaataaatcattataacctggccaagcagagcatcactagatccgtgagcccctggatgagcgttctgagcgaggaaaaactcagtgagcaggaaaccgaggctgctgagaagagcgcctag

SEQ ID NO: 106713 - protein, 578 aa, Artificial Sequence
  derived and/or modified sequence
MSDTLTADVIGRRVEVNGEHATVRFAGVVPPVAGPWLGVEWDNPERGKHDGSHEGTVYFKCRHPTGGSFIRPNKVNFGTDFLTAIKNRYVLEDGPEEDRKEQIVTIGNKPVETIGFDSIMKQQSQLSKLQEVSLRNCAVSCAGEKGGVAEACPNIRKVDLSKNLLSSWDEVIHIADQLRHLEVLNVSENKLKFPSGSVLTGTLSVLKVLVLNQTGITWAEAHAQCGGSRHGLDMQKDASKFVDLCVLQKCSTSNCIISAKDHTSMRMNVAKVLRCVAGCPGLEELYLESNNIFISERPTDVLQTVKLLDLSSNQLIDENQLYLIAHLPRLEQLILSDTGISSLHFPDAGIGCKTSMFPSLKYLVVNDNQISQWSFFNELEKLPSLRALSCLRNPLTKEDKEAETARLLIIASIGQLKTLNKCEILPEERRRAELDYRKAFGNEWKQAGGHKDPEKNRLSEEFLTAHPRYQFLCLKYGAPEDWELKTQQPLMLKNQLLTLKIKYPHQLDQKVLEKQLPGSMTIQKVKGLLSRLLKVPVSDLLLSYESPKKPGREIELENDLKSLQFYSVENGDCLLVRW

SEQ ID NO: 106714 - DNA, 1737 bp, Artificial Sequence
  derived and/or modified sequence
atgagcgacaccctgaccgccgacgtgatcggcagaagagtggaggtgaacggcgagcacgccaccgtgagattcgccggcgtggtgccccccgtggccggcccctggctgggcgtggagtgggacaaccccgagagaggcaagcacgacggcagccacgagggcaccgtgtacttcaagtgcagacaccccaccggcggcagcttcatcagacccaacaaggtgaacttcggcaccgacttcctgaccgccatcaagaacagatacgtgctggaggacggccccgaggaggacagaaaggagcagatcgtgaccatcggcaacaagcccgtggagaccatcggcttcgacagcatcatgaagcagcagagccagctgagcaagctgcaggaggtgagcctgagaaactgcgccgtgagctgcgccggcgagaagggcggcgtggccgaggcctgccccaacatcagaaaggtggacctgagcaagaacctgctgagcagctgggacgaggtgatccacatcgccgaccagctgagacacctggaggtgctgaacgtgagcgagaacaagctgaagttccccagcggcagcgtgctgaccggcaccctgagcgtgctgaaggtgctggtgctgaaccagaccggcatcacctgggccgaggcccacgcccagtgcggcggcagcagacacggcctggacatgcagaaggacgccagcaagttcgtggacctgtgcgtgctgcagaagtgcagcaccagcaactgcatcatcagcgccaaggaccacaccagcatgagaatgaacgtggccaaggtgctgagatgcgtggccggctgccccggcctggaggagctgtacctggagagcaacaacatcttcatcagcgagagacccaccgacgtgctgcagaccgtgaagctgctggacctgagcagcaaccagctgatcgacgagaaccagctgtacctgatcgcccacctgcccagactggagcagctgatcctgagcgacaccggcatcagcagcctgcacttccccgacgccggcatcggctgcaagaccagcatgttccccagcctgaagtacctggtggtgaacgacaaccagatcagccagtggagcttcttcaacgagctggagaagctgcccagcctgagagccctgagctgcctgagaaaccccctgaccaaggaggacaaggaggccgagaccgccagactgctgatcatcgccagcatcggccagctgaagaccctgaacaagtgcgagatcctgcccgaggagagaagaagagccgagctggactacagaaaggccttcggcaacgagtggaagcaggccggcggccacaaggaccccgagaagaacagactgagcgaggagttcctgaccgcccaccccagataccagttcctgtgcctgaagtacggcgcccccgaggactgggagctgaagacccagcagcccctgatgctgaagaaccagctgctgaccctgaagatcaagtacccccaccagctggaccagaaggtgctggagaagcagctgcccggcagcatgaccatccagaaggtgaagggcctgctgagcagactgctgaaggtgcccgtgagcgacctgctgctgagctacgagagccccaagaagcccggcagagagatcgagctggagaacgacctgaagagcctgcagttctacagcgtggagaacggcgactgcctgctggtgagatggtag

SEQ ID NO: 106715 - DNA, 1737 bp, Artificial Sequence
  derived and/or modified sequence
atgagcgacactctgactgccgacgtgattgggcgccgcgtggaagtcaatggtgagcatgccacagttcgcttcgccggagttgtgcctcccgtggcaggaccctggctgggggtcgagtgggataatcccgagagaggcaaacatgatgggtcccacgaaggtaccgtctactttaaatgcaggcaccctaccggggggtcctttatcagacctaataaggttaatttcggcaccgactttctgacggcgattaagaaccgttacgtgctggaagacggtcccgaagaggacagaaaagaacagattgtgactattggcaacaagcctgtagagactatcggattcgacagcatcatgaagcagcagagtcagctgtcgaagttgcaagaggtgtcgctgagaaattgcgccgtgtcctgtgccggcgaaaagggaggcgtggcagaggcctgtcccaacatcaggaaggttgacttatccaaaaatttgttatcttcatgggatgaagttattcacatagcagatcagctgcgccacctggaagtccttaatgtgtcagagaataagttgaagtttccctcgggttccgttctaaccggcaccctgtccgtgctgaaagtgctggtgctcaatcagactggcataacatgggccgaagcacacgcacaatgcgggggtagccggcacggacttgacatgcagaaagatgcatcgaagtttgtggatctatgcgttttgcagaagtgtagcacatccaattgcataatttctgccaaagatcatacatcaatgcgaatgaacgttgccaaagtgttgaggtgtgtggccggctgccccggcctggaagagctgtacctggaatcaaataacatcttcattagtgagagaccaaccgatgttctgcagacagtgaaactgctcgacttaagtagcaatcagctgattgatgaaaaccagttatatcttatcgcccacctccctcgtttagagcaattaatactcagcgacaccgggatttcaagcctgcacttccctgacgccggcatcggctgcaagacctcaatgtttccctccctgaagtacctggtggttaacgataatcagatcagtcagtggtccttttttaatgagctcgaaaagttgccctcactgcgggctctctcttgccttcgcaaccccctgaccaaagaggacaaggaggccgagaccgctagactgctcatcattgcttctattggtcagctcaagactctgaacaaatgcgaaattttgcccgaagaaaggcggagagcggaactcgactacagaaaggcattcggcaacgagtggaagcaggccggcggacataaggaccctgagaagaatcgattgagcgaggagtttcttacagctcatccacgctatcaatttctgtgtcttaaatacggtgccccagaggattgggagctcaaaacacaacagcctctcatgctcaagaatcagctgctgacactgaaaattaagtacccacatcagctggatcagaaggtactggaaaaacagcttccaggatccatgaccatacagaaggtcaagggattgctgtccagactgctgaaggtgcctgtaagcgacctgttgttgagttatgaatctcccaaaaaaccaggccgggagatagagttagaaaatgacctaaaaagcctgcagttctattcggttgaaaacggggactgtctcctggtgagatggtag

SEQ ID NO: 106716 - DNA, 1737 bp, Artificial Sequence
  derived and/or modified sequence
atgtctgacaccctgacagcagatgtgattggccggcgggtggaggtgaatggagagcacgccaccgtgcgctttgctggggtggtgccccctgtggccggcccctggctgggcgtggagtgggacaaccctgagcggggcaagcatgatggcagccatgagggcaccgtgtacttcaagtgccgccaccccactggaggcagcttcatccggcccaacaaggtgaactttggaacagacttcctgacagccatcaagaacagatatgtgctggaggatggccctgaggaggacaggaaggagcagatcgtgaccatcggcaacaagcctgtggagaccatcggctttgacagcatcatgaagcagcagagccagctgagcaagctgcaggaggtgtccctgaggaactgtgctgtgtcctgtgccggggagaagggcggcgtggccgaggcctgccccaacatcaggaaggtggacctgagcaagaacctgctgagctcctgggatgaagtcatccacatcgctgaccagctgcggcacctggaggtgctgaatgtgtctgagaacaagctgaagttccccagcggctctgtgctgaccggcaccctgtctgtgctgaaggtgctggtgctgaaccagacaggcatcacctgggccgaggcccacgcccagtgtggcggcagccgccacggcctggacatgcagaaggatgccagcaagtttgtggacctgtgtgtgctgcagaagtgcagcaccagcaactgcatcatcagcgccaaggaccacacctccatgaggatgaatgtggccaaggtgctgcgctgtgtggccggctgccccggcctggaggagctgtacctggagagcaacaacatcttcatcagcgagcggcccacagatgtgctgcagacagtgaagctgctggacctgagcagcaaccagctgattgatgagaaccagctgtacctgattgcccacctgccccggctggagcagctgatcctgagtgacaccggcatcagcagcctgcacttcccagatgctggcatcggctgcaagacctccatgttccccagcctgaagtacctggtggtgaatgacaaccagatcagccagtggagcttcttcaatgagctggagaagctgcccagcctgcgggccctgagctgcctgaggaaccccctgaccaaggaggacaaggaggccgagacagcccggctgctgatcatcgccagcatcggccagctgaagaccctgaacaagtgtgagatcctgcctgaggagcggcggcgggcagagctggactacaggaaggcctttggaaatgagtggaagcaggccggcggccacaaggaccctgagaagaaccggctgtctgaggagttcctgacagcccacccccgctaccagttcctgtgcctgaagtacggggcccctgaggactgggagctgaagacccagcagcccctgatgctgaagaaccagctgctgaccctgaagatcaagtacccccaccagctggaccagaaggtgctggagaagcagctgcccggctccatgaccatccagaaggtgaagggcctgctgagccggctgctgaaggtgcctgtgtctgacctgctgctgtcctatgagagccccaagaagccaggccgggagattgagctggagaatgacctgaagagcctgcagttctacagcgtggagaatggagactgcctgctggtgcgctggtag

SEQ ID NO: 106717 - DNA, 1737 bp, Artificial Sequence
  derived and/or modified sequence
atgagcgacaccctgaccgccgacgtgatcggccggcgggtggaggttaacggggaacacgcaacagtccgattcgctggcgtagtgcccccagtcgccggaccctggttaggcgtggagtgggacaaccctgaacggggaaagcacgatggaagtcatgagggcactgtttattttaaatgcagacatcctaccggtgggtcctttatcaggcctaacaaagtcaattttgggactgattttctgacagctatcaaaaaccggtacgtgttggaggatggtccggaggaagacaggaaagaacagattgtgaccataggaaataaacccgtagaaaccattgggttcgactctatcatgaagcagcagagtcagctgagcaagttacaggaagtgtctctgaggaactgtgccgtgtcttgtgctggggagaaagggggcgtagcagaggcttgtcccaatatccgcaaggtggacctgtcgaagaacttattgtcatcttgggatgaagtgatccacatagcggatcagttgcggcatttggaggtgctgaacgtgtccgagaacaagttgaaattcccctcaggtagcgtgctgacaggcactctctccgttttgaaagtgttggttcttaaccagaccggcatcacttgggccgaggcgcatgctcagtgtggcgggtctagacatggccttgacatgcaaaaggacgcctcaaagttcgtcgacttgtgtgtgctacagaagtgtagcacatccaattgcatcatcagcgccaaagaccacacctctatgcggatgaatgtagcaaaggtgctgcgctgcgtggctggctgcccaggcctggaggagctgtatctcgaaagcaacaacatattcatcagtgagcgccctaccgacgttttgcagactgtaaagctgctggaccttagcagtaaccagctaatcgacgagaaccaactctacctaattgctcatctgcccaggctagaacaactgatcttgagcgacaccggtatctcatcgctgcacttccccgacgccggcatcggctgcaagacatccatgtttccgtctctgaagtatctggtcgtgaatgacaatcagattagccagtggtcattctttaacgaactcgagaagctcccatcactgcgggccctcagttgcctccgcaatcctttaacaaaggaagacaaggaggcagagacagctaggctcctcataatcgcaagcatcgggcagcttaagaccctgaacaaatgcgagattctacctgaggaaagacggagagcagaattggattaccgcaaggccttcggcaacgagtggaagcaggcggggggacataaggaccctgagaagaatcgactgtctgaagagttccttacagcgcaccccaggtatcagtttttgtgtctcaaatatggtgctccggaagattgggagttaaaaacacagcagcccttgatgcttaagaatcagctcttaaccttgaaaatcaagtatccccaccagctggaccaaaaggtgcttgagaagcagctgccaggcagcatgacaattcagaaagtcaagggcctcttaagtcggttgctcaaggtgcctgtgtcggatcttctgctgagctatgagtcacccaagaaacccggccgagaaatagaactggaaaatgatttaaagagcctgcaattttactctgtggagaatggagattgcctccttgttagatggtag

SEQ ID NO: 106718 - DNA, 1737 bp, Artificial Sequence
  derived and/or modified sequence
atgagtgacacacttacggctgacgtcataggcagacgcgtggaggtaaacggagagcacgccaccgtcaggttcgcaggtgtggtccccccagttgccggaccctggctcggtgtggagtgggataatcctgaacgaggcaaacacgacggctcccacgaagggactgtgtacttcaaatgcagacatccaacaggcggaagttttatcaggcccaataaggtgaattttggcactgactttctcacagccattaagaatcgttatgtcctggaggacggccctgaggaggataggaaagagcagatcgtgacaatcggaaacaagccagtggagactatcggatttgatagcatcatgaaacagcagtcccagctgtctaagttacaggaagtttccctgaggaactgcgctgtgtcttgcgcgggtgagaagggtggggtcgctgaggcatgccccaatatccgcaaagtcgatctgtccaagaatttactgtccagttgggatgaggtgatccacatagcagatcagttgcgacacctggaagtcctcaatgtcagcgagaacaagttaaaattcccctcaggatcggttctgacaggcactttaagcgtattgaaggtgcttgtgctgaatcaaacaggtatcacctgggcagaggcacatgcacagtgcggtggctcaaggcatgggctggatatgcagaaggacgcgagcaaatttgttgatttgtgcgtgcttcagaaatgtagcacatctaactgcattatttctgcgaaggaccacacctcaatgcggatgaatgttgccaaagttcttaggtgtgttgcaggctgtccagggctggaggaactgtacctagagagtaacaatatttttatctcagagcgacctaccgacgtgctgcagaccgtgaagctgctggatctctctagtaaccagttaatcgatgagaaccagctgtatctaattgcccacctgcctcggttagaacagctgattctgtccgatactggaatttctagtctgcacttcccagatgctggcatcgggtgtaaaaccagcatgttccccagtctaaaatatctcgtggtgaatgacaatcaaataagtcagtggtcctttttcaatgaactggagaagcttccaagtcttagggcactgtcctgtctgaggaatccactgacaaaagaagacaaagaggccgagacagcgaggctgttgattattgcaagtataggacaattgaagacgttgaataaatgcgaaattttaccagaggagcggaggcgggctgagttggattaccgcaaagcgttcggtaacgagtggaaacaggcgggaggccacaaggaccctgaaaaaaaccggctgagcgaagagtttttgactgcccatcccaggtatcagtttctttgcctgaaatatggtgccccagaagactgggagcttaagactcagcagcctttgatgttgaaaaaccaacttctcacacttaagatcaagtaccctcaccagctggatcaaaaggtactggaaaaacaactccctggatctatgactatccaaaaagttaagggcctgctctcaagactcctgaaagttcccgtttcggacctacttctgtcttatgagtccccgaaaaagcccggaagagaaatcgagctggagaacgatttgaaaagcctgcagttttactccgtcgagaacggggattgtctcctcgttcggtggtag

SEQ ID NO: 106719 - DNA, 1980 bp, Artificial Sequence
  derived and/or modified sequence
agagcctcaagcttcgctgctgggcagttggctggaggggctgctgctgggaacacctggagtctccgcgggcagatctcatattttggattctggatatattataatgagtgacactttgacagcggatgtcattggtcgaagagttgaagttaatggagaacatgcaacagtacgttttgctggtgttgtccctcccgtggcaggaccctggttaggagtagaatgggacaatcccgagagaggaaagcatgatgggagccacgaagggactgtgtattttaaatgcaggcacccgacaggaggatcctttattcgtccgaacaaggtaaattttggaacagactttcttactgcaattaagaaccgctatgtgttagaagatggaccagaggaagatagaaaagagcaaattgttacaattggaaataaacctgtggagactatcggttttgactctattatgaaacagcaaagtcagctgagcaagttgcaagaagtttctctgaggaactgtgcagtaagttgtgctggtgaaaaaggaggagttgctgaagcatgtcctaatatcagaaaggtagatttgtcaaaaaacctgttgtcatcatgggatgaagtgatacacattgctgatcagctcagacacctggaagtccttaatgtcagtgaaaataaactaaaatttccctccggttcagtattaactggaacgctttctgtactgaaggttttagtcctcaatcaaacaggaataacgtgggctgaggctcatgcgcagtgtggtggcagcaggcacggtctcgacatgcagaaagacgccagcaagttcgtggatctgtgcgtgctgcagaaatgctccaccagcaactgcatcatcagtgccaaggaccacacatccatgcggatgaacgtggccaaggtgctgcggtgtgtcgcggggtgcccaggcctggaggaactctaccttgagtctaacaacattttcatttccgaaaggccaacagatgttctccagacagtcaagttattagatctttcctctaatcaattaattgatgaaaatcagctgtatctgatagcccacctgcccaggttagaacaattaatcctctctgacactggaatttcttctctacattttccggatgctggaattgggtgcaaaacgtccatgttcccatccttgaagtacctggtagtaaacgacaatcagatatcacaatggtcgtttttcaatgagctagagaagttaccaagtctacgggctttgtcctgcctaagaaaccccctgaccaaagaggacaaagaagcagagacggcgcgactactcattatcgccagcattggccagctgaagacgctgaacaaatgtgagattctccccgaggagaggcggagagctgagcttgactaccgaaaagcttttggaaatgagtggaaacaggctggtggacataaggatccggaaaaaaacagactcagcgaagaattcctcacagcccatcccagataccagttcctctgcctgaaatatggtgcacctgaagattgggaactcaaaacacagcaaccacttatgctgaaaaaccagctactaacactgaagataaaataccctcatcaacttgatcagaaagtcctggagaaacaactgccgggctccatgacaattcaaaaggtgaagggattgctgtcacgtcttctcaaagttcctgtgtcagaccttctgttgtcctatgaaagtcccaaaaagccgggcagagaaatcgagctggaaaatgacctaaagtcattacagttttattctgtggaaaatggagattgtctattagtgcgatggtgacaaccaactaataaaatttaaagaccacactgcttatcgtgtctggggttcaccggaaataaatgattcactggaacaattctactgtcaaaacaaagggggtttacaacttgtcctaagtataacaagggatgtat

SEQ ID NO: 106720 - protein, 1253 aa, Artificial Sequence
  derived and/or modified sequence
MAAQVTLEDALSNVDLLEELPLPDQQPCIEPPPSSLLYQPNFNTNFEDRNAFVTGIARYIEQATVHSSMNEMLEEGQEYAVMLYTWRSCSRAIPQVKCNEQPNRVEIYEKTVEVLEPEVTKLMNFMYFQRNAIERFCGEVRRLCHAERRKDFVSEAYLITLGKFINMFAVLDELKNMKCSVKNDHSAYKRAAQFLRKMADPQSIQESQNLSMFLANHNKITQSLQQQLEVISGYEELLADIVNLCVDYYENRMYLTPSEKHMLLKVMGFGLYLMDGSVSNIYKLDAKKRINLSKIDKYFKQLQVVPLFGDMQIELARYIKTSAHYEENKSRWTCTSSGSSPQYNICEQMIQIREDHMRFISELARYSNSEVVTGSGRQEAQKTDAEYRKLFDLALQGLQLLSQWSAHVMEVYSWKLVHPTDKYSNKDCPDSAEEYERATRYNYTSEEKFALVEVIAMIKGLQVLMGRMESVFNHAIRHTVYAALQDFSQVTLREPLRQAIKKKKNVIQSVLQAIRKTVCDWETGHEPFNDPALRGEKDPKSGFDIKVPRRAVGPSSTQLYMVRTMLESLIADKSGSKKTLRSSLEGPTILDIEKFHRESFFYTHLINFSETLQQCCDLSQLWFREFFLELTMGRRIQFPIEMSMPWILTDHILETKEASMMEYVLYSLDLYNDSAHYALTRFNKQFLYDEIEAEVNLCFDQFVYKLADQIFAYYKVMAGSLLLDKRLRSECKNQGATIHLPPSNRYETLLKQRHVQLLGRSIDLNRLITQRVSAAMYKSLELAIGRFESEDLTSIVELDGLLEINRMTHKLLSRYLTLDGFDAMFREANHNVSAPYGRITLHVFWELNYDFLPNYCYNGSTNRFVRTVLPFSQEFQRDKQPNAQPQYLHGSKALNLAYSSIYGSYRNFVGPPHFQVICRLLGYQGIAVVMEELLKVVKSLLQGTILQYVKTLMEVMPKICRLPRHEYGSPGILEFFHHQLKDIVEYAELKTVCFQNLREVGNAILFCLLIEQSLSLEEVCDLLHAAPFQNILPRVHVKEGERLDAKMKRLESKYAPLHLVPLIERLGTPQQIAIAREGDLLTKERLCCGLSMFEVILTRIRSFLDDPIWRGPLPSNGVMHVDECVEFHRLWSAMQFVYCIPVGTHEFTVEQCFGDGLHWAGCMIIVLLGQQRRFAVLDFCYHLLKVQKHDGKDEIIKNVPLKKMVERIRKFQILNDEIITILDKYLKSGDGEGTPVEHVRCFQPPIHQSLASS

SEQ ID NO: 106721 - protein, 1255 aa, Artificial Sequence
  derived and/or modified sequence
MGPKHVLRQPGPSERHHPEVPAWTPRAGPPCWLCRQRWGWTLHPPGRGCPALLLSEPRMAAQVTLEDALSNVDLLEELPLPDQQPCIEPPPSSLLYQNEMLEEGQEYAVMLYTWRSCSRAIPQVKCNEQPNRVEIYEKTVEVLEPEVTKLMNFMYFQRNAIERFCGEVRRLCHAERRKDFVSEAYLITLGKFINMFAVLDELKNMKCSVKNDHSAYKRAAQFLRKMADPQSIQESQNLSMFLANHNKITQSLQQQLEVISGYEELLADIVNLCVDYYENRMYLTPSEKHMLLKVMGFGLYLMDGSVSNIYKLDAKKRINLSKIDKYFKQLQVVPLFGDMQIELARYIKTSAHYEENKSRWTCTSSGSSPQYNICEQMIQIREDHMRFISELARYSNSEVVTGSGRQEAQKTDAEYRKLFDLALQGLQLLSQWSAHVMEVYSWKLVHPTDKYSNKDCPDSAEEYERATRYNYTSEEKFALVEVIAMIKGLQVLMGRMESVFNHAIRHTVYAALQDFSQVTLREPLRQAIKKKKNVIQSVLQAIRKTVCDWETGHEPFNDPALRGEKDPKSGFDIKVPRRAVGPSSTQLYMVRTMLESLIADKSGSKKTLRSSLEGPTILDIEKFHRESFFYTHLINFSETLQQCCDLSQLWFREFFLELTMGRRIQFPIEMSMPWILTDHILETKEASMMEYVLYSLDLYNDSAHYALTRFNKQFLYDEIEAEVNLCFDQFVYKLADQIFAYYKVMAGSLLLDKRLRSECKNQGATIHLPPSNRYETLLKQRHVQLLGRSIDLNRLITQRVSAAMYKSLELAIGRFESEDLTSIVELDGLLEINRMTHKLLSRYLTLDGFDAMFREANHNVSAPYGRITLHVFWELNYDFLPNYCYNGSTNRFVRTVLPFSQEFQRDKQPNAQPQYLHGSKALNLAYSSIYGSYRNFVGPPHFQVICRLLGYQGIAVVMEELLKVVKSLLQGTILQYVKTLMEVMPKICRLPRHEYGSPGILEFFHHQLKDIVEYAELKTVCFQNLHAAPFQNILPRVHVKEGERLDAKMKRLESKYAPLHLVPLIERLGTPQQIAIAREGDLLTKERLCCGLSMFEVILTRIRSFLDDPIWRGPLPSNGVMHVDECVEFHRLWSAMQFVYCIPVGTHEFTVEQCFGDGLHWAGCMIIVLLGQQRRFAVLDFCYHLLKVQKHDGKDEIIKNVPLKKMVERIRKFQILNDEIITILDKYLKSGDGEGTPVEHVRCFQPPIHQSLASS

SEQ ID NO: 106722 - protein, 151 aa, Artificial Sequence
  derived and/or modified sequence
MAAQVTLEDALSNVDLLEELPLPDQQPCIEPPPSSLLYQPNFNTNFEDRNAFVTGIARYIEQATVHSSMNEMLEEGQEYAVMLYTWRSCSRAIPQVKCNEQPNRVEIYEKTVEVLEPEVTKLMNFMYFQRNAIERFCGEVRRLCHAERRKD

SEQ ID NO: 106723 - DNA, 3762 bp, Artificial Sequence
  derived and/or modified sequence
atggccgcacaggtcacccttgaggatgccttatctaatgtggatctgctggaggagttgccacttcccgatcagcagccttgtattgagccaccaccgtccagcctcctatatcagcccaatttcaacacaaacttcgaggaccgaaatgctttcgtcactggcatcgcccgatacatcgagcaggcaaccgttcactcatctatgaacgaaatgctggaggaaggacaggagtacgcagtgatgctgtatacgtggcgctcttgcagtcgcgcaatccctcaggtgaaatgtaacgagcagcccaacagagtcgagatctacgagaagacggtcgaagtgctggagcccgaggtgactaagttgatgaattttatgtacttccagcggaatgccatagaacggttctgcggcgaggtgagacggctgtgtcacgccgaacggaggaaagatttcgtttcagaagcttatctcatcacactgggaaagttcatcaatatgttcgctgtcttggacgagctcaaaaatatgaagtgcagtgtgaaaaacgatcactccgcatataagagggccgcccagtttttgcggaagatggccgatccccagtctatacaggaatctcagaacctgtccatgtttctagcaaatcacaacaagatcacgcagtctcttcaacaacaactggaggtaatctctgggtacgaggaactcttggctgacatcgtgaacctttgtgtggactactacgagaacaggatgtatctcacaccttcagaaaagcatatgttgctgaaggtcatgggttttggactgtacctcatggatggaagcgtgtcaaatatctacaagctcgatgctaaaaaaagaatcaatcttagtaagattgataaatacttcaagcaactgcaggtcgtgccgctgttcggggatatgcagattgaactggcaagatatattaagacctctgctcactatgaggaaaataagagcagatggacatgcaccagctccgggtcaagccctcagtacaacatctgcgagcagatgatccagatacgcgaggaccatatgagatttataagtgaattggcccggtactccaactcggaagtcgtgaccggtagcgggaggcaggaggcccagaagacagacgccgagtatagaaaattgttcgatctcgccctgcaagggctgcaacttctttcccagtggagcgcccatgtgatggaagtttactcctggaaactcgtccacccaacagataaatactccaataaggactgtcccgacagcgctgaagagtacgagcgagccacgagatataactatacaagtgaagagaaattcgctctagtggaggtgatcgccatgatcaaaggcctacaggtgcttatgggaagaatggaatccgttttcaaccatgcaattaggcacacagtttatgccgcgctgcaggacttttcgcaagtcacactccgtgaaccactccggcaggccattaagaagaaaaagaatgtgattcagagtgtcctccaggcaatacgcaaaacagtgtgcgactgggaaacaggccacgaaccgtttaacgatcccgcgttgcgaggcgagaaggatcctaagagcggcttcgacatcaaggtgccccgcagagccgttgggccatcttcaacacagctctatatggtgcgcaccatgctggaaagcctgatcgccgataaatctggttccaaaaagaccctacgaagttccctggagggccccactatcctggacatagaaaagtttcatagggaatcattcttctacacgcacctgatcaactttagtgaaactctgcaacagtgttgtgacctgtcacaattgtggttcagggagtttttcctggaactgaccatgggtagacgaatccagtttcccatcgagatgagcatgccgtggattctcaccgatcatatattagagaccaaagaagcctctatgatggagtacgtgctgtactctctagacctgtataacgactccgcgcactacgcacttacccggttcaataagcagttcctttacgatgagatcgaggctgaagtgaatctctgttttgaccagtttgtgtataaattagccgaccagatctttgcttactacaaagtcatggctggatcgctgttgctcgacaagcgtctcaggagcgagtgcaagaaccaaggagctacaatacacctcccaccttccaatcgatacgagacgttgctgaagcagagacatgtccagcttcttggacgctctattgatctgaacagacttatcacccaacgcgttagcgcagctatgtacaagagcctggaactggccataggtcgcttcgaatctgaagatctcacgtctatcgtggaacttgatggtctactggagatcaaccgcatgacccacaagctgttgtctaggtatctcaccctcgacggctttgacgctatgttcagggaagcaaatcataatgtgtcggcaccatatggtcgcatcaccttacatgtcttttgggagctgaattacgacttcttacccaactattgctacaacggatccaccaacaggttcgtgcgcactgtgctcccattctcccaggagtttcagcgagataaacagccgaacgctcaaccacagtacctgcatggctcgaaagcccttaacctcgcctactcatctatttatgggagttacaggaactttgtcggcccaccacacttccaggtaatctgcagactattgggatatcaaggtatagctgtcgtgatggaggaattgctgaaagtggtgaagtctctcctccaagggactatactgcaatacgtgaagacgctcatggaggtcatgccaaagatttgtagactacccagacatgagtacggctcccccggaatcctcgagttctttcatcaccagctcaaggacatagtggagtatgccgagttaaagactgtgtgctttcagaacctgcgtgaagtcggtaatgctatactcttttgtctgctaatcgagcaaagcctgtctttggaggaggtttgcgatctgctgcacgcggccccgtttcagaatatcctgcctagggtgcacgtaaaggagggagagcgactagacgctaaaatgaagcgactggaatccaagtacgccccattacatctcgtaccgctcattgagcgcctgggaaccccacaacaaatcgccatcgctagagaaggcgatttattaactaaggagcgcctgtgttgcggcctgagtatgtttgaggtgattctaacaaggattcggagtttcctggatgatcccatctggcgaggacctcttccttcaaacggtgtgatgcatgtggatgaatgcgtagaattccacagattgtggagtgctatgcaattcgtgtactgcatccctgtgggcacgcacgagttcacagtcgaacaatgttttggcgacggccttcattgggcagggtgtatgataattgtcctgctcgggcaacagcgccgcttcgccgtactggacttctgctatcaccttttgaaggtccagaagcacgacgggaaggacgaaattattaagaatgtcccgcttaaaaaaatggttgagcgaatcagaaagttccagatcttgaacgatgaaatcattacaatcctggataagtatctgaagagcggagacggagagggaacccctgtggaacacgttaggtgtttccagccgccaatccaccagtctctggcgtcatcttag

SEQ ID NO: 106724 - DNA, 3768 bp, Artificial Sequence
  derived and/or modified sequence
atgggccctaagcacgtgctgcggcagcctggaccctcggagaggcaccatccagaagttcctgcgtggacgcctagggcggggcccccttgttggctgtgcagacagaggtggggctggaccctgcaccccccgggcagagggtgtccagctctgctgctgtcagaacctcggatggccgcccaagtgaccttggaagacgccttgtccaatgtggacctgcttgaggagctccctctgcccgatcagcagccatgtattgagccccctccctcaagcttactgtaccagaacgagatgcttgaggaggggcaagaatatgcggtgatgctgtacacttggcgtagctgcagccgagcaataccacaggtgaagtgtaacgaacagcccaaccgagtggagatctacgagaaaacagtagaggtcctggaaccggaggttacaaagcttatgaactttatgtattttcagaggaacgccattgagaggttttgcggcgaggtaagacgtctctgtcacgcggaaaggagaaaggactttgtatctgaggcctacctcatcactctaggaaaatttatcaatatgtttgccgtcctggacgaattgaagaacatgaaatgtagcgtgaagaatgaccactctgcttataaacgcgccgcccagttcttaaggaaaatggccgacccacagagcatacaggaatcgcagaacctcagtatgttccttgctaaccacaataagataacccaatctcttcagcagcagcttgaagtgatttcaggttacgaagagctgctggccgatatagtaaacctgtgcgtcgactattacgagaatcgcatgtacctcaccccgagtgaaaaacatatgctgctaaaagtcatggggttcggcttgtatctaatggacgggagtgtctcgaatatctacaagctggacgccaaaaagcggataaacctgtcaaaaatagataagtacttcaagcagctccaggtggttcctttgttcggggacatgcaaattgaactggctcggtacatcaagacttcagctcactacgaggagaataagagtaggtggacctgcacgtccagcggctcctctcctcagtataatatctgtgaacagatgattcagatccgagaggatcacatgaggtttataagcgaactggcccggtattcaaactccgaagtggtcaccggaagcggccggcaggaagctcagaagactgatgccgaataccgcaagctctttgatctcgcattgcagggccttcagctcctgagccagtggtccgcacacgtaatggaggtttacagctggaaactggtgcaccctacagataaatatagtaataaggattgccccgattctgctgaggagtacgagcgcgcaacgagatacaactatacctctgaggagaaattcgcgctggtcgaagtcattgcgatgatcaagggattgcaggttcttatggggaggatggaatcagtatttaatcacgcaatcaggcataccgtgtacgctgctctgcaggatttttcccaggtgacactgagagagcctctgagacaggccatcaaaaagaaaaagaacgtcattcagtctgtgttgcaggccatccgtaagactgtgtgcgactgggagaccgggcacgagccctttaacgaccccgcgttaagaggcgaaaaggatccaaagagtggttttgacattaaagttccaaggcgcgcggtgggaccctcctccacccagttatacatggtaaggactatgttggaaagtctcatcgccgacaagagtggaagtaaaaaaaccctcagaagctccttggagggacctacaattctagacatcgaaaagttccacagagaatccttcttctatacccatctaatcaatttttccgagacgctgcaacagtgctgcgatttatctcaactttggttcagagagttctttctggaactgaccatggggcggaggatccagtttccaatcgagatgtcgatgccttggattctgacggatcatatcttagagacaaaggaagccagtatgatggaatacgtgttatactccctggatctgtacaatgactccgcacactatgcacttacccgatttaacaaacagtttctgtacgacgaaattgaagctgaggtaaacctgtgctttgatcagttcgtgtacaaattggcagaccaaatatttgcgtactacaaggtgatggctgggagccttttactggacaaacgactcagaagcgaatgtaaaaaccagggagcgacaattcatttgcctccctcaaacaggtatgaaactctgctgaagcaacgtcatgtccaactgctaggtaggtctatcgatttaaacagattgattacccagcgtgtgtcagccgcgatgtataagtccttggagctggccattggtcggttcgaatcagaagacctgaccagcatcgtggagctggatggactattggaaattaatcgaatgactcacaaacttcttagccgctatcttaccctggatgggttcgatgccatgttcagagaagctaatcataatgtttcagccccctatgggcggatcaccctgcatgtattttgggagctcaactacgattttctgcctaattactgctacaacggctctaccaataggtttgtgagaaccgtcctccctttttcacaggagttccagagggataagcaaccgaacgcccagccacagtatttgcacgggagcaaagctcttaatctcgcatattcttccatctacggaagctatagaaactttgtggggccgcctcactttcaggtcatttgtaggctgctgggctatcagggaatcgccgtggttatggaggaactcctgaaagtcgtaaaatctctgcttcaaggcactattctgcaatacgtaaagacactgatggaggtcatgcccaagatctgtcggctgcctcgccatgagtatgggtctccaggcatcttggagttcttccatcaccagctcaaggacatcgtggaatatgccgagcttaagacagtctgtttccagaatttacatgccgctccatttcagaatatcttgcctcgggtgcatgtgaaggagggagaacgcctcgatgcaaaaatgaaaaggcttgaatcaaagtacgctcccctgcacctagtgccgttgattgaaagacttgggactccacaacagatcgccattgctcgagagggagacctgctgaccaaagagagactgtgctgtggactgtctatgttcgaagtgatactgaccagaatccgatcctttctggacgatcccatttggcgcggtccgctgccttcgaatggtgtgatgcacgtcgacgaatgcgtcgagtttcatagactgtggtccgccatgcagtttgtctactgtattcccgttggcacacatgaatttactgttgagcagtgctttggtgatggtttgcactgggcagggtgtatgatcattgttctcttgggacagcagcgacgattcgccgtactggacttctgttaccatcttctgaaggttcagaagcacgacggtaaagatgagattattaagaatgtgcccctaaaaaaaatggtggagcgaattaggaagttccagatcctgaacgacgaaattatcaccatcctggataaatacctgaagagtggggatggggaagggacccccgtggaacacgtgcgctgttttcagcctcccatacaccaatctctggcttcttcttag

SEQ ID NO: 106725 - DNA, 3762 bp, Artificial Sequence
  derived and/or modified sequence
atggccgcccaggtaactctagaggatgctctgtcaaacgtggatttgcttgaggaattgcccctccctgaccagcagccgtgcatcgagcccccaccttctagcctcctgtatcagcctaacttcaatactaactttgaggatcgcaacgcttttgtaacagggattgcccggtatatcgagcaggctacagtgcacagttctatgaatgaaatgttagaagagggccaggaatacgctgttatgctctacacctggcggtcctgttctagggcaatcccccaggtgaaatgcaacgaacagcctaaccgcgtggagatctatgagaaaaccgtcgaggtgctggaacccgaggtgacgaagctgatgaactttatgtattttcagagaaacgcaattgagagattttgtggagaagttaggaggctgtgtcatgcggagaggcgcaaggatttcgtgtcagaggcctaccttattaccttaggaaagttcataaatatgtttgcggtgctggatgaactgaagaatatgaaatgctccgtaaagaatgaccactccgcgtacaagcgggcggcccagtttctgaggaaaatggccgatcctcagtccattcaggagtcgcagaacttaagcatgttcctggcaaaccacaacaaaataacccagtcactccagcagcagctcgaggtgatcagtgggtatgaggagctcctggccgacatcgtgaacctgtgcgtggactactacgaaaacagaatgtatctgacaccctccgaaaaacatatgcttctgaaggtgatgggctttggcctgtatctgatggatggctcagttagcaacatttataaacttgacgccaaaaaaaggataaacctgagtaagattgataaatactttaaacagctccaggtcgtaccgctgttcggtgatatgcagatcgagcttgcaagatacataaagacatcagcacactacgaggagaacaagagcagatggacttgcacatcctctggcagcagtcctcaatacaatatctgtgagcaaatgattcagataagagaagaccatatgagatttataagcgagctcgccagatatagcaacagtgaagttgtcaccggaagtgggaggcaggaggcccagaaaacggacgcagagtacaggaaattatttgacctggctctgcaagggttgcagctgctgtctcagtggtctgctcacgttatggaggtctatagctggaagcttgtccatccaaccgataaatactcgaacaaagactgcccagatagcgccgaggagtacgagcgcgccacacggtataactacactagcgaggaaaaatttgctctggtggaggtgatagctatgataaaaggactgcaggtcttaatgggccgcatggagagcgtttttaatcacgccatcaggcacacagtctacgccgcattgcaagatttttctcaggtgaccttgcgcgaacctctgcgacaagctattaagaagaagaagaatgtcatacagtcagtgctgcaagcaatcagaaaaactgtctgtgactgggagaccggacatgaaccatttaacgacccggccctacggggcgagaaggatccgaagagcggatttgacattaaagtgccgcgccgcgccgtgggaccttccagcacacagctctacatggttcgcacaatgctggaatcccttattgccgacaagtccggctctaaaaagacccttagaagctcgctcgaaggccccaccattcttgatatcgagaagtttcaccgggaaagtttcttttatacacatctaatcaatttcagcgagactctccagcaatgctgcgacttaagccagctgtggttcagggaattttttctggagctgaccatgggcagacgcatccaatttccaattgagatgtcgatgccctggatccttacagaccatatcctcgaaactaaggaagctagtatgatggagtatgttctttactcactggatctttacaacgactcagctcattatgccctgacccgattcaacaaacagtttttgtatgacgagatagaggccgaggtgaatttatgtttcgatcaatttgtctacaaactagcagaccagatcttcgcttactacaaggtgatggccggatccctgctcctggacaagcgcttaagatccgagtgcaaaaatcagggcgccacaatccatttacccccatcgaaccggtacgaaacgctcctgaagcaacgtcacgtgcagctcttaggtagaagcattgatctcaatagactgatcacacaacgggtgtctgcagcaatgtacaaatctctggaactggctattggaagatttgagagcgaagacctgacgtccatcgttgagttagacggattgctggaaattaaccgcatgacccataagcttttaagtcgctatctaaccctcgacggctttgacgccatgtttagagaggccaaccataacgtgtctgcgccctacgggagaataacactccatgttttttgggagctgaactatgattttctccccaattattgttataatggaagtacgaatagattcgtgaggactgtgttaccattttctcaggagtttcagcgcgacaaacagccgaacgctcagccgcagtatctgcacggctcaaaggccttgaatctggcttacagcagtatctacggctcatataggaactttgtcggcccaccccattttcaggttatctgccgattactaggataccaaggaatcgcggtagtcatggaggagctgctcaaagttgtcaagagtcttctgcaaggaaccatattgcagtacgtgaaaactctgatggaagtcatgccaaaaatttgtagactgcctcgccatgagtacggaagcccaggcatcctagaattctttcaccatcagttgaaagatattgtggaatatgctgaactcaaaacggtctgctttcaaaatctccgggaagtgggaaatgcgatcctattctgcctattgatagaacaatccctctctctggaggaggtgtgtgacctgctacatgctgccccctttcaaaacatccttcctagagtgcacgtcaaggagggcgagagactggacgccaaaatgaagcggttggagtcaaaatacgccccccttcacctcgtgcccctcattgagcgcttgggcactcctcagcagatcgctatcgctcgggaaggagatctactgaccaaagaaaggctttgttgtgggctgtctatgttcgaagtgattctgactcgcatcaggtcatttctggacgaccccatctggcgtggccccctgcctagtaacggtgtcatgcacgtcgacgagtgtgtggagtttcatcgactgtggtctgctatgcagttcgtctactgcatcccggttggtactcatgagttcaccgtggaacagtgcttcggagatggcctgcactgggccggatgcatgattatcgtgcttctgggtcaacaacgtcgattcgccgttctggacttctgctaccacctgctaaaagtccaaaaacacgatgggaaagatgagattattaaaaacgtgcctctcaaaaaaatggtggagagaattcgcaaatttcaaatcctcaacgatgagataatcactatcctcgacaagtatctcaaaagtggcgacggcgaaggaacccctgtggaacatgtacggtgtttccaacctccgatccaccagtcccttgcgagttcatag

SEQ ID NO: 106726 - DNA, 3762 bp, Artificial Sequence
  derived and/or modified sequence
atggccgcccaggtgaccctggaggatgccctgagcaatgtggacctgctggaggagctgcccctgcctgaccagcagccctgcatcgagcccccacccagcagcctgctgtaccagcccaacttcaacaccaactttgaagatagaaatgcctttgtgacaggcatcgcccgctacatcgagcaggccaccgtgcacagctccatgaatgagatgctggaggagggccaggagtatgctgtgatgctgtacacctggaggagctgcagccgggccatcccccaggtgaagtgcaatgagcagcccaacagagtggagatctatgagaagacagtggaggtgctggagcctgaggtgaccaagctgatgaacttcatgtacttccagagaaatgccatcgagcgcttctgtggggaggtgcggcggctgtgccacgccgagaggaggaaggactttgtgtctgaggcctacctgatcaccctgggcaagttcatcaacatgtttgctgtgctggatgagctgaagaacatgaagtgcagcgtgaagaatgaccacagcgcctacaagagagctgcccagttcctgaggaagatggctgacccccagagcatccaggagagccagaacctgtccatgttcctggccaaccacaacaagatcacccagagcctgcagcagcagctggaggtgatcagcggctatgaggagctgctggccgacatcgtgaacctgtgtgtggactactatgagaacaggatgtacctgacccccagcgagaagcacatgctgctgaaggtgatgggcttcggcctgtacctgatggatggctctgtgagcaacatctacaagctggatgccaagaagaggatcaacctgagcaagattgacaagtacttcaagcagctgcaggtggtgcccctgtttggagacatgcagatcgagctggcccgctacatcaagaccagcgcccactatgaggagaacaagagccgctggacctgcaccagcagcggcagcagcccccagtacaacatctgtgagcagatgatccagatccgggaggaccacatgaggttcatcagcgagctggcccgctacagcaacagcgaggtggtgactggaagtggccggcaggaggcccagaagacagatgctgagtacaggaagctgtttgacctggccctgcagggcctgcagctgctgagccagtggagcgcccacgtgatggaggtgtacagctggaagctggtgcaccccacagacaagtacagcaacaaggactgcccagattctgctgaggagtatgagcgggccacccgctacaactacaccagcgaggagaagtttgccctggtggaggtgattgccatgatcaagggcctgcaggtgctgatgggccgcatggagagcgtcttcaaccacgccatccgccacacagtgtatgctgccctgcaggacttcagccaggtgaccctgcgggagcccctgcggcaggccatcaagaagaagaagaatgtcatccagagcgtgctgcaggccatcaggaagacagtgtgtgactgggagactggacatgagcccttcaatgaccctgccctgcggggggagaaggaccccaagagcggctttgacatcaaggtgcccaggagagctgtgggccccagcagcacccagctgtacatggtgaggaccatgctggagagcctgattgctgacaagagcggcagcaagaagaccctgcggagcagcctggagggccccaccatcctggacatcgagaagttccaccgggagagcttcttctacacccacctgatcaacttcagcgagaccctgcagcagtgctgtgacctgagccagctgtggttccgggagttcttcctggagctgaccatgggccgccgcatccagttccccatcgagatgtccatgccctggatcctgacagaccacatcctggagaccaaggaggcctccatgatggagtatgtgctgtacagcctggacctgtacaatgacagcgcccactacgccctgacccgcttcaacaagcagttcctgtatgatgaaattgaagctgaggtgaacctgtgctttgaccagtttgtgtacaagctggccgaccagatctttgcctactacaaggtgatggccggcagcctgctgctggacaagaggctgcggtctgagtgcaagaaccagggcgccaccatccacctgccccccagcaacagatatgagaccctgctgaagcagagacatgtgcagctgctgggccgcagcattgacctgaacagactcatcacccagagggtgtctgctgccatgtacaagagcctggagctggccatcggccgctttgaaagtgaggacctgaccagcatcgtggagctggatggcctgctggagatcaacaggatgacccacaagctgctgagccgctacctgaccctggatggctttgatgccatgttccgggaggccaaccacaacgtgtctgccccctacggccgcatcaccctgcacgtgttctgggagctgaactatgacttcctgcccaactactgctacaacggcagcaccaacagatttgtgaggacagtgctgcccttcagccaggagttccagagggacaagcagcccaatgcccagccccagtacctgcacggcagcaaggccctgaacctggcctacagcagcatctacggcagctacagaaactttgtgggccccccccacttccaggtgatctgccgcctgctgggctaccagggcattgctgtggtgatggaggagctgctgaaggtggtgaagagcctgctgcagggcaccatcctgcagtatgtgaagaccctgatggaggtgatgcccaagatctgccgcctgcccaggcatgaatatggcagccctggcatcctggagttcttccaccaccagctgaaggacatcgtggagtatgcagagctgaagacagtgtgcttccagaacctgcgggaggtgggcaatgccatcctcttctgcctgctgattgagcagagcctgagcctggaggaggtgtgtgacctgctgcatgctgcccccttccagaacatcctgccccgggtgcacgtgaaggagggggagcggctggatgccaagatgaagaggctggagagcaaatatgcccccctgcacctggtgcccctgattgagcggctgggcaccccccagcagatcgccatcgcccgggagggggacctgctgaccaaggagcggctgtgctgcggcctgtccatgtttgaagtcatcctgacccgcatccgctccttcctggatgaccccatctggaggggccccctgcccagcaatggagtgatgcacgtggatgaatgtgtggagttccaccggctgtggagcgccatgcagtttgtgtactgcatccctgtgggcacccatgagttcaccgtggagcagtgctttggagatggcctgcactgggccggctgcatgatcatcgtgctgctgggccagcagaggagatttgctgtgctggacttctgctaccacctgctgaaggtgcagaagcatgatggcaaggatgagatcatcaagaatgtgcccctgaagaagatggtggagcgcatcaggaagttccagatcctgaatgatgagatcatcaccatcctggacaagtacctgaagtctggagatggagagggcacccctgtggagcacgtgcgctgcttccagccccccatccaccagagcctggccagcagctag

SEQ ID NO: 106727 - DNA, 3768 bp, Artificial Sequence
  derived and/or modified sequence
atgggccccaagcacgtgctgcggcagcccggccccagcgagcggcaccaccctgaggtgcctgcctggacccccagggctggccccccctgctggctgtgccggcagcgctggggctggaccctgcaccccccaggccggggctgcccagccctgctgctgtctgagcccaggatggccgcccaggtgaccctggaggatgccctgagcaatgtggacctgctggaggagctgcccctgcctgaccagcagccctgcatcgagcccccacccagcagcctgctgtaccagaatgagatgctggaggagggccaggagtatgctgtgatgctgtacacctggaggagctgcagccgggccatcccccaggtgaagtgcaatgagcagcccaacagagtggagatctatgagaagacagtggaggtgctggagcctgaggtgaccaagctgatgaacttcatgtacttccagagaaatgccatcgagcgcttctgtggggaggtgcggcggctgtgccacgccgagaggaggaaggactttgtgtctgaggcctacctgatcaccctgggcaagttcatcaacatgtttgctgtgctggatgagctgaagaacatgaagtgcagcgtgaagaatgaccacagcgcctacaagagagctgcccagttcctgaggaagatggctgacccccagagcatccaggagagccagaacctgtccatgttcctggccaaccacaacaagatcacccagagcctgcagcagcagctggaggtgatcagcggctatgaggagctgctggccgacatcgtgaacctgtgtgtggactactatgagaacaggatgtacctgacccccagcgagaagcacatgctgctgaaggtgatgggcttcggcctgtacctgatggatggctctgtgagcaacatctacaagctggatgccaagaagaggatcaacctgagcaagattgacaagtacttcaagcagctgcaggtggtgcccctgtttggagacatgcagatcgagctggcccgctacatcaagaccagcgcccactatgaggagaacaagagccgctggacctgcaccagcagcggcagcagcccccagtacaacatctgtgagcagatgatccagatccgggaggaccacatgaggttcatcagcgagctggcccgctacagcaacagcgaggtggtgactggaagtggccggcaggaggcccagaagacagatgctgagtacaggaagctgtttgacctggccctgcagggcctgcagctgctgagccagtggagcgcccacgtgatggaggtgtacagctggaagctggtgcaccccacagacaagtacagcaacaaggactgcccagattctgctgaggagtatgagcgggccacccgctacaactacaccagcgaggagaagtttgccctggtggaggtgattgccatgatcaagggcctgcaggtgctgatgggccgcatggagagcgtcttcaaccacgccatccgccacacagtgtatgctgccctgcaggacttcagccaggtgaccctgcgggagcccctgcggcaggccatcaagaagaagaagaatgtcatccagagcgtgctgcaggccatcaggaagacagtgtgtgactgggagactggacatgagcccttcaatgaccctgccctgcggggggagaaggaccccaagagcggctttgacatcaaggtgcccaggagagctgtgggccccagcagcacccagctgtacatggtgaggaccatgctggagagcctgattgctgacaagagcggcagcaagaagaccctgcggagcagcctggagggccccaccatcctggacatcgagaagttccaccgggagagcttcttctacacccacctgatcaacttcagcgagaccctgcagcagtgctgtgacctgagccagctgtggttccgggagttcttcctggagctgaccatgggccgccgcatccagttccccatcgagatgtccatgccctggatcctgacagaccacatcctggagaccaaggaggcctccatgatggagtatgtgctgtacagcctggacctgtacaatgacagcgcccactacgccctgacccgcttcaacaagcagttcctgtatgatgaaattgaagctgaggtgaacctgtgctttgaccagtttgtgtacaagctggccgaccagatctttgcctactacaaggtgatggccggcagcctgctgctggacaagaggctgcggtctgagtgcaagaaccagggcgccaccatccacctgccccccagcaacagatatgagaccctgctgaagcagagacatgtgcagctgctgggccgcagcattgacctgaacagactcatcacccagagggtgtctgctgccatgtacaagagcctggagctggccatcggccgctttgaaagtgaggacctgaccagcatcgtggagctggatggcctgctggagatcaacaggatgacccacaagctgctgagccgctacctgaccctggatggctttgatgccatgttccgggaggccaaccacaacgtgtctgccccctacggccgcatcaccctgcacgtgttctgggagctgaactatgacttcctgcccaactactgctacaacggcagcaccaacagatttgtgaggacagtgctgcccttcagccaggagttccagagggacaagcagcccaatgcccagccccagtacctgcacggcagcaaggccctgaacctggcctacagcagcatctacggcagctacagaaactttgtgggccccccccacttccaggtgatctgccgcctgctgggctaccagggcattgctgtggtgatggaggagctgctgaaggtggtgaagagcctgctgcagggcaccatcctgcagtatgtgaagaccctgatggaggtgatgcccaagatctgccgcctgcccaggcatgaatatggcagccctggcatcctggagttcttccaccaccagctgaaggacatcgtggagtatgcagagctgaagacagtgtgcttccagaacctgcatgctgcccccttccagaacatcctgccccgggtgcacgtgaaggagggggagcggctggatgccaagatgaagaggctggagagcaaatatgcccccctgcacctggtgcccctgattgagcggctgggcaccccccagcagatcgccatcgcccgggagggggacctgctgaccaaggagcggctgtgctgcggcctgtccatgtttgaagtcatcctgacccgcatccgctccttcctggatgaccccatctggaggggccccctgcccagcaatggagtgatgcacgtggatgaatgtgtggagttccaccggctgtggagcgccatgcagtttgtgtactgcatccctgtgggcacccatgagttcaccgtggagcagtgctttggagatggcctgcactgggccggctgcatgatcatcgtgctgctgggccagcagaggagatttgctgtgctggacttctgctaccacctgctgaaggtgcagaagcatgatggcaaggatgagatcatcaagaatgtgcccctgaagaagatggtggagcgcatcaggaagttccagatcctgaatgatgagatcatcaccatcctggacaagtacctgaagtctggagatggagagggcacccctgtggagcacgtgcgctgcttccagccccccatccaccagagcctggccagcagctag

SEQ ID NO: 106728 - DNA, 3762 bp, Artificial Sequence
  derived and/or modified sequence
atggccgcccaggtgaccctggaggacgccctgagcaacgtggacttgctggaagagcttcccctgccggatcagcagccatgtatcgagccccctccaagttcattgctgtaccagcccaactttaatactaatttcgaagacagaaatgctttcgttacaggcatcgcaaggtatattgagcaggctactgttcattcctcgatgaacgaaatgttggaggagggccaggaatatgcggtcatgctatacacgtggaggtcttgttccagggccatccctcaggtgaagtgtaacgagcagcccaatcgcgtggagatttatgagaagacggtggaggtgttggaacccgaggtcaccaagctcatgaactttatgtattttcagagaaatgcgatcgagcgcttctgcggagaggtccgccgcctgtgccacgcagagagaagaaaggacttcgtttcagaagcttatctgattactctggggaagttcattaacatgttcgccgtgttggatgagctgaagaatatgaagtgttcagtgaagaatgaccatagtgcctataagagggctgcacagttcctaagaaaaatggctgatcctcagagcatacaggaatctcagaatcttagtatgttcttggctaaccataacaagatcacccagtctctgcagcagcagcttgaggtgatctctggttacgaggagctgcttgccgacattgtcaacctctgcgttgactactatgagaacagaatgtatctgaccccttctgagaaacatatgttgcttaaagtcatgggattcggactgtacttgatggatggttcagtgagtaacatatataagttagatgccaagaaaagaataaatttgagcaagattgataagtatttcaaacaactgcaggtcgtgcctctgtttggtgacatgcaaattgagttagccaggtacatcaagacatcagcccattacgaggagaacaagtccaggtggacttgtactagtagtgggtccagccctcaatataacatttgtgaacagatgattcagattagggaggaccatatgcgattcatttcggagctggcccgctactctaattctgaggtcgttaccggctccgggagacaggaagcccagaaaacagacgctgaatacagaaagttgttcgatctagcgctccagggtctccagctgctgagtcagtggagtgcacacgttatggaagtctactcctggaaactcgtacatcctaccgataagtacagcaataaagactgtcctgactcagcggaggagtacgagcgcgcgactaggtacaattacacctccgaagagaaatttgcgctagtcgaggtgatcgccatgataaagggtctgcaggtcttgatgggaaggatggaatctgtgtttaaccacgccatccgtcatacagtgtatgcagcgctgcaggacttttctcaggtcaccttgcgcgaaccccttcgccaggcgattaagaaaaaaaaaaatgtgattcagtctgtgctgcaggccatccgaaaaacggtgtgtgactgggagactggacatgagccttttaacgaccctgcattgcggggggaaaaggacccgaaaagcggcttcgatattaaggtccctagacgcgccgtcgggccttcatctactcagctctacatggtgaggactatgctggaaagtcttatcgccgataagtccgggagtaaaaagacgctacgatcatctcttgagggccccacaatccttgatattgagaagttccatagggagtcctttttctacactcacctcattaatttttcagaaaccttgcaacagtgctgcgatttgagtcagctctggtttagggaatttttcctcgaactcacaatgggtcgcagaattcagtttccgattgagatgagcatgccatggattctgacagatcatatcctggaaactaaggaggcgtctatgatggagtacgtgctgtacagtttggacctttataatgacagcgctcactatgctctaaccaggtttaacaagcagtttctgtacgatgagatcgaggcggaagttaatctgtgcttcgatcagttcgtgtacaaactggctgatcagatctttgcatactacaaggtcatggctggaagcctgctcctggataaaaggcttcggagtgagtgcaaaaatcagggagcaactatccatttaccaccctcgaataggtacgagaccctgctgaagcaaagacacgtgcaactgttaggcaggtcaattgatttgaacagacttataacgcagcgagtctcagctgctatgtacaagagtcttgaattggcaatcgggcggtttgagagcgaggatctgacaagtatcgttgagttggatggcttgctggagattaacagaatgactcacaaactgttatcaagatatctgactttagacggcttcgacgccatgttccgcgaagccaaccataacgtgagcgcaccatacggccgcataacgctgcatgtgttctgggaattaaactatgattttctgcccaattactgctataacggctctacaaaccgcttcgtccgcaccgtcctgccctttagtcaggagttccagagagataagcagccgaacgcgcagccacagtacctccacggaagcaaggctctgaatctggcctattcttcgatctacggctcataccgcaacttcgtcgggcccccgcacttccaggttatctgccggttactcgggtatcaggggatcgccgtggtgatggaggaattacttaaggtggtgaagtcactcctgcaggggacgatactgcagtacgttaagacactcatggaggtgatgccaaaaatctgtcgattgccacggcatgaatacggatccccaggaatcctagagttctttcatcaccaacttaaagacatcgtggaatatgcggagctgaaaacagtgtgttttcagaacctcagagaggtcggcaacgctattctcttctgcttgctaattgaacagtcactgtccctggaggaggtgtgcgatctactacacgccgctccctttcaaaacatactacctagggttcacgtcaaggaaggcgagcgcctagacgccaaaatgaagaggctggaatctaaatacgctccacttcatctggtgcctctcatcgaacggctgggcaccccacaacagatcgccattgccagagaaggagacctgctcaccaaagagcggctctgctgtggcctgtctatgttcgaagtgatcctgactcggatacgcagttttctcgatgatccgatttggagaggacctctgccttcaaatggcgtgatgcatgttgatgagtgcgtcgagttccaccggctgtggtcagccatgcagtttgtgtactgtatccccgtcggtacccatgagtttactgtcgaacaatgctttggggatgggcttcactgggcaggctgtatgattattgttctcctgggtcagcagagacgcttcgccgttctggacttctgctatcatttgttaaaggtgcaaaaacatgacggtaaagacgaaataatcaagaatgttcccttaaagaagatggtcgaacgtatacgaaagttccagatcctgaacgacgagatcataacgatcctcgataagtatctgaaaagcggcgatggagaaggcactcccgtggagcatgtacgatgttttcagccacctatccaccagtcactggcttcgtcatag

SEQ ID NO: 106729 - DNA, 3768 bp, Artificial Sequence
  derived and/or modified sequence
atgggccccaagcacgtgctgcggcagcccggccccagcgagcggcaccaccctgaagtgcccgcctggacccccagggcgggaccaccgtgctggctgtgtcgccagcggtggggttggacccttcacccccctggccggggatgtcccgcgctgctgttatccgaacctaggatggcggcgcaggtgaccctggaagatgcactttcaaatgttgatctgctggaggaactgcccctgccggatcagcaaccctgcattgagcccccgccgagctctctcctgtaccaaaacgagatgttagaagagggtcaggaatacgctgttatgctgtacacctggaggagctgcagtagggctatcccacaggtcaagtgcaacgaacaacctaacagggttgagatctatgaaaagactgtggaggtgctggagcctgaagtgaccaaacttatgaacttcatgtattttcagcgcaatgcgattgagcgcttttgtggggaggtaaggcggctgtgccacgcggagcgacgtaaagattttgtttccgaggcataccttatcaccctaggtaagttcatcaatatgtttgccgtcctcgatgagctgaagaatatgaagtgttctgtcaagaatgaccactccgcttataaaagagccgctcagttccttcggaaaatggccgacccacagtccatccaggagtcacagaacttaagtatgtttcttgccaatcacaataagataacgcaatctctccaacagcagctggaggtgattagcggatacgaagagctgctcgctgatatagttaacctgtgtgttgactactatgagaaccgcatgtacctcaccccaagtgaaaagcacatgctactgaaagtgatgggatttggcttatacttgatggatgggtctgtgtcaaacatctacaagctggacgcgaaaaaacggattaacctgtccaaaattgacaagtactttaagcagcttcaagtggttccactctttggagatatgcagatcgaactagccaggtatatcaagacatccgcgcactatgaagagaataaatcacggtggacatgcacttccagtggttcttcgcctcaatacaacatatgtgagcagatgattcaaattagggaggaccatatgcgcttcatttctgaactggcccgatatagcaatagcgaggttgtgactggatcaggccgccaagaggcacagaaaacagatgcggagtaccggaagttatttgatctggccctgcagggactgcagttgctgtcccaatggagcgcccacgttatggaggtctatagctggaagctggtgcacccgaccgacaagtatagcaacaaggattgtcccgattcagctgaggaatacgaaagagctaccagatacaactatacaagcgaagaaaagttcgcactggtggaagttattgccatgatcaaggggctccaggtgcttatgggaagaatggagagtgtattcaatcatgccattcggcacacagtgtacgctgcattgcaggatttctcccaagtcaccttgagagagccattgcggcaggccatcaagaagaagaagaacgtgattcaatcggtcctgcaggcaatcaggaaaacagtctgtgattgggaaacgggccacgagccattcaacgaccccgccctgcgtggtgaaaaggaccctaagagcggattcgatatcaaagtgccccgtcgggccgtagggcccagctccacacaactctatatggtgcgcacaatgctggagtcgctcattgctgataagtcgggtagcaagaaaacacttcgttcctcactcgagggcccgaccattctcgacatcgaaaagtttcaccgtgaaagcttcttctacacccacctgatcaacttctccgagactttgcaacaatgttgtgacctcagtcagctctggttccgcgaatttttccttgagttgacaatgggccgcagaattcaatttccaatcgagatgagtatgccatggatcctgaccgaccacattctcgagactaaggaggcttccatgatggaatatgttctatactccctcgatctgtacaatgatagtgcccactatgcacttactcggtttaacaaacagttcctctacgatgagatagaggcggaggtcaacctatgttttgatcagttcgtgtataaattagctgatcagatattcgcttattacaaagttatggcaggctcactgctcctagataaaagactgcgctctgagtgtaagaaccagggcgccacaatccatttgcccccctccaaccgctacgagacactgctcaagcagcgccatgtccagctgctcggacgatcaattgacctcaaccggttgataacgcaaagagtgtctgcagcaatgtacaaatcattggagttagctatcggaaggttcgaatctgaagacttgacatctatcgtagagttggacggcttacttgagatcaacagaatgacgcacaaacttctatccagatatttaacactggatggcttcgacgccatgtttcgtgaagcaaaccacaatgtatcagcaccgtatggcagaatcacacttcacgtcttttgggagctgaactacgacttcttgcccaactattgctacaacggcagcacaaatcggttcgtacggactgtcctacccttctctcaagagttccagcgtgataaacagccgaatgctcagccacagtacttacatggctctaaggcacttaatctcgcgtactcttctatctacgggtcctataggaactttgtggggcccccacattttcaagtaatctgtcgcctgctgggttaccaaggcattgctgtcgtcatggaagagctactaaaagtggtgaaaagtcttcttcagggcactatactccagtacgtaaaaacccttatggaagtgatgcctaagatttgtcgactgccacgacacgagtacggctctcctgggattctggaattcttccatcaccagctaaaggacattgtcgaatatgctgagcttaaaaccgtgtgctttcaaaacctgcacgccgctccattccagaatattttgccccgtgtacatgtcaaggaaggtgagcggttggacgcaaaaatgaaacgcctggaaagtaaatacgcaccgcttcatctagtgccacttatcgagcggcttggtacacctcaacaaatcgccatcgcgcgagaaggcgatctgctgactaaggagaggctctgttgtggactgtctatgtttgaagtgatactgacccgaattcgctcattcctggatgacccaatttggaggggtcctctcccctcaaacggcgtaatgcacgtggatgagtgtgtcgagttccaccgcttgtggtctgcgatgcagtttgtgtactgtattcccgtggggacgcacgagttcacggtagaacaatgctttggggacggactgcattgggccggatgtatgattatcgttctattaggccaacaacgaaggtttgccgtccttgacttttgttatcacctactgaaagtccaaaaacatgatgggaaagatgagatcattaaaaatgtccctttgaagaagatggttgaaagaatcaggaaatttcagattctaaatgacgaaataatcacgatccttgacaagtaccttaaatcaggtgatggagaaggcacgcccgtggagcacgtccggtgcttccagcccccaattcaccagagtctcgcgagctcttag

SEQ ID NO: 106730 - DNA, 3762 bp, Artificial Sequence
  derived and/or modified sequence
atggccgcccaggtgaccctggaggacgccctgagcaacgtggacctgctggaggagttgcccctgcctgatcagcaaccgtgcattgagccgcctccttcttccctgctgtatcaaccgaatttcaacaccaacttcgaagacaggaatgcatttgttactggaatcgctagatatatcgaacaagccaccgtccacagttctatgaatgaaatgctagaggaagggcaagagtacgcagttatgctgtacacatggcgtagctgttctagggctatcccacaagtcaaatgcaatgaacagccaaatcgggtggaaatttacgagaagacggtggaggtgctggagcccgaagtgaccaaactcatgaacttcatgtactttcaaagaaacgctattgagcgcttctgtggagaggtgagaagactgtgtcacgccgaacgaagaaaggattttgtcagtgaagcctatctcatcacattaggaaaattcatcaatatgttcgccgtgttggatgaactgaagaacatgaagtgctccgtcaaaaacgatcactccgcttataaacgggctgcccaattcttaaggaaaatggctgacccgcagtccatacaagagtcacagaacctgtcaatgtttctagctaatcataacaaaattactcagtctcttcagcaacaattagaggtgatctccggctacgaggagctcttggcggatattgttaacctctgcgtcgactattacgagaatcgcatgtaccttacgcctagcgagaaacacatgcttctgaaggtgatggggttcgggctctacctgatggatggtagcgtgagcaacatatacaaactggatgccaagaaaaggatcaacctttccaaaatagataagtacttcaaacaactgcaggttgtgcccctcttcggcgacatgcaaattgaactcgctcgatacatcaaaacttcagcccactacgaagagaacaagagcaggtggacgtgtacaagctcaggcagctcaccccaatataatatttgtgagcagatgatacagatacgcgaagaccatatgcgattcatctcagagctggccagatactcgaacagcgaggtcgttacaggctccggacgccaggaggcgcagaagacagacgccgagtaccgcaagctcttcgacctcgccctccaaggactgcagctactgtcacaatggtcagcacatgtaatggaggtgtattcatggaaacttgttcaccctaccgacaaatactccaacaaggattgtcccgactcagcagaggagtatgaacgggccaccagatacaactataccagcgaggagaagtttgccttggtggaggtgattgctatgatcaaagggctgcaagtgctaatgggtcgaatggagagcgtgtttaaccacgccatacggcatacagtgtatgccgctttgcaagatttttcccaggtaacactgagggaacctctgcgccaggccatcaaaaagaaaaagaacgtcatccaatccgttctgcaggctatccgaaagaccgtctgcgactgggagaccgggcatgaaccattcaatgatccagctcttcgcggtgagaaagaccctaagtcgggctttgacattaaggtgcctagaagggcagtgggtccgtcatctacccagctgtatatggtgagaacaatgctagagagtcttatagccgacaagtctgggtctaagaaaacactccgttcatcactcgagggccccaccatcctggatattgagaaatttcaccgcgaaagcttcttttatacccacctcattaatttctcagaaacattacaacagtgttgtgatctatcacaactgtggtttcgggaatttttcctggaactgaccatggggcgccggattcaatttccaatcgagatgagcatgccatggattctgacggaccacattctcgagaccaaggaagctagcatgatggaatacgtgctctactcactagacctgtacaacgactcagctcattacgccctgaccagattcaacaaacaattcctttatgacgagatagaggccgaggtcaatctttgtttcgaccagtttgtgtacaagctggcggaccaaatctttgcctactacaaggttatggccggttcactcctgttggacaaacgtctgcggtctgagtgcaaaaaccagggtgcaaccattcaccttccacctagtaatcggtacgaaacgctcctgaagcagcgacatgtacaactgctcgggcgctccattgatctcaatcggttaatcactcaaagagtctccgcagccatgtacaagtcgctggaactggccatcgggcggttcgagtccgaggacctgacatctatcgtcgaactcgacggactgctggagatcaacagaatgacccacaaacttttgtcccgatacctgacactggacggatttgatgcaatgtttcgggaggcaaatcacaacgtgtctgccccctacggaagaataactctccatgtgttctgggaactcaattacgattttctccccaactactgttacaatggatctacgaaccggtttgtgaggacggtccttcctttctcccaggagttccaacgggataaacagcctaatgcacagccccagtatctgcatggttctaaggccctgaatctcgcttactcctcaatttacggtagttatcgcaacttcgttggccctccccattttcaggtgatatgtaggcttctcggctatcaaggtatcgccgttgttatggaggagcttctgaaagtcgtcaagtccctgctgcaggggactatcctgcagtacgtgaagactctgatggaagtaatgccgaagatttgccgcctgccaagacacgaatacggtagtcctggcatcctggagttctttcaccaccagctgaaggatattgtcgaatacgcggagctgaaaacggtgtgctttcagaacctgcgcgaggtaggaaacgcaattttattctgtctcctgatcgaacagtccctcagtttagaggaggtgtgcgacctgttgcacgctgctccctttcagaacattctgccacgcgttcacgtgaaggagggcgagcggttggacgcaaagatgaagcgacttgaaagtaagtacgctcccctccatctggtcccgttgatagagcgattgggaacaccccagcaaatcgctattgcacgggagggtgatctgttaaccaaagaaagactttgttgtggactcagcatgtttgaagtaatcctgacccgaatcaggagcttcctggatgatccaatctggcgaggccctctgcccagtaatggtgtaatgcacgtggatgaatgcgtggagttccaccgtttgtggtctgctatgcagtttgtctattgtattcctgtaggcacacacgagttcaccgtcgaacagtgtttcggggatggcttacattgggccggttgtatgattatcgttcttctgggacagcagagaaggttcgccgtgttggacttctgctatcacctgctaaaggttcagaagcatgatggaaaggacgagatcatcaagaatgtgcccctgaagaagatggtggaaaggatccgcaagttccaaattctcaatgacgagataataacaatcctcgacaagtatctgaaatccggggatggggaagggactcccgtcgagcacgtgcggtgtttccagcctcctatccatcagagtctggcatcctcatag

SEQ ID NO: 106731 - DNA, 3762 bp, Artificial Sequence
  derived and/or modified sequence
atggcagcccaagtgacactggaagatgccctttccaacgtggatctcttggaagagctacccctcccagaccagcagccctgtatagagccgccaccctctagtttgttgtaccagccaaatttcaacaccaattttgaggatcggaacgccttcgttacaggaatcgccaggtacatcgaacaggccacggtccactccagcatgaacgagatgctagaggaaggacaagaatacgctgtcatgctgtatacatggagatcttgcagtcgggctattccccaagtaaagtgtaatgagcagcccaaccgggtggagatatatgaaaaaacggtggaagttctcgagccagaagttaccaagctgatgaacttcatgtactttcagaggaatgccatcgaacgcttttgtggcgaagtgaggcgcctgtgccatgcagagaggaggaaggactttgtgtcagaggcatacctcattacactcggtaagtttattaacatgtttgccgtactagatgaactcaaaaacatgaagtgctccgtgaaaaacgaccacagtgcctacaagcgggcagctcagtttcttaggaaaatggccgacccgcagtctatccaggaaagtcagaacctaagcatgtttttagccaaccacaacaaaatcacacaaagcctccagcagcagcttgaggtgataagcggctatgaggaactgctagcagatattgtgaatctgtgcgtcgactattatgaaaaccgtatgtatctgacccccagtgagaagcatatgctgttgaaggtgatgggctttggactgtacctgatggatggatcagtcagcaatatttacaaactggatgccaagaaacgcattaacttaagtaaaatcgataagtactttaaacagcttcaggtggtccccctgtttggcgacatgcagatcgagcttgccaggtacatcaaaacctccgcacactatgaggaaaacaagagtcggtggacctgtacgtcctcgggctcttcgccacaatataatatctgcgagcagatgatccagatacgggaagaccatatgaggttcatctcagagctcgcgaggtattcaaattcggaggtggtgactggttcaggacgccaggaggcccagaagacagatgcggagtataggaagctgtttgatcttgctctgcaggggctgcaacttctgagccagtggtctgcccacgtaatggaggtttatagctggaaactagttcacccaacagataagtattcaaacaaggattgccctgattctgctgaggagtatgaacgcgcaacacgctataactatacgtccgaggaaaagttcgcactagtggaagtgatcgctatgattaaaggcctgcaagtactgatgggtcggatggagtcagtcttcaaccatgctatacgccacacggtttatgctgcactgcaggatttcagtcaggtcacgctgcgggagcccctgcgccaagccatcaaaaaaaagaagaatgtgattcagagcgtgctgcaagcgattaggaagactgtctgtgactgggaaacaggtcacgaacccttcaatgacccagccctccgcggagaaaaggatcccaaatccgggtttgacatcaaagtcccaaggcgggctgtcgggccaagctcaacccaactttacatggtcaggactatgctcgagtcacttattgccgacaaatcagggtccaagaaaactttaagatctagcttggagggaccaactatcttggacatagagaagtttcacagggagagcttcttttatacacacctgatcaatttctctgagaccttacagcagtgctgcgacctctcacagctgtggttcagggagttcttcctggagttaacgatgggaaggcgcatccagttcccaatcgaaatgtctatgccatggattttaacagaccacatactcgaaactaaagaggcctccatgatggagtatgtgctttacagcttagacctttataacgattcagctcactacgcattgacccgcttcaacaagcagttcctgtacgacgaaattgaggccgaggtgaacctttgtttcgatcaatttgtctataagctcgccgaccaaatctttgcgtactacaaggtaatggcagggagcctccttctggacaaacgcctgaggtcagagtgcaaaaaccagggcgctacaatccatttgcctccctctaaccgctatgaaacattgctgaagcagagacatgtgcaactcctgggtcgctccatcgacctgaaccgcctgatcacacagcgcgtgtcagctgcgatgtataaaagcctggaacttgctatcgggagattcgagtctgaggatttgaccagcatcgtcgaattggatgggctgctagagatcaatcggatgacacacaagctccttagtcgatatcttacactggatggattcgatgccatgtttcgagaggcaaaccataatgtttctgcgccatacggcagaatcactcttcatgttttctgggaactgaattatgattttctgcccaactactgctataatggcagtaccaaccgattcgtacggacagttctaccctttagccaagagtttcagcgggacaagcagccgaatgcacaaccccaatacctgcacggctccaaggcactgaatctggcatattccagtatatatggatcctataggaactttgtggggcctccccattttcaggtcatctgtagactgctcggctaccaaggcatcgcagttgtgatggaagagctgttaaaagtagtaaaatccttgcttcagggtaccatcctgcagtacgtcaaaacactgatggaggtgatgccaaaaatctgtcggcttccaaggcatgagtatgggagcccaggtattctggagttcttccaccaccagttgaaggatattgtggagtacgccgaactgaaaaccgtgtgcttccaaaacctccgtgaggtaggcaacgccattctgttctgcctgctgatcgagcagtctctatccctggaggaagtgtgcgatctgttgcatgccgcaccgtttcagaacatcctgccaagggtacacgtcaaagagggagaacgattggatgccaaaatgaaaagactcgagtccaaatatgcacctctccacttagtacctctaatagagcgccttggcactcctcagcaaattgccattgcacgggaaggggacttgttgacaaaggagcgcctttgttgcggcctgtccatgttcgaagtcatactcaccagaatacgatcattcctagacgatcccatttggcgaggcccactaccttccaatggggtgatgcacgttgacgaatgcgtggagttccacagactgtggtccgcaatgcaatttgtgtactgtatcccggtgggaacccacgagtttaccgtggaacaatgctttggggatggtttacactgggccggttgcatgataattgtgctcttgggccagcagcgtcggttcgctgtcctggacttttgctatcatttactgaaggttcaaaaacacgatggcaaggatgaaattattaaaaacgtgccactaaagaaaatggttgaaagaatacggaaatttcagattttaaatgatgagattatcaccatattggacaagtatttgaagtccggggacggcgagggaactcctgtggagcacgtaagatgcttccagccacctatccatcagagcctagctagcagctag

SEQ ID NO: 106732 - DNA, 3768 bp, Artificial Sequence
  derived and/or modified sequence
atgggacccaagcatgttcttaggcagcccggaccgtccgagcgccatcatccagaagtcccagcatggacccctagggcaggtcccccttgttggctctgtcgtcagcgctgggggtggacgttgcacccacctgggagggggtgtcctgcgctgctgctcagcgagcctagaatggccgctcaagtgaccttggaggatgccctatctaacgttgatctgctagaggagcttcctctcccagaccagcagccctgtatcgagccacctccatcttcgcttctgtaccagaatgagatgctggaagaggggcaggagtatgcggtgatgctctatacgtggcgctcatgctcccgcgcaatccctcaggtcaagtgtaatgaacagcctaatagagtggaaatctacgagaaaactgtggaggtcctggagcccgaagtcacaaagctgatgaactttatgtattttcaacggaacgccatcgaaagattttgcggtgaagtgaggcggctttgtcacgctgagcggaggaaggatttcgtttccgaagcctatctgatcacattgggcaaatttataaacatgttcgccgtgcttgatgagctcaaaaacatgaaatgctccgttaagaacgaccattctgcttacaagcgagctgcacagtttctcagaaagatggcggacccacagtccatccaggaaagccagaacctctcaatgtttctcgctaatcataataagatcactcagagcctccagcagcagctcgaggtcattagtggctacgaggagctgctggcagacatagtgaatctctgcgttgattattacgaaaacagaatgtaccttactcctagtgagaagcatatgttgttgaaagtgatgggtttcggcctctatctgatggacggtagcgtgagcaacatatacaaactggacgctaaaaagcgaattaacttgtccaagatagataagtatttcaagcaattgcaggtcgtgccactgtttggcgacatgcagattgaactggcacgttacataaagacctctgcccactacgaggagaataaatcaaggtggacttgcacttcttctggaagttcaccgcaatataatatctgcgagcagatgattcagatccgagaagatcatatgaggttcatcagtgagctggctaggtactcaaattccgaggtcgtgacaggatccgggagacaggaagcacagaagacggacgctgaatacaggaagctattcgatctggccttgcagggactgcaactgttgtcccagtggagcgcacatgtcatggaagtgtacagttggaagttagtgcacccgactgacaagtacagtaacaaggactgccctgactccgctgaggagtacgaacgtgcgacccggtacaattacacctccgaggagaagtttgcactggtcgaggtgatcgccatgattaaggggttgcaggtgttaatgggacggatggaatctgtgttcaaccacgcaattcgccacacagtctacgctgcgctccaggacttttcccaggtcactcttagagagccgctgcgacaggccattaagaaaaagaagaatgttattcagagcgtcctacaagccattaggaagacggtgtgtgattgggagacaggccatgagccttttaacgacccagcgctacgtggcgagaaagatcccaagtccggatttgacattaaagtgccaaggcgcgcagtgggaccgtcttccactcagctctacatggtgagaactatgctggagtctctgattgccgacaaatccggttcgaaaaaaacactaaggagctccctcgaaggacccaccattctggacattgaaaagttccacagggaatccttcttctacacccacctgatcaacttttcagaaaccttgcagcagtgctgcgacctttctcagctctggtttagagagttcttcctggagctgacgatgggtaggcgcatccaatttcccatcgaaatgagtatgccgtggatactcacagaccacattttagagacaaaggaggcttcaatgatggaatatgtgctgtattcgttggatctgtataatgactcggcccattacgctctgacacgcttcaacaagcagttcttatatgacgaaatcgaggccgaagtgaatctgtgcttcgaccaatttgtatacaagctggccgatcaaatctttgcttattacaaggtcatggccggtagtctactactagataaaagattgcgaagtgagtgtaaaaatcagggggcaactatccacttgcctccatcaaaccgctatgagaccctgcttaagcagcgtcacgtgcagttactcggccgaagcattgacttaaacaggctgattacacaacgggtgtccgcagccatgtataagtctttagagctggccataggccgtttcgagtctgaagacctgacatcaattgtcgagttggatggcctgttagagatcaacagaatgacacacaagctcttgtctagatatctgacattggatggcttcgatgctatgtttcgagaagccaatcacaatgtgagtgctccctatggcaggatcacacttcacgtcttctgggagctgaactatgattttttacccaattattgttacaatggcagcacaaaccgattcgtgcggaccgtgcttccttttagtcaggaattccagcgggacaaacagccaaatgctcagcctcagtacttacacggatccaaggcactcaatctcgcttactctagcatctatggatcataccggaactttgttggcccacctcattttcaggtcatctgtcgactgctcgggtaccaggggatcgccgtggttatggaggagttgctcaaagtggtgaagtcactgctacagggtacaattttacagtatgtgaagacgcttatggaggttatgcccaagatatgccgcctccccagacacgaatacggaagtccaggcatcctggagttcttccatcaccaactcaaagacattgtagagtacgcagaattgaaaacggtgtgtttccagaacttgcatgcagccccatttcagaacatcctgccacgggtccacgtaaaagagggtgaaaggctcgatgccaagatgaagagactcgagtcaaagtacgcccctctccaccttgttcccctgattgaaaggctaggaacacctcagcaaatcgcgattgctcgggaaggtgatcttctgaccaaagaacgactgtgttgcggactgagcatgtttgaagttattcttacacggatccggtctttcctggacgatccaatctggagaggccctctaccttccaacggtgtgatgcatgtggacgagtgcgtggagtttcatcgactctggagcgccatgcagttcgtatattgcatccccgtgggaacccacgagtttacagtcgagcaatgtttcggcgacggactccattgggccggttgcatgatcatcgtcttgctcggccaacagcgcaggtttgcagtactggatttttgttaccacctcctcaaggtccagaaacacgatgggaaggacgaaatcattaagaatgtgccccttaaaaaaatggtagagagaatccgaaagtttcaaattctgaatgatgagatcattactatcttagacaaatatcttaagagcggcgacggtgaggggacgccagtcgaacacgttagatgctttcagccccctatacatcagtcactcgcctccagttag

SEQ ID NO: 106733 - DNA, 3762 bp, Artificial Sequence
  derived and/or modified sequence
atggctgcccaggtgaccctcgaagacgccctgagcaacgtggacttgctggaagaacttcccttgcctgaccaacagccgtgtattgaacccccaccaagcagcctgttgtaccagcctaattttaacacaaattttgaagacaggaacgcctttgtgaccgggatcgcacgctatatcgaacaggcaactgtccatagcagtatgaacgagatgctggaggaaggacaagagtacgcagtgatgctgtacacttggaggagctgcagccgtgctatccctcaggtaaaatgcaatgagcaacctaacagagtggagatctatgagaagactgtcgaggtgctggagcctgaggttacaaaactgatgaacttcatgtactttcaaaggaatgccattgaaaggttttgcggggaagtccgacgcctatgccacgcagagagacggaaggatttcgtgtccgaggcgtacctgatcacattggggaaattcatcaacatgttcgccgtactggacgaactaaagaacatgaagtgttcggtgaaaaacgatcacagcgcttataaaagagcggctcagtttttgaggaaaatggcggatccacaatccattcaagagagccagaacctgagcatgttcctagctaaccacaacaaaataacacaatccctgcaacaacagctggaagttatctccggttatgaagagctcctggcagatatcgtaaatctttgcgtggattattatgagaacaggatgtatctcacaccatccgagaagcatatgttattaaaggtcatgggatttggattgtatctaatggatggttcggtatcaaacatatataagctggacgctaagaagcggatcaacctgtctaagattgataagtactttaaacagcttcaagtcgtgcccctgtttggagatatgcaaatcgagctggcgagatatatcaagacatctgcccattatgaggaaaacaaatcccgctggacatgcacctcctcagggagtagtccccagtacaacatatgcgagcagatgattcagatcagagaggatcatatgcgtttcatatcagaactggcccgatactctaactccgaagtcgtgacaggatcagggcgtcaggaagctcagaagaccgacgcagagtacagaaagctctttgacttggcgctacaagggctacagttgctctctcaatggtccgctcatgtcatggaagtttacagctggaaacttgtgcaccctactgataagtattcaaataaagattgtcccgattccgccgaagaatatgagcgcgcaacacgttacaactacactagcgaggaaaagtttgcccttgtggaggtcattgccatgattaagggactccaagtgcttatgggcaggatggagtctgtgtttaatcacgctattaggcacacagtgtacgcggctttgcaggatttttctcaagtgactcttcgcgagccactgcgccaggcaatcaagaagaaaaagaatgtcatccaatccgttctccaggccatcaggaaaactgtgtgcgactgggagacaggtcacgaaccatttaatgatcccgcactcagaggtgaaaaagaccccaagtctggattcgatattaaagtgccgaggagagccgtgggcccaagcagcacgcagctgtatatggtcaggacaatgcttgagagcctgatcgccgacaagtctggcagtaagaaaacattgaggagcagccttgagggtcctaccatcttggatatcgagaagtttcatagagaaagcttcttttatacacacctgatcaatttctctgagacgctacagcagtgttgcgatctaagccagttgtggttccgggagttttttctagagctgaccatgggacgcaggattcaattccctatcgaaatgagtatgccatggatcctcaccgaccacatccttgagactaaggaagcctccatgatggagtacgtgctttactcgttggacttgtacaacgattccgctcattacgctctgaccagattcaacaagcagtttctgtacgatgaaattgaagctgaggtgaatttatgttttgaccaatttgtctacaaactggcagaccagattttcgcatactataaagtgatggctggaagcctcttgttagacaagaggcttcgctctgaatgtaagaaccagggggctactattcacttacccccatccaatcggtacgaaactctgttgaagcaaagacatgtgcagctgctgggcagatccattgatttgaacaggctgatcacacaaagggtgagtgctgcaatgtataagtctctggaattggctataggtaggttcgagtcagaagacctaacaagcatagtcgagctcgatgggctgcttgagataaaccgaatgactcataagctgctatcaagatatctcacactggacggctttgatgccatgttcagagaggcaaaccacaatgtgtccgctccctacggcaggatcaccttgcacgtgttctgggagctgaattacgatttcctgcctaattattgttataacgggtctacaaaccggtttgttcggaccgttctccccttttctcaggagtttcagagggacaagcagcctaatgcccagcctcagtacctccatgggtcaaaagcactgaacctggcttactcaagtatctatggtagttaccggaatttcgtgggacctcctcacttccaagtgatctgtcgtctgctgggataccaagggatcgcggtggtgatggaagaattactcaaggtagtcaaatctttactgcaaggtactattcttcagtacgtgaagacattaatggaagtaatgcctaagatttgccgtctccctcgtcatgagtatggatctccagggatcctggagttcttccatcaccagctcaaggacattgtggaatatgccgaattgaaaacagtatgctttcagaatctgagggaggtaggaaatgccattctcttttgtctgctgatcgagcagtccttgtctctggaggaagtatgcgatttgctgcatgcagccccttttcagaatattctgccacgcgtccatgtcaaggaaggggaaagattagatgcaaaaatgaagcgcttagagtctaaatacgcgccacttcacctagtgcccctgatcgagcgcttaggaacacctcagcagatcgcgatcgcccgagagggggatctgctgacaaaagagagactttgctgcggcctcagcatgttcgaggtgattcttacacgcattcgatcttttctggatgatcctatttggcgtgggcctctgccctccaacggggtcatgcatgttgatgagtgcgttgagttccatcggctgtggagtgccatgcaatttgtgtactgtatcccagtcggaactcatgagtttacagtggagcaatgctttggcgatggccttcattgggcgggttgcatgattatcgtgttgttggggcagcagaggcgcttcgccgtgttagatttttgttatcacctgttgaaggtgcagaaacacgacggcaaagacgaaatcataaaaaacgtgcccctgaagaagatggtggagaggatccgcaagttccaaatccttaatgatgaaataattacaatactcgataaatacctgaaatccggcgacggggagggaacgccagtggagcatgtacgatgctttcagccacctattcaccagagtctggcatcctcttag

SEQ ID NO: 106734 - DNA, 6863 bp, Artificial Sequence
  derived and/or modified sequence
cgggaggaaggggaggaggccgagtgtttcctggcgcattcccggccagcccgagtgactcactcggccaaggaaactcccagggcccgcccaggacccccaagccgccgcggacgcagcccaggatggcggcccaggtgactctggaggacgcgctgtccaacgtggacctcctggaggagctgcccctgcccgaccagcagccctgcatcgagcccccgccatcctcgctgctctaccagccaaatttcaacactaactttgaagacagaaatgcatttgttactggcatcgcaagatacattgaacaagccaccgtccactctagcatgaacgagatgctggaggagggccaagaatatgctgtcatgctgtacacctggaggagctgctcccgggccatcccacaggtgaaatgtaacgagcagcctaacagagtggaaatctacgagaaaaccgtggaggttctggagcctgaggtcacaaaactgatgaatttcatgtacttccagagaaatgccattgagcgtttctgcggggaagtgaggcgcctgtgccatgccgagaggaggaaggacttcgtgtcagaagcctacctgatcacactgggcaaattcatcaacatgttcgctgtgctggacgagctgaagaacatgaagtgcagtgtgaagaacgaccactcagcgtacaagagggccgctcagtttttacgtaaaatggcagatccacagtccatccaggaatcgcagaatctgtccatgttcctggccaatcataacaagatcacacagtctctgcagcagcagctcgaagtgatttctggctacgaagagctcctggcagatattgtgaatctgtgtgtggattactacgagaacaggatgtatttgacgcccagtgagaaacacatgcttctcaaagtcatgggatttggtctgtacctgatggatgggagtgtcagtaacatctataagttggatgccaagaaaagaataaacttatccaaaatcgacaagtacttcaagcaactccaggtggttccgctatttggggacatgcaaatagaactggcaagatatatcaagaccagcgcccactacgaggaaaataaatctcgatggacgtgcacatcctccggcagcagccctcagtacaacatctgcgagcagatgatccagatccgcgaggaccacatgcgcttcatttcggagctggcgcgctacagcaacagcgaggtggtcacgggctcgggccgccaggaggcccagaagacggacgcggagtaccgcaagctcttcgacctggcgctgcagggcctgcagctgttgtcgcagtggagcgcgcacgtgatggaagtgtattcctggaagcttgtgcaccccaccgacaagtactccaacaaggactgccccgacagcgctgaagagtacgagcgtgccacgcgctacaactacaccagcgaggagaagtttgccctagtggaggtgatcgccatgatcaaaggcctgcaggtgctgatgggcaggatggagagcgtgttcaaccacgccatccggcacaccgtctatgccgcactgcaggacttctcccaggtgacccttagggagccgctgcggcaggccatcaagaagaagaagaacgtcatccagagtgtcctgcaggccatcaggaagaccgtgtgtgactgggagacggggcatgagcccttcaatgacccagccttgcggggcgagaaggaccccaagagcggcttcgacataaaagtaccacgccgcgccgtgggaccctccagcactcagctttacatggtgagaaccatgctagagtccctcattgcagacaaaagtggttccaagaaaaccttgagaagtagccttgaggggcccaccatattggacatagaaaaatttcatcgagagtcattcttctacactcacttgataaatttcagtgaaacgctgcagcagtgctgtgacctttcgcagctgtggttccgagagttcttcctggagctgaccatgggcaggaggatccagttccccattgagatgtcgatgccctggatcctgacggaccacatcctggagaccaaggaggcatcgatgatggagtacgtgctctactccctggacctgtacaatgacagcgcccactacgcgctcaccaggttcaacaagcagttcctgtacgacgaaattgaggccgaggtgaatctatgttttgaccaatttgtttacaagctagcagaccagatatttgcctattataaggttatggcaggaagtttgcttcttgataaacggttacgatcagaatgcaagaatcagggagccacgatccacctcccgccgtctaaccgctacgagacgctgctgaagcagaggcatgtgcagctcctcggcagatcaatagacctcaatcgtctgatcacccagcgcgtctcagcagccatgtataagtccctagaactggcgattggacgatttgaaagtgaagatttgacctccatagttgagctggatggcctgttggaaatcaaccgcatgacccacaagctgctgagccggtacctgacgctggacggcttcgacgccatgttccgggaggccaaccacaacgtgtcagcgccctacgggaggatcaccctgcacgtcttctgggagctcaactatgacttcctgcccaactactgctacaacggctctaccaaccggtttgttcggacagtgttaccattttctcaggaatttcaaagagataagcagcctaatgcacagcctcagtatctgcatggatccaaggctttgaacttggcctactccagcatttacggcagctaccggaacttcgtgggacctccacactttcaagtcatctgccggcttctcggctaccagggtatcgccgtggtcatggaggagctgctgaaggtcgtcaagagcctgctgcaaggcacaatcctgcagtacgtgaagacgctgatggaggtgatgcccaagatctgccgcctgccccggcacgagtacggctctcctggtatcctggagttcttccaccaccagctgaaggacatcgtggagtacgcagagctgaagacggtgtgcttccagaacctgcgggaggtggggaacgccatcctcttctgcctgctcatcgagcagagcctgtctttagaagaagtgtgtgacctgctgcacgcggctcctttccagaacatcttgccgcgagtccatgtgaaagagggggagagacttgatgccaaaatgaaaagactagaatcaaagtacgccccgctgcatcttgtcccactgattgaaagactggggacccctcagcaaattgccatcgcaagagagggggacctgctgacaaaggagcgcctctgctgcggcctgtccatgtttgaggtcatcctgacacggatccggagctttctggatgaccccatctggcgcgggcctctgcccagcaatggggtcatgcatgtggacgagtgtgtggagtttcacagactgtggagtgccatgcagtttgtctactgcattcccgtggggacacacgagttcacagtcgagcagtgctttggtgatgggctacactgggctggctgtatgatcatcgtacttcttgggcagcagcggcgttttgctgtgctggatttctgctaccatctacttaaagtccagaaacatgatggcaaagatgagattattaaaaatgtgcctttgaagaagatggtggagagaattcgcaagttccagattctcaatgatgagatcatcaccatcctggataagtacctgaagtcaggcgacggggagggcacgccagtggagcatgtgcgctgcttccagccgcccatccaccagtccctcgccagcagctgagggcacgcgctgcactccgtaactcaacatggcatgcctttctctccgtaaactatttagtgagatttttagggactatttttcagtatctctgtacctgttaaagggggtgcttttcgatctaaaaacttaattttataaaattgacttatttttctagactaaaattgtatatgcttttggtaattaggaactcttgagaatattggctgctgattgttgccatcacgttcctacaaaattgtttttctatgggatgttctggcagctgtgtcataaaatgctgctgggttcattcattcattccataagaaacttaataccagcaaatgcattaaatcccttgccagttaccattaactgtaactatttagcttttgtttagggatctttctgatggtcttttatgagcaatcttagttctaagtcattgttcccatcccttttttgtgtgtttcagaaaatagtgaacttgattcccctgcttccactaaatccagttgtgacaaaatctaacgtgacatcagatcgaaaggttatagaaataaaactaatgagatctatttgtgttcatttatttactctaaccctgtgctgcctggcttggcaaggaactctaacctgaactcacataccaggccagctgggatggaggtcacctctaaggctgaggtgggatgggaccgtgacaccatcccatataccgctcacctcagcacaggtttagctttatatttagggttccgcaggcaaatgaggtgtaaaacggccgtgttggctgctccaatctggatatgaagaggctactcagtgcctctctgttacctgtgcccatgacctggaggaagccagcaatgtgggaggagatcagtcaggcccagtgggtgctgcacaaagggaccgggagcaccgagtccagccttcagctgtccccgatccacagggctcacatggctggagctggttcacatgatctgtcagaatgaaaaacaatcggtctagactaccagtagagtcacgaacatgtttgagaaactaaagccatattttaaaaagtactaaggcaatgaggttctgaaaatcctaactaactgaatggaaaaagatgctatgcctgtttattgtagatgaatactacagataaacacaagtccagcatgattaactgaactcactttatattgtagcctggcagtcattttacattatttggagtattgcaaccttcaccaattttaaaattttctatggatgccaagttgccataaaaagcaggcctcgcctacttttccggaggcctttggaaactgtccagaagcatatgatgcacggcacagaaaagtagtaagtgtacgaaccatcctgttacactgccaaactcactcaagtgacatgaagcctaacaaacaattattctttctttataaaaagttccctaaaaatgcttttggtaatgtgaattaataaccctggggccagcattctgctgcagatttagaggtggtagctgtgcttatcttagaaactacagaataggatgaaaaattatggtaaaacttaatcaattaccaagttttataaggcttaattatataccaaatatgtaataccttaggtataagacaatctcaagtgctacaaaatgttaaataagaatttattatttattaacctatgcatgttcaaatgagtctctgtcctcaagggggagaaaactggttcttttatgtacaaagcacagatgtaggtacagtatataaacagatacgtagtacatctgtagtattaaaatggcatgggaggaggcagttagaaaaaacatctaaaacagctccttagaaggccaataataaagttggaaaaaagggagtttccacgcagccagtggtgagctgcatgggataccagcaccattggcaggggaggccctcggggagtgatggcttggcgctggcgcaccactgggtaacctccaggcaggagccacaggctggaacaggcgaacactttcttcccatcacctaggtggaaattaattctgccaatacttttttttaaaggccagtcaatggttatgagtggataggttcaaagctgaatggagttcattagaccttttttattattctaccttttctgcatatgtttgcagttttccatcgacttcttcataaacaaacattttctagaaaccaaaatatgtagtggcccaaaggagctcttaagcaaagtacttggtacaaagagaccatattctataaacatgttaagtttgttctaagcattcagacttttagaataagaacttcatttcaactttttattataacatgagctaaatttaagaaacaaccctagtcttctatttcccagagctgttcaaagtctaaatgacaatataactcattatgaaaatatactgaaaagtacaagagctgatgtaaaacggtaatcaaggttccaggcatcatgggattagggtaactgaagaataaacccagccaggctgcaacagcaggcaggatgtgctggcttgatgaggtgctaaggccatcgaatgctcagaggaagccggattcacggtgatcatctcaacctgagaaatcgttccttggggtgatttctgcccttttttttgttttgtaagaaagaggttccttcattcagtaacttagttttcccttaataaatatttcaaaaataaaaccaatcatcatcaaacaaacaggagccacttttgtaggtaaggtaaatcacaggataatgtattgggataactctgtttttttaaaataaaaaagccttacatggtcagggattgatggagtggggatgacaaatgcacatttcagactttcatcaccaatgaaaaaataaagcattttcatagacttaaaactgtcattagtgcattcggcttttggagaagggatgaaaatgtaaaatacttctacaacaataaaatgttaatagaaa

SEQ ID NO: 106735 - DNA, 4460 bp, Artificial Sequence
  derived and/or modified sequence
gttgacccgcgtggggcccgggcatgactggacacgcccccaggcctctcctggcactatctgggttcaggccgcagaaagggcagactgcgggactctgggctggagtcgcaggacacgggcagcccctatggggccgaagcacgtcctcaggcagcctggcccctccgagcggcatcaccctgaggtgcctgcgtggacaccaagggcaggccccccatgctggctctgcaggcagcgctggggctggaccctgcacccacccggccggggctgccctgcactgctcctttctgagcccaggatggcggcccaggtgactctggaggacgcgctgtccaacgtggacctcctggaggagctgcccctgcccgaccagcagccctgcatcgagcccccgccatcctcgctgctctaccagaacgagatgctggaggagggccaagaatatgctgtcatgctgtacacctggaggagctgctcccgggccatcccacaggtgaaatgtaacgagcagcctaacagagtggaaatctacgagaaaaccgtggaggttctggagcctgaggtcacaaaactgatgaatttcatgtacttccagagaaatgccattgagcgtttctgcggggaagtgaggcgcctgtgccatgccgagaggaggaaggacttcgtgtcagaagcctacctgatcacactgggcaaattcatcaacatgttcgctgtgctggacgagctgaagaacatgaagtgcagtgtgaagaacgaccactcagcgtacaagagggccgctcagtttttacgtaaaatggcagatccacagtccatccaggaatcgcagaatctgtccatgttcctggccaatcataacaagatcacacagtctctgcagcagcagctcgaagtgatttctggctacgaagagctcctggcagatattgtgaatctgtgtgtggattactacgagaacaggatgtatttgacgcccagtgagaaacacatgcttctcaaagtcatgggatttggtctgtacctgatggatgggagtgtcagtaacatctataagttggatgccaagaaaagaataaacttatccaaaatcgacaagtacttcaagcaactccaggtggttccgctatttggggacatgcaaatagaactggcaagatatatcaagaccagcgcccactacgaggaaaataaatctcgatggacgtgcacatcctccggcagcagccctcagtacaacatctgcgagcagatgatccagatccgcgaggaccacatgcgcttcatttcggagctggcgcgctacagcaacagcgaggtggtcacgggctcgggccgccaggaggcccagaagacggacgcggagtaccgcaagctcttcgacctggcgctgcagggcctgcagctgttgtcgcagtggagcgcgcacgtgatggaagtgtattcctggaagcttgtgcaccccaccgacaagtactccaacaaggactgccccgacagcgctgaagagtacgagcgtgccacgcgctacaactacaccagcgaggagaagtttgccctagtggaggtgatcgccatgatcaaaggcctgcaggtgctgatgggcaggatggagagcgtgttcaaccacgccatccggcacaccgtctatgccgcactgcaggacttctcccaggtgacccttagggagccgctgcggcaggccatcaagaagaagaagaacgtcatccagagtgtcctgcaggccatcaggaagaccgtgtgtgactgggagacggggcatgagcccttcaatgacccagccttgcggggcgagaaggaccccaagagcggcttcgacataaaagtaccacgccgcgccgtgggaccctccagcactcagctttacatggtgagaaccatgctagagtccctcattgcagacaaaagtggttccaagaaaaccttgagaagtagccttgaggggcccaccatattggacatagaaaaatttcatcgagagtcattcttctacactcacttgataaatttcagtgaaacgctgcagcagtgctgtgacctttcgcagctgtggttccgagagttcttcctggagctgaccatgggcaggaggatccagttccccattgagatgtcgatgccctggatcctgacggaccacatcctggagaccaaggaggcatcgatgatggagtacgtgctctactccctggacctgtacaatgacagcgcccactacgcgctcaccaggttcaacaagcagttcctgtacgacgaaattgaggccgaggtgaatctatgttttgaccaatttgtttacaagctagcagaccagatatttgcctattataaggttatggcaggaagtttgcttcttgataaacggttacgatcagaatgcaagaatcagggagccacgatccacctcccgccgtctaaccgctacgagacgctgctgaagcagaggcatgtgcagctcctcggcagatcaatagacctcaatcgtctgatcacccagcgcgtctcagcagccatgtataagtccctagaactggcgattggacgatttgaaagtgaagatttgacctccatagttgagctggatggcctgttggaaatcaaccgcatgacccacaagctgctgagccggtacctgacgctggacggcttcgacgccatgttccgggaggccaaccacaacgtgtcagcgccctacgggaggatcaccctgcacgtcttctgggagctcaactatgacttcctgcccaactactgctacaacggctctaccaaccggtttgttcggacagtgttaccattttctcaggaatttcaaagagataagcagcctaatgcacagcctcagtatctgcatggatccaaggctttgaacttggcctactccagcatttacggcagctaccggaacttcgtgggacctccacactttcaagtcatctgccggcttctcggctaccagggtatcgccgtggtcatggaggagctgctgaaggtcgtcaagagcctgctgcaaggcacaatcctgcagtacgtgaagacgctgatggaggtgatgcccaagatctgccgcctgccccggcacgagtacggctctcctggtatcctggagttcttccaccaccagctgaaggacatcgtggagtacgcagagctgaagacggtgtgcttccagaacctgcacgcggctcctttccagaacatcttgccgcgagtccatgtgaaagagggggagagacttgatgccaaaatgaaaagactagaatcaaagtacgccccgctgcatcttgtcccactgattgaaagactggggacccctcagcaaattgccatcgcaagagagggggacctgctgacaaaggagcgcctctgctgcggcctgtccatgtttgaggtcatcctgacacggatccggagctttctggatgaccccatctggcgcgggcctctgcccagcaatggggtcatgcatgtggacgagtgtgtggagtttcacagactgtggagtgccatgcagtttgtctactgcattcccgtggggacacacgagttcacagtcgagcagtgctttggtgatgggctacactgggctggctgtatgatcatcgtacttcttgggcagcagcggcgttttgctgtgctggatttctgctaccatctacttaaagtccagaaacatgatggcaaagatgagattattaaaaatgtgcctttgaagaagatggtggagagaattcgcaagttccagattctcaatgatgagatcatcaccatcctggataagtacctgaagtcaggcgacggggagggcacgccagtggagcatgtgcgctgcttccagccgcccatccaccagtccctcgccagcagctgagggcacgcgctgcactccgtaactcaacatggcatgcctttctctccgtaaactatttagtgagatttttagggactatttttcagtatctctgtacctgttaaagggggtgcttttcgatctaaaaacttaattttataaaattgacttatttttctagactaaaattgtatatgcttttggtaattaggaactcttgagaatattggctgctgattgttgccatcacgttcctacaaaattgtttttctatgggatgttctggcagctgtgtcataaaatgctgctgggttcattcattcattccataagaaacttaataccagcaaatgcattaaatcccttgccagttaccattaactgtaactatttagcttttgtttagggatctttctgatggtcttttatgagcaatcttagttctaagtcattgttcccatcccttttttgtgtgtttcagaaaatagtgaacttgattcccctgcttccactaaatccagttgtgacaaaatctaacgtgacatcagatcgaaaggttatagaaataaaactaatgagatct

SEQ ID NO: 106736 - DNA, 4515 bp, Artificial Sequence
  derived and/or modified sequence
agtgactcactcggccaaggaaactcccagggcccgcccaggacccccaagccgccgcggacgcagaatgtggctcagctgcccctggtcccatcccagggcagagctcctcctgagtacccttgagactggagcagattcagcagaaggcagattgccccctctccctggagctggctctgaagcccaggatggcggcccaggtgactctggaggacgcgctgtccaacgtggacctcctggaggagctgcccctgcccgaccagcagccctgcatcgagcccccgccatcctcgctgctctaccagccaaatttcaacactaactttgaagacagaaatgcatttgttactggcatcgcaagatacattgaacaagccaccgtccactctagcatgaacgagatgctggaggagggccaagaatatgctgtcatgctgtacacctggaggagctgctcccgggccatcccacaggtgaaatgtaacgagcagcctaacagagtggaaatctacgagaaaaccgtggaggttctggagcctgaggtcacaaaactgatgaatttcatgtacttccagagaaatgccattgagcgtttctgcggggaagtgaggcgcctgtgccatgccgagaggaggaaggacttcgtgtcagaagcctacctgatcacactgggcaaattcatcaacatgttcgctgtgctggacgagctgaagaacatgaagtgcagtgtgaagaacgaccactcagcgtacaagagggccgctcagtttttacgtaaaatggcagatccacagtccatccaggaatcgcagaatctgtccatgttcctggccaatcataacaagatcacacagtctctgcagcagcagctcgaagtgatttctggctacgaagagctcctggcagatattgtgaatctgtgtgtggattactacgagaacaggatgtatttgacgcccagtgagaaacacatgcttctcaaagtcatgggatttggtctgtacctgatggatgggagtgtcagtaacatctataagttggatgccaagaaaagaataaacttatccaaaatcgacaagtacttcaagcaactccaggtggttccgctatttggggacatgcaaatagaactggcaagatatatcaagaccagcgcccactacgaggaaaataaatctcgatggacgtgcacatcctccggcagcagccctcagtacaacatctgcgagcagatgatccagatccgcgaggaccacatgcgcttcatttcggagctggcgcgctacagcaacagcgaggtggtcacgggctcgggccgccaggaggcccagaagacggacgcggagtaccgcaagctcttcgacctggcgctgcagggcctgcagctgttgtcgcagtggagcgcgcacgtgatggaagtgtattcctggaagcttgtgcaccccaccgacaagtactccaacaaggactgccccgacagcgctgaagagtacgagcgtgccacgcgctacaactacaccagcgaggagaagtttgccctagtggaggtgatcgccatgatcaaaggcctgcaggtgctgatgggcaggatggagagcgtgttcaaccacgccatccggcacaccgtctatgccgcactgcaggacttctcccaggtgacccttagggagccgctgcggcaggccatcaagaagaagaagaacgtcatccagagtgtcctgcaggccatcaggaagaccgtgtgtgactgggagacggggcatgagcccttcaatgacccagccttgcggggcgagaaggaccccaagagcggcttcgacataaaagtaccacgccgcgccgtgggaccctccagcactcagctttacatggtgagaaccatgctagagtccctcattgcagacaaaagtggttccaagaaaaccttgagaagtagccttgaggggcccaccatattggacatagaaaaatttcatcgagagtcattcttctacactcacttgataaatttcagtgaaacgctgcagcagtgctgtgacctttcgcagctgtggttccgagagttcttcctggagctgaccatgggcaggaggatccagttccccattgagatgtcgatgccctggatcctgacggaccacatcctggagaccaaggaggcatcgatgatggagtacgtgctctactccctggacctgtacaatgacagcgcccactacgcgctcaccaggttcaacaagcagttcctgtacgacgaaattgaggccgaggtgaatctatgttttgaccaatttgtttacaagctagcagaccagatatttgcctattataaggttatggcaggaagtttgcttcttgataaacggttacgatcagaatgcaagaatcagggagccacgatccacctcccgccgtctaaccgctacgagacgctgctgaagcagaggcatgtgcagctcctcggcagatcaatagacctcaatcgtctgatcacccagcgcgtctcagcagccatgtataagtccctagaactggcgattggacgatttgaaagtgaagatttgacctccatagttgagctggatggcctgttggaaatcaaccgcatgacccacaagctgctgagccggtacctgacgctggacggcttcgacgccatgttccgggaggccaaccacaacgtgtcagcgccctacgggaggatcaccctgcacgtcttctgggagctcaactatgacttcctgcccaactactgctacaacggctctaccaaccggtttgttcggacagtgttaccattttctcaggaatttcaaagagataagcagcctaatgcacagcctcagtatctgcatggatccaaggctttgaacttggcctactccagcatttacggcagctaccggaacttcgtgggacctccacactttcaagtcatctgccggcttctcggctaccagggtatcgccgtggtcatggaggagctgctgaaggtcgtcaagagcctgctgcaaggcacaatcctgcagtacgtgaagacgctgatggaggtgatgcccaagatctgccgcctgccccggcacgagtacggctctcctggtatcctggagttcttccaccaccagctgaaggacatcgtggagtacgcagagctgaagacggtgtgcttccagaacctgcgggaggtggggaacgccatcctcttctgcctgctcatcgagcagagcctgtctttagaagaagtgtgtgacctgctgcacgcggctcctttccagaacatcttgccgcgagtccatgtgaaagagggggagagacttgatgccaaaatgaaaagactagaatcaaagtacgccccgctgcatcttgtcccactgattgaaagactggggacccctcagcaaattgccatcgcaagagagggggacctgctgacaaaggagcgcctctgctgcggcctgtccatgtttgaggtcatcctgacacggatccggagctttctggatgaccccatctggcgcgggcctctgcccagcaatggggtcatgcatgtggacgagtgtgtggagtttcacagactgtggagtgccatgcagtttgtctactgcattcccgtggggacacacgagttcacagtcgagcagtgctttggtgatgggctacactgggctggctgtatgatcatcgtacttcttgggcagcagcggcgttttgctgtgctggatttctgctaccatctacttaaagtccagaaacatgatggcaaagatgagattattaaaaatgtgcctttgaagaagatggtggagagaattcgcaagttccagattctcaatgatgagatcatcaccatcctggataagtacctgaagtcaggcgacggggagggcacgccagtggagcatgtgcgctgcttccagccgcccatccaccagtccctcgccagcagctgagggcacgcgctgcactccgtaactcaacatggcatgcctttctctccgtaaactatttagtgagatttttagggactatttttcagtatctctgtacctgttaaagggggtgcttttcgatctaaaaacttaattttataaaattgacttatttttctagactaaaattgtatatgcttttggtaattaggaactcttgagaatattggctgctgattgttgccatcacgttcctacaaaattgtttttctatgggatgttctggcagctgtgtcataaaatgctgctgggttcattcattcattccataagaaacttaataccagcaaatgcattaaatcccttgccagttaccattaactgtaactatttagcttttgtttagggatctttctgatggtcttttatgagcaatcttagttctaagtcattgttcccatcccttttttgtgtgtttcagaaaatagtgaacttgattcccctgcttccactaaatccagttgtgacaaaatctaacgtgacatcagatcgaaaggttatagaaataaaactaatgagatct

SEQ ID NO: 106737 - DNA, 3762 bp, Artificial Sequence
  derived and/or modified sequence
atggccgcccaggtgaccctggaggacgccctgagcaacgtggacctgctggaggagctgcccctgcccgaccagcagccctgcatcgagcccccccccagcagcctgctgtaccagcccaacttcaacaccaacttcgaggacagaaacgccttcgtgaccggcatcgccagatacatcgagcaggccaccgtgcacagcagcatgaacgagatgctggaggagggccaggagtacgccgtgatgctgtacacctggagaagctgcagcagagccatcccccaggtgaagtgcaacgagcagcccaacagagtggagatctacgagaagaccgtggaggtgctggagcccgaggtgaccaagctgatgaacttcatgtacttccagagaaacgccatcgagagattctgcggcgaggtgagaagactgtgccacgccgagagaagaaaggacttcgtgagcgaggcctacctgatcaccctgggcaagttcatcaacatgttcgccgtgctggacgagctgaagaacatgaagtgcagcgtgaagaacgaccacagcgcctacaagagagccgcccagttcctgagaaagatggccgacccccagagcatccaggagagccagaacctgagcatgttcctggccaaccacaacaagatcacccagagcctgcagcagcagctggaggtgatcagcggctacgaggagctgctggccgacatcgtgaacctgtgcgtggactactacgagaacagaatgtacctgacccccagcgagaagcacatgctgctgaaggtgatgggcttcggcctgtacctgatggacggcagcgtgagcaacatctacaagctggacgccaagaagagaatcaacctgagcaagatcgacaagtacttcaagcagctgcaggtggtgcccctgttcggcgacatgcagatcgagctggccagatacatcaagaccagcgcccactacgaggagaacaagagcagatggacctgcaccagcagcggcagcagcccccagtacaacatctgcgagcagatgatccagatcagagaggaccacatgagattcatcagcgagctggccagatacagcaacagcgaggtggtgaccggcagcggcagacaggaggcccagaagaccgacgccgagtacagaaagctgttcgacctggccctgcagggcctgcagctgctgagccagtggagcgcccacgtgatggaggtgtacagctggaagctggtgcaccccaccgacaagtacagcaacaaggactgccccgacagcgccgaggagtacgagagagccaccagatacaactacaccagcgaggagaagttcgccctggtggaggtgatcgccatgatcaagggcctgcaggtgctgatgggcagaatggagagcgtgttcaaccacgccatcagacacaccgtgtacgccgccctgcaggacttcagccaggtgaccctgagagagcccctgagacaggccatcaagaagaagaagaacgtgatccagagcgtgctgcaggccatcagaaagaccgtgtgcgactgggagaccggccacgagcccttcaacgaccccgccctgagaggcgagaaggaccccaagagcggcttcgacatcaaggtgcccagaagagccgtgggccccagcagcacccagctgtacatggtgagaaccatgctggagagcctgatcgccgacaagagcggcagcaagaagaccctgagaagcagcctggagggccccaccatcctggacatcgagaagttccacagagagagcttcttctacacccacctgatcaacttcagcgagaccctgcagcagtgctgcgacctgagccagctgtggttcagagagttcttcctggagctgaccatgggcagaagaatccagttccccatcgagatgagcatgccctggatcctgaccgaccacatcctggagaccaaggaggccagcatgatggagtacgtgctgtacagcctggacctgtacaacgacagcgcccactacgccctgaccagattcaacaagcagttcctgtacgacgagatcgaggccgaggtgaacctgtgcttcgaccagttcgtgtacaagctggccgaccagatcttcgcctactacaaggtgatggccggcagcctgctgctggacaagagactgagaagcgagtgcaagaaccagggcgccaccatccacctgccccccagcaacagatacgagaccctgctgaagcagagacacgtgcagctgctgggcagaagcatcgacctgaacagactgatcacccagagagtgagcgccgccatgtacaagagcctggagctggccatcggcagattcgagagcgaggacctgaccagcatcgtggagctggacggcctgctggagatcaacagaatgacccacaagctgctgagcagatacctgaccctggacggcttcgacgccatgttcagagaggccaaccacaacgtgagcgccccctacggcagaatcaccctgcacgtgttctgggagctgaactacgacttcctgcccaactactgctacaacggcagcaccaacagattcgtgagaaccgtgctgcccttcagccaggagttccagagagacaagcagcccaacgcccagccccagtacctgcacggcagcaaggccctgaacctggcctacagcagcatctacggcagctacagaaacttcgtgggccccccccacttccaggtgatctgcagactgctgggctaccagggcatcgccgtggtgatggaggagctgctgaaggtggtgaagagcctgctgcagggcaccatcctgcagtacgtgaagaccctgatggaggtgatgcccaagatctgcagactgcccagacacgagtacggcagccccggcatcctggagttcttccaccaccagctgaaggacatcgtggagtacgccgagctgaagaccgtgtgcttccagaacctgagagaggtgggcaacgccatcctgttctgcctgctgatcgagcagagcctgagcctggaggaggtgtgcgacctgctgcacgccgcccccttccagaacatcctgcccagagtgcacgtgaaggagggcgagagactggacgccaagatgaagagactggagagcaagtacgcccccctgcacctggtgcccctgatcgagagactgggcaccccccagcagatcgccatcgccagagagggcgacctgctgaccaaggagagactgtgctgcggcctgagcatgttcgaggtgatcctgaccagaatcagaagcttcctggacgaccccatctggagaggccccctgcccagcaacggcgtgatgcacgtggacgagtgcgtggagttccacagactgtggagcgccatgcagttcgtgtactgcatccccgtgggcacccacgagttcaccgtggagcagtgcttcggcgacggcctgcactgggccggctgcatgatcatcgtgctgctgggccagcagagaagattcgccgtgctggacttctgctaccacctgctgaaggtgcagaagcacgacggcaaggacgagatcatcaagaacgtgcccctgaagaagatggtggagagaatcagaaagttccagatcctgaacgacgagatcatcaccatcctggacaagtacctgaagagcggcgacggcgagggcacccccgtggagcacgtgagatgcttccagccccccatccaccagagcctggccagcagctag

SEQ ID NO: 106738 - DNA, 3768 bp, Artificial Sequence
  derived and/or modified sequence
atgggccccaagcacgtgctgagacagcccggccccagcgagagacaccaccccgaggtgcccgcctggacccccagagccggccccccctgctggctgtgcagacagagatggggctggaccctgcacccccccggcagaggctgccccgccctgctgctgagcgagcccagaatggccgcccaggtgaccctggaggacgccctgagcaacgtggacctgctggaggagctgcccctgcccgaccagcagccctgcatcgagcccccccccagcagcctgctgtaccagaacgagatgctggaggagggccaggagtacgccgtgatgctgtacacctggagaagctgcagcagagccatcccccaggtgaagtgcaacgagcagcccaacagagtggagatctacgagaagaccgtggaggtgctggagcccgaggtgaccaagctgatgaacttcatgtacttccagagaaacgccatcgagagattctgcggcgaggtgagaagactgtgccacgccgagagaagaaaggacttcgtgagcgaggcctacctgatcaccctgggcaagttcatcaacatgttcgccgtgctggacgagctgaagaacatgaagtgcagcgtgaagaacgaccacagcgcctacaagagagccgcccagttcctgagaaagatggccgacccccagagcatccaggagagccagaacctgagcatgttcctggccaaccacaacaagatcacccagagcctgcagcagcagctggaggtgatcagcggctacgaggagctgctggccgacatcgtgaacctgtgcgtggactactacgagaacagaatgtacctgacccccagcgagaagcacatgctgctgaaggtgatgggcttcggcctgtacctgatggacggcagcgtgagcaacatctacaagctggacgccaagaagagaatcaacctgagcaagatcgacaagtacttcaagcagctgcaggtggtgcccctgttcggcgacatgcagatcgagctggccagatacatcaagaccagcgcccactacgaggagaacaagagcagatggacctgcaccagcagcggcagcagcccccagtacaacatctgcgagcagatgatccagatcagagaggaccacatgagattcatcagcgagctggccagatacagcaacagcgaggtggtgaccggcagcggcagacaggaggcccagaagaccgacgccgagtacagaaagctgttcgacctggccctgcagggcctgcagctgctgagccagtggagcgcccacgtgatggaggtgtacagctggaagctggtgcaccccaccgacaagtacagcaacaaggactgccccgacagcgccgaggagtacgagagagccaccagatacaactacaccagcgaggagaagttcgccctggtggaggtgatcgccatgatcaagggcctgcaggtgctgatgggcagaatggagagcgtgttcaaccacgccatcagacacaccgtgtacgccgccctgcaggacttcagccaggtgaccctgagagagcccctgagacaggccatcaagaagaagaagaacgtgatccagagcgtgctgcaggccatcagaaagaccgtgtgcgactgggagaccggccacgagcccttcaacgaccccgccctgagaggcgagaaggaccccaagagcggcttcgacatcaaggtgcccagaagagccgtgggccccagcagcacccagctgtacatggtgagaaccatgctggagagcctgatcgccgacaagagcggcagcaagaagaccctgagaagcagcctggagggccccaccatcctggacatcgagaagttccacagagagagcttcttctacacccacctgatcaacttcagcgagaccctgcagcagtgctgcgacctgagccagctgtggttcagagagttcttcctggagctgaccatgggcagaagaatccagttccccatcgagatgagcatgccctggatcctgaccgaccacatcctggagaccaaggaggccagcatgatggagtacgtgctgtacagcctggacctgtacaacgacagcgcccactacgccctgaccagattcaacaagcagttcctgtacgacgagatcgaggccgaggtgaacctgtgcttcgaccagttcgtgtacaagctggccgaccagatcttcgcctactacaaggtgatggccggcagcctgctgctggacaagagactgagaagcgagtgcaagaaccagggcgccaccatccacctgccccccagcaacagatacgagaccctgctgaagcagagacacgtgcagctgctgggcagaagcatcgacctgaacagactgatcacccagagagtgagcgccgccatgtacaagagcctggagctggccatcggcagattcgagagcgaggacctgaccagcatcgtggagctggacggcctgctggagatcaacagaatgacccacaagctgctgagcagatacctgaccctggacggcttcgacgccatgttcagagaggccaaccacaacgtgagcgccccctacggcagaatcaccctgcacgtgttctgggagctgaactacgacttcctgcccaactactgctacaacggcagcaccaacagattcgtgagaaccgtgctgcccttcagccaggagttccagagagacaagcagcccaacgcccagccccagtacctgcacggcagcaaggccctgaacctggcctacagcagcatctacggcagctacagaaacttcgtgggccccccccacttccaggtgatctgcagactgctgggctaccagggcatcgccgtggtgatggaggagctgctgaaggtggtgaagagcctgctgcagggcaccatcctgcagtacgtgaagaccctgatggaggtgatgcccaagatctgcagactgcccagacacgagtacggcagccccggcatcctggagttcttccaccaccagctgaaggacatcgtggagtacgccgagctgaagaccgtgtgcttccagaacctgcacgccgcccccttccagaacatcctgcccagagtgcacgtgaaggagggcgagagactggacgccaagatgaagagactggagagcaagtacgcccccctgcacctggtgcccctgatcgagagactgggcaccccccagcagatcgccatcgccagagagggcgacctgctgaccaaggagagactgtgctgcggcctgagcatgttcgaggtgatcctgaccagaatcagaagcttcctggacgaccccatctggagaggccccctgcccagcaacggcgtgatgcacgtggacgagtgcgtggagttccacagactgtggagcgccatgcagttcgtgtactgcatccccgtgggcacccacgagttcaccgtggagcagtgcttcggcgacggcctgcactgggccggctgcatgatcatcgtgctgctgggccagcagagaagattcgccgtgctggacttctgctaccacctgctgaaggtgcagaagcacgacggcaaggacgagatcatcaagaacgtgcccctgaagaagatggtggagagaatcagaaagttccagatcctgaacgacgagatcatcaccatcctggacaagtacctgaagagcggcgacggcgagggcacccccgtggagcacgtgagatgcttccagccccccatccaccagagcctggccagcagctag

SEQ ID NO: 106739 - protein, 480 aa, Artificial Sequence
  derived and/or modified sequence
MDFRTACEETKTGICLLQDGNQEPFKVRLHLAKDILMIQEQDVICVSGEPFYSGERTVTIRRQTVGGFGLSIKGGAEHNIPVVVSKISKEQRAELSGLLFIGDAILQINGINVRKCRHEEVVQVLRNAGEEVTLTVSFLKRAPAFLKLPLNEDCACAPSDQSSGTSSPLCDSGLHLNYHPNNTDTLSCSSWPTSPGLRWEKRWCDLRLIPLLHSRFSQYVPGTDLSRQNAFQVIAVDGVCTGIIQCLSAEDCVDWLQAIATNISNLTKHNIKKINRNFPVNQQIVYMGWCEAREQDPLQDRVYSPTFLALRGSCLYKFLAPPVTTWDWTRAEKTFSVYEIMCKILKDSDLLDRRKQCFTVQSESGEDLYFSVELESDLAQWERAFQTATFLEVERIQCKTYACVLESHLMGLTIDFSTGFICFDAATKELEFSNLFAVLHCIHSFFAAKVACLDPLFLGNQATASTAASSATTSKAKYTT

SEQ ID NO: 106740 - DNA, 1443 bp, Artificial Sequence
  derived and/or modified sequence
atggacttcagaaccgcctgcgaggagaccaagaccggcatctgcctgctgcaggacggcaaccaggagcccttcaaggtgagactgcacctggccaaggacatcctgatgatccaggagcaggacgtgatctgcgtgagcggcgagcccttctacagcggcgagagaaccgtgaccatcagaagacagaccgtgggcggcttcggcctgagcatcaagggcggcgccgagcacaacatccccgtggtggtgagcaagatcagcaaggagcagagagccgagctgagcggcctgctgttcatcggcgacgccatcctgcagatcaacggcatcaacgtgagaaagtgcagacacgaggaggtggtgcaggtgctgagaaacgccggcgaggaggtgaccctgaccgtgagcttcctgaagagagcccccgccttcctgaagctgcccctgaacgaggactgcgcctgcgcccccagcgaccagagcagcggcaccagcagccccctgtgcgacagcggcctgcacctgaactaccaccccaacaacaccgacaccctgagctgcagcagctggcccaccagccccggcctgagatgggagaagagatggtgcgacctgagactgatccccctgctgcacagcagattcagccagtacgtgcccggcaccgacctgagcagacagaacgccttccaggtgatcgccgtggacggcgtgtgcaccggcatcatccagtgcctgagcgccgaggactgcgtggactggctgcaggccatcgccaccaacatcagcaacctgaccaagcacaacatcaagaagatcaacagaaacttccccgtgaaccagcagatcgtgtacatgggctggtgcgaggccagagagcaggaccccctgcaggacagagtgtacagccccaccttcctggccctgagaggcagctgcctgtacaagttcctggccccccccgtgaccacctgggactggaccagagccgagaagaccttcagcgtgtacgagatcatgtgcaagatcctgaaggacagcgacctgctggacagaagaaagcagtgcttcaccgtgcagagcgagagcggcgaggacctgtacttcagcgtggagctggagagcgacctggcccagtgggagagagccttccagaccgccaccttcctggaggtggagagaatccagtgcaagacctacgcctgcgtgctggagagccacctgatgggcctgaccatcgacttcagcaccggcttcatctgcttcgacgccgccaccaaggagctggagttcagcaacctgttcgccgtgctgcactgcatccacagcttcttcgccgccaaggtggcctgcctggaccccctgttcctgggcaaccaggccaccgccagcaccgccgccagcagcgccaccaccagcaaggccaagtacaccacctag

SEQ ID NO: 106741 - DNA, 1443 bp, Artificial Sequence
  derived and/or modified sequence
atggacttccgaaccgcctgcgaggagactaagactggaatctgtctgctgcaggatggaaaccaagaacctttcaaggtgcgcctgcacctcgcgaaggacatcctgatgatccaggagcaggatgtgatctgcgtgagcggagagcccttttacagtggtgagaggacagttaccatccgccgtcagacagtcggagggttcggcctgagtattaaaggtggggccgagcacaatataccagttgttgtatccaagatatccaaggagcagagagccgagttgtctggactcctcttcattggtgacgctatactgcagatcaatggtatcaatgttcgaaagtgtagacacgaagaagtagtgcaggttctccgcaacgcaggagaggaagtaacccttacagtgagctttttgaaaagagcccccgcttttctaaaactgccgttaaacgaagattgcgcatgcgcaccatctgaccagtctagcggaacctcgtctccattatgcgatagtggactccatttgaactatcatccgaacaatacggatacactttcttgttccagttggcccacctcccccggattgcgatgggaaaagcgttggtgcgatttgcgccttatcccgctgttacacagccgcttttcacagtacgtgcctggtaccgatctgagccgccagaacgcttttcaagtgatcgctgtcgatggcgtctgcaccggaatcatccagtgtctaagtgcagaagattgcgtggactggctccaggccatcgcaaccaatatatccaaccttactaagcacaatattaaaaaaattaacaggaactttccagtgaatcagcagatcgtctatatggggtggtgtgaggctcgggaacaggacccgttacaggatcgggtttatagcccaacgtttcttgcccttagaggtagctgcttatacaagttcctggcaccacctgttactacctgggattggacacgggcggaaaaaaccttcagtgtgtatgaaataatgtgcaagatcctgaaggatagcgatctgctggacagacgaaagcagtgctttactgtgcagtccgaaagtggtgaagacctctacttcagcgtggagctggagagcgacctggctcagtgggagagggctttccagactgccacatttctcgaagtggagagaatacagtgcaaaacctacgcttgcgtgctggagtcacacctcatggggctgacgatcgacttcagcaccggattcatttgtttcgacgccgccactaaagaactggagttttccaacttatttgcagtcctgcactgcatccactccttcttcgccgccaaagtcgcgtgtctggacccactctttttaggaaaccaagcgactgcctccaccgcagcctcttcagcaaccacgagtaaagccaagtatacaacgtag

SEQ ID NO: 106742 - DNA, 1443 bp, Artificial Sequence
  derived and/or modified sequence
atggatttcaggaccgcctgcgaagagaccaaaacaggaatctgccttctccaagacggaaaccaggaaccatttaaggtccgtctgcacttggcgaaggacatcttaatgatccaagaacaggacgttatttgtgtgtcaggtgaaccgttttattcaggagagagaaccgtcacaatcaggcgacaaaccgtgggaggtttcgggttgtctatcaaagggggagccgagcacaatatccccgtggtcgtgtccaagatcagcaaggagcagagggccgaactcagcggacttctctttatcggggatgcaatcctacagattaacggcatcaacgtgcggaaatgcaggcatgaagaagtcgtccaggtcctcagaaacgccggcgaagaggtgaccctgactgtctcattcttgaagagggctccggcgtttctgaagttacctctgaatgaagactgcgcctgtgcgccaagcgatcagtcctccggtacctccagtccactgtgcgatagcggccttcatcttaactaccatccaaataacacagatacactgtcttgctcctcttggcctacttccccaggactgcgctgggaaaaacgttggtgcgaccttaggctgattccgctcctccactctcgcttctcacagtacgtgccaggaactgaccttagtaggcagaatgcatttcaggtgatcgccgttgacggcgtgtgcacaggaataattcagtgtttgtccgcagaggattgcgtcgactggctgcaggctatagccaccaatatttccaacctgacgaaacataacatcaaaaagataaacagaaattttccagtgaatcaacagattgtgtacatggggtggtgcgaggcccgcgagcaggacccactccaggacagggtctattccccgacctttctcgctctgagggggagttgcctatataagtttctggcacctcccgttacaacttgggactggactagggctgagaagaccttttccgtctatgagatcatgtgcaagattttgaaagactcagacctactggacagacggaagcagtgtttcacggtacagtcagagagtggagaagatctctactttagcgtggaactggaatccgatctagcccagtgggagagagcttttcagacagccaccttcctcgaggtcgagcgcatccagtgtaagacgtacgcttgtgtgctggagagtcatctcatgggccttaccatagatttttccactggattcatatgctttgacgccgcaaccaaagagctagagttcagcaatctattcgcagtgttacactgcatccactctttctttgccgcaaaagtggcctgcctggaccctctttttctgggaaaccaggcgaccgcgagcacggcggctagttccgctaccacgtcaaaggccaaatatacaacgtag

SEQ ID NO: 106743 - DNA, 1443 bp, Artificial Sequence
  derived and/or modified sequence
atggacttcagaacagcctgtgaggagaccaagacaggcatctgcctgctgcaggacggcaaccaggagcccttcaaggtgcggctgcacctggccaaggacatcctgatgatccaggagcaggacgtcatctgtgtgtctggagagcccttctacagcggggagaggacagtgaccatccggcggcagacagtgggcggcttcggcctgagcatcaagggcggcgctgagcacaacatccctgtggtggtgtccaagatcagcaaggagcagagagctgagctgagcggcctgctcttcatcggagatgccatcctgcagatcaatggcatcaacgtgaggaaatgtagacatgaggaggtggtgcaggtgctgagaaatgctggggaggaggtgaccctgactgtgtccttcctgaagagggccccagccttcctgaagctgcccctgaatgaagactgtgcctgtgcccccagcgaccagagcagcggcaccagcagccccctgtgtgacagcggcctgcacctgaactaccaccccaacaacacagacaccctgagctgcagctcctggcccaccagccctggcctgcgctgggagaagcgctggtgtgacctgcggctcatccccctgctgcacagccgcttcagccagtatgtgcctggaacagacctgagccggcagaatgccttccaggtgattgctgtggatggagtgtgcaccggcatcatccagtgcctgtctgctgaggactgtgtggactggctgcaggccatcgccaccaacatcagcaacctgaccaagcacaacatcaagaagatcaacagaaacttccctgtgaaccagcagatcgtgtacatgggctggtgtgaggcccgggagcaggaccccctgcaggacagagtgtacagccccaccttcctggccctgcggggcagctgcctgtacaagttcctggcccctcctgtgaccacctgggactggaccagggctgagaagaccttctctgtgtatgagatcatgtgcaagatcctgaaggacagcgacctgctggacaggaggaagcagtgcttcaccgtgcagagcgagagcggggaggacctgtacttctctgtggagctggagagtgacctggcccagtgggagcgggccttccagacagccaccttcctggaggtggagcgcatccagtgcaagacctacgcctgtgtgctggagagccacctgatgggcctgaccatcgacttcagcacaggcttcatctgctttgatgctgccaccaaggagctggagttcagcaacctgtttgctgtgctgcactgcatccacagcttctttgctgccaaggtggcctgcctggaccccctcttcctgggcaaccaggccacagccagcacagctgccagcagcgccaccaccagcaaggccaagtacaccacctag

SEQ ID NO: 106744 - DNA, 1443 bp, Artificial Sequence
  derived and/or modified sequence
atggacttccggaccgcctgcgaggagaccaagaccggcatctgcctcctgcaagatggtaaccaagaaccattcaaagtgcgattgcacttggcgaaagatatcctgatgatccaggagcaggatgttatctgcgtatctggtgaaccattctactccggtgagcgcacggttacaattaggcggcagaccgttggtggatttggactgtcgatcaaaggcggtgccgagcacaatattcctgttgtagtgagtaagatttcaaaagagcaaagagcagagctgtcagggttgctcttcatcggggacgccatcctgcagattaatggtataaatgtgaggaagtgccggcatgaggaggtggtgcaggtgcttcgcaatgccggcgaagaagtgacactgaccgtgtcctttcttaaaagagcccctgcttttctgaaacttccactgaatgaggactgcgcttgcgccccatccgaccagtcaagtggcacgtcaagtcctctatgtgattccggcttgcacctcaactatcaccccaataatactgatactctgtcctgttcttcttggcctacttccccaggacttcgttgggaaaaaaggtggtgcgacctgcgcctgattccccttttacatagccggttttctcagtatgtgccggggactgacctcagtcggcagaacgcgtttcaggtgatcgctgtggacggcgtctgtacaggcatcatccagtgtttatctgcggaagactgcgtcgactggctgcaagccatcgccactaatatatctaacctcaccaaacataatataaaaaagatcaacagaaatttccctgtgaaccagcaaatcgtctatatgggatggtgcgaggctagagagcaagatcctttacaggacagggtgtattccccaacgttcctcgctctacgagggtcgtgtctctacaagttcttagccccacccgtcaccacctgggactggacccgggctgaaaaaaccttttctgtatatgagattatgtgtaaaatattaaaagattccgacttgcttgacaggaggaaacagtgctttacagtgcagtctgagagcggagaggatctatatttttctgtggagttggaatctgacctggcgcagtgggagcgcgcctttcagacagccaccttcctggaggttgaaagaatccagtgtaagacatatgcttgcgttctcgaatcacaccttatggggctgaccattgactttagcaccggattcatttgttttgacgccgctacaaaggagttagagttctccaatttgtttgccgtcctccattgtatccactcttttttcgcagccaaggttgcatgcctggatccacttttcctgggcaatcaggccactgcatccacggcagcgtcaagcgcgaccacgtctaaggcaaaatacactacctag

SEQ ID NO: 106745 - DNA, 1443 bp, Artificial Sequence
  derived and/or modified sequence
atggacttccggaccgcctgcgaggagaccaagaccggcatctgcctgctacaggatgggaaccaggagccgttcaaggttaggcttcatttggccaaggacatcctgatgattcaggagcaagatgtgatttgtgtctccggagagcccttctattccggcgaacgcactgtaactatccgcaggcagacagtcggggggttcggtctgagcatcaagggtggcgccgagcacaacatccccgttgttgtctctaaaatatctaaggagcagagggcggagctgagcggcctcctgtttatcggtgatgctatactgcagattaatggcatcaatgtgcggaagtgccggcacgaagaagtagtccaggttcttcggaatgcgggggaggaagtcaccctcactgtttcgttcttgaagcgcgcaccggcctttttgaagctgccactaaacgaggactgtgcgtgcgcacccagtgaccagagttccggtaccagttctcctctctgcgactctgggttacacctcaactaccatccaaataatactgatactctgtcatgctccagctggccgacgtctcccggattacgatgggagaagcggtggtgcgaccttcgcctaatcccgcttctacattctcggttttcccagtatgtacctggtaccgatctgtctcggcaaaatgccttccaagtcattgcagtagatggagtgtgcacggggattatccagtgccttagtgcagaagactgtgtggactggctccaggccattgcaacaaatatatccaacctgactaagcataatataaaaaagatcaatcgcaatttccccgtcaaccagcaaatagtttacatgggttggtgtgaggcaagggaacaagatcccctgcaagaccgcgtctactccccaaccttcttggctttgcgcggctcatgtctatacaagttccttgcaccccccgtgactacttgggactggacaagggcagaaaagacattctcagtgtatgaaatcatgtgtaagattttaaaagattcagatttgctggaccgtcgcaaacagtgctttactgtgcagagtgagtctggggaggatctgtactttagcgttgaactggaatcagatctggctcagtgggaacgggccttccagactgccacgttcctcgaggtggagcggattcagtgtaaaacctatgcttgcgtgttggagtctcacctaatggggctgacaatagatttctccacaggattcatttgttttgacgcggccactaaggagctggaattcagtaacctcttcgcagtcctgcattgtatccatagttttttcgctgccaaggtagcttgcctggatccattattcttgggcaatcaggcgaccgcgtcaacagcagcatccagcgccaccactagcaaagccaagtacacaacctag

SEQ ID NO: 106746 - DNA, 1443 bp, Artificial Sequence
  derived and/or modified sequence
atggactttcgcacagcatgcgaagagacgaagaccggtatctgtcttctgcaggatggcaatcaggaaccatttaaggtgaggctgcatctggccaaggacattttaatgattcaggagcaggatgtgatttgcgtttccggagaacctttctactcgggggagaggaccgtcacaatccgtagacagaccgtgggagggttcggattatccataaagggcggagccgagcataatatccctgtggtggtatcaaaaatcagtaaggaacagcgcgctgaattatctgggctcctgttcatcggggacgcaatcttgcagatcaatggcattaacgtccggaagtgccggcatgaggaggttgtacaggtccttcggaacgcaggagaggaagtgaccctgactgtgagcttccttaagcgcgcacccgctttcttaaaactgcccctcaatgaggactgcgcttgtgctccgtctgaccaaagctcaggaacatcatcccccctctgcgattccggactgcatctgaattaccatccaaataacaccgacactttaagctgctcaagctggcccacgagccctgggttgagatgggagaagcggtggtgtgatctgcgcctgattcctctcttacactcacggtttagtcagtacgtaccagggacagacttgtcgcgccagaatgcatttcaggttatcgcggtggatggagtttgtacagggattattcagtgtctgagtgctgaggactgcgtcgactggctacaggcaatcgctacaaatatcagcaatctgacaaaacataacatcaaaaagattaacaggaactttccagtgaaccaacagatcgtttacatgggatggtgtgaagctcgcgagcaagatcccctccaggatagagtgtattcacccaccttcctcgccctgagaggcagctgtctctacaaatttctcgcgccaccagtgaccacctgggactggacacgagctgaaaagacattcagcgtgtatgagattatgtgcaaaattcttaaggacagcgacctgcttgacagacgtaaacagtgcttcacagtacagtcagaaagtggcgaagacctgtatttttcggtggagcttgaatcagaccttgcccagtgggaacgggcttttcaaactgcaaccttcctggaagttgagaggatacagtgcaaaacgtacgcatgcgttttggaatcccatctcatggggctgaccattgacttttccactggtttcatctgcttcgatgctgcaaccaaggagctcgagttttctaacttattcgccgtcctgcactgcatccacagcttctttgcggcaaaggtagcttgtcttgatcctcttttcctgggcaaccaggcaactgcctctactgctgcatccagtgccacgacttctaaagccaagtatacaacgtag

SEQ ID NO: 106747 - DNA, 1443 bp, Artificial Sequence
  derived and/or modified sequence
atggacttccggacagcatgcgaggagaccaaaaccggtatctgcctgctccaggatggcaaccaagagccattcaaagtgcgccttcacctagccaaagatattctcatgatccaggaacaagatgtcatctgtgtgtcaggggaacccttctatagcggagagcgcacagtgaccataaggcgtcaaacagtcggtgggtttggactctccattaaagggggagccgaacataacatcccggtagtggtcagcaagatttcgaaagagcagcgggctgagctctcgggactgctcttcatcggcgacgccatcctgcagatcaatggcatcaatgtccggaagtgtaggcacgaggaggtggtgcaggtgctccggaacgcaggcgaagaagtcaccctgacggtttcctttctcaagcgggctcctgcctttctcaaactgcccttgaatgaggattgtgcttgtgctccctcagaccagagcagcggaacaagttctccgctctgtgatagtggactgcacttgaactatcaccccaataatacagacactttgtcctgttcatcttggcctacttccccaggcttaaggtgggaaaagcgatggtgcgatctccgcctgatacccctgcttcatagccgattctctcagtatgtccccggaaccgacctgtcgaggcagaatgcattccaggtcatcgccgtcgacggcgtctgcacgggaatcatacagtgtctcagtgctgaagattgtgtcgactggttacaggccatcgctaccaacattagcaacctcacaaagcataacattaagaaaatcaacaggaacttcccagtgaatcagcagatcgtatatatggggtggtgtgaagcacgggagcaggatcccctgcaggatcgcgtgtacagccctacgttcctagctctccggggatcgtgcctttacaagttcctcgcccctcctgtaacaacatgggattggacacgcgcagaaaagactttctctgtttacgaaattatgtgtaaaatcctcaaagacagcgatttgctggacagacggaagcagtgttttacagtccagtcagagagtggcgaggatctatatttttccgtggaactggaatcagatctcgcccagtgggaacgggcattccaaactgccacctttctggaggtcgagcgaattcaatgtaaaacatacgcatgcgtgctcgaaagccacttgatgggtcttaccatcgatttttctactggatttatctgttttgacgctgccaccaaggagctcgagttcagtaacctgtttgctgtgcttcactgcatccacagtttctttgcggctaaagtggcttgtctggatccattattcctgggcaatcaagccaccgcttctacagccgcttcttctgctacgacttcaaaagcaaaatacactacctag

SEQ ID NO: 106748 - DNA, 1505 bp, Artificial Sequence
  derived and/or modified sequence
cgacatcctttgtggtgccacagcacatggatttcagaaccgcctgtgaggagacaaagacaggaatttgtttgctgcaggatggtaaccaggagcctttcaaagtgcggctgcacctagccaaagacattttgatgatccaggaacaggatgtgatatgtgtgtctggtgagcctttctattctggtgaaagaacggtgaccatcagaagacaaacagtaggaggatttggattaagcataaagggaggagcagaacataacattccagttgtcgtttcaaaaatctccaaggaacaaagagcggaactttcaggactactttttattggagatgcaattctacagataaatggcattaatgtgagaaaatgtagacatgaagaagtggttcaggttcttcggaatgctggagaagaagtgactctaacagtgtcatttttaaaaagagcacctgctttcctcaaactcccattgaatgaagattgtgcatgtgctccaagtgaccagagcagtggcacctcctctcctctctgtgacagtggcttacatctcaactaccatcccaacaatacagacacattatcatgctcgtcgtggccgacgtctccaggcttgaggtgggagaagcgatggtgcgacctcagactgatccctctacttcattcgcgcttctctcagtatgtgcccggcacagatttgagtcggcagaatgcctttcaagtcattgctgtggatggggtctgcactgggattattcagtgcctctctgctgaagactgcgttgactggctacaagcaatagcaactaacatttcaaatctcacaaagcacaatattaaaaaaatcaacagaaactttcctgtaaaccagcagattgtctacatgggctggtgtgaagcccgggagcaagaccccctccaggacagagtgtactccccgaccttcctggccctgaggggctcatgtctctacaagtttctggcacctccagtgaccacctgggactggacgagagcagagaaaacattctcagtttatgagattatgtgcaagatcctcaaggacagtgacctgctggaccgacggaaacagtgcttcaccgtgcagtctgagtctggggaggacctgtacttctcagtggagctggaaagtgacctcgcccagtgggaaagagccttccagacagcaacctttctagaagtagaacggatacagtgcaagacctatgcatgtgtgctagaaagtcatctaatgggactcacaattgatttcagcacaggatttatctgctttgatgctgcaacaaaggagttggaattttctaatttatttgctgttcttcactgcattcattccttctttgctgccaaggtagcttgtttggaccctctatttttaggcaatcaagctactgcttctactgctgccagctctgctaccacgagcaaagcaaagtatacaacttgacatactgaactcttcattgacacaccccatgactgt

SEQ ID NO: 106749 - DNA, 1703 bp, Artificial Sequence
  derived and/or modified sequence
ttagaagctctgagaaatcatgggccgtgcggtaggggttgaaatgctcaaaggtccacacttcttgaaataaacagaatggtcttgagtggattgcaactgttttggaaatagctttgtgaaaagagggtggagagctactcaaaattctacgttagagagactgaaaagacatctaatttcattgctcggcagacgacatcctttgtggtgccacagcacatggatttcagaaccgcctgtgaggagacaaagacaggaatttgtttgctgcaggatggtaaccaggagcctttcaaagtgcggctgcacctagccaaagacattttgatgatccaggaacaggatgtgatatgtgtgtctggtgagcctttctattctggtgaaagaacggtgaccatcagaagacaaacagtaggaggatttggattaagcataaagggaggagcagaacataacattccagttgtcgtttcaaaaatctccaaggaacaaagagcggaactttcaggactactttttattggagatgcaattctacagataaatggcattaatgtgagaaaatgtagacatgaagaagtggttcaggttcttcggaatgctggagaagaagtgactctaacagtgtcatttttaaaaagagcacctgctttcctcaaactcccattgaatgaagattgtgcatgtgctccaagtgaccagagcagtggcacctcctctcctctctgtgacagtggcttacatctcaactaccatcccaacaatacagacacattatcatgctcgtcgtggccgacgtctccaggcttgaggtgggagaagcgatggtgcgacctcagactgatccctctacttcattcgcgcttctctcagtatgtgcccggcacagatttgagtcggcagaatgcctttcaagtcattgctgtggatggggtctgcactgggattattcagtgcctctctgctgaagactgcgttgactggctacaagcaatagcaactaacatttcaaatctcacaaagcacaatattaaaaaaatcaacagaaactttcctgtaaaccagcagattgtctacatgggctggtgtgaagcccgggagcaagaccccctccaggacagagtgtactccccgaccttcctggccctgaggggctcatgtctctacaagtttctggcacctccagtgaccacctgggactggacgagagcagagaaaacattctcagtttatgagattatgtgcaagatcctcaaggacagtgacctgctggaccgacggaaacagtgcttcaccgtgcagtctgagtctggggaggacctgtacttctcagtggagctggaaagtgacctcgcccagtgggaaagagccttccagacagcaacctttctagaagtagaacggatacagtgcaagacctatgcatgtgtgctagaaagtcatctaatgggactcacaattgatttcagcacaggatttatctgctttgatgctgcaacaaaggagttggaattttctaatttatttgctgttcttcactgcattcattccttctttgctgccaaggtagcttgtttggaccctctatttttaggcaatcaagctactgcttctactgctgccagctctgctaccacgagcaaagcaaagtatacaacttgacatactgaactcttcattgacacaccccatgactgtat

SEQ ID NO: 106750 - protein, 1111 aa, Artificial Sequence
  derived and/or modified sequence
MVDLESEVPPLPPRYRFRDLLLGDQGWQNDDRVQVEFYMNENTFKERLKLFFIKNQRSSLRIRLFNFSLKLLSCLLYIIRVLLENPSQGNEWSHIFWVNRSLPLWGLQVSVALISLFETILLGYLSYKGNIWEQILRIPFILEIINAVPFIISIFWPSLRNLFVPVFLNCWLAKHALENMINDLHRAIQRTQSAMFNQVLILISTLLCLIFTCICGIQHLERIGKKLNLFDSLYFCIVTFSTVGFGDVTPETWSSKLFVVAMICVALVVLPIQFEQLAYLWMERQKSGGNYSRHRAQTEKHVVLCVSSLKIDLLMDFLNEFYAHPRLQDYYVVILCPTEMDVQVRRVLQIPMWSQRVIYLQGSALKDQDLLRAKMDDAEACFILSSRCEVDRTSSDHQTILRAWAVKDFAPNCPLYVQILKPENKFHIKFADHVVCEEEFKYAMLALNCICPATSTLITLLVHTSRGQEGQQSPEQWQKMYGRCSGNEVYHIVLEESTFFAEYEGKSFTYASFHAHKKFGVCLIGVRREDNKNILLNPGPRYIMNSTDICFYINITKEENSAFKNQDQQRKSNVSRSFYHGPSRLPVHSIIASMGTVAIDLQDTSCRSASGPTLSLPTEGSKEIRRPSIAPVLEVADTSSIQTCDLLSDQSEDETTPDEEMSSNLEYAKGYPPYSPYIGSSPTFCHLLHEKVPFCCLRLDKSCQHNYYEDAKAYGFKNKLIIVAAETAGNGLYNFIVPLRAYYRPKKELNPIVLLLDNPLDDLLRCGVTFAANMVVVDKESTMSAEEDYMADAKTIVNVQTLFRLFSSLSIITELTHPANMRFMQFRAKDCYSLALSKLEKKERERGSNLAFMFRLPFAAGRVFSISMLDTLLYQSFVKDYMISITRLLLGLDTTPGSGFLCSMKITADDLWIRTYARLYQKLCSSTGDVPIGIYRTESQKLTTSESQISISVEEWEDTKDSKEQGHHRSNHRNSTSSDQSDHPLLRRKSMQWARRLSRKGPKHSGKTAEKITQQRLNLYRRSERQELAELVKNRMKHLGLSTVGYDEMNDHQSTLSYILINPSPDTRIELNDVVYLIRPDPLAYLPNSEPSRRNSICNVTGQDSREETQL

SEQ ID NO: 106751 - protein, 523 aa, Artificial Sequence
  derived and/or modified sequence
IINDLHRAIQRTQSAMFNQVLILISTLLCLIFTCICGIQHLERIGKKLNLFDSLYFCIVTFSTVGFGDVTPETWSSKLFVVAMICVALVVLPIQFEQLAYLWMERQKSGGNYSRHRAQTEKHVVLCVSSLKIDLLMDFLNEFYAHPRLQDYYVVILCPTEMDVQVRRVLQIPMWSQRVIYLQGSALKDQDLLRAKMDDAEACFILSSRCEVDRTSSDHQTILRAWAVKDFAPNCPLYVQILKPENKFHIKFADHVVCEEEFKYAMLALNCICPATSTLITLLVHTSRGQEGQQSPEQWQKMYGRCSGNEVYHIVLEESTFFAEYEGKSFTYASFHAHKKFGVCLIGVRREDNKNILLNPGPRYIMNSTDICFYINITKEENSAFKNQDQQRKSNVSRSFYHGPSRLPVHSIIASMGTVAIDLQDTSCRSASGPTLSLPTEGSKEIRRPSIAPVLEVADTSSIQTCDLLSDQSEDETTPDEEMSSNLEYAKGYPPYSPYIGSSPTFCHLLHEKVPFCCLRLDKF

SEQ ID NO: 106752 - DNA, 3336 bp, Artificial Sequence
  derived and/or modified sequence
atggtggatcttgagtctgaggtgcctcctctccccccacgctatcggtttagggatctgctgcttggggaccagggttggcagaatgatgatagagtgcaggtcgagttttatatgaatgagaacacattcaaagaacgactgaagttgttctttattaagaaccaaaggtctagcctgcggatccgcttattcaactttagcctcaagctgttgtcctgtttgctgtatattatcagagtactcctggaaaatccatcccagggaaacgagtggtcgcacatcttttgggtaaacaggagcctccccctctgggggttgcaagtatctgtggcgcttatcagcctattcgagacaatccttctcgggtacctgtcgtataagggaaacatctgggagcagatcctgagaatcccatttatcctggagatcattaatgctgtccccttcataatatctatattctggccttctttacgaaatctgttcgtcccagtgtttctgaactgctggttagctaaacatgcgctggagaacatgattaatgacttgcatagagcaattcagcgcactcagagcgccatgtttaatcaagttctgattctgatcagcaccctgctgtgccttattttcacctgtatatgtggaatccagcacctcgaaagaatcggcaaaaagctcaatctatttgacagcctgtacttttgcattgttactttctctacagtaggattcggagatgtgacaccagagacctggtcgagtaagcttttcgtggtggctatgatttgcgtggcacttgttgtgctaccaatccagttcgaacaactggcatacctgtggatggagagacaaaaaagcgggggtaattacagccggcatcgagcccagactgagaagcacgtggtcctgtgtgtgtcaagtctgaaaatcgatctacttatggatttcctgaatgaattctatgcccaccccaggctgcaagattactacgtcgtcatactctgcccaactgagatggatgtgcaggtgagacgggttctccagatccccatgtggtcacagagggtgatttaccttcagggcagcgccctgaaagatcaggacctgttacgtgctaaaatggatgatgccgaagcctgctttattcttagcagcaggtgcgaagttgacaggacaagttccgatcaccagactatactccgagcctgggctgtgaaagacttcgctccaaactgcccgttgtacgtgcagattctcaaacccgagaataagtttcatatcaagtttgccgatcacgtggtttgcgaggaggaatttaagtatgctatgctggctttgaattgtatctgtcccgctacaagtactctcataaccctgttagtgcatacatcacgcggacaagagggccaacagtcacctgagcagtggcagaagatgtacgggcgctgctcaggtaatgaagtgtatcatatcgttctggaggaaagtacgtttttcgcagaatacgaggggaaaagtttcacatatgcctcctttcacgcccataaaaagttcggtgtgtgtctgataggtgttaggcgggaagacaacaagaatatactgctgaaccctggtcctcgctatattatgaactcaacggacatttgtttctacattaacattacgaaagaagagaacagcgcctttaaaaaccaagaccagcagaggaagtcaaacgtaagccgcagtttctaccacggccccagcaggctgccagtccattctatcatagccagcatgggcacagtggctatcgatctccaggatactagctgtcgaagcgcctcggggcccaccctctctcttcccacagaggggagtaaggagatcagacgccccagtatcgcacctgtgttggaagtggcagacacctctagcatccagacttgtgacttgctgtccgatcagagtgaggatgagacaaccccagacgaagagatgtcttctaatttggaatatgcaaagggatacccaccctattctccgtatatcgggtcctcgcccacattttgccacctgctccacgaaaaagtcccgttttgctgcctcaggttggataagtcctgccaacataactattacgaagatgccaaggcttacgggtttaagaacaaactgattatcgtagccgccgagaccgccggaaacggcctctataactttatcgtgccacttcgggcttattatcgcccaaagaaggaattgaatccgatcgtccttctcctcgacaatcccttagacgatcttctgcgctgcggggttacattcgcagccaatatggtcgtcgtggacaaggaatccacaatgtccgctgaggaggattacatggccgatgccaaaaccatcgtgaacgtgcagacactatttcgactattttcgagcttgtctatcatcaccgagctgacgcacccagcaaatatgaggttcatgcagttcagggccaaagattgctatagcctggctcttagcaaactcgaaaagaaggagagagaacggggctcgaacctcgccttcatgtttaggctcccatttgccgccggccgtgtgtttagtatcagtatgttagataccctcctgtatcaatcttttgtcaaggattacatgatcagcataacgcggcttctgctggggttagacacaacccctggttcggggtttctgtgttccatgaagatcaccgcagacgacctttggattaggacttacgctcggctttatcagaagctgtgctcatcaaccggcgatgtgccaatcgggatttatcgaactgagtctcagaaactgactacgtccgagtcacagatctccatcagcgtggaagagtgggaggacacaaaggacagcaaggaacaaggacaccaccgcagcaaccataggaatagtacgtccagtgatcagagtgatcatccgctccttcgacggaagtccatgcagtgggctaggcggttgagcaggaaaggccccaaacatagcggtaagaccgctgagaagatcacacaacagcgacttaatctgtatagaagatccgagcgccaggagctggcagagctcgtgaagaatagaatgaaacaccttgggctatctactgtaggctacgatgaaatgaatgatcatcagtcaaccctctcatacatcttgataaacccttccccagacacacgaatcgagctcaacgatgtagtgtatctcattcgacctgatcctctagcgtacctcccaaacagcgaaccctcccgccgaaatagcatttgtaacgttaccggacaggatagcagagaggagacacagctttag

SEQ ID NO: 106753 - DNA, 3336 bp, Artificial Sequence
  derived and/or modified sequence
atggtggacctggagagcgaggtgccccccctgcccccacgctaccgcttccgggacctgctgctgggggaccagggctggcagaatgatgacagagtgcaggtggagttctacatgaatgaaaacaccttcaaggagcggctgaagctgttcttcatcaagaaccagaggagcagcctgcgcatccgcctcttcaacttcagcctgaagctgctgagctgcctgctgtacatcatccgggtgctgctggagaaccccagccagggcaatgagtggagccacatcttctgggtgaacagaagcctgcccctgtggggcctgcaggtgtctgtggccctgatcagcctgtttgagaccatcctgctgggctacctgagctacaagggcaacatctgggagcagatcctgcgcatccccttcatcctggagatcatcaatgctgtgcccttcatcatcagcatcttctggcccagcctgaggaacctgtttgtgcctgtgttcctgaactgctggctggccaagcacgccctggagaacatgatcaatgacctgcaccgggccatccagaggacccagagcgccatgttcaaccaggtgctgatcctgatcagcaccctgctgtgcctgatcttcacctgcatctgtggcatccagcacctggagagaattggcaagaagctgaacctgtttgacagcctgtacttctgcatcgtgaccttcagcacagtgggctttggagatgtgaccccagagacctggagcagcaagctgtttgtggtggccatgatctgtgtggccctggtggtgctgcccatccagtttgagcagctggcctacctgtggatggagcggcagaagagcggcggcaactacagccgccaccgggcccagacagagaagcacgtggtgctgtgtgtgagcagcctgaagattgacctgctgatggacttcctgaatgagttctacgcccacccccggctgcaggactactacgtggtgatcctgtgccccacagagatggatgtgcaggtgagaagagtgctgcagatccccatgtggagccagagggtcatctacctgcagggcagcgccctgaaggaccaggacctgctgcgggccaagatggatgatgctgaggcctgcttcatcctgagcagccgctgtgaggtggacaggaccagcagtgaccaccagaccatcctgcgggcctgggccgtgaaggactttgcccccaactgccccctgtatgtgcagatcctgaagccagagaacaagttccacatcaagtttgctgaccacgtggtgtgtgaggaggagttcaagtatgccatgctggccctgaactgcatctgcccagccaccagcaccctcatcaccctgctggtgcacaccagccggggccaggagggccagcagagccctgagcagtggcagaagatgtatggccgctgcagcggaaatgaggtgtaccacatcgtgctggaggagagcaccttctttgctgaatatgagggcaagagcttcacctacgccagcttccacgcccacaagaagtttggagtgtgcctgattggagtgagaagagaggacaacaagaacatcctgctgaaccctggcccccgctacatcatgaacagcacagacatctgcttctacatcaacatcaccaaggaggagaacagcgccttcaagaaccaggaccagcagaggaagagcaatgtgagccgctccttctaccacggccccagccggctgcctgtgcacagcatcatcgcctccatgggcaccgtggccatcgacctgcaggacaccagctgccgcagcgccagcggccccaccctgagcctgcccacagagggcagcaaggagatcagaagacccagcatcgcccctgtgctggaggtggccgacaccagcagcatccagacctgtgacctgctgagtgaccagagtgaagatgagaccaccccagatgaggagatgagcagcaacctggagtatgccaagggctacccaccctacagcccctacatcggcagcagccccaccttctgccacctgctgcacgagaaggtgcccttctgctgcctgcggctggacaagagctgccagcacaactactatgaagatgccaaggcctacggcttcaagaacaagctgatcatcgtggccgctgagacagctggaaatggcctgtacaacttcatcgtgcccctgcgggcctactaccggcccaagaaggagctgaaccccatcgtgctgctgctggacaaccccctggatgacctgctgcgctgtggggtgacctttgctgccaacatggtggtggtggacaaggagagcaccatgtctgctgaggaggactacatggctgatgccaagaccatcgtgaatgtgcagaccctcttccgcctcttcagcagcctgagcatcatcacagagctgacccacccagccaacatgaggttcatgcagttccgggccaaggactgctacagcctggccctgagcaagctggagaagaaggagcgggagcggggcagcaacctggccttcatgttccggctgccctttgctgctggccgggtcttcagcatctccatgctggacaccctgctgtaccagagctttgtgaaggactacatgatcagcatcacccggctgctgctgggcctggacaccaccccaggcagcggcttcctgtgcagcatgaagatcacagcagatgacctgtggatccgcacctacgcccggctgtaccagaagctgtgcagcagcactggagatgtgcccatcggcatctacagaacagagagccagaagctgaccaccagcgagagccagatcagcatctctgtggaggagtgggaggacaccaaggacagcaaggagcagggccaccacaggagcaaccacaggaacagcaccagcagtgaccagagcgaccaccccctgctgcggaggaagtccatgcagtgggcccggcggctgagcaggaagggccccaagcacagcggcaagacagctgagaagatcacccagcagaggctgaacctgtacagaagaagtgagcggcaggagctggccgagctggtgaagaacaggatgaagcacctgggcctgagcacagtgggctatgatgagatgaatgaccaccagagcaccctgagctacatcctgatcaaccccagcccagacaccagaattgagctgaatgatgtggtgtacctgatccggccagaccccctggcctacctgcccaacagcgagcccagcagaagaaacagcatctgcaatgtgacaggccaggacagccgggaggagacccagctgtag

SEQ ID NO: 106754 - DNA, 3336 bp, Artificial Sequence
  derived and/or modified sequence
atggtggacctggagagcgaggtgccccccctgcccccccggtacaggttcagagatctgctgcttggcgatcagggatggcaaaatgacgacagggtccaggtcgagttttatatgaatgagaacacttttaaggagcgcctaaagctgtttttcatcaaaaatcagagatccagtcttaggattcgcctttttaacttctcactgaagcttctgagctgtcttctgtatattattagggtgcttttagagaacccttctcagggcaatgagtggagccacattttttgggttaatagatctttgccactgtggggactgcaagtcagcgtagccctgatttcactgttcgaaactatcctgctgggatacttgagctacaaaggcaatatctgggagcaaatccttagaatcccttttatcctggaaattatcaatgcggtgccgttcattattagcatcttctggccatctctcagaaatctgttcgtcccagttttccttaactgctggctagccaagcatgctttggaaaatatgatcaacgatctgcatagagctatccagagaacccagtccgctatgtttaatcaagtcctaatcttgattagtaccctcctgtgtctgattttcacatgcatctgtggcattcaacacctcgagcgtatcggcaaaaagttgaacctgtttgattcgctgtatttctgcattgttacattttccactgtcggttttggcgacgtcacccccgaaacatggtcctccaagttgttcgtggttgctatgatctgtgtggcgctggtagttcttccaattcagttcgagcagctggcatatttgtggatggagcgacaaaagtcaggcggaaactactcccgacaccgcgctcagaccgaaaagcatgtcgtgctgtgtgtgtccagcttgaagatagacctgttgatggatttcctcaatgaattctatgctcacccccgactacaggactattacgttgtcatcctatgcccaacagaaatggacgtgcaggtgcgtcgagtcctgcagatccccatgtggtcgcagagggtgatttacctacagggaagtgccctgaaagaccaggacctgctgcgagccaagatggacgacgccgaggcatgcttcatcttaagcagccggtgcgaggtagatagaacatctagtgatcatcagacgatattacgagcatgggctgtgaaagactttgctccgaattgcccactttacgtgcagattctgaagcccgagaacaagtttcacatcaaatttgctgaccacgtagtgtgcgaagaagaattcaagtatgccatgctggccttaaattgcatctgccccgctactagcactctaatcacccttttagtgcacacctcacgaggacaggagggccagcagagtcctgagcagtggcagaagatgtacggtagatgctcgggcaatgaggtctatcacatcgttttggaggaatccactttttttgcagaatacgagggtaagtctttcacatacgccagtttccatgcccataagaagtttggggtttgcctgatcggcgtgcgcagagaagacaacaagaacatcctgttgaatcccggcccacgatacatcatgaacagcaccgatatctgcttttacatcaacatcaccaaggaagagaatagcgccttcaaaaatcaggatcagcagagaaagtctaatgttagtcggtccttttatcacgggccatcccggctgcccgtgcactccattattgcctccatgggcaccgtcgctatcgacctgcaagacacaagttgtcgttcagcgtctggcccaacattgtcgcttcctaccgaaggctcaaaagagatccggaggcctagcatcgcacctgttctcgaagtcgccgatacttcctcaatacagacatgcgatttgttgagtgatcagtctgaggatgaaacgacccctgacgaggagatgagctcaaacctcgaatatgccaaaggatatcccccttactcaccctacattggaagctcccctaccttttgtcatttgctgcacgaaaaggtacccttctgctgtctacgtctggataaatcctgtcaacacaattattatgaggacgcgaaagcgtacggatttaaaaataagctcataattgttgctgctgaaaccgccggtaacggcctgtataacttcatcgtcccactgagggcctattatcggccgaagaaagaactaaacccaatcgtgctgctactggacaatcctttggacgaccttttgagatgcggagtaacctttgctgcaaacatggttgtggtcgataaggaaagcactatgtcagctgaggaagactacatggcagacgcaaagaccattgtaaacgtgcagacgctgttcaggctattctcttcactgtctattattactgagcttacacacccagccaacatgagattcatgcagttcagagccaaagactgttatagcctggcccttagtaaattggagaagaaggaacgggagcggggcagtaacttagcctttatgtttaggctacctttcgcggcgggtagagtcttctctatttcaatgctggacacgctgctctatcagagcttcgtgaaggattacatgatctctatcacaagactgctactcggcctggacaccaccccaggctccggattcctgtgctcgatgaaaatcacagctgacgacctgtggatcaggacatatgctaggctttaccaaaaactctgctcatccactggagacgtccctattggtatatacaggactgagtcacagaagctgacaacgtctgagtctcaaatttccatatccgtggaggagtgggaagatactaaagacagtaaggagcagggacaccaccggagcaaccacagaaatagcacttcgtcggatcagtccgatcatccactgcttaggaggaagagtatgcaatgggcccggcggcttagcaggaagggtccaaaacactctggaaaaactgccgagaagatcacccagcagagactaaatttgtataggcgttccgagaggcaggagttagcagagttagttaagaacagaatgaaacatctgggcctgagcacagtgggatacgacgagatgaatgatcatcagtctacgctgtcctatatccttattaatccaagcccagacactcgaatagagctcaatgatgttgtctatctgatccgacccgatcctttagcttacctgcctaattccgaacccagccggaggaattctatttgtaatgtgaccggccaagactctcgggaggaaactcaactttag

SEQ ID NO: 106755 - DNA, 5883 bp, Artificial Sequence
  derived and/or modified sequence
acagcgtcttgttagtcctctccctgtactccgcaatattttctttctttctccctcctctcctccatttgttgtttgatgtttcccactctttgaggaaggatggttgatttggagagcgaagtgccccctctgcctcccaggtacaggtttcgagatttgctgctaggggaccaaggatggcaaaacgacgacagggtacaagttgaattctatatgaatgaaaatacatttaaagaaagactaaaattatttttcataaaaaaccagagatcaagtctaaggatacgcctgttcaatttttctctcaaattactaagctgcttattatacataatccgagtactactagaaaacccttcacaaggaaatgaatggtctcatatcttttgggtgaacagaagtctacctttgtggggcttacaggtttcagtggcattgataagtctgtttgaaacaatattacttggttatcttagttataagggaaacatctgggaacagattttacgaatacccttcatcttggaaataattaatgcagttcccttcattatctcaatattctggccttccttaaggaatctatttgtcccagtctttctgaactgttggcttgccaaacatgccttggaaaatatgattaatgatctacacagagccattcagcgtacacagtctgcaatgtttaatcaagttttgattttaatatctacattactatgccttatcttcacctgcatttgtgggatccaacatctggaacgaataggaaagaagctgaatctctttgactccctttatttctgcattgtgacgttttctactgtgggcttcggggatgtcactcctgaaacatggtcctccaagctttttgtagttgctatgatttgtgttgctcttgtggttctacccatacagtttgaacagctggcttatttgtggatggagagacaaaagtcaggaggaaactatagtcgacatagagctcaaactgaaaagcatgtcgtcctgtgtgtcagctcactgaagattgatttacttatggattttttaaatgaattctatgctcatcctaggctccaggattattatgtggtgattttgtgtcctactgaaatggatgtacaggttcgaagggtactgcagattccaatgtggtcccaacgagttatctaccttcaaggttcagcccttaaagatcaagacctattgagagcaaagatggatgacgctgaggcctgttttattctcagtagccgttgtgaagtggataggacatcatctgatcaccaaacaattttgagagcatgggctgtgaaagattttgctccaaattgtcctttgtatgtccagatattaaagcctgaaaataaatttcacatcaaatttgctgatcatgttgtttgtgaagaagagtttaaatacgccatgttagctttaaactgtatatgcccagcaacatctacacttattacactactggttcatacctctagagggcaagaaggccagcaatcgccagaacaatggcagaagatgtacggtagatgctccgggaatgaagtctaccacattgttttggaagaaagtacattttttgctgaatatgaaggaaagagttttacatatgcctctttccatgcacacaaaaagtttggcgtctgcttgattggtgttaggagggaggataataaaaacattttgctgaatccaggtcctcgatacattatgaattctacagacatatgcttttatattaatattaccaaagaagagaattcagcatttaaaaaccaagaccagcagagaaaaagcaatgtgtccaggtcgttttatcatggaccttccagattacctgtacatagcataattgccagcatgggtactgtggctatagacttgcaagatacaagctgtagatcagcaagtggccctaccctgtctcttcctacagagggaagcaaagaaataagaagacctagcattgctcctgttttagaggttgcagatacatcatcgattcaaacatgtgatcttctaagtgaccaatcagaagatgaaactacaccagatgaagaaatgtcttcaaacttagagtatgctaaaggttacccaccttattctccatatataggaagttcacccactttttgtcatctccttcatgaaaaagtaccattttgctgcttaagattagacaagagttgccaacataactactatgaggatgcaaaagcctatggattcaaaaataaactaattatagttgcagctgaaacagctggaaatggattatataactttattgttcctctcagggcatattatagaccaaagaaagaacttaatcccatagtactgctattggataaccccctagatgacttactcaggtgtggagtgacttttgctgctaatatggtggttgtggataaagagagcaccatgagtgccgaggaagactacatggcagatgccaaaaccattgtgaacgtgcagacactcttcaggttgttttccagtctcagtattatcacagagctaactcaccccgccaacatgagattcatgcaattcagagccaaagactgttactctcttgctctttcaaaactggaaaagaaagaacgggagagaggctctaacttggcctttatgtttcgactgccttttgctgctgggagggtgtttagcatcagtatgttggacactctgctgtatcagtcatttgtgaaggattatatgatttctatcacgagacttctgttgggactggacactacaccaggatctgggtttctttgttctatgaaaatcactgcagatgacttatggatcagaacttatgccagactttatcagaagttgtgttcttctactggagatgttcccattggaatctacaggactgagtctcagaaacttactacatctgagtctcaaatatctatcagtgtagaagagtgggaagacaccaaagactccaaagaacaagggcaccaccgcagcaaccaccgcaactcaacatccagtgatcagtcggaccatcccttgctgcggagaaaaagcatgcagtgggcccgaagactgagcagaaaaggcccaaaacactctggtaaaacagctgaaaaaataacccagcagcgactgaacctctacaggaggtcagaaagacaagagcttgctgaacttgtgaaaaatagaatgaaacacttgggtctttctacagtgggatatgatgaaatgaatgatcatcaaagtaccctctcctacatcctgattaacccatctccagataccagaatagagctgaatgatgttgtatacttaattcgaccagatccactggcctaccttccaaacagtgagcccagtcgaagaaacagcatctgcaatgtcactggtcaagattctcgggaggaaactcaactttgataaaaataaaatgagaaacttttttcctacaaagaccttgcttgaaaccacaaaagttttgctggcacgaaagaaactagatggaaatatatgtaattctctcatatttaaaaacgtaatctcttctcttagaagtatagatcattttgaaacttaatgtactacttactggtactctccctattaatatttgaaggacctcaatggaataaatttgaaaagctaaattaaaatacaaaaatttaaatctgacatttaattgttttataataatccaaactctatgaaagcaattttaaaaattattaaggttttatgaagttgacaaaatctaactatatttggtgcatcacaatggacacagaatgctgctgctcctcttaaaaattaaatgtgtcatattatattctttaaacttactgttttacaaaattgagctcatcgtaaatgtctagtcttctcacatagagattaaccaacaaacttgtgtggctgacttttgtgtaagaatcatagtttgctttagaatacaaatctttaagtcattttaacttttttttctgccttacgatataaaaatatttatcttagaatttgagatgttcatagcatgttttattacattgaagaaactaaaacataaatgaaaagaaacactaggttcctgcactttttggtaactttatgtctagcaaatattttatgccaagaaaagcatactataaagcaaatatctattattctcctaaacgaatgcctagcatagagaaaatacttaatacacatttgttgacttaaatttaattcaaggattgaaaaattaactggatatcttgaaatatacagtaatgattgtccttagactcttgaactttaccatctttcctattcatatatctatatagtaaatttcactagaaaaattcttttaaaattgacagaagataatttataccttttatggactctgaagacacttcaaaacattaaaagtccttatgtctttggtaatgaaacaataacactcaatgaaggatgtattaaaatttttgacttaattttgaaatcgtatatatgagctatactttaacattatgagagaaaagcataaaacaaaaataggtagttcttggcttttaacattaatgcaaatcatgcagaatttgagttataaatttaaatataaattgaccattgatgatatccagtttttcattttttacctgtattgcattttccccctagagaaatagatcaaaagagcacaagagtatgcgtacatagtttaccaggtagtagaagtgtgttaaaatgttcctgtaaaagaaacattggtaaatttaaatacatactgttctaattttgtattttttaatttttgaatttgacattgagtttaattcagcaacaacaaaaaatacatataaaactagaaagggactttttttcctttcttttcataatgaagcagatcaacttaaaggataataaaatttttaaagaaaagatattctaatgtactctcaataattctacagaaataaaactgtaaagtgcaatgtgaaatcaaagattatagtcattgtataatttggcttggaggctatgaaatgtctttttttctttttggtattttacattattcacattttagaataacaagaacaccaagaattacccctaaaacagagaccctgtatttaatctactttgatcagagaagtagaatttataacaggttagctaaaattgggagcatgccttaaaacttaaagattgtatgcatatatgtgtatatgttataaacgtgaaatatatttgacacacacattcacatataaattgttaaaaactgaaggcagaatggaactaatatatgtaacagagaaaaacaataaattttatgaacttgttttatatttgcatatcaagagtcaagtatgatgtttctttaagttgactttttttacttcattatttttaggaataaatgtaagattttacaaatcttttatttccccacaagatctgaagtttggtatttttgcattatgacagttgttgagactaggattttaagctaggatatgattatatttcctatataactaaaaattttgtttcataaattttaaaataattatttttgactatgaacattagtccaaatttaatatttgacacagttcataccagcttgctacaataatgataatttattagtctttctgttatttaaagaataaaaacatgcttataaaagacttttaatgaaatgttgcctttttaaaataattatacttgcacatgaaaataaaatataaagtcaataatagtccttgtagcccaatgggaattgattctgtttattgtctgtaccattttgctaccagttacattgaactgctttaaaataaataataaaattatttctaatgatgaaaa

SEQ ID NO: 106756 - DNA, 3336 bp, Artificial Sequence
  derived and/or modified sequence
atggttgacttggagtctgaagttcctcccctgccaccgaggtaccgtttccgcgatttgctgctgggggaccagggttggcagaacgatgacagagttcaggtggagttctatatgaatgaaaatacatttaaggagcgcctaaaattgtttttcatcaaaaaccagaggtccagcttgcgcattaggctattcaatttctcattgaagttactgtcctgcctgctatatatcatccgtgtgctactcgaaaaccctagtcagggcaatgaatggtcccacattttctgggtgaatcgaagtctgccgttgtgggggctgcaggtgagtgtggccctaatctccctgtttgaaacaattctgttggggtatctgtcttataaaggtaatatctgggagcaaattctgaggatcccattcattctggaaatcatcaacgcagtgccattcatcatatccattttctggcccagcctaaggaacctgttcgtgcccgtgtttctcaattgctggctagcgaaacatgcgctcgagaatatgatcaacgatttgcaccgggctattcagagaacccaaagtgctatgttcaatcaggttttgattctgatttccaccttactgtgcctgatcttcacttgcatctgcggcatccagcatttagagcgaataggcaagaagttaaatcttttcgattccctgtatttctgtatcgttaccttctctactgtaggctttggggacgtgacccccgaaacctggagcagtaagctgttcgtggtcgctatgatctgcgttgccttggttgtcttaccaatacagttcgaacagctagcatacctctggatggaacgccagaaaagcgggggaaattacagccggcaccgggcacagaccgagaaacacgtagtgctgtgcgttagtagcttgaagatcgacttgctgatggactttctgaacgaattctatgcgcacccaagactgcaggactactacgtagttatcctgtgtcccaccgagatggacgtccaggttagacgggtgctgcagatccctatgtggtctcagagggtcatatatctgcaggggtccgccctgaaagaccaggacctgttacgcgctaagatggatgatgccgaagcctgtttcatcctatcttcgaggtgtgaggtagaccggacatcgtccgaccatcagacgatcctgagagcctgggccgtgaaagactttgcaccgaattgcccactgtacgtccaaatccttaaaccggagaataagttccatattaagttcgctgatcacgtagtgtgtgaggaggagttcaaatacgcgatgctggcactgaattgcatttgccctgctacctcgacccttatcacacttctcgtgcacaccagcagagggcaggagggccagcagagtcctgaacaatggcagaagatgtacggcagatgttcgggcaatgaggtgtatcacatagtccttgaggaaagcaccttcttcgccgaatacgaggggaaaagcttcacctatgccagctttcatgcccacaagaagtttggcgtgtgtttgatcggggtgcggcgagaggacaataagaacattcttctgaaccccggaccgaggtacataatgaatagcacggacatttgcttctacattaacatcaccaaggaggagaattcggcttttaaaaatcaggatcagcaacgcaagtccaatgtgtctaggtccttttatcacggcccaagtagactcccagtccacagcataatcgcttccatgggcacagtcgccattgacctccaggatacatcgtgccgctcagcctctggcccaaccctatcgctcccaactgagggatccaaagagatcaggcgacctagtatcgcccctgtcctggaagttgcagatacctcctctattcagacctgcgatctcctttcagaccagtctgaagacgaaactacgccggatgaagagatgagctctaatctggagtacgctaaaggctacccaccatatagtccctatataggctcatcccctaccttttgtcatctgctgcatgagaaggtgccgttctgctgtctgagactcgataaatcctgtcaacataactactatgaggacgcaaaagcatatggattcaagaacaaactgataatcgtggcagcagagaccgccggtaatggcttgtataatttcattgttccactccgtgcttactataggcccaaaaaagaactgaatccgatcgtcctgttgttggacaaccccctggacgacctcttacggtgtggcgtcacatttgcagctaacatggtggtcgtggataaagagtcaaccatgagtgcggaggaggactatatggcggatgcaaagacgatagtaaatgtccagaccctgtttcggctgttttcttctctttcaatcatcacagaactcactcatccagccaacatgagatttatgcagtttcgcgctaaagattgttactccctggcgcttagcaagctggaaaaaaaagagagagaaagggggtccaatctggcttttatgttccggctgccattcgctgctggacgcgtcttctccatttcaatgttagatacgctgctgtaccagagcttcgttaaagactatatgatcagcataactaggctcctcctgggcctggacaccacgccaggcagcggctttctgtgcagcatgaaaatcacggccgacgacctgtggattcggacatacgcgaggttatatcagaagctatgttcctccaccggcgatgtgccgatcggtatttatcggaccgagtcccagaaactgacaacttccgagtctcagataagcatatctgttgaagagtgggaggataccaaggacagtaaggaacagggccatcatcgtagcaaccaccggaactctaccagttcggatcaaagtgaccacccacttctaagacggaaatccatgcaatgggctagacgactgtcccggaagggtcccaagcacagcgggaagaccgcagaaaagatcactcagcagcggctgaatctgtaccgtagatcagagcgccaggagctggcagagctggtcaaaaacaggatgaaacatctgggcctgtccaccgtaggctacgacgagatgaacgatcatcagtctactttgagctacatcctgattaatccaagcccggacaccagaatcgaattgaatgacgtggtctacctcatcaggccagaccctctcgcttatctccccaattctgaaccctccagacgaaatagcatctgcaacgttaccggtcaggattccagagaggagacgcaattgtag

SEQ ID NO: 106757 - DNA, 3336 bp, Artificial Sequence
  derived and/or modified sequence
atggtggacctggagagcgaggtgccccccctgccccccagatacagattcagagacctgctgctgggcgaccagggctggcagaacgacgacagagtgcaggtggagttctacatgaacgagaacaccttcaaggagagactgaagctgttcttcatcaagaaccagagaagcagcctgagaatcagactgttcaacttcagcctgaagctgctgagctgcctgctgtacatcatcagagtgctgctggagaaccccagccagggcaacgagtggagccacatcttctgggtgaacagaagcctgcccctgtggggcctgcaggtgagcgtggccctgatcagcctgttcgagaccatcctgctgggctacctgagctacaagggcaacatctgggagcagatcctgagaatccccttcatcctggagatcatcaacgccgtgcccttcatcatcagcatcttctggcccagcctgagaaacctgttcgtgcccgtgttcctgaactgctggctggccaagcacgccctggagaacatgatcaacgacctgcacagagccatccagagaacccagagcgccatgttcaaccaggtgctgatcctgatcagcaccctgctgtgcctgatcttcacctgcatctgcggcatccagcacctggagagaatcggcaagaagctgaacctgttcgacagcctgtacttctgcatcgtgaccttcagcaccgtgggcttcggcgacgtgacccccgagacctggagcagcaagctgttcgtggtggccatgatctgcgtggccctggtggtgctgcccatccagttcgagcagctggcctacctgtggatggagagacagaagagcggcggcaactacagcagacacagagcccagaccgagaagcacgtggtgctgtgcgtgagcagcctgaagatcgacctgctgatggacttcctgaacgagttctacgcccaccccagactgcaggactactacgtggtgatcctgtgccccaccgagatggacgtgcaggtgagaagagtgctgcagatccccatgtggagccagagagtgatctacctgcagggcagcgccctgaaggaccaggacctgctgagagccaagatggacgacgccgaggcctgcttcatcctgagcagcagatgcgaggtggacagaaccagcagcgaccaccagaccatcctgagagcctgggccgtgaaggacttcgcccccaactgccccctgtacgtgcagatcctgaagcccgagaacaagttccacatcaagttcgccgaccacgtggtgtgcgaggaggagttcaagtacgccatgctggccctgaactgcatctgccccgccaccagcaccctgatcaccctgctggtgcacaccagcagaggccaggagggccagcagagccccgagcagtggcagaagatgtacggcagatgcagcggcaacgaggtgtaccacatcgtgctggaggagagcaccttcttcgccgagtacgagggcaagagcttcacctacgccagcttccacgcccacaagaagttcggcgtgtgcctgatcggcgtgagaagagaggacaacaagaacatcctgctgaaccccggccccagatacatcatgaacagcaccgacatctgcttctacatcaacatcaccaaggaggagaacagcgccttcaagaaccaggaccagcagagaaagagcaacgtgagcagaagcttctaccacggccccagcagactgcccgtgcacagcatcatcgccagcatgggcaccgtggccatcgacctgcaggacaccagctgcagaagcgccagcggccccaccctgagcctgcccaccgagggcagcaaggagatcagaagacccagcatcgcccccgtgctggaggtggccgacaccagcagcatccagacctgcgacctgctgagcgaccagagcgaggacgagaccacccccgacgaggagatgagcagcaacctggagtacgccaagggctaccccccctacagcccctacatcggcagcagccccaccttctgccacctgctgcacgagaaggtgcccttctgctgcctgagactggacaagagctgccagcacaactactacgaggacgccaaggcctacggcttcaagaacaagctgatcatcgtggccgccgagaccgccggcaacggcctgtacaacttcatcgtgcccctgagagcctactacagacccaagaaggagctgaaccccatcgtgctgctgctggacaaccccctggacgacctgctgagatgcggcgtgaccttcgccgccaacatggtggtggtggacaaggagagcaccatgagcgccgaggaggactacatggccgacgccaagaccatcgtgaacgtgcagaccctgttcagactgttcagcagcctgagcatcatcaccgagctgacccaccccgccaacatgagattcatgcagttcagagccaaggactgctacagcctggccctgagcaagctggagaagaaggagagagagagaggcagcaacctggccttcatgttcagactgcccttcgccgccggcagagtgttcagcatcagcatgctggacaccctgctgtaccagagcttcgtgaaggactacatgatcagcatcaccagactgctgctgggcctggacaccacccccggcagcggcttcctgtgcagcatgaagatcaccgccgacgacctgtggatcagaacctacgccagactgtaccagaagctgtgcagcagcaccggcgacgtgcccatcggcatctacagaaccgagagccagaagctgaccaccagcgagagccagatcagcatcagcgtggaggagtgggaggacaccaaggacagcaaggagcagggccaccacagaagcaaccacagaaacagcaccagcagcgaccagagcgaccaccccctgctgagaagaaagagcatgcagtgggccagaagactgagcagaaagggccccaagcacagcggcaagaccgccgagaagatcacccagcagagactgaacctgtacagaagaagcgagagacaggagctggccgagctggtgaagaacagaatgaagcacctgggcctgagcaccgtgggctacgacgagatgaacgaccaccagagcaccctgagctacatcctgatcaaccccagccccgacaccagaatcgagctgaacgacgtggtgtacctgatcagacccgaccccctggcctacctgcccaacagcgagcccagcagaagaaacagcatctgcaacgtgaccggccaggacagcagagaggagacccagctgtag

SEQ ID NO: 106758 - protein, 1069 aa, Artificial Sequence
  derived and/or modified sequence
MVDLESEVPPLPPRYRFRDLLLGDQGWQNDDRVQVEFYMNENTFKERLKLFFIKNQRSSLRIRLFNFSLKLLSCLLYIIRVLLENPSQGNEWSHIFWVNRSLPLWGLQVSVALISLFETILLGYLSYKGNIWEQILRIPFILEIINAVPFIISIFWPSLRNLFVPVFLNCWLAKHALENMINDLHRAIQRTQSAMFNQVLILISTLLCLIFTCICGIQHLERIGKKLNLFDSLYFCIVTFSTVGFGDVTPETWSSKLFVVAMICVALVVLPIQFEQLAYLWMERQKSGGNYSRHRAQTEKHVVLCVSSLKIDLLMDFLNEFYAHPRLQDYYVVILCPTEMDVQVRRVLQIPMWSQRVIYLQGSALKDQDLLRAKMDDAEACFILSSRCEVDRTSSDHQTILRAWAVKDFAPNCPLYVQILKPENKFHIKFADHVVCEEEFKYAMLALNCICPATSTLITLLVHTSRGQFGVCLIGVRREDNKNILLNPGPRYIMNSTDICFYINITKEENSAFKNQDQQRKSNVSRSFYHGPSRLPVHSIIASMGTVAIDLQDTSCRSASGPTLSLPTEGSKEIRRPSIAPVLEVADTSSIQTCDLLSDQSEDETTPDEEMSSNLEYAKGYPPYSPYIGSSPTFCHLLHEKVPFCCLRLDKSCQHNYYEDAKAYGFKNKLIIVAAETAGNGLYNFIVPLRAYYRPKKELNPIVLLLDNPLDDLLRCGVTFAANMVVVDKESTMSAEEDYMADAKTIVNVQTLFRLFSSLSIITELTHPANMRFMQFRAKDCYSLALSKLEKKERERGSNLAFMFRLPFAAGRVFSISMLDTLLYQSFVKDYMISITRLLLGLDTTPGSGFLCSMKITADDLWIRTYARLYQKLCSSTGDVPIGIYRTESQKLTTSEETYILIFLSQISISVEEWEDTKDSKEQGHHRSNHRNSTSSDQSDHPLLRRKSMQWARRLSRKGPKHSGKTAEKITQQRLNLYRRSERQELAELVKNRMKHLGLSTVGYDEMNDHQSTLSYILINPSPDTRIELNDVVYLIRPDPLAYLPNSEPSRRNSICNVTGQDSREETQL

SEQ ID NO: 106759 - DNA, 3210 bp, Artificial Sequence
  derived and/or modified sequence
atggtagatttagagtccgaagtgccaccattgcccccacggtacagatttcgagatctccttctgggcgatcagggatggcagaatgatgatcgggttcaggttgagttctatatgaatgagaatacctttaaggagcgcctcaagctgttcttcattaaaaaccaaaggagttcactcagaatcagactgttcaacttctctttgaagctgctgtcctgccttctgtatatcatccgtgtcttactggagaacccatcacagggcaatgagtggtcccacatcttttgggtaaatcgcagcctgccgctgtggggcctgcaggtgagcgtggcactgatctcgctgttcgagaccatcctgctgggctatctgtcctataagggaaacatctgggagcagatcctccggatcccctttatcctggagatcatcaatgccgtaccttttataatttccattttctggccatctttgagaaacctgtttgttcctgtgttcttgaattgttggctcgccaagcacgcactggagaatatgataaatgacctgcatagggctatccagcgaacgcagtccgccatgtttaaccaggtgctaatcttgattagtaccttgttgtgtctgatcttcacctgtatttgcgggatccagcatctggagcgaatagggaaaaagttgaatttattcgattctctttatttctgtattgtcactttctcgacggtggggttcggggatgttacccccgagacgtggagttccaagctttttgtggtcgcaatgatctgcgtggctctcgttgtgttgcccattcaatttgagcagctcgcttatttgtggatggagaggcagaaaagtgggggaaactatagccgacatagagcacagacagaaaaacatgtggtgctgtgtgtcagttccctcaaaatcgacctgctcatggactttttaaatgagttttacgcgcacccccggttgcaggattattacgtagtgatattgtgccccacggaaatggatgtgcaggtgcggcgcgtgttacagattcccatgtggtcgcagagagtgatctacctacaggggagcgctttaaaggatcaggatttgctccgggccaaaatggatgacgccgaagcttgtttcatcttaagcagccgctgcgaggtggacagaaccagctccgaccaccaaaccattcttcgcgcctgggcggttaaggatttcgcaccaaattgtcctctctatgttcagattctgaaacccgagaacaagtttcacataaagttcgccgatcatgtggtttgtgaggaggaattcaagtacgccatgcttgccttaaattgtatctgccccgccacatccaccctcattaccctactggtgcacacgagcagaggacagttcggcgtctgccttattggggtccgcagggaagataataaaaacatcctactgaaccccgggccacggtacattatgaatagtacagatatttgtttctacataaatattaccaaagaagagaacagtgcattcaagaatcaggaccagcagcggaagagcaacgtgtctagatccttctaccacggtccatccaggctgcccgttcactctatcattgcctctatggggacagtcgcaatcgatctgcaagatacaagctgtaggagcgccagcgggccaacactttctttgcctactgagggcagtaaagaaatcagaagaccatcaatcgcccccgtgttggaggtcgcagatacctcaagcatacagacttgtgatctgctgtctgaccagtccgaagatgagaccacccctgacgaagaaatgtcaagcaaccttgagtatgctaaggggtacccaccctattcaccatatatcggaagttctcccaccttttgccatcttctacacgagaaggttcccttctgttgtctgaggctagataagtcttgtcagcataactactacgaggacgccaaagcttatggttttaaaaacaaactgattatagtcgcagccgaaaccgctggtaatggtctgtataatttcattgtgccactgcgagcttactaccgccctaagaaggagttgaaccctattgtactcctgctggacaatcccctggatgatctactgcgatgcggagtgacctttgcggctaatatggttgtggtggataaggagtctaccatgtcagctgaggaggactacatggctgacgcgaaaaccatcgttaacgtccagacactgtttcggttattttcctctttgagcatcattaccgagttgacgcatcccgctaacatgaggtttatgcagttcagagcaaaagactgctatagcctcgctctgagcaaacttgagaagaaggagcgggaacggggatccaatttagccttcatgttccgtttacctttcgcggccgggcgtgtgttctccatttctatgctcgacactctgttgtatcagagcttcgtcaaggactacatgatctctatcacccgactgctcttgggactggataccacccctggttctgggttcctgtgctcaatgaaaatcaccgcagacgatctgtggataaggacatatgctcgactgtatcagaaactgtgctctagtactggggacgtgcccatagggatatatcgtactgagagtcagaaactgacaacaagcgaggagacctacatacttatttttctgtctcagatttctatctctgtggaagaatgggaagacacaaaagatagtaaagagcagggccatcatagatctaatcatagaaactctacttccagcgatcagagcgatcacccgctgctgcgaagaaagtcaatgcagtgggcccgccgattatcaaggaaggggccaaagcactccggtaagacagcggagaagataacacaacagcggttgaatttgtaccggcgttctgaacgccaggagctcgccgagctggtcaaaaataggatgaaacaccttggcctgagcaccgtgggatatgatgaaatgaatgatcatcagtccactttgtcctacatcttgattaacccttcccctgacacaaggatcgagctgaacgacgttgtctacctgatcaggcctgatcctcttgcataccttccgaacagtgagccaagcagacgcaatagtatttgcaacgtgactggacaagacagcagggaagaaacacagctgtag

SEQ ID NO: 106760 - DNA, 3210 bp, Artificial Sequence
  derived and/or modified sequence
atggtggacctggagagcgaggtgccccccctgcccccacgctaccgcttccgggacctgctgctgggggaccagggctggcagaatgatgacagagtgcaggtggagttctacatgaatgaaaacaccttcaaggagcggctgaagctgttcttcatcaagaaccagaggagcagcctgcgcatccgcctcttcaacttcagcctgaagctgctgagctgcctgctgtacatcatccgggtgctgctggagaaccccagccagggcaatgagtggagccacatcttctgggtgaacagaagcctgcccctgtggggcctgcaggtgtctgtggccctgatcagcctgtttgagaccatcctgctgggctacctgagctacaagggcaacatctgggagcagatcctgcgcatccccttcatcctggagatcatcaatgctgtgcccttcatcatcagcatcttctggcccagcctgaggaacctgtttgtgcctgtgttcctgaactgctggctggccaagcacgccctggagaacatgatcaatgacctgcaccgggccatccagaggacccagagcgccatgttcaaccaggtgctgatcctgatcagcaccctgctgtgcctgatcttcacctgcatctgtggcatccagcacctggagagaattggcaagaagctgaacctgtttgacagcctgtacttctgcatcgtgaccttcagcacagtgggctttggagatgtgaccccagagacctggagcagcaagctgtttgtggtggccatgatctgtgtggccctggtggtgctgcccatccagtttgagcagctggcctacctgtggatggagcggcagaagagcggcggcaactacagccgccaccgggcccagacagagaagcacgtggtgctgtgtgtgagcagcctgaagattgacctgctgatggacttcctgaatgagttctacgcccacccccggctgcaggactactacgtggtgatcctgtgccccacagagatggatgtgcaggtgagaagagtgctgcagatccccatgtggagccagagggtcatctacctgcagggcagcgccctgaaggaccaggacctgctgcgggccaagatggatgatgctgaggcctgcttcatcctgagcagccgctgtgaggtggacaggaccagcagtgaccaccagaccatcctgcgggcctgggccgtgaaggactttgcccccaactgccccctgtatgtgcagatcctgaagccagagaacaagttccacatcaagtttgctgaccacgtggtgtgtgaggaggagttcaagtatgccatgctggccctgaactgcatctgcccagccaccagcaccctcatcaccctgctggtgcacaccagccggggccagtttggagtgtgcctgattggagtgagaagagaggacaacaagaacatcctgctgaaccctggcccccgctacatcatgaacagcacagacatctgcttctacatcaacatcaccaaggaggagaacagcgccttcaagaaccaggaccagcagaggaagagcaatgtgagccgctccttctaccacggccccagccggctgcctgtgcacagcatcatcgcctccatgggcaccgtggccatcgacctgcaggacaccagctgccgcagcgccagcggccccaccctgagcctgcccacagagggcagcaaggagatcagaagacccagcatcgcccctgtgctggaggtggccgacaccagcagcatccagacctgtgacctgctgagtgaccagagtgaagatgagaccaccccagatgaggagatgagcagcaacctggagtatgccaagggctacccaccctacagcccctacatcggcagcagccccaccttctgccacctgctgcacgagaaggtgcccttctgctgcctgcggctggacaagagctgccagcacaactactatgaagatgccaaggcctacggcttcaagaacaagctgatcatcgtggccgctgagacagctggaaatggcctgtacaacttcatcgtgcccctgcgggcctactaccggcccaagaaggagctgaaccccatcgtgctgctgctggacaaccccctggatgacctgctgcgctgtggggtgacctttgctgccaacatggtggtggtggacaaggagagcaccatgtctgctgaggaggactacatggctgatgccaagaccatcgtgaatgtgcagaccctcttccgcctcttcagcagcctgagcatcatcacagagctgacccacccagccaacatgaggttcatgcagttccgggccaaggactgctacagcctggccctgagcaagctggagaagaaggagcgggagcggggcagcaacctggccttcatgttccggctgccctttgctgctggccgggtcttcagcatctccatgctggacaccctgctgtaccagagctttgtgaaggactacatgatcagcatcacccggctgctgctgggcctggacaccaccccaggcagcggcttcctgtgcagcatgaagatcacagcagatgacctgtggatccgcacctacgcccggctgtaccagaagctgtgcagcagcactggagatgtgcccatcggcatctacagaacagagagccagaagctgaccaccagcgaggagacctacatcctgatcttcctgagccagatcagcatctctgtggaggagtgggaggacaccaaggacagcaaggagcagggccaccacaggagcaaccacaggaacagcaccagcagtgaccagagcgaccaccccctgctgcggaggaagtccatgcagtgggcccggcggctgagcaggaagggccccaagcacagcggcaagacagctgagaagatcacccagcagaggctgaacctgtacagaagaagtgagcggcaggagctggccgagctggtgaagaacaggatgaagcacctgggcctgagcacagtgggctatgatgagatgaatgaccaccagagcaccctgagctacatcctgatcaaccccagcccagacaccagaattgagctgaatgatgtggtgtacctgatccggccagaccccctggcctacctgcccaacagcgagcccagcagaagaaacagcatctgcaatgtgacaggccaggacagccgggaggagacccagctgtag

SEQ ID NO: 106761 - DNA, 3210 bp, Artificial Sequence
  derived and/or modified sequence
atggtggacctggagagcgaggtgccccccctgcccccccggtacagatttcgggacctgctcctaggggatcagggctggcagaatgacgatcgcgtgcaggttgaattttacatgaacgagaatacgttcaaggagcgtctgaagcttttttttatcaagaaccaaaggtcaagcctaaggatacggctcttcaattttagcctgaaactactgagctgcctcctctatattatccgcgtcctgcttgagaacccctcacagggtaatgagtggagtcacatattttgggtcaaccgctcgcttcctctttgggggttacaggtctccgtggcactcatttctctgtttgagacaattctcctgggctacttgtcttacaaaggaaacatctgggaacagatcctgcggatcccatttatcttagaaatcatcaatgccgtgcctttcatcatttctatcttctggccgtctttgcgcaatcttttcgtgccagtattcctgaactgttggctggcgaaacatgcattggagaacatgattaacgatctgcatcgggcaattcaacggacacagtccgctatgtttaatcaggttttaatcctgatctccacccttctgtgcctcattttcacatgtatctgtgggattcagcacctggagagaattggcaagaagctcaatctatttgattcgttatacttctgtattgtgacattctcaacagtggggtttggcgacgtgacacccgaaacgtggtcctctaagcttttcgtggttgctatgatctgtgtggccttggtcgttctccccatacagttcgagcaacttgcatatctttggatggagagacagaagagcgggggcaattattctaggcacagagctcaaaccgagaagcatgttgtgctctgcgtaagctcactaaaaatcgacctcctgatggatttcctgaatgagttttacgcgcacccccgtttgcaggattattacgtcgtgattctgtgccctaccgagatggacgtgcaggttagacgcgttctccagattcccatgtggagtcaacgtgttatttacttgcagggatccgcactgaaggaccaagaccttctgcgtgccaagatggacgacgctgaagcctgcttcattctctcctcacgctgtgaagtggatcgaacttccagcgaccaccagacaattctgagagcttgggctgtgaaagacttcgcccccaattgtcctctctatgtacaaattctgaaacccgagaacaagttccatattaaatttgctgatcacgttgtgtgtgaagaggagttcaagtatgccatgctcgcactcaattgcatttgcccagcgacttctacacttatcaccctgctggttcacacatctaggggtcagtttggcgtgtgtttaataggcgtgcggcgcgaagataacaaaaacattctgctgaatcccggccccagatatattatgaactcaacggatatttgtttctacatcaatattaccaaagaagagaacagtgcctttaagaaccaggaccagcaaaggaagtcgaatgtaagccggtctttctaccacggcccctcccgtctgccagtccatagcattatcgcctcaatgggaactgtggcaatagacctgcaagataccagctgtaggtccgctagcgggcctactctgtccctgcctacagagggatccaaggagatacggcgacccagcattgcaccagtcctagaggtggctgatacaagttccatccagacctgtgatctcctctcggatcagagcgaagatgagactacacccgacgaggaaatgagcagcaatctcgagtatgccaagggttatccaccctacagcccgtatataggttcgagtcctacgttctgtcacctgctgcacgagaaggtacccttctgctgtctgcggctagacaagtcatgccagcacaactactacgaagacgcaaaggcctatggttttaaaaacaagttaataatcgtggctgccgagaccgctgggaatggactgtacaactttattgttcccctccgagcctattatcgaccgaaaaaagaactgaaccccattgttttgcttctggataatcccctggacgacctcctgaggtgtggcgtgaccttcgccgctaacatggtggttgtcgacaaagagtctaccatgtctgcagaagaagattatatggccgatgccaagacgatcgttaacgtccagacactattccggttattcagtagcttaagcatcattacggagctgactcaccccgccaacatgcggttcatgcagttccgagctaaagattgctattctcttgctcttagcaagttggagaaaaaggaacgagaacgtggaagcaatctggcttttatgtttagactgccctttgccgcgggccgcgtgttctcaatttccatgttggatacactgctgtaccagagcttcgtgaaggattatatgatttccatcacaagactgctactgggactggatacaactccaggcagtggattcctgtgttctatgaaaataacggctgacgacttatggattcgcacctatgcccggttataccagaagctttgctcatctacaggagacgtacctatcgggatctacagaaccgaaagccagaagcttaccactagtgaggagacctatatattaatcttcttgagtcagatttccatcagtgtcgaggaatgggaagataccaaggatagtaaagagcagggccaccataggagcaatcacaggaactctacaagctctgaccagtcagaccatccgcttttgagaaggaaaagcatgcagtgggcccgcagattatcccgcaaaggcccaaagcatagcggcaagaccgcagagaagatcacccaacaacggctgaacctttaccgccgctcagagagacaagagctggctgagcttgtgaagaatagaatgaagcatttgggtttgtcaacagtggggtacgatgagatgaacgaccaccagagcaccctgtcttatatcttgattaatccgagcccagatactagaattgaactcaacgatgtggtgtatctaattcggcctgacccgttggcttaccttccgaatagtgagccttctaggagaaattccatctgtaatgtcacaggtcaggactctcgagaggagactcagttgtag

SEQ ID NO: 106762 - DNA, 5753 bp, Artificial Sequence
  derived and/or modified sequence
acagcgtcttgttagtcctctccctgtactccgcaatattttctttctttctccctcctctcctccatttgttgtttgatgtttcccactctttgaggaaggatggttgatttggagagcgaagtgccccctctgcctcccaggtacaggtttcgagatttgctgctaggggaccaaggatggcaaaacgacgacagggtacaagttgaattctatatgaatgaaaatacatttaaagaaagactaaaattatttttcataaaaaaccagagatcaagtctaaggatacgcctgttcaatttttctctcaaattactaagctgcttattatacataatccgagtactactagaaaacccttcacaaggaaatgaatggtctcatatcttttgggtgaacagaagtctacctttgtggggcttacaggtttcagtggcattgataagtctgtttgaaacaatattacttggttatcttagttataagggaaacatctgggaacagattttacgaatacccttcatcttggaaataattaatgcagttcccttcattatctcaatattctggccttccttaaggaatctatttgtcccagtctttctgaactgttggcttgccaaacatgccttggaaaatatgattaatgatctacacagagccattcagcgtacacagtctgcaatgtttaatcaagttttgattttaatatctacattactatgccttatcttcacctgcatttgtgggatccaacatctggaacgaataggaaagaagctgaatctctttgactccctttatttctgcattgtgacgttttctactgtgggcttcggggatgtcactcctgaaacatggtcctccaagctttttgtagttgctatgatttgtgttgctcttgtggttctacccatacagtttgaacagctggcttatttgtggatggagagacaaaagtcaggaggaaactatagtcgacatagagctcaaactgaaaagcatgtcgtcctgtgtgtcagctcactgaagattgatttacttatggattttttaaatgaattctatgctcatcctaggctccaggattattatgtggtgattttgtgtcctactgaaatggatgtacaggttcgaagggtactgcagattccaatgtggtcccaacgagttatctaccttcaaggttcagcccttaaagatcaagacctattgagagcaaagatggatgacgctgaggcctgttttattctcagtagccgttgtgaagtggataggacatcatctgatcaccaaacaattttgagagcatgggctgtgaaagattttgctccaaattgtcctttgtatgtccagatattaaagcctgaaaataaatttcacatcaaatttgctgatcatgttgtttgtgaagaagagtttaaatacgccatgttagctttaaactgtatatgcccagcaacatctacacttattacactactggttcatacctctagagggcagtttggcgtctgcttgattggtgttaggagggaggataataaaaacattttgctgaatccaggtcctcgatacattatgaattctacagacatatgcttttatattaatattaccaaagaagagaattcagcatttaaaaaccaagaccagcagagaaaaagcaatgtgtccaggtcgttttatcatggaccttccagattacctgtacatagcataattgccagcatgggtactgtggctatagacttgcaagatacaagctgtagatcagcaagtggccctaccctgtctcttcctacagagggaagcaaagaaataagaagacctagcattgctcctgttttagaggttgcagatacatcatcgattcaaacatgtgatcttctaagtgaccaatcagaagatgaaactacaccagatgaagaaatgtcttcaaacttagagtatgctaaaggttacccaccttattctccatatataggaagttcacccactttttgtcatctccttcatgaaaaagtaccattttgctgcttaagattagacaagagttgccaacataactactatgaggatgcaaaagcctatggattcaaaaataaactaattatagttgcagctgaaacagctggaaatggattatataactttattgttcctctcagggcatattatagaccaaagaaagaacttaatcccatagtactgctattggataaccccctagatgacttactcaggtgtggagtgacttttgctgctaatatggtggttgtggataaagagagcaccatgagtgccgaggaagactacatggcagatgccaaaaccattgtgaacgtgcagacactcttcaggttgttttccagtctcagtattatcacagagctaactcaccccgccaacatgagattcatgcaattcagagccaaagactgttactctcttgctctttcaaaactggaaaagaaagaacgggagagaggctctaacttggcctttatgtttcgactgccttttgctgctgggagggtgtttagcatcagtatgttggacactctgctgtatcagtcatttgtgaaggattatatgatttctatcacgagacttctgttgggactggacactacaccaggatctgggtttctttgttctatgaaaatcactgcagatgacttatggatcagaacttatgccagactttatcagaagttgtgttcttctactggagatgttcccattggaatctacaggactgagtctcagaaacttactacatctgaggaaacatacattttaatatttttatctcaaatatctatcagtgtagaagagtgggaagacaccaaagactccaaagaacaagggcaccaccgcagcaaccaccgcaactcaacatccagtgatcagtcggaccatcccttgctgcggagaaaaagcatgcagtgggcccgaagactgagcagaaaaggcccaaaacactctggtaaaacagctgaaaaaataacccagcagcgactgaacctctacaggaggtcagaaagacaagagcttgctgaacttgtgaaaaatagaatgaaacacttgggtctttctacagtgggatatgatgaaatgaatgatcatcaaagtaccctctcctacatcctgattaacccatctccagataccagaatagagctgaatgatgttgtatacttaattcgaccagatccactggcctaccttccaaacagtgagcccagtcgaagaaacagcatctgcaatgtcactggtcaagattctcgggaggaaactcaactttgataaaaataaaatgagaaacttttttcctacaaagaccttgcttgaaaccacaaaagttttgctggcacgaaagaaactagatggaaatatatgtaattctctcatatttaaaaacgtaatctcttctcttagaagtatagatcattttgaaacttaatgtactacttactggtactctccctattaatatttgaaggacctcaatggaataaatttgaaaagctaaattaaaatacaaaaatttaaatctgacatttaattgttttataataatccaaactctatgaaagcaattttaaaaattattaaggttttatgaagttgacaaaatctaactatatttggtgcatcacaatggacacagaatgctgctgctcctcttaaaaattaaatgtgtcatattatattctttaaacttactgttttacaaaattgagctcatcgtaaatgtctagtcttctcacatagagattaaccaacaaacttgtgtggctgacttttgtgtaagaatcatagtttgctttagaatacaaatctttaagtcattttaacttttttttctgccttacgatataaaaatatttatcttagaatttgagatgttcatagcatgttttattacattgaagaaactaaaacataaatgaaaagaaacactaggttcctgcactttttggtaactttatgtctagcaaatattttatgccaagaaaagcatactataaagcaaatatctattattctcctaaacgaatgcctagcatagagaaaatacttaatacacatttgttgacttaaatttaattcaaggattgaaaaattaactggatatcttgaaatatacagtaatgattgtccttagactcttgaactttaccatctttcctattcatatatctatatagtaaatttcactagaaaaattcttttaaaattgacagaagataatttataccttttatggactctgaagacacttcaaaacattaaaagtccttatgtctttggtaatgaaacaataacactcaatgaaggatgtattaaaatttttgacttaattttgaaatcgtatatatgagctatactttaacattatgagagaaaagcataaaacaaaaataggtagttcttggcttttaacattaatgcaaatcatgcagaatttgagttataaatttaaatataaattgaccattgatgatatccagtttttcattttttacctgtattgcattttccccctagagaaatagatcaaaagagcacaagagtatgcgtacatagtttaccaggtagtagaagtgtgttaaaatgttcctgtaaaagaaacattggtaaatttaaatacatactgttctaattttgtattttttaatttttgaatttgacattgagtttaattcagcaacaacaaaaaatacatataaaactagaaagggactttttttcctttcttttcataatgaagcagatcaacttaaaggataataaaatttttaaagaaaagatattctaatgtactctcaataattctacagaaataaaactgtaaagtgcaatgtgaaatcaaagattatagtcattgtataatttggcttggaggctatgaaatgtctttttttctttttggtattttacattattcacattttagaataacaagaacaccaagaattacccctaaaacagagaccctgtatttaatctactttgatcagagaagtagaatttataacaggttagctaaaattgggagcatgccttaaaacttaaagattgtatgcatatatgtgtatatgttataaacgtgaaatatatttgacacacacattcacatataaattgttaaaaactgaaggcagaatggaactaatatatgtaacagagaaaaacaataaattttatgaacttgttttatatttgcatatcaagagtcaagtatgatgtttctttaagttgactttttttacttcattatttttaggaataaatgtaagattttacaaatcttttatttccccacaagatctgaagtttggtatttttgcattatgacagttgttgagactaggattttaagctaggatatgattatatttcctatataactaaaaattttgtttcataaattttaaaataattatttttgactatgaacattagtccaaatttaatatttgacacagttcataccagcttgctacaataatgataatttattagtctttctgttatttaaagaataaaaacatgcttataaaagacttttaatgaaatgttgcctttttaaaataattatacttgcacatgaaaataaaatataaagtcaataatagtccttgtagcccaatgggaattgattctgtttattgtctgtaccattttgctaccagttacattgaactgctttaaaataaataataaaattatttctaatgatg

SEQ ID NO: 106763 - DNA, 3210 bp, Artificial Sequence
  derived and/or modified sequence
atggtggacctcgaatcggaagtgccaccactcccaccccgatatcggtttagagatctcctgctgggggatcagggctggcagaatgatgatagggtgcaagttgaattttatatgaacgagaataccttcaaagagaggctcaaactatttttcataaagaatcagcgctcctccctacgtatacgtctctttaacttttctctgaaactcttgtcctgcctcttgtacataatccgggtcctcctcgagaacccatcgcagggtaatgagtggtctcacattttttgggtgaacagatccctgccactctgggggcttcaggtttcagttgccttgatttccctgtttgagaccatcctgcttggatacctgagttacaagggcaacatttgggaacagattttgcgcatcccattcattctggagatcatcaacgccgtgccttttatcatcagcatcttttggccatcattacgtaatctgttcgtcccagtctttctgaactgttggctagccaaacacgctttggaaaatatgattaatgacttacatcgagccattcagaggactcaatctgccatgtttaatcaggttttgatcctcatatctactctgctctgcctgatcttcacctgcatttgcggtattcagcatctcgagaggatcggcaagaaactgaacctgtttgattcattgtacttttgcatcgtgaccttcagtacggtgggattcggcgatgtgactcccgaaacttggtcctccaaactattcgtagttgccatgatttgcgttgcactggtggtactgcctattcagtttgaacaattagcttatctgtggatggagcgccagaaatcaggtggaaactattcacgccatcgggcacagactgaaaaacacgtggtgctttgcgtgagcagcctcaaaatcgatctcctgatggacttcctgaacgagttttacgctcatccgcgactgcaggattactatgtagtcattctttgccctaccgagatggacgtgcaagtgagacgggtactgcagattccaatgtggagtcagcgcgtgatctatttgcaggggagtgcacttaaggaccaagatctgttgcgtgcaaaaatggatgatgccgaggcttgttttatcctgtcttctagatgcgaagtcgatcggacctccagcgaccatcagacgatcctaagagcctgggccgtgaaggacttcgctcccaactgtcctctttatgtccagatcctcaagccagagaacaaattccacattaaatttgcagatcacgtagtctgcgaagaggagtttaagtatgccatgctggcgctgaactgcatttgtccggctacaagcaccttaattaccttgctcgtccatacgtcaaggggccaatttggcgtgtgtctgattggtgtgagaagggaagacaacaagaacattttgctgaaccctggaccgaggtatatcatgaactcaaccgatatttgtttctacataaacattacaaaggaggaaaattctgcttttaaaaatcaagaccagcagcggaagtcaaacgtttctcgaagtttctatcacggaccaagcaggctgcctgtgcattccattattgccagcatgggaactgtagcaatcgatctccaagacacatcctgcaggtcggcctcgggcccaaccctgagtctccctaccgaaggatctaaggaaattcgccgacctagcattgctcccgtactagaggttgctgacacttcctcaattcaaacttgtgaccttctgtccgaccagagcgaggacgaaacaacccccgatgaggagatgtcatcaaacctagaatatgccaaggggtatccaccctactccccatacataggctcttctcccactttttgccacctgttgcacgaaaaagtgcccttctgctgtttgcggctggacaagtcttgccagcataattactacgaggacgccaaagcctatggctttaaaaataagctcattatcgtagcggcagaaacagcgggaaacgggttgtataacttcatcgtgccactgagggcctattaccggccaaagaaagagctgaaccctatcgtgctactccttgacaacccacttgatgatctgctacgctgcggcgtaaccttcgctgccaatatggtggtggtggataaggagtccactatgagtgccgaagaagattacatggccgacgcaaagactattgtgaacgtacaaaccctcttccgcctcttcagtagtctctcaatcattactgagctcacgcacccagccaacatgcgatttatgcaatttagggccaaggattgctattctctggcgctgtctaaactcgagaagaaagaacgcgaaagaggaagcaatctggcatttatgtttcggttaccattcgccgcagggcgagtattttccatttctatgctggacaccctcctctaccagtctttcgtgaaagactatatgatcagcataacccgcctccttctggggctggatacgaccccagggtcgggtttcctttgctccatgaaaatcaccgcggacgatttatggatacggacttacgccagactctatcaaaaactgtgtagttccactggcgatgttcccatcggaatctatcggactgagagccagaaactgacaacttctgaagagacatacattttaattttcctgtcacaaattagcatcagcgtcgaggagtgggaggacacaaaggacagtaaggaacagggtcatcatagatcaaaccacagaaattccacctcctccgaccaaagtgaccaccctctgctccgcaggaagagcatgcagtgggcacgcagacttagccgcaaaggtcccaagcatagcggaaaaaccgcagaaaaaatcacacagcagcgtctgaatttgtatcggaggtccgaaagacaggaactggccgagcttgtgaaaaaccgcatgaagcatttgggcttgagcacagtcggttacgacgaaatgaacgatcaccagtcgactctatcttatatcctgataaatccctctccagatacccgcatcgagctgaacgatgtcgtttacttaatacgaccagaccccctcgcatatttaccgaattcggagcctagccggcgaaacagcatttgtaatgtgacaggacaggactcacgcgaagagacccagctgtag

SEQ ID NO: 106764 - DNA, 3210 bp, Artificial Sequence
  derived and/or modified sequence
atggtggacctggagagcgaggtgccccccctgccccccagatacagattcagagacctgctgctgggcgaccagggctggcagaacgacgacagagtgcaggtggagttctacatgaacgagaacaccttcaaggagagactgaagctgttcttcatcaagaaccagagaagcagcctgagaatcagactgttcaacttcagcctgaagctgctgagctgcctgctgtacatcatcagagtgctgctggagaaccccagccagggcaacgagtggagccacatcttctgggtgaacagaagcctgcccctgtggggcctgcaggtgagcgtggccctgatcagcctgttcgagaccatcctgctgggctacctgagctacaagggcaacatctgggagcagatcctgagaatccccttcatcctggagatcatcaacgccgtgcccttcatcatcagcatcttctggcccagcctgagaaacctgttcgtgcccgtgttcctgaactgctggctggccaagcacgccctggagaacatgatcaacgacctgcacagagccatccagagaacccagagcgccatgttcaaccaggtgctgatcctgatcagcaccctgctgtgcctgatcttcacctgcatctgcggcatccagcacctggagagaatcggcaagaagctgaacctgttcgacagcctgtacttctgcatcgtgaccttcagcaccgtgggcttcggcgacgtgacccccgagacctggagcagcaagctgttcgtggtggccatgatctgcgtggccctggtggtgctgcccatccagttcgagcagctggcctacctgtggatggagagacagaagagcggcggcaactacagcagacacagagcccagaccgagaagcacgtggtgctgtgcgtgagcagcctgaagatcgacctgctgatggacttcctgaacgagttctacgcccaccccagactgcaggactactacgtggtgatcctgtgccccaccgagatggacgtgcaggtgagaagagtgctgcagatccccatgtggagccagagagtgatctacctgcagggcagcgccctgaaggaccaggacctgctgagagccaagatggacgacgccgaggcctgcttcatcctgagcagcagatgcgaggtggacagaaccagcagcgaccaccagaccatcctgagagcctgggccgtgaaggacttcgcccccaactgccccctgtacgtgcagatcctgaagcccgagaacaagttccacatcaagttcgccgaccacgtggtgtgcgaggaggagttcaagtacgccatgctggccctgaactgcatctgccccgccaccagcaccctgatcaccctgctggtgcacaccagcagaggccagttcggcgtgtgcctgatcggcgtgagaagagaggacaacaagaacatcctgctgaaccccggccccagatacatcatgaacagcaccgacatctgcttctacatcaacatcaccaaggaggagaacagcgccttcaagaaccaggaccagcagagaaagagcaacgtgagcagaagcttctaccacggccccagcagactgcccgtgcacagcatcatcgccagcatgggcaccgtggccatcgacctgcaggacaccagctgcagaagcgccagcggccccaccctgagcctgcccaccgagggcagcaaggagatcagaagacccagcatcgcccccgtgctggaggtggccgacaccagcagcatccagacctgcgacctgctgagcgaccagagcgaggacgagaccacccccgacgaggagatgagcagcaacctggagtacgccaagggctaccccccctacagcccctacatcggcagcagccccaccttctgccacctgctgcacgagaaggtgcccttctgctgcctgagactggacaagagctgccagcacaactactacgaggacgccaaggcctacggcttcaagaacaagctgatcatcgtggccgccgagaccgccggcaacggcctgtacaacttcatcgtgcccctgagagcctactacagacccaagaaggagctgaaccccatcgtgctgctgctggacaaccccctggacgacctgctgagatgcggcgtgaccttcgccgccaacatggtggtggtggacaaggagagcaccatgagcgccgaggaggactacatggccgacgccaagaccatcgtgaacgtgcagaccctgttcagactgttcagcagcctgagcatcatcaccgagctgacccaccccgccaacatgagattcatgcagttcagagccaaggactgctacagcctggccctgagcaagctggagaagaaggagagagagagaggcagcaacctggccttcatgttcagactgcccttcgccgccggcagagtgttcagcatcagcatgctggacaccctgctgtaccagagcttcgtgaaggactacatgatcagcatcaccagactgctgctgggcctggacaccacccccggcagcggcttcctgtgcagcatgaagatcaccgccgacgacctgtggatcagaacctacgccagactgtaccagaagctgtgcagcagcaccggcgacgtgcccatcggcatctacagaaccgagagccagaagctgaccaccagcgaggagacctacatcctgatcttcctgagccagatcagcatcagcgtggaggagtgggaggacaccaaggacagcaaggagcagggccaccacagaagcaaccacagaaacagcaccagcagcgaccagagcgaccaccccctgctgagaagaaagagcatgcagtgggccagaagactgagcagaaagggccccaagcacagcggcaagaccgccgagaagatcacccagcagagactgaacctgtacagaagaagcgagagacaggagctggccgagctggtgaagaacagaatgaagcacctgggcctgagcaccgtgggctacgacgagatgaacgaccaccagagcaccctgagctacatcctgatcaaccccagccccgacaccagaatcgagctgaacgacgtggtgtacctgatcagacccgaccccctggcctacctgcccaacagcgagcccagcagaagaaacagcatctgcaacgtgaccggccaggacagcagagaggagacccagctgtag

SEQ ID NO: 106765 - DNA, 1434 bp, Artificial Sequence
  derived and/or modified sequence
atggcccacaaccccaacatgacccacctgaagatcaacctgcccgtgaccgccctgccccccctgtgggtgagatgcgacagcagcgaccccgagggcacctgctggctgggcgccgagctgatcaccaccaacaacagcatcaccggcatcgtgctgtacgtggtgagctgcaaggccgacaagaactacagcgtgaacctggagaacctgaagaacctgcacaagaagagacaccacctgagcaccgtgaccagcaagggcttcgcccagtacgagctgttcaagagcagcgccctggacgacaccatcaccgccagccagaccgccatcgccctggacatcagctggagccccgtggacgagatcctgcagatcccccccctgagcagcaccgccaccctgaacatcaaggtggagagcggcgagcccagaggccccctgaaccacctgtacagagagctgaagttcctgctggtgctggccgacggcctgagaaccggcgtgaccgagtggctggagcccctggaggccaagagcgccgtggagctggtgcaggagttcctgaacgacctgaacaagctggacggcttcggcgacagcaccaagaaggacaccgaggtggagaccctgaagcacgacaccgccgccgtggacagaagcgtgaagagactgttcaaggtgagaagcgacctggacttcgccgagcagctgtggtgcaagatgagcagcagcgtgatcagctaccaggacctggtgaagtgcttcaccctgatcatccagagcctgcagagaggcgacatccagccctggctgcacagcggcagcaacagcctgctgagcaagctgatccaccagagctaccacggcaccatggacaccgtgagcctgagcggcaccatccccgtgcagatgctgctggagatcggcctggacaagctgaagaaggactacatcagcttcttcatcggccaggagctggccagcctgaaccacctggagtacttcatcgcccccagcgtggacatccaggagcaggtgtacagagtgcagaagctgcaccacatcctggagatcctggtgagctgcatgcccttcatcaagagccagcacgagctgctgttcagcctgacccagatctgcatcaagtactacaagcagaaccccctggacgagcagcacatcttccagctgcccgtgagacccaccgccgtgaagaacctgtaccagagcgagaagccccagaagtggagagtggagatctacagcggccagaagaagatcaagaccgtgtggcagctgagcgacagcagccccatcgaccacctgaacttccacaagcccgacttcagcgagctgaccctgaacggcagcctggaggagagaatcttcttcaccaacatggtgacctgcagccaggtgcacttcaagtag

SEQ ID NO: 106766 - DNA, 1434 bp, Artificial Sequence
  derived and/or modified sequence
atggctcacaatcctaacatgacacacctcaagatcaacctccccgtcacagccttacctcctttgtgggtgcgatgcgacagctcggacccggagggcacgtgttggttgggggccgagttgattactaccaataattctataaccgggatagttttgtatgttgtgtcatgcaaggccgacaaaaattattcggtgaacctcgagaacctgaagaacttgcacaagaagcgccaccatctttccactgtgaccagtaagggttttgctcaatacgaactgtttaagtcctctgctctggacgataccattaccgcatctcaaacagccattgctctggacatatcttggagccctgttgatgagatcctgcagattcccccgctgtcgtcaaccgctactctcaacatcaaagttgagtccggtgagccccgcggccctcttaaccatctctaccgggaattgaagttcctactcgtgctcgccgacggactgaggactggggtgacggagtggctggagccactggaagctaagagcgccgttgaactggtgcaggaattcttgaacgaccttaacaagctggacggtttcggggacagcaccaagaaggacaccgaagtcgaaacactgaaacacgacacagctgctgtggatagatcggtgaagcgtctcttcaaggtaaggtcagaccttgacttcgccgaacagctttggtgcaaaatgagctcatcggtcatatcctaccaggacttagtgaagtgttttactctcatcattcagtcactacagcgtggagatatccagccctggcttcactcggggagcaattccttgctgagcaaactaatccatcagtcttatcacgggacgatggataccgtcagcttatctgggaccatccccgtgcagatgctcctagaaattggcctggacaaactcaaaaaggattatatttcatttttcattggccaggagctggcctcactcaatcacctggagtattttatagcgccttcagttgacatacaagagcaagtctatagagtacagaaactgcaccatatcctggaaattctcgtcagctgtatgcctttcatcaagtctcagcatgaactactgttttcacttacccaaatctgcatcaaatattacaaacaaaaccctcttgacgagcaacatatctttcaacttcccgtccgccccactgcagtgaaaaacctttatcaatcagaaaagccacagaaatggagggtggaaatctatagcggacaaaaaaagatcaagaccgtctggcagctcagtgactcgagccctatagatcaccttaactttcataaaccagatttttccgaactgaccttaaacgggagccttgaggagcgcattttcttcaccaacatggtgacttgttctcaggtgcatttcaagtag

SEQ ID NO: 106767 - DNA, 1434 bp, Artificial Sequence
  derived and/or modified sequence
atggcccacaatcccaacatgacccacctcaagataaatctgccggtcacagccctcccacccctttgggtcaggtgtgatagttctgatcctgaagggacctgctggcttggcgcagagcttataacaacaaataactcaatcacagggattgtcttatacgtggtgagctgcaaggccgacaagaactacagtgtcaacttggagaatttaaaaaacttgcacaagaagcggcaccacctgagtaccgtcacgtccaagggattcgcccaatatgagctatttaagtcaagcgcactcgatgacaccatcacagccagtcagaccgccattgcgctggatatttcatggtcacccgtcgatgagatactacagatccccccactttcaagcactgctactctcaacatcaaagttgagtcaggtgaaccccgtggccccctgaatcacttatacagagaactgaaatttcttctggtgctggccgacggccttaggaccggagtgaccgaatggctcgagcctcttgaagcaaaatccgctgttgagcttgtgcaggagtttttgaacgacctgaataaactggatggatttggagattctaccaaaaaggacacagaagtggaaacgttaaaacacgatacagcagcagttgacaggagcgtcaagaggctgttcaaggtgagaagcgatttggacttcgccgaacagctgtggtgcaagatgagtagctcagtcatctcatatcaagatctagtgaaatgcttcactcttataatccagtccctgcagcggggagacattcagccctggctgcattctgggtctaacagtctcttaagtaaactgatccaccagagctatcacggtaccatggataccgtgagcctctccggcacgattcctgtgcaaatgctgcttgagatcggactcgataaattgaagaaagactacataagctttttcatcggccaggagctcgccagcttaaaccacctggaatactttattgctccatccgtagatattcaggaacaggtttatagggtgcagaagctgcaccacattttggagattctggtgtcttgcatgcccttcatcaagtcccagcatgaactgctcttcagcctgactcaaatatgcattaaatactacaaacagaaccctcttgatgagcagcatattttccagctgcccgtgcgccccacagccgtgaaaaatctctatcagtcggagaagccacagaagtggagagtggagatctactccgggcaaaagaagattaagacagtgtggcagctgagcgacagctccccaatagaccatcttaattttcacaagcctgacttttccgaactaacactcaacggctccctggaagagcgcatcttcttcactaacatggtgacctgctctcaggtgcactttaagtag

SEQ ID NO: 106768 - DNA, 1434 bp, Artificial Sequence
  derived and/or modified sequence
atggcccacaaccccaacatgacccacctgaagatcaacctgcctgtgacagccctgccccccctgtgggtgcgctgtgacagcagtgaccctgagggcacctgctggctgggcgctgagctgatcaccaccaacaacagcatcactggaattgtgctgtatgtggtgtcctgcaaggctgacaagaactacagcgtgaacctggagaacctgaagaacctgcacaagaagaggcaccacctgagcacagtgaccagcaaaggatttgcccagtatgagctgttcaagagcagcgccctggatgacaccatcacagccagccagacagccatcgccctggacatctcctggagccctgtggatgagatcctgcagatcccccccctgagcagcacagccaccctgaacatcaaggtggagagcggggagccccggggccccctgaaccacctgtaccgggagctgaagttcctgctggtgctggctgatggcctgaggactggagtgacagagtggctggagcccctggaggccaagtctgctgtggagctggtgcaggagttcctgaatgacctgaacaagctggatggctttggagacagcaccaagaaggacacagaggtggagaccctgaagcatgacacagctgctgtggacagatctgtgaagaggctcttcaaggtgcggagtgacctggactttgctgagcagctgtggtgcaagatgagcagcagcgtcatctcctaccaggacctggtgaagtgcttcaccctcatcatccagagcctgcagagaggagacatccagccctggctgcacagcggcagcaacagcctgctgagcaagctgatccaccagagctaccacggcaccatggacacagtgtccctgagcggcaccatccctgtgcagatgctgctggagatcggcctggacaagctgaagaaggactacatctccttcttcatcggccaggagctggccagcctgaaccacctggagtacttcatcgcccccagcgtggacatccaggagcaggtgtacagagtgcagaagctgcaccacatcctggagatcctggtgtcctgcatgcccttcatcaagagccagcacgagctgctcttcagcctgacccagatctgcatcaagtactacaagcagaaccccctggatgagcagcacatcttccagctgcctgtgcggcccacagctgtgaagaacctgtaccagagcgagaagccccagaagtggagggtggagatctacagcggccagaagaagatcaagacagtgtggcagctgagtgacagcagccccatcgaccacctgaacttccacaagccagacttcagcgagctgaccctgaatggcagcctggaggagcgcatcttcttcaccaacatggtgacctgcagccaggtgcacttcaagtag

SEQ ID NO: 106769 - DNA, 1434 bp, Artificial Sequence
  derived and/or modified sequence
atggcccacaaccccaacatgacccacctgaagatcaacctgcccgtcacagccctcccgcctttatgggtgcgttgcgactcgtcagacccggaggggacatgctggctgggagctgagctgatcaccacaaacaactccatcacagggattgtgctgtacgtggtgagctgtaaagctgacaagaattattccgtcaatctagaaaatctcaaaaatctgcataagaagaggcaccacttatccaccgtaacaagcaaaggctttgcccagtacgagctgtttaagagctccgccctggacgacacaatcacggcctcacagacagcaatcgccctggacatcagttggtcccccgtcgacgaaatactccagattccccctctgtcctctaccgcaacgctgaacatcaaggtagagtccggggaaccgagaggacctctcaatcacctttacagagagctcaaattccttctggtgctagcagatggcctcagaaccggtgttacagaatggcttgaacccttagaggccaagagcgcagtagagctggtgcaggagtttttgaacgatctgaataaactggatgggtttggagattctaccaagaaagatactgaagttgagacactcaagcacgatacggccgcagtggatcggagtgttaagcggctctttaaagtgagaagcgatctggactttgctgaacagctgtggtgcaaaatgtcatcctctgtcattagttatcaggatctggtgaaatgcttcacgctcatcatccagtccctccagcgcggcgacatacaaccctggctacattctggctccaactctttactctctaaactaatccaccagtcttaccacgggaccatggacactgtcagcctcagcgggactatcccagtccagatgcttcttgagattggattggataaactgaagaaggattacatcagcttctttataggacaagagctggcttccctaaaccacctggaatattttatcgccccttccgtggacattcaggagcaggtataccgcgtccagaaactgcatcacatcctggagattctcgtgtcttgtatgcccttcattaaatcccaacacgaactgctcttttctttaacccagatttgcatcaaatactataaacaaaatcctctagatgaacagcatatcttccagctcccggtgagaccgaccgccgtcaagaatctttatcagtctgagaaaccacaaaaatggcgggtggagatctactctggccagaagaaaatcaaaacagtgtggcagttatcggattcatcacctatagaccacctcaacttccacaagcctgatttttccgagctcactcttaatggatctcttgaagaaagaattttctttactaacatggtgacctgctcgcaggttcactttaaatag

SEQ ID NO: 106770 - DNA, 1434 bp, Artificial Sequence
  derived and/or modified sequence
atggcccacaaccccaacatgacccacctgaagatcaacctgcccgtcacggctctaccgccactatgggtccggtgcgactcatccgatcccgaaggcacatgctggctgggagcagagttaatcacaaccaacaattcaattaccggaatcgtgctgtatgtggtaagctgcaaggctgacaaaaactattcagtgaatcttgaaaacttaaagaatctgcataaaaagaggcaccacctgagcacagtgacatcgaagggtttcgctcagtacgaactgtttaaaagtagcgcattggacgacactataaccgcatcccagacggcgatcgcactggacatctcctggtctcccgtggacgagattctgcagatcccacccctgtcttctaccgctaccctgaatatcaaggtggaatctggggaacctcggggaccactgaaccatctgtaccgggaacttaagtttctattggtgctcgctgatggtctccgaacaggcgtcaccgagtggctcgaaccgctggaggccaagtccgcagttgagctggtgcaggagttccttaatgatctgaacaagctcgatgggttcggtgacagcaccaagaaggacacagaagtggaaactttgaaacacgatacagcagctgttgatcgctccgtgaagcggttgttcaaggtacgaagcgacttagactttgccgaacagttgtggtgtaagatgtcttcctctgtcatttcttaccaagatctcgtgaaatgctttacgctgatcattcagagccttcagcgcggggatatccaaccgtggctgcatagtggaagtaactcattactgagcaaacttatccaccagtcttatcatggcacgatggacacggtgagcttatccgggactatccctgttcaaatgcttctggaaatcggactcgataaattaaagaaggactatatctccttttttatcggtcaggagctggcctctctgaatcacctcgagtatttcattgcgccatccgtggacatccaggagcaggtttatcgggtgcagaagctgcatcatatactggagatcctggtgagttgcatgccttttataaaaagccagcatgaactgttgttttctctgacacagatttgcattaaatactacaagcaaaatccactggacgaacaacacatcttccagctgcctgtgaggccaacagcggtcaagaacttgtaccagtcagagaaaccccaaaagtggcgcgttgaaatctacagcgggcagaagaagattaagacagtctggcaacttagcgattccagccccatagaccacctcaatttccacaagcccgactttagcgaactaacactcaacgggtcgctggaagagagaattttctttacaaatatggtgacgtgctcacaggtccatttcaagtag

SEQ ID NO: 106771 - DNA, 1434 bp, Artificial Sequence
  derived and/or modified sequence
atggcccataaccctaacatgacgcatctcaagatcaacctaccagttaccgcgcttcctccactctgggtgcggtgtgacagctctgatcctgagggcacatgctggctgggggcagaactcatcacaaccaataacagcatcacaggaatcgttctatatgtggtgagctgcaaggcggataaaaattactccgtgaacctcgagaatcttaaaaacctgcacaaaaaaaggcaccacctttcaaccgtgaccagcaaggggtttgcccagtacgagctgtttaaatccagcgctctggatgatactatcacagcctcgcagacagccattgccttggatatatcttggtccccagttgacgaaatcttacagattccacctctgagttctactgctacactgaacataaaggtcgagtcaggagaacctcggggacctctgaatcacttgtaccgcgaattaaagtttttactggttcttgcagacggattgaggacaggagtgacagagtggctcgaaccactcgaggcaaaatctgcggtggagcttgtccaggagttccttaatgatcttaacaagcttgatggcttcggggatagcacaaaaaaggacacagaagttgaaaccctgaaacatgatacagcggctgtggacaggtcagtgaagaggctgttcaaggttcgatctgacctagattttgctgaacagctctggtgtaagatgtccagttctgtcataagttatcaggacctggtcaagtgttttactttaataatccagtccttacagagaggtgacatacagccatggctgcatagtggatcaaacagcttactaagcaagctcatccaccagtcctaccacggaaccatggatacagtttccctgtcagggaccatccctgtgcaaatgttgctcgagattgggctagacaagctgaagaaggattatatttcttttttcattggccaggaacttgcctctctcaaccaccttgagtactttatcgcaccatccgtggatatccaagagcaggtgtacagagtgcagaagctacaccatattctggaaattctggtgtcttgcatgccattcataaagagtcagcacgaattgctgttttcactcacccagatttgtatcaagtactacaaacagaatcctttggatgagcagcatatttttcagcttcccgtgaggcccaccgctgttaaaaatctctaccagagcgagaaaccccagaagtggcgtgtcgagatttattctggtcaaaaaaagataaagactgtgtggcaactgtcagattcaagccctattgatcatctgaactttcataagcctgatttttctgaactgaccctgaacggaagtctcgaggagaggatctttttcactaatatggtcacatgttcgcaggtgcatttcaagtag

SEQ ID NO: 106772 - DNA, 1434 bp, Artificial Sequence
  derived and/or modified sequence
atggctcataaccccaacatgacccatttgaagataaatctgcctgtaactgcgctcccacctctgtgggttcgatgcgacagttctgatccagaaggaacttgttggctcggcgctgagctgatcacaactaacaacagcattacgggtatcgtcttatatgtcgtttcttgtaaagccgacaagaattactctgtcaacctagagaaccttaagaatcttcacaagaaaagacaccacctctcaactgtcacgtcaaagggctttgcccagtacgagctgtttaagtcatccgccctagacgataccatcacagcgagccagacagcgatcgcgctggacatcagctggtcccccgtagatgagatcttgcagatccctcctttgagttccacggcaacactcaacataaaagtcgaatcaggagagccccgaggaccacttaatcatttgtacagggagctgaagttccttttagtgcttgccgacggtttgaggacaggggtaactgagtggctagaaccattggaggcaaagtccgccgtagagcttgtgcaggagtttctaaacgacctgaacaaactggatgggttcggagacagtacaaagaaagatactgaagttgaaacgctgaaacacgacaccgccgctgtggaccgtagtgttaagaggctatttaaagtgagaagtgacctcgattttgccgaacagctgtggtgtaagatgtcaagctctgtgatctcttaccaggatcttgtgaagtgttttactttgataatccaatctttacagcggggtgacattcaaccttggcttcactctggttccaatagcctgctgtctaagctgatccatcagtcctatcacggaaccatggacaccgtgtctttgtctggaaccattcctgtgcagatgctgctagagatagggcttgacaagctgaagaaagactacatttcctttttcatcggacaggagctggctagcttaaaccacttggagtattttattgccccttctgtagatattcaggagcaagtgtatagggtccagaaactgcaccacatcctcgagatccttgtctcttgtatgccttttatcaaaagtcagcacgaactcctgttctctctgacacagatctgcatcaaatactataaacagaatcctctggatgaacagcatatattccaactaccagtacgccctaccgcagtgaaaaacctgtaccagtcagaaaaacctcaaaaatggcgcgtggagatatactcgggccagaagaaaattaagaccgtttggcagctgagtgatagttcaccaattgaccacttaaattttcacaagccggacttctccgagctcaccctgaatggctcgctggaggaacggatcttttttacgaacatggttacttgtagtcaggtccatttcaaatag

SEQ ID NO: 106773 - protein, 871 aa, Artificial Sequence
  derived and/or modified sequence
MERYKALEQLLTELDDFLKILDQENLSSTALVKKSCLAELLRLYTKSSSSDEEYIYMNKVTINKQQNAESQGKAPEEQGLLPNGEPSQHSSAPQKSLPDLPPPKMRILTLGQISGAQSFSPDGTHLTGTEFLGGWSWRPSQIRLMSPGTHWGDLTATEIPERKQLAIPKTESPEGYYEEAEPYDTSLNEDGEAVSSSYESYDEEDGSKGKSAPYQWPSPEAGIELMRDARICAFLWRKKWLGQWAKQLCVIKDNRLLCYKSSKDHSPQLDVNLLGSSVIHKEKQVRKKEHKLKITPMNADVIVLGLQSKDQAEQWLRVIQEVSGLPSEGASEGNQYTPDAQRFNCQKPDIAEKYLSASEYGSSVDGHPEVPETKDVKKKCSAGLKLSNLMNLGRKKSTSLEPVERSLETSSYLNVLVNSQWKSRWCSVRDNHLHFYQDRNRSKVAQQPLSLVGCEVVPDPSPDHLYSFRILHKGEELAKLEAKSSEEMGHWLGLLLSESGSKTDPEEFTYDYVDADRVSCIVSAAKNSLLLMQRKFSEPNTYIDGLPSQDRQEELYDDVDLSELTAAVEPTEEATPVADDPNERESDRVYLDLTPVKSFLHGPSSAQAQASSPTLSCLDNATEALPADSGPGPTPDEPCIKCPENLGEQQLESLEPEDPSLRITTVKIQTEQQRISFPPSCPDAVVATPPGASPPVKDRLRVTSAEIKLGKNRTEAEVKRYTEEKERLEKKKEEIRGHLAQLRKEKRELKETLLKCTDKEVLASLEQKLKEIDEECRGEESRRVDLELSIMEVKDNLKKAEAGPVTLGTTVDTTHLENVSPRPKAVTPASAPDCTPVNSATTLKNRPLSVVVTGKGTVLQKAKEWEKKGAS

SEQ ID NO: 106774 - DNA, 2616 bp, Artificial Sequence
  derived and/or modified sequence
atggagagatacaaagccctggagcagttgctgacagagttggacgacttcttgaagatcctggaccaagaaaatttgtcctcgaccgcactagtgaagaaaagttgcttggctgagcttctgagactctatacaaagtcctcatcctcagatgaagaatacatctatatgaataaagtgaccattaataagcagcagaatgcggagtcgcaaggaaaggccccggaagagcagggccttcttccgaatggtgagccatcacaacattcctccgctccccagaaatcacttccagacctgcccccacccaagatgcgtatcctgacgctggggcagatttcaggagctcagtctttttctcctgacgggacgcacctgacagggacagagttcttggggggctggtcctggcgcccatctcaaattcgtctgatgagcccaggcacccactggggcgatctcaccgcaaccgagatacctgagaggaagcagctggccatccccaagactgagtctccagaagggtactacgaagaagcagagccttacgacacgagcctgaatgaggatggagaagcggtgtcaagcagttacgaaagttatgacgaggaagatgggtctaaaggcaaatcggctccttatcagtggccatcccctgaggccggtatcgaactgatgcgggatgctcggatctgcgcgttcctctggagaaaaaaatggctaggacaatgggccaaacagctctgcgtaatcaaggataacagactgctttgttataagtcatctaaagaccactctccacagcttgatgttaaccttttggggagttccgtgattcataaagagaagcaggtgcgcaaaaaggagcacaagcttaagattactccgatgaacgccgacgtcatcgtgctagggctgcagtccaaggatcaggccgaacagtggttaagggtgattcaggaggtatctggactgccttccgagggggccagcgagggcaatcaatatacgcccgacgctcagcgcttcaattgccagaagcccgatattgccgagaaatacttgtccgccagcgagtacggctcctcagttgacggccatcctgaggtgcctgaaacaaaagatgttaagaagaagtgctccgctgggctgaaactgagcaacctgatgaacctcggccggaagaagtcaaccagcttggaaccagtcgaacgcagcttagagacaagctcctacttgaatgtactcgttaactcccaatggaagtcccgatggtgctcggtgcgtgacaatcatttgcacttttaccaggacagaaaccgtagcaaggtggctcagcagcccctttctctagtaggctgtgaagtagtccctgatccatctcccgatcacctatactcttttagaatattgcacaagggcgaagagctcgccaagctggaagcaaagtcctcagaagagatgggtcattggcttgggctcttgctctcggaatcaggatccaagaccgatcccgaagaatttacgtatgactacgttgatgcagacagggttagctgcattgtgtctgctgccaagaactctctgttgctcatgcaacgaaagtttagcgaacctaacacatacatcgacggtctcccctcacaagaccgccaggaagaactatacgacgacgtggatctctccgagctgactgctgctgtggaacctactgaagaggctacccccgtggctgacgaccctaacgaacgggagagcgatagggtttacctggatttgacgcccgtcaagtctttcctgcacggtccttcctccgcccaggctcaggcaagtagccctactttatcctgcctagacaatgctactgaggcgcttcccgcagactcaggaccgggaccaactcctgacgagccgtgcatcaaatgcccagaaaacctcggggaacagcagctagagtcacttgagcccgaagatcccagtctccggataaccaccgtgaagatccaaaccgagcagcagcggatctctttcccaccgtcttgcccagatgctgtcgtagccacacctcccggagcttctcctcccgtgaaggatcgtctcagggtcacttccgccgaaattaagctcggaaagaaccgcaccgaggccgaagtgaagcggtacacagaagaaaaggagaggcttgaaaaaaagaaagaggagattaggggccacctggcccagttaagaaaggagaaaagagaactgaaggagaccctgctaaaatgcaccgataaggaagtactcgctagcctggagcaaaaactgaaagagattgacgaggaatgccgaggcgaggagtctagacgagtcgatcttgaactaagcatcatggaagttaaagacaatcttaaaaaggccgaagcaggtcccgtgactctcggcaccaccgtcgataccacccaccttgaaaacgttagccccagaccgaaggctgtgacaccagcaagtgccccggattgcacaccagttaattcagcgacgacccttaaaaacaggccattatctgtggtggtcactggcaaagggacggtgttacagaaagccaaagagtgggaaaagaagggagcaagttag

SEQ ID NO: 106775 - DNA, 2616 bp, Artificial Sequence
  derived and/or modified sequence
atggagcgctacaaggccctggagcagctgctgacagagctggatgacttcctgaagatcctggaccaggagaacctgagcagcacagccctggtgaagaagagctgcctggccgagctgctgcggctgtacaccaagagcagcagcagtgatgaggagtacatctacatgaacaaggtgaccatcaacaagcagcagaatgctgagagccagggcaaggcccctgaggagcagggcctgctgcccaatggagagcccagccagcacagcagcgccccccagaagagcctgcctgacctgcccccacccaagatgaggatcctgaccctgggccagatcagcggggcccagagcttctccccagatggcacccacctgactggaacagagttcctgggcggctggagctggaggcccagccagatccggctgatgagccctggcacccactggggagacctgacagccacagagatccctgagaggaagcagctggccatccccaagacagagagccctgagggctactatgaggaggccgagccctatgacaccagcctgaatgaagatggagaggccgtgagcagcagctatgagagctatgatgaggaggatggcagcaagggcaagagcgccccctaccagtggcccagccctgaggccggcatcgagctgatgagagatgcccgcatctgtgccttcctgtggaggaagaagtggctgggccagtgggccaagcagctgtgtgtgatcaaggacaaccggctgctgtgctacaagagcagcaaggaccacagcccccagctggatgtgaacctgctgggcagcagcgtcatccacaaggagaagcaggtgaggaagaaggagcacaagctgaagatcacccccatgaatgctgatgtgattgtgctgggcctgcagagcaaggaccaggccgagcagtggctgcgggtcatccaggaggtgtctggcctgcccagcgagggcgccagcgagggcaaccagtacaccccagatgcccagcgcttcaactgccagaagccagacattgctgagaagtacctgagcgcctctgaatatggcagctctgtggatggccaccctgaggtgcctgagaccaaggatgtgaagaagaagtgcagcgctggcctgaagctgagcaacctgatgaacctgggcaggaagaagagcaccagcctggagcctgtggagaggagcctggagaccagcagctacctgaatgtgctggtgaacagccagtggaagagccgctggtgcagcgtgcgggacaaccacctgcacttctaccaggacaggaacagaagcaaggtggcccagcagcccctgagcctggtgggctgtgaggtggtgcctgaccccagcccagaccacctgtacagcttccgcatcctgcacaagggggaggagctggccaagctggaggccaagagcagcgaggagatgggccactggctgggcctgctgctgtctgagagcggcagcaagacagatcctgaggagttcacctatgactatgtggatgctgacagagtgtcctgcatcgtgtctgctgccaagaacagcctgctgctgatgcagaggaagttcagcgagcccaacacctacattgatggcctgcccagccaggaccggcaggaggagctgtatgatgatgtggacctgtctgagctgacagctgctgtggagcccacagaggaggccacccctgtggctgatgaccccaatgaaagagaaagtgacagagtgtacctggacctgacccctgtgaagagcttcctgcacggccccagcagcgcccaggcccaggccagcagccccaccctgagctgcctggacaatgccacagaggccctgcctgctgacagcggccctggccccaccccagatgagccctgcatcaagtgcccagagaacctgggggagcagcagctggagagcctggagcctgaggaccccagcctgcgcatcaccaccgtgaagatccagacagagcagcagaggatctccttcccccccagctgcccagatgctgtggtggccaccccacctggggccagcccccctgtgaaggaccggctgcgggtgaccagcgctgagatcaagctgggcaagaacagaacagaggccgaggtgaagcgctacacagaggagaaggagcggctggagaagaagaaggaggagatccggggccacctggcccagctgaggaaggagaagcgggagctgaaggagaccctgctgaagtgcacagacaaggaggtgctggccagcctggagcagaagctgaaggagattgatgaagaatgtagaggagaggagagccggcgggtggacctggagctgagcatcatggaggtgaaggacaacctgaagaaggccgaggccggccctgtgaccctgggcaccaccgtggacaccacccacctggagaatgtgagcccccggcccaaggctgtgaccccagccagcgccccagactgcacccctgtgaacagcgccaccaccctgaagaaccggcccctgtctgtggtggtgactggaaaaggaacagtgctgcagaaggccaaggagtgggagaagaagggggccagctag

SEQ ID NO: 106776 - DNA, 2616 bp, Artificial Sequence
  derived and/or modified sequence
atggagcggtacaaggccctggagcagctgctgaccgagctggacgacttccttaagattctggatcaggaaaacctgtcctccaccgctctagtgaaaaagagctgcctagcagagctattacgcctgtataccaagtcttcctcatcggatgaggagtatatctacatgaacaaggttactatcaacaaacagcagaatgccgaatcacaagggaaagcccccgaagagcagggtctgttgcctaatggtgagccttcccaacactcctcagccccccaaaaatcgttgccagatctcccccccccaaaaatgaggattttaactttgggccagatctcaggagctcagtcttttagtcccgatgggacccatctcaccggcacagaattccttggcggctggagttggcgaccctctcagatccggcttatgagccctgggacacactggggagacctgacagccactgagatccctgagagaaagcagctcgcaatccctaagacagaaagtcctgagggctattacgaggaggcagaaccttacgatacttcactgaatgaagacggcgaggccgtctcctcatcctacgagtcctacgacgaggaggacgggagtaagggtaaatctgcaccctatcagtggccatcaccagaggcggggatcgagctgatgcgggatgcccgcatatgtgcctttctgtggaggaagaaatggttggggcagtgggcaaaacagctgtgcgtgatcaaggataacagacttctgtgctataagtccagtaaagatcatagcccccaactcgacgtgaacctactagggtcatcggtgatccataaggaaaaacaggtgaggaagaaggagcacaaattgaagattaccccaatgaatgcagatgtgatagtattagggctccagagtaaggaccaggccgaacagtggctgcgggtaattcaggaggtgagtgggctaccttccgagggagctagcgagggaaaccagtatacccctgacgcccaaagattcaactgccagaagccagacatagctgagaaatatctgagcgctagtgaatatgggtctagcgtggacggacaccccgaggtgcctgaaactaaggatgtgaaaaagaaatgcagtgccggcctcaagctgagtaatctcatgaatttgggaagaaaaaaatctacttcactagaaccagtcgaacggtcgctggaaacatcctcctatctgaacgttctggttaactcccagtggaaaagccggtggtgtagcgtgcgcgataatcacctccacttctaccaggaccgaaatcgaagtaaagtggcccagcagccactgtctctggtgggctgcgaggtagttcctgacccctcacctgaccatttgtactccttccgcatactccataagggagaggagctggccaagctcgaggccaaatctagcgaagagatgggtcactggctcggcctcctgctgtccgaatctggtagcaaaaccgatcccgaagagtttacttacgattatgttgacgccgaccgggtttcctgcatcgtgtctgcggccaagaactcactgctgcttatgcagcgaaagtttagcgaacccaacacctacatcgatggactgccctcccaggatagacaagaagagctgtatgatgatgtggacctgtctgaattaaccgccgcggttgaaccaaccgaagaggctacacctgtcgccgacgacccgaatgagagggagtccgatcgagtgtatttggaccttacacccgtcaagtcatttctgcatggtccttcttcggcccaggcccaggcttcctcccctaccctgagctgtctggataatgccacagaagccctacctgccgatagtgggcctggcccaacaccggatgaaccctgcatcaaatgtcctgagaacctgggagaacagcagctggaatccctggagccggaagatcctagcctgagaattacgaccgtgaaaatacaaaccgaacaacagcggattagctttcccccctcctgccccgatgcagttgtggcgactccccccggcgcgagtcccccagtcaaagatagattgagggtaacctctgccgaaatcaaactggggaagaatcgcacagaagcagaggttaagcgttacacagaagagaaagaacggctggaaaaaaagaaggaagagattcgggggcaccttgcacagttgaggaaggaaaagcgagagctgaaagaaacgttgctgaaatgtaccgataaggaagtgctggcttctctggagcagaaactgaaagagatagatgaagaatgtcgaggcgaggaatcccgcagggtggatctggagctgagcattatggaagtcaaggacaacctgaagaaggccgaggctgggccagttaccttaggaacaacagtggatactacgcaccttgaaaatgtctctccaaggcccaaggcggtgacacccgcatctgcccctgactgcaccccagtgaactctgccacgacactgaaaaacaggccgctgagcgtggtcgtcactgggaagggaacagtgctacagaaagctaaagaatgggagaaaaagggggcctcttag

SEQ ID NO: 106777 - DNA, 2616 bp, Artificial Sequence
  derived and/or modified sequence
atggaaaggtacaaggccctggaacagctactgactgagctggacgacttcttaaaaatcctagatcaggagaacctgtcctcgacggccctcgtcaaaaagagctgcctggctgaactgctgcgcctctacaccaaaagctcctcgtcagacgaagaatatatctacatgaataaagtgaccataaataaacagcagaacgccgagtctcaagggaaggcccctgaggaacaaggactgctcccaaacggagaaccttctcagcacagcagcgcgccacaaaaaagcctccctgatcttccccctcctaagatgaggattctaacccttggacagatctcaggcgctcagtccttctcaccagacggaacccatttgaccggtactgagttcctaggcggatggtcatggcggccaagccaaatccgcttgatgtccccaggaacccattggggggatttgacagctactgaaattccagaaagaaagcagctggctatccccaagaccgagagtccggaagggtattacgaggaggctgaaccctacgatacctcactgaacgaggatggtgaagccgtcagcagctcctacgagagttacgacgaggaggatggaagcaagggtaaatctgctccctatcaatggccctcgcccgaggcgggtatcgagttgatgcgggatgcacgaatatgtgcattcctctggcggaaaaaatggctgggccagtgggcgaaacagctgtgtgtgattaaggataatcgcctgctctgctacaagagtagcaaggatcactctccccaactcgacgtgaatctgctgggttcatccgtcatccacaaggaaaaacaggtgaggaaaaaagagcacaaattaaaaattactcccatgaatgccgatgttatcgtgcttgggcttcagtctaaagatcaggctgaacagtggttgcgcgtaatccaggaggtaagtggtctcccatctgagggggcttctgaggggaatcagtacacaccagatgcacagcggttcaactgtcagaaacccgacattgcggaaaagtatctgtctgcgtccgagtatggctctagcgtcgacggccaccccgaagtgccagagaccaaggacgtgaagaaaaaatgtagcgctggtctaaagctttcaaacctgatgaatctgggtagaaagaagtccactagtctggagccagtggagaggtccctggaaacgtcctcctatctgaacgtgctggtgaattctcaatggaaatctcgttggtgtagcgtgcgggataatcacttgcacttttaccaggatcgtaaccgtagcaaagtcgcccagcaacccctgtccctggtcggatgtgaagtggtcccagatccctcaccagaccacttgtatagttttcgcattttgcataaaggagaggaactggctaagctcgaagctaaaagctccgaagagatgggccattggctcgggctgttgctctccgagtcaggcagcaaaactgaccctgaggagttcacttacgactacgtggatgccgacagagtgtcctgcattgtgagtgccgctaagaactcgctgctactgatgcaacggaagttctccgaaccaaatacctatatagatggcttgcccagccaagatcgccaggaggaactctacgacgacgtggatttgtcagagcttactgcagccgtggagcctactgaggaggccacgcccgtagcagatgaccccaacgaaagagaatctgacagggtgtatttggacctcacaccggtgaagtcttttctgcatggcccttccagtgcccaagcccaggcctcaagtcctacacttagttgcctggataacgctaccgaagcactgcccgcagattccggtcctggtcccacacccgatgagccctgtatcaaatgccccgagaacctgggcgaacagcagttggagagtctggagcccgaggatccctctctgcgtatcactacagtgaaaatccaaaccgaacagcagagaatttccttccctccttcttgcccagatgctgtcgtggcaactcctccaggggcttcacctcctgtgaaagatcgcctcagagttacaagtgcagagattaaactcggcaaaaacagaacagaggcagaggtcaagcgttacaccgaagagaaagagagactggaaaagaagaaggaagagattagaggccacttggcacagcttcgaaaggaaaagcgtgagttaaaggaaacattgctgaagtgcacagacaaagaggttctggcaagtctagagcagaagctcaaggaaattgacgaggagtgtcggggagaagagtcccggagagtcgacctggaactgtccattatggaggtgaaagataacctgaaaaaagccgaagcaggacccgtcacgttagggacaacagtggatacaacccaccttgaaaatgtctcaccccgtcctaaggcagtgactcctgcgagcgccccagactgcacacctgttaattctgctacaaccttgaagaatcgacccctctcagtcgtggtgacaggaaagggaaccgttctgcagaaggccaaggaatgggaaaaaaagggggcaagttag

SEQ ID NO: 106778 - DNA, 2932 bp, Artificial Sequence
  derived and/or modified sequence
gagcagcgcagaagccgagccgcgaggagcgcactccgtggccccgatggagcggtacaaagccctggaacagctgctgacagagttggatgacttcctcaagattcttgaccaggagaacctgagcagcacagcactggtgaagaagagctgcctggcggagctcctccggctttacaccaaaagcagcagctctgatgaggagtacatttatatgaacaaagtgaccatcaacaagcaacagaatgcagagtctcaaggcaaagcgcctgaggagcagggcctgctacccaatggggagcccagccagcactcctcggcccctcagaagagccttccagacctcccgccacccaagatgagaatcctgaccttgggccagatctcgggtgcccagagcttttctccagatgggacccacctgacgggaacggagtttcttggaggctggagctggaggcccagccagatcaggctgatgagccctgggacccactggggagaccttactgccacagagattccagaacggaaacagcttgccatcccaaagacggagtctccagagggctactatgaagaggctgagccatatgacacatccctcaatgaggacggagaggctgtgagcagctcctacgagtcctacgatgaagaggacggcagcaagggcaagtcggccccttaccagtggccctcgccggaggccggcatcgagctgatgcgtgacgcccgcatctgcgccttcctgtggcgcaagaagtggctgggacagtgggccaagcagctctgtgtcatcaaggacaacaggcttctgtgctacaaatcctccaaggaccacagccctcagctggacgtgaacctactgggcagcagcgtcattcacaaggagaagcaagtgcggaagaaggagcacaagctgaagatcacgccgatgaatgccgatgtgattgtgctgggcctgcagagcaaggaccaggctgagcagtggctcagggtcatccaggaagtgagcggcctgccttccgaaggagcatctgaaggaaaccagtacaccccggatgcccagcgctttaactgccagaaaccagatatagctgagaagtacctgtcggcttcagagtatgggagctccgtggatggccaccctgaggtcccagaaaccaaagacgtcaagaagaaatgttctgctggcctcaaactgagcaacctaatgaatctgggcaggaagaaatccacctcactggagcctgtggagaggtccctcgagacatccagttacctgaacgtgctggtgaacagccagtggaagtctcgctggtgctctgtcagggacaatcacctgcacttctaccaggaccggaaccggagcaaggtggcccagcaacccctcagcctggtgggctgcgaggtggtcccagaccccagccccgaccacctctactccttccgcatcctccacaagggcgaggagctggccaagcttgaggccaagtcttccgaggaaatgggccactggctgggtctcctgctctctgagtcaggctccaagacagacccagaagagttcacctacgactatgtggatgccgatagggtctcctgtattgtgagtgcggccaaaaactctctcttactgatgcagagaaagttctcagagcccaacacttacatcgatggcctgcctagccaggaccgccaggaggagctgtatgacgacgtggacctgtcagagctcacagctgcggtggagcctaccgaggaagccacccctgttgcagatgacccaaatgagagagaatctgaccgagtgtacctggacctcacacctgtcaagtcctttctgcatggccccagcagtgcacaggcccaggcctcctccccgacgttgtcctgcctggacaatgcaactgaggccctcccggcagactcaggcccaggtcccaccccagatgagccctgcataaagtgtccagagaacctgggagaacagcagctggagagtttggagccagaggatccttccctgagaatcaccaccgtcaaaatccagacggaacagcagagaatctccttcccaccgagctgcccggatgccgtggtggccaccccacctggtgccagcccacctgtgaaggacaggttgcgcgtgaccagtgcagagatcaagcttggcaagaatcggacagaagctgaggtgaagcggtacacagaggagaaggagaggcttgaaaagaagaaggaagaaatccgggggcacctggctcagctccggaaagagaaacgggagctaaaggaaaccctactgaaatgcacagacaaggaagtcctggcgagcctggagcagaagctgaaggaaattgacgaggagtgccggggcgaggagagcaggcgcgtggacctggagctcagcatcatggaggtgaaggacaacctgaagaaggctgaggcagggcctgtgacgttaggcaccaccgtggacaccacccacctggagaatgtgagcccccgccccaaagctgtcacacctgcctctgccccagactgtaccccagtcaactctgcaaccacactcaagaacaggcctctctcggtcgtggtcacaggcaaaggcactgtactccagaaagccaaggaatgggagaagaaaggagcaagttagaaaacaagcttcatctaaagactctcatgtcaatgtggaccttggtgacaatcctgctttgttaaagcaaaaactatgcgaaagggtgagtctgtttagaagaaaaagcaaagactgaggtactgtgaatggagagcttcagctaagaggaggctctgtcccttttcagagccaaaggaaataatacaacaaaaaggaggcttctttggagacctaagtctattggatgtaaacaagacgttgtatttagggatgttctgtgtttctttc

SEQ ID NO: 106779 - DNA, 2616 bp, Artificial Sequence
  derived and/or modified sequence
atggagagatacaaggccctggagcagctgctgaccgagctggacgacttcctgaagatcctggaccaggagaacctgagcagcaccgccctggtgaagaagagctgcctggccgagctgctgagactgtacaccaagagcagcagcagcgacgaggagtacatctacatgaacaaggtgaccatcaacaagcagcagaacgccgagagccagggcaaggcccccgaggagcagggcctgctgcccaacggcgagcccagccagcacagcagcgccccccagaagagcctgcccgacctgcccccccccaagatgagaatcctgaccctgggccagatcagcggcgcccagagcttcagccccgacggcacccacctgaccggcaccgagttcctgggcggctggagctggagacccagccagatcagactgatgagccccggcacccactggggcgacctgaccgccaccgagatccccgagagaaagcagctggccatccccaagaccgagagccccgagggctactacgaggaggccgagccctacgacaccagcctgaacgaggacggcgaggccgtgagcagcagctacgagagctacgacgaggaggacggcagcaagggcaagagcgccccctaccagtggcccagccccgaggccggcatcgagctgatgagagacgccagaatctgcgccttcctgtggagaaagaagtggctgggccagtgggccaagcagctgtgcgtgatcaaggacaacagactgctgtgctacaagagcagcaaggaccacagcccccagctggacgtgaacctgctgggcagcagcgtgatccacaaggagaagcaggtgagaaagaaggagcacaagctgaagatcacccccatgaacgccgacgtgatcgtgctgggcctgcagagcaaggaccaggccgagcagtggctgagagtgatccaggaggtgagcggcctgcccagcgagggcgccagcgagggcaaccagtacacccccgacgcccagagattcaactgccagaagcccgacatcgccgagaagtacctgagcgccagcgagtacggcagcagcgtggacggccaccccgaggtgcccgagaccaaggacgtgaagaagaagtgcagcgccggcctgaagctgagcaacctgatgaacctgggcagaaagaagagcaccagcctggagcccgtggagagaagcctggagaccagcagctacctgaacgtgctggtgaacagccagtggaagagcagatggtgcagcgtgagagacaaccacctgcacttctaccaggacagaaacagaagcaaggtggcccagcagcccctgagcctggtgggctgcgaggtggtgcccgaccccagccccgaccacctgtacagcttcagaatcctgcacaagggcgaggagctggccaagctggaggccaagagcagcgaggagatgggccactggctgggcctgctgctgagcgagagcggcagcaagaccgaccccgaggagttcacctacgactacgtggacgccgacagagtgagctgcatcgtgagcgccgccaagaacagcctgctgctgatgcagagaaagttcagcgagcccaacacctacatcgacggcctgcccagccaggacagacaggaggagctgtacgacgacgtggacctgagcgagctgaccgccgccgtggagcccaccgaggaggccacccccgtggccgacgaccccaacgagagagagagcgacagagtgtacctggacctgacccccgtgaagagcttcctgcacggccccagcagcgcccaggcccaggccagcagccccaccctgagctgcctggacaacgccaccgaggccctgcccgccgacagcggccccggccccacccccgacgagccctgcatcaagtgccccgagaacctgggcgagcagcagctggagagcctggagcccgaggaccccagcctgagaatcaccaccgtgaagatccagaccgagcagcagagaatcagcttcccccccagctgccccgacgccgtggtggccaccccccccggcgccagcccccccgtgaaggacagactgagagtgaccagcgccgagatcaagctgggcaagaacagaaccgaggccgaggtgaagagatacaccgaggagaaggagagactggagaagaagaaggaggagatcagaggccacctggcccagctgagaaaggagaagagagagctgaaggagaccctgctgaagtgcaccgacaaggaggtgctggccagcctggagcagaagctgaaggagatcgacgaggagtgcagaggcgaggagagcagaagagtggacctggagctgagcatcatggaggtgaaggacaacctgaagaaggccgaggccggccccgtgaccctgggcaccaccgtggacaccacccacctggagaacgtgagccccagacccaaggccgtgacccccgccagcgcccccgactgcacccccgtgaacagcgccaccaccctgaagaacagacccctgagcgtggtggtgaccggcaagggcaccgtgctgcagaaggccaaggagtgggagaagaagggcgccagctag

SEQ ID NO: 106780 - protein, 158 aa, Artificial Sequence
  derived and/or modified sequence
MMRFMLLFSRQGKLRLQKWYLATSDKERKKMVRELMQVVLARKPKMCSFLEWRDLKVVYKRYASLYFCCAIEGQDNELITLELIHRYVELLDKYFGSVCELDIIFNFEKAYFILDEFLMGGDVQDTSKKSVLKAIEQADLLQEEDESPRSVLEEMGLA

SEQ ID NO: 106781 - protein, 294 aa, Artificial Sequence
  derived and/or modified sequence
MSRSRHLGKIRKRLEDVKSQWVRPARADFSDNESARLATDALLDGGSEAYWRVLSQEGEVDFLSSVEAQYIQAQAREPPCPPDTLGGAEAGPKGLDSSSLQSGTYFPVASEGSEPALLHSWASAEKPYLKEKSSATVYFQTVKHNNIRDLVRRCITRTSQNISIRSVEGEIYCAKSGRKFAGQIREKFIISDWRFVLSGSYSFTWLCGHVHRNILSKFTGQAVELFDEEFRHLYASSKPVMGLKSPRLVAPVPPGAAPANGRLSSSSGSASDRTSSNPFSGRSAGSHPGTRTDG

SEQ ID NO: 106782 - DNA, 885 bp, Artificial Sequence
  derived and/or modified sequence
atgagcagaagcagacacctgggcaagatcagaaagagactggaggacgtgaagagccagtgggtgagacccgccagagccgacttcagcgacaacgagagcgccagactggccaccgacgccctgctggacggcggcagcgaggcctactggagagtgctgagccaggagggcgaggtggacttcctgagcagcgtggaggcccagtacatccaggcccaggccagagagcccccctgcccccccgacaccctgggcggcgccgaggccggccccaagggcctggacagcagcagcctgcagagcggcacctacttccccgtggccagcgagggcagcgagcccgccctgctgcacagctgggccagcgccgagaagccctacctgaaggagaagagcagcgccaccgtgtacttccagaccgtgaagcacaacaacatcagagacctggtgagaagatgcatcaccagaaccagccagaacatcagcatcagaagcgtggagggcgagatctactgcgccaagagcggcagaaagttcgccggccagatcagagagaagttcatcatcagcgactggagattcgtgctgagcggcagctacagcttcacctggctgtgcggccacgtgcacagaaacatcctgagcaagttcaccggccaggccgtggagctgttcgacgaggagttcagacacctgtacgccagcagcaagcccgtgatgggcctgaagagccccagactggtggcccccgtgccccccggcgccgcccccgccaacggcagactgagcagcagcagcggcagcgccagcgacagaaccagcagcaaccccttcagcggcagaagcgccggcagccaccccggcaccagaaccgacggctag

SEQ ID NO: 106783 - DNA, 885 bp, Artificial Sequence
  derived and/or modified sequence
atgagtcgcagcagacatctggggaaaatccgaaaacgtctcgaggacgtgaaaagccaatgggtccgccctgcccgcgcagatttttccgataatgaaagtgcccgacttgcaaccgacgccctcctggacggtggctccgaggcttactggcgggtgctttcacaggagggagaagtcgacttcttgagcagcgtggaagctcaatacatccaggcacaagcccgtgagcccccctgtcctcccgatacattgggcggggctgaagccgggcctaaaggacttgacagttctagtctgcagagcggaacctattttccagtcgcatctgaagggtccgagcccgctctgctgcattcctgggcatccgccgagaaaccttacctgaaggaaaagtcttccgctaccgtgtacttccagacagtgaaacataataatataagagaccttgttaggaggtgcatcaccagaaccagccagaatatctcgattaggtcagtggagggggaaatctattgcgccaagtcaggaagaaagtttgcgggacagatcagagaaaaatttataataagcgactggcggttcgtcctgagcggttcgtattcctttacttggttatgcggccatgtgcaccggaacatcctgtctaaatttactgggcaagcagtggagctgtttgacgaagagttccgccacctctatgccagcagcaagccggtcatgggcctgaagagtcccagactggtcgctcccgtcccacccggtgctgctcccgcaaacgggcggctgtcatcatcctccggcagtgcgtccgacagaacgtccagtaacccattcagcggacggagcgctgggtcacaccccggaacccgcacagacgggtag

SEQ ID NO: 106784 - DNA, 885 bp, Artificial Sequence
  derived and/or modified sequence
atgtccagatctcgacacctcggcaagatcaggaaaaggctggaagatgtcaagagccaatgggtgagacctgccagggcggactttagtgacaacgagtcggctaggcttgctaccgacgctctcttggatggtgggagcgaggcttactggagagtactctcacaagagggagaagtcgacttcctctcctctgttgaagcacaatacatccaagcgcaggctagagaacctccttgtcccccggatacgctgggtggggccgaagcggggcccaaaggtctcgacagctcatccctgcagtctgggacctactttcccgtggcgagtgaaggctccgaaccagccttgctccatagctgggcatcagccgagaagccataccttaaggagaaaagtagtgccaccgtgtacttccagaccgtaaagcacaataacatccgtgaccttgtgagacgatgtatcactcgaacatcgcaaaatatttccatccgttccgtagagggagaaatttactgcgcaaagtctgggagaaaatttgcaggacagattagggagaaatttatcatcagcgattggcggttcgtgctctccggctcttactcattcacttggttatgtggacacgtccaccgtaacattctgtctaagtttaccgggcaggctgtagaactctttgatgaagagtttcggcatctgtacgcatcttctaagccggttatggggttaaaaagtcccagattggttgcaccagtgcccccaggcgccgctccggctaacggacggttgtccagcagcagcgggtccgcttcagatcgcactagcagcaatccttttagcggtcgtagcgccgggagccacccagggactagaactgatggttag

SEQ ID NO: 106785 - DNA, 1600 bp, Artificial Sequence
  derived and/or modified sequence
attgctcaggacagcggtaaatcacttcttggaggtgccctgcacgccggtcctgggagcaggcggcctcccgggggtgcgggagccccactcctccgtggtgtgttccatttgcttcccacatctggaggagctgacgtgccagcctcccccagcaccacccagggacgggaggcatgagccggtcaaggcacctgggcaaaatccggaagcgtctggaagatgtcaagagccagtgggtccggccagccagggctgactttagtgacaacgagagtgcccggctggccacggacgccctcttggatgggggttctgaagcctactggcgggtgctcagccaggaaggcgaggtggacttcttgtcctcggtggaggcccagtacatccaggcccaggccagggagcccccgtgtcccccagacaccctgggaggggcggaagcaggccctaagggactggactccagctccctacagtccggcacctacttccctgtggcctcagagggcagcgagccggccctactgcacagctgggcctcagctgagaagccctacctgaaggaaaaatccagcgccactgtgtacttccagaccgtcaagcacaacaacatcagagacctcgtccgccgctgcatcacccggactagccagaacatttccatccggagtgtggaaggagagatatactgtgccaagtcaggcaggaaattcgctggccaaatccgggagaagttcatcatctcggactggagatttgtcctgtctggatcttacagcttcacctggctctgcggacacgtgcaccggaacatcctctccaagttcacaggccaggcggtggagctgtttgacgaggagttccgccacctctacgcctcctccaagcctgtgatgggcctgaagtccccgcggctggtcgcccccgtcccgcccggagcagccccggccaatggccgccttagcagcagcagtggctccgccagtgaccgcacgtcctccaaccccttcagcggccgctcggcaggcagccaccccggtacccgaactgacggctgagatgaggttagaatgactgggcccggctgaacattccaaattggatttcaccatctgctgagaaagtttaaggaaggcaaagcttgccaggtcacagaagctcccaagcccagctttccaaaggcctcagcctgtgcctgtgtcgagctcagtcctgggagataggggagaacctgcaggcaggaacaagcccccctactcctgaccaccctccatcagcagtctcccctccgtggtcgtctttgttgacaaaggtgcagtttctcctctcctgggcacctgtaacatgtgatgcgctgcctgctgggaggttaggtcggggctgccccggcgagtggagcatgagcagaaccgccgagggtcacttctgggcagaagctttgagagcctgggtccaggttgccacatagaagcagctctccagttgaaaccctcctctgccagcctggggtcctaagcgatgagcagaatcccccactcccaccccaccaacccacaatggatatgtagtgagcaagaaataaacctttgttgtttaa

SEQ ID NO: 106786 - DNA, 1787 bp, Artificial Sequence
  derived and/or modified sequence
tcagcgatggccaagtatgggagaagccatgctggaatgaacatgtgggaccattttgtgcagtttctcagcgccaacactgactggtcccctgggctcgtgggccgccggcagcctcggctcgttctccagacagtgttccaagaagccacttccagcgaggaagcgttggcctgagaactggaacctctgcggtctctgcaaacacgacaatgacaaacacttgagagggcatgggagaaaggagctccttcatagggcagggaggggtgggcacttgggtgtgaccaaggagaggaggcgcgcctggtcaacagctctccctggcccgtgtccagctccctcctcacacagagaggggggcgcatctcagggatggcatctttcccccccacagggaaattcttatctttgaaacagcatgggaatcgaggcacccaggaggggagcagaggcaggcaggcctccttcaggcccatcctccagctgggctggtggtgccagggaggctccctgcttggtaacaaaggcctgagggagagttgcgaaacccagcaggaaagccggctcaccttcgcctccccctgcggctgggaggagaggaaatatcccatggctgactgtgccaaggaggtgtctgagccagccctcccggcccgagggcagggcaggtggccctgagagataagccaatcccgcagctgcagatgaggagttctgagaagcattgctcaggacagcggtaaatcacttcttggaggtgccctgcacgccggtcctgggagcaggcggcctcccgggggtgcgggagccccactcctccgtggtgtgttccatttgcttcccacatctggaggagctgacgtgccagcctcccccagcaccacccagggacgggaggcatgagccggtcaaggcacctgggcaaaatccggaagcgtctggaagatgtcaagagccagtgggtccggccagccagggctgactttagtgacaacgagagtgcccggctggccacggacgccctcttggatgggggttctgaagcctactggcgggtgctcagccaggaaggcgaggtggacttcttgtcctcggtggaggcccagtacatccaggcccaggccagggagcccccgtgtcccccagacaccctgggaggggcggaagcaggccctaagggactggactccagctccctacagtccggcacctacttccctgtggcctcagagggcagcgagccggccctactgcacagctgggcctcagctgagaagccctacctgaaggaaaaatccagcgccactgtgtacttccagaccgtcaagcacaacaacatcagagacctcgtccgccgctgcatcacccggactagccagaacatttccatccggagtgtggaaggagagatatactgtgccaagtcaggcaggaaattcgctggccaaatccgggagaagttcatcatctcggactggagatttgtcctgtctggatcttacagcttcacctggctctgcggacacgtgcaccggaacatcctctccaagttcacaggccaggcggtggagctgtttgacgaggagttccgccacctctacgcctcctccaagcctgtgatgggcctgaagtccccgcggctggtcgcccccgtcccgcccggagcagccccggccaatggccgccttagcagcagcagtggctccgccagtgaccgcacgtcctccaaccccttcagcggccgctcggcaggcagccaccccggtacccgaactgacggctga

SEQ ID NO: 106787 - DNA, 885 bp, Artificial Sequence
  derived and/or modified sequence
atgagccgcagccgccacctgggcaagatcaggaagaggctggaggatgtgaagagccagtgggtgcggcctgcccgggctgacttcagtgacaatgaaagtgcccggctggccacagatgccctgctggatggcggcagcgaggcctactggagggtgctgagccaggagggggaggtggacttcctgagctctgtggaggcccagtacatccaggcccaggcccgggagcccccctgccccccagacaccctgggcggcgctgaggccggccccaagggcctggacagcagcagcctgcagagcggcacctacttccctgtggccagcgagggcagcgagcccgccctgctgcacagctgggccagcgctgagaagccctacctgaaggagaagagcagcgccaccgtgtacttccagacagtgaagcacaacaacatccgggacctggtgcggcgctgcatcaccaggaccagccagaacatcagcatccgctctgtggagggggagatctactgtgccaagagcggcaggaagtttgctggccagatccgggagaagttcatcatcagtgactggaggtttgtgctgagcggcagctacagcttcacctggctgtgtggccacgtgcacaggaacatcctgagcaagttcaccggccaggccgtggagctgtttgatgaggagttccgccacctgtatgccagcagcaagcctgtgatgggcctgaagagcccccggctggtggcccctgtgcccccaggggccgccccagccaacggccgcctgagcagcagcagcggcagcgccagtgacaggaccagcagcaaccccttcagcggccgctctgctggcagccaccctggcaccaggacagatggatag

SEQ ID NO: 106788 - DNA, 885 bp, Artificial Sequence
  derived and/or modified sequence
atgagccggagccggcacctgggcaagatccggaagcggctggaggacgtgaaaagtcaatgggtgaggcccgctagagcagatttttctgacaacgagtctgccaggctcgcaacggatgccctcttggacgggggaagcgaggcatactggcgcgtactttcccaggaaggggaggtcgattttctgagctctgtggaagctcagtatattcaggctcaggcccgtgaaccaccttgtcctccagataccctcgggggggcagaagctgggcctaagggcttggatagcagttcactgcagtcgggcacttactttcctgtggcaagtgaaggcagcgaacctgcactgctgcattcttgggcttctgcagaaaaaccatacctgaaggagaagtcctctgccacagtctactttcagaccgtgaaacataataatatccgcgacctggttcgacggtgcatcacacgcacctcccagaacatttctattaggtcagttgaaggagagatttattgtgcaaaatctggcaggaagttcgccgggcagatccgggagaaatttatcataagcgactggagatttgtcctgagcgggtcatactctttcacttggctatgtgggcacgtccatcgtaacattctgtctaagttcactggacaggcagtcgagctgtttgatgaagaatttcgacacctctacgcatctagcaagcctgttatgggcctcaagagtccaaggcttgtcgctcctgtgcccccaggtgcagcccctgctaacggcaggctgtcttcaagttctggcagcgcatcagacaggacttccagcaatcctttcagcggaagaagcgctggatctcatcccgggactaggaccgatggatag

SEQ ID NO: 106789 - DNA, 885 bp, Artificial Sequence
  derived and/or modified sequence
atgagccggagccggcacctgggcaagatccggaagcggctggaggacgtgaagtcccaatgggtgcgccccgctagggccgacttttccgacaacgagtcagcccggctggctacagacgctcttctagacggaggcagtgaggcctattggcgggtgctcagccaggagggggaggtagactttctgagcagcgttgaggctcagtacattcaggcccaggctagggagccaccatgtccacccgacacgttagggggggccgaggcgggaccaaaggggctggatagcagcagtcttcagagcggcacctacttccctgtggcatctgagggtagtgagcctgcacttttgcatagttgggcctctgccgaaaaaccgtatctaaaggaaaagtcctctgccacggtttacttccaaactgtgaagcacaacaatatccgagacttggtccgtcgctgcatcacaaggaccagtcaaaatatctctatccgaagtgtggagggagaaatttactgcgcgaagtcagggaggaagtttgctggacagattagggaaaaatttatcatttcagattggagattcgtgctctccgggagctattcattcacctggctgtgcggtcacgtccacaggaatatcctaagtaagttcaccgggcaggcagttgaattattcgacgaggagttcagacacttgtatgcctcatccaagcccgtcatgggcctgaagagccctagactcgtcgcgcccgtcccccctggtgctgcgcctgccaatggtagactctctagtagctccggttccgcatctgatagaacatccagcaatcccttcagcggaagatcagccggatcacacccaggaacacgcacggatggctag

SEQ ID NO: 106790 - DNA, 885 bp, Artificial Sequence
  derived and/or modified sequence
atgagccgctcccgacaccttgggaagattcgtaaaagactggaggatgtgaagtctcagtgggtgcgccctgcaagagccgattttagcgacaacgagagcgccagactggccactgacgccttgcttgatggcggatccgaagcatattggcgggtgcttagtcaggaaggagaagtggatttcctttccagcgtcgaagcacaatatatacaagcgcaagccagggaacctccatgtcccccagatactctgggcggagccgaggccggacccaagggacttgacagctcctctctgcaatctgggacatatttcccagtggcaagtgagggttctgagcccgctctgctacattcctgggccagcgccgaaaagccatatctgaaagagaaatcttcagctacggtgtattttcaaacggtgaagcataacaacatccgcgacctcgtgagacgttgtattactcgcacatcccagaacatcagcatccgtagcgtggaaggtgagatttattgcgcaaaaagcgggagaaaatttgccggtcagatccgcgagaagttcatcatttccgactggaggtttgtcctttcgggctcctacagtttcacatggctctgtgggcacgtacacagaaatattcttagtaagtttacagggcaggctgttgaactctttgacgaagaattccggcacctgtatgctagctccaagcctgtcatgggactgaagagtcctcgactggttgcaccagtgccccctggggcagctccggcaaacggcagactgtcatcttcaagcggcagcgccagtgatagaacgtcctctaatccattttcgggccgatcggctggcagccacccaggaacccgtacagacggatag

SEQ ID NO: 106791 - DNA, 885 bp, Artificial Sequence
  derived and/or modified sequence
atgagtcgtagtaggcaccttgggaaaataaggaagcgcctcgaggatgttaaaagtcagtgggtgcgaccagcacgtgcagatttttccgacaacgagtcggctcgccttgccaccgatgccctgttggatggtgggagcgaagcgtattggcgagttctgtcacaggagggtgaagtggattttctgtcatcggtcgaggctcagtatatacaggcacaggctagggaacctccatgccccccagacacattgggcggagccgaagcaggtccgaaaggactggatagcagcagcctccagtcaggcacgtattttcccgttgcgagcgagggatcggagcctgcactcctccactcttgggcaagcgccgagaagccttatctgaaggagaagtcaagtgccaccgtttattttcagaccgttaaacataataatatcagagatcttgttcgaagatgtatcacccgaacttcccagaacatctcaataaggtccgtggagggcgaaatttactgtgccaagagcggccgaaagttcgccggacagattagggaaaaattcataattagcgactggcggttcgtcctatccggaagctacagctttacttggctttgcgggcacgtccaccgcaacatactctctaagttcacgggccaggccgtagaactgttcgatgaagagtttcgtcacctgtacgcatcgagtaaaccggttatgggcctcaagagccctcggctagtggctcctgtccctcccggagctgcccctgcaaacggccgattatctagctccagcggctccgctagtgaccggactagctccaatcccttcagcggcagaagtgccggttcacaccctgggacccgaacagacgggtag

SEQ ID NO: 106792 - protein, 158 aa, Artificial Sequence
  derived and/or modified sequence
MGDNPFQPKSNSKMAELFMECEEEELEPWQKKVKEVEDDDDDEPIFVGEISSSKPAISNILNRVNPSSYSRGLKNGALSRGITAAFKPTSQHYTNPTSNPVPASPINFHPESRSSDSSVIVQPFSKPVSVSKTIRPAQGSIGCCLSISTVPSYNSGLS

SEQ ID NO: 106793 - DNA, 243 bp, Artificial Sequence
  derived and/or modified sequence
atgggcgacaaccccttccagcccaagagcaacagcaagatggccgagctgttcatggagtgcgaggaggaggagctggagccctggcagaagaaggtgaaggaggtggaggacgacgacgacgacgagcccatcttcgtgggcgagatcagcagcagcaagcccgccatcagcaacatcctgaacagagtgaaccccagcagctacagcagaggcctgaagaacggcgccctgagcagatag

SEQ ID NO: 106794 - DNA, 477 bp, Artificial Sequence
  derived and/or modified sequence
atgggcgacaaccccttccagcccaagagcaacagcaagatggccgagctgttcatggagtgcgaggaggaggagctggagccctggcagaagaaggtgaaggaggtggaggacgacgacgacgacgagcccatcttcgtgggcgagatcagcagcagcaagcccgccatcagcaacatcctgaacagagtgaaccccagcagctacagcagaggcctgaagaacggcgccctgagcagaggcatcaccgccgccttcaagcccaccagccagcactacaccaaccccaccagcaaccccgtgcccgccagccccatcaacttccaccccgagagcagaagcagcgacagcagcgtgatcgtgcagcccttcagcaagcccgtgagcgtgagcaagaccatcagacccgcccagggcagcatcggctgctgcctgagcatcagcaccgtgcccagctacaacagcggcctgagctag

SEQ ID NO: 106795 - DNA, 243 bp, Artificial Sequence
  derived and/or modified sequence
atgggcgataacccttttcagccaaagtccaacagtaagatggccgagcttttcatggagtgcgaagaggaggagttagagccttggcagaaaaaggtgaaagaggtggaggacgacgatgacgatgagcctatatttgtgggggagatcagcagctctaagcctgccatctccaatattcttaatcgagtcaatccctcatcgtacagcagaggcctcaagaacggtgctctttctaggtag

SEQ ID NO: 106796 - DNA, 477 bp, Artificial Sequence
  derived and/or modified sequence
atgggggacaatccattccaacccaaatctaatagcaagatggctgaactgttcatggaatgcgaggaagaggaactggagccgtggcaaaaaaaggtaaaagaagtggaagacgatgacgacgacgagccaatttttgtcggagagatttcctctagcaagcctgccatatccaatatactgaatcgagtcaaccccagttcttattcaagagggcttaaaaatggcgccttgtcgcgggggattacggccgcatttaagcctacgtcacagcactacactaacccaacatccaatcctgttccagcctccccgattaacttccatccagagagcaggagttctgacagcagcgtgatcgtccagccattctctaaacccgtgtcagtttctaagaccattaggccagcacagggctcgatcgggtgttgcctgagcatttcaacggtgccatcttacaacagcgggctatcctag

SEQ ID NO: 106797 - DNA, 243 bp, Artificial Sequence
  derived and/or modified sequence
atgggagacaaccccttccagcccaagagcaacagcaagatggccgagctgttcatggagtgtgaggaggaggagctggagccctggcagaagaaggtgaaggaggtggaggatgatgatgatgatgagcccatctttgtgggggagatcagcagcagcaagccagccatcagcaacatcctgaacagagtgaaccccagcagctacagccggggcctgaagaatggagccctgagcaggtag

SEQ ID NO: 106798 - DNA, 477 bp, Artificial Sequence
  derived and/or modified sequence
atgggagacaaccccttccagcccaagagcaacagcaagatggccgagctgttcatggagtgtgaggaggaggagctggagccctggcagaagaaggtgaaggaggtggaggatgatgatgatgatgagcccatctttgtgggggagatcagcagcagcaagccagccatcagcaacatcctgaacagagtgaaccccagcagctacagccggggcctgaagaatggagccctgagccggggcatcacagctgccttcaagcccaccagccagcactacaccaaccccaccagcaaccctgtgcctgccagccccatcaacttccaccctgagagccgcagcagtgacagcagcgtcatcgtgcagcccttcagcaagcctgtgtctgtgtccaagaccatccggcctgcccagggcagcatcggctgctgcctgagcatcagcacagtgcccagctacaacagcggcctgtcctag

SEQ ID NO: 106799 - DNA, 243 bp, Artificial Sequence
  derived and/or modified sequence
atgggcgacaaccccttccagcccaagagcaacagcaagatggccgagcttttcatggaatgcgaggaggaggaactcgaaccgtggcagaaaaaagtcaaggaagttgaagacgacgatgacgatgagcctatcttcgtaggggaaatctcgtcttccaaaccagccatttctaatattttaaaccgggtgaatccctctagctactctagaggcctcaagaatggtgcccttagcagatag

SEQ ID NO: 106800 - DNA, 477 bp, Artificial Sequence
  derived and/or modified sequence
atgggcgacaaccccttccagcccaagagcaacagcaagatggccgaactgtttatggagtgcgaggaggaggaactggaaccgtggcagaagaaggtcaaggaagtggaagacgatgacgatgatgagcccattttcgtgggggagatatcatcaagcaaacctgccatctccaacatccttaatagagtcaatccctcatcctattcacggggcctgaagaacggtgctctcagtaggggcatcacagccgcttttaagcctacctcccagcactacaccaaccctacaagcaatcccgtgcctgcttccccgatcaatttccatcctgagtcgcgctcctcagatagctctgtcatcgtacagcctttctcgaagccagtgagtgtgagcaaaacaatcaggcctgcgcagggctctattgggtgttgtctgtctataagcacagtgccatcatataattccggtttatcctag

SEQ ID NO: 106801 - DNA, 243 bp, Artificial Sequence
  derived and/or modified sequence
atgggtgacaatccatttcagcccaaatccaactcaaagatggcagagctctttatggagtgcgaggaggaagaactggaaccttggcagaaaaaagttaaagaagttgaggacgacgacgatgacgaacctatcttcgtaggggagatatcaagtagtaaaccagccatttctaacatattgaatagggttaacccaagcagctactctagagggttaaaaaatggggcactgtcacgatag

SEQ ID NO: 106802 - DNA, 477 bp, Artificial Sequence
  derived and/or modified sequence
atgggagacaacccattccagcctaagtccaactcaaagatggctgagctcttcatggaatgtgaagaggaggaactagaaccctggcagaaaaaggtgaaggaggttgaggatgacgacgatgatgagccgatcttcgtgggtgaaatttcatcctctaaacccgctattagcaatattctgaaccgggtaaacccatcttcttacagccgaggtttgaagaatggagctttgagccgaggaattactgccgcttttaaacccacctcacagcactatactaatcccacatctaacccagtccctgcctctcccattaattttcaccctgagtctcgcagcagcgattctagcgtgattgttcagcctttctctaaaccagtaagtgtgtcaaagactatcagaccagcccagggatcgatagggtgttgcttgtccatatcaaccgtgccaagttataattcaggtctatcctag

SEQ ID NO: 106803 - DNA, 428 bp, Artificial Sequence
  derived and/or modified sequence
gtgctcctccttttcctcctcctctttctcctcctcctcagggctccagtcaggccgatccgctccgctcacgatctgtgcagaaatcattgtggttagagggaaggaaaacagaaataacttgctggcttgtctggagtcacatgtacttaggtgacaatttacagaaagtcatctctgcagcttgatgggcgacaacccttttcaaccaaaaagtaattcaaaaatggcagaactgtttatggaatgtgaagaagaggagctggaaccatggcagaagaaagtaaaagaagttgaggatgacgatgatgatgagccaatctttgttggcgagatatcaagttcaaaaccagcaatttcaaatattttgaacagagttaaccccagctcatattcaaggggactaaagaatggtgcactcagtcgag

SEQ ID NO: 106804 - DNA, 3666 bp, Artificial Sequence
  derived and/or modified sequence
ctcagggctccagtcaggccgatccgctccgctcacggaaggaaaacagaaataacttgctggcttgtctggagtcacatggtgacaatttacagaaagtcatctctgcagcttgatgggcgacaacccttttcaaccaaaaagtaattcaaaaatggcagaactgtttatggaatgtgaagaagaggagctggaaccatggcagaagaaagtaaaagaagttgaggatgacgatgatgatgagccaatctttgttggcgagatatcaagttcaaaaccagcaatttcaaatattttgaacagagttaaccccagctcatattcaaggggactaaagaatggtgcactcagtcgaggtattactgctgcattcaagcctacaagtcaacactacacgaatccaacatcaaatccagtgcctgcctcaccaataaattttcatcctgagtctagatcttcagatagttctgttattgttcagcctttttctaaacctgtaagtgtttctaaaactatacggccagctcagggatccattggatgttgtttatcaatatcaacagtacccagttacaattctggactgtcataagtagtcatccagtagaagcatagttagcatcagaaaatgtcaccatattttcgctagctcaagcagtaccccaagtaataactgaaggagctaactacccaacctgttaataacaggcagtatgcctaaataggtacagtaatgaaaactatactatcaaaatgtgaataaaattatagtcagccataaatattgcataatgacaaatatttaagattgcagacgggaccaggtattcttaattgggaaaacagtcaagtgaccatcatagctttttattctgaaaacattccttcatagttcagttagttaaaaaaaaacaaacattttttcctattacaaaaaactcccactttttttgttacaaaaagtaatagaaaatggtaatagttaacattcattgagctgttaatatgtataagtgtttgtgctaaatgctataggtaaattcatttcatttagttcttaaacatccccatgaagtaaacactattattatcctcattttttagttgaggaaactgaggctcatagaggttgaaagatttattcaagatcccaaagctggcagttgatggatctgggatttcaatccagcctaacccatagtttatatgtatatgcacacatacatacatatatgttgtgtataaatgtacacttttttagacatgaaagaattgccttagttgaacagttctcagattgtagtttgcaatcccctggggttccccaagaccctttcagaggtttgagggtcaacagtgttgtcattataatcaaagactgttttccttttccactgtgttggcatttgcactggtgatgctaaagtaatggtggataagctgctggtgccttagtgtgaatcaaggtagtgccaccaaagtgtacttgtagtttctgtattagtcacctgccgtgcactcacagtaaactacattactcaactgagtattacccagttatacccaatccctgatgaagtattaaaatgttattagttttattaactctctacacttgaatgtgtgttttttaaaatattctgtgtgatgacatgggtagtgtgcataaagtacctctgtgtctgaagtatgatagttgtcttgaggaaaagcacttgtgtgattgaattgtgaggtaaactacctgatttttttttgttgttacatgaaagaatgagtgacaaatctttaaagtatttacaatatcactccagaaaagaaaacaaatcaaataaatattgactcaaaactctccaagtacatatcaaaatctcaggaagggaaaaaagagtctaaagaacaaaatataacactattttatttcagtcatgttagttcagtttccacagtttgaactgggtatagattaatatctaaaaccaaaaaatgaacatgtgtatagtgatgctgaaaaatgtgcattattttttatttatattttaggaataataaagttagttattaaagaatttagtgattttgattgagtgagaggtgtgagctatatttgcttctttcctgtatgatatacatacattgtttccaatctcatttctattaaataactataggagagcccacagccttgttattttacatatcactatttagatatttgttatttatttatttgtgttggcctgaagtaaatgttacttttgtacgatatttgaaggatagatttattttataaattaatagtttaaataagattttgccagcatttgaaatgatatttatttctgtgtatcaatattaccacaaacttacacagcttaaaacaacatacactctttatctcatgatctcacaatttctgtgggtcaggaatcaggtcatggcttaggtgggttttctgcttaaggatctcacaaggctgcattcaagatgtggtgcctgaagttgcagtttcatctgaaattctgttggggaagtatttgcttccaagttcacatggttgttggtagcattcagttccttaagggatgttggactgagaatctctgtatcttgttggcttttggctggctccttgccacgtaggtcttcccaataaggctgcttgcttcctcaaagctagcaggtgagagtgagtccttagcaagatgcccttacagtcttaggtaacataatcacgtacacaaaaatcatatatatcctgtcacctttgttgtgttctattggttaaaagcaagtcagaggtcctgcccacactcaatgggagggaattacacaggacctgaataccaggacctggggattatgggtaatgacatttacatggaggccactttagagtctgtctgccacacacgcttagtcaatcttgattgtttggcaaacatttcctcaaatctgtcacttcagcaaaaataattgatagtaatatttcttaccaatggtaaaatttgaacttttaagcaaaaattagaattttggaaaactcatttgccaccgtgatcttggcagcttttgaataagagttttctgatgggtggtggtgttcataaataatgatttttaaaatattgtgtaatgaactatgtcaccatttggaagacctgtgtaattcagtgaaactagtattttccacataactagtatatatactacaaaagtatgcatgggtaaaacatacatttaaaagctaagatagaccaatgattttaatggaacgggtgttctgggatacggtttcagatttcacactgcaacaaacctttaagaaagtaccaactgttcagttttggtatagtatcaaagtagtatatccacagttaattaaaaccctattaaaacactcccttttccagttatatattcctgtgaggcagaatttaataatactcctcaaccaaaacaacatgtcatagtagactgaaggcagaagcagataagagactaaaacaatttttgattaagctagatatttaagagctttgcaaagatgtgaaacaatgccacttttcactagttttttttgcgtttgcaagtcatttttcattaaaatgttatttatgttaatttgtaatgagtttgttattttaaaatgaataaataaatatt

SEQ ID NO: 106805 - DNA, 831 bp, Artificial Sequence
  derived and/or modified sequence
atgaccaccgccggcagaggcaacctgggcctgatccccagaagcaccgccttccagaagcaggagggcagactgaccgtgaagcaggagcccgccaaccagacctggggccagggcagcagcctgcagaagaactacccccccgtgtgcgagatcttcagactgcacttcagacagctgtgctaccacgagatgagcggcccccaggaggccctgagcagactgagagagctgtgcagatggtggctgatgcccgaggtgcacaccaaggagcagatcctggagctgctggtgctggagcagttcctgagcatcctgcccggcgagctgagaacctgggtgcagctgcaccaccccgagagcggcgaggaggccgtggccgtggtggaggacttccagagacacctgagcggcagcgaggaggtgagcgcccccgcccagaagcaggagatgcacttcgaggagaccaccgccctgggcaccaccaaggagagcccccccaccagccccctgagcggcggcagcgcccccggcgcccacctggagcccccctacgaccccggcacccaccacctgcccagcggcgacttcgcccagtgcaccagccccgtgcccaccctgccccaggtgggcaacagcggcgaccaggccggcgccaccgtgctgagaatggtgagaccccaggacaccgtggcctacgaggacctgagcgtggactacacccagaagaagtggaagagcctgaccctgagccagagagccctgcagtggaacatgatgcccgagaaccaccacagcatggccagcctgggctggagcaccatggcctag

SEQ ID NO: 106806 - DNA, 831 bp, Artificial Sequence
  derived and/or modified sequence
atgaccaccgccggaagaggaaatctgggtctcattccaagatctaccgcatttcagaaacaagagggccgactgacagttaaacaggaaccagcaaatcagacctggggtcagggttcttctctacaaaagaattacccacctgtttgcgagatttttcgactacatttccgccagctctgctatcatgagatgtctggcccgcaggaggcactctcccggctacgggaactttgtcggtggtggttaatgcctgaagtacacacaaaggaacagattctggagctgttagtccttgagcagtttctgtctattctgcccggcgagttgaggacgtgggttcagctgcaccatcctgaaagcggtgaggaggctgtggctgtggtagaagactttcaacgccacctgtctggcagcgaggaagtgtcggccccagcccaaaaacaagaaatgcactttgaagaaactactgccctgggaacaaccaaggaatcccctcccaccagcccactctccgggggatcagctcctggtgctcacctggaacctccctacgaccctggtacccaccaccttccgtctggagacttcgcgcagtgtacttcacccgtccctaccctacctcaggtgggtaactctggcgatcaagctggggccactgtgctgcggatggtccgaccacaggatactgtggcatatgaggatcttagtgtggactatacccagaaaaaatggaaaagcctgaccctgtcccagagagccctccaatggaatatgatgcccgagaaccaccactccatggccagcttgggttggtccacaatggcctag

SEQ ID NO: 106807 - DNA, 831 bp, Artificial Sequence
  derived and/or modified sequence
atgacaactgccgggagggggaacctgggtttaattcccagatctacagccttccagaaacaggaaggcagactgactgtgaagcaagagccagcaaatcaaacctggggtcagggaagctcgctgcaaaaaaattatccccccgtgtgtgaaatattccgactccatttccgccagctgtgctatcacgagatgtccggcccgcaagaagctttgtccaggctgcgagagctgtgccgttggtggctgatgcctgaggttcacactaaggagcagattttggagttgcttgtgctggaacagttcctgtccatcttacctggggagttgaggacctgggttcagctgcaccaccccgagtccggggaagaagccgttgctgtcgtggaggattttcagcgccacctgagcgggtcagaagaggtttccgctcctgcacaaaagcaggagatgcactttgaagagaccaccgcattggggactaccaaagagtctcccccgacctcaccattgagtggggggtctgcccccggtgcccacctggagccaccgtacgaccctggcactcaccacctgccctcaggggactttgcacagtgcacttcgcctgttccaactttaccacaggtaggtaattccggtgaccaggccggagcaaccgtgctcagaatggttcgtccacaggatacagtggcctatgaggacctgtctgtggactatacccagaagaaatggaagtccctcaccctgagtcagagagcccttcagtggaacatgatgcccgaaaaccatcacagcatggcaagcctcggctggtccactatggcgtag

SEQ ID NO: 106808 - DNA, 831 bp, Artificial Sequence
  derived and/or modified sequence
atgaccacagctggccggggcaacctgggcctcatccccaggagcacagccttccagaagcaggagggccgcctgactgtgaagcaggagcccgccaaccagacctggggccagggcagcagcctgcagaagaactacccacctgtgtgtgagatcttccggctgcacttccggcagctgtgctaccacgagatgagcggcccccaggaggccctgagccggctgcgggagctgtgccgctggtggctgatgcctgaggtgcacaccaaggagcagatcctggagctgctggtgctggagcagttcctgagcatcctgcctggagagctgcggacctgggtgcagctgcaccaccctgagagcggggaggaggccgtggccgtggtggaggacttccagaggcacctgagcggcagcgaggaggtgtctgccccagcccagaagcaggagatgcactttgaggagaccacagccctgggcaccaccaaggagagcccccccaccagccccctgagcggcggcagcgcccctggggcccacctggagcccccctatgaccccggcacccaccacctgcccagcggggactttgcccagtgcaccagccctgtgcccaccctgccccaggtgggcaacagcggggaccaggccggggccaccgtgctgaggatggtgcggccccaggacacagtggcctatgaggacctgtctgtggactacacccagaagaagtggaagagcctgaccctgagccagagggccctgcagtggaacatgatgcctgagaaccaccacagcatggccagcctgggctggagcaccatggcctag

SEQ ID NO: 106809 - DNA, 831 bp, Artificial Sequence
  derived and/or modified sequence
atgaccaccgccggccggggcaacctgggcctgatcccccggagcacagcctttcaaaagcaggagggccgcctcactgttaaacaggagcccgccaaccaaacttgggggcagggctcttccctgcagaaaaattacccccctgtgtgtgaaatctttagactgcacttcaggcagctctgctaccacgagatgtccgggccgcaagaggccctttcccggctgcgcgaattgtgccggtggtggctgatgccagaggttcacaccaaggaacagatactggaactcctggtgctggagcagttcttatctatcttacctggagagctgcgcacctgggttcagttacatcaccccgaaagcggagaagaagcggttgccgtggtggaagattttcagcgacacctcagcggttccgaagaggtgtcagcccctgctcaaaagcaagagatgcactttgaggagactacagcactagggacgacaaaggagtctcctccgacgagccccctatccggagggagtgcccccggggcacatttggaaccaccctatgacccaggcactcaccatctgccgtccggggactttgcacagtgtactagtccggtgccaacactacctcaggtcggaaactcaggcgaccaagccggagccaccgtacttcggatggtgcggccccaagatacagtggcctacgaagacctcagcgtggactacacacagaagaagtggaagtcactgaccctgtcgcagcgcgcattacagtggaacatgatgcctgaaaaccatcacagcatggcatcactcggatggtctactatggcatag

SEQ ID NO: 106810 - DNA, 831 bp, Artificial Sequence
  derived and/or modified sequence
atgaccaccgccggccggggcaacctgggcctgatcccccggagcaccgccttccagaagcaggaaggaaggctcaccgtcaaacaagagcctgccaatcagacgtggggtcagggcagctcccttcagaagaattatcctcctgtatgcgaaatttttaggctgcatttccggcagctgtgctatcatgagatgtctggaccacaggaggcactgtctaggctccgggaactttgccgctggtggctcatgccggaggtccacacaaaggagcagatcctggaattgcttgttcttgagcaatttctttccattctgccaggcgagctacgcacctgggtgcaattgcaccatcccgaatcgggggaggaagctgtagccgtggtggaggattttcagagacacctgagcggtagcgaggaagtctccgcccccgcacagaaacaggagatgcacttcgaggaaaccacagcccttggcacgacgaaggagtctcctccaacatctccgctgagtggaggctcagccccaggagcacacctagaacccccctacgaccccggaactcaccaccttccatctggtgacttcgcacaatgtacctctccggtgcccacgcttccacaggtggggaattcgggagaccaggctggggcgacggttctgcgtatggtgcgccctcaggatactgttgcatacgaggatctgtccgttgactatacgcagaagaaatggaaatcactcactctgagccagcgagccctgcaatggaatatgatgcccgaaaaccaccattctatggcatctctcggctggtctactatggcatag

SEQ ID NO: 106811 - DNA, 831 bp, Artificial Sequence
  derived and/or modified sequence
atgactactgccggacggggaaacctcggattgatccctcggtctacggcctttcagaagcaagagggcaggctgaccgtgaaacaggaacccgctaaccagacatgggggcagggttcttctctgcagaaaaactacccaccggtgtgcgagattttccgcctgcactttcgccagctttgttatcatgagatgtctggccctcaagaagccttgagccggctgcgggagctctgccgctggtggctaatgcccgaggtgcataccaaagaacagatactcgagttgctggtgttagagcagttccttagtattttgccaggtgaactgcgcacttgggtgcaacttcatcatccagagagtggtgaggaagcagtggccgtcgtggaggacttccaacggcatctgtcgggcagtgaagaagtcagcgcaccggcacagaaacaagaaatgcactttgaggagactacagctctgggaaccaccaaggagagtcccccaacaagccctcttagcggtggaagcgctcccggagcccacctggagcctccatacgaccctggaacccaccatctgccttctggggatttcgcacaatgtacctcaccagtccccaccctgccacaggtgggaaactctggagaccaggcgggagccaccgtgctacgaatggtccgccctcaggataccgtggcttacgaagacctcagtgtggactacacccaaaagaagtggaagagtctaaccctgagccagagggctctgcagtggaacatgatgccggagaaccatcattctatggcaagcttggggtggtcgaccatggcctag

SEQ ID NO: 106812 - DNA, 831 bp, Artificial Sequence
  derived and/or modified sequence
atgactacagcgggtcgtgggaatctcggcctgatacccagaagcacagctttccagaaacaggagggcaggctgactgttaagcaggagccagcaaatcagacttgggggcagggaagttcattgcaaaagaattaccctcccgtgtgtgagatctttcgcctccatttcagacagctatgctaccacgaaatgtcagggcctcaggaggcactctccagactacgggagctctgcagatggtggctcatgccggaggtgcatacgaaagaacaaatcctcgagctcctggtgctggagcagttcctgtccatactccccggtgaacttcgcacgtgggtgcagctgcatcacccagagtctggcgaagaggccgtagctgtggtggaggatttccagcggcacctgagtggatccgaagaagtatccgccccagcccagaaacaagagatgcatttcgaggaaaccacagctcttggaactactaaggaatctccaccaacctctcccctctccggtggctctgcaccaggcgctcacctcgagcccccttacgatccagggacgcaccacttgccgtccggcgattttgcacagtgcacttcgcccgtaccaacccttccacaggtgggaaactccggcgaccaggccggagccaccgtgcttcgaatggtgcggccacaggataccgtggcctatgaggatctgtcagtggattatacccagaaaaagtggaagtcactgacattgagccagcgagccctgcaatggaatatgatgccagaaaaccatcattcgatggcttcactcggttggtcgactatggcatag

SEQ ID NO: 106813 - DNA, 1757 bp, Artificial Sequence
  derived and/or modified sequence
cggccattgtttttggtctaacgggcagtagagtgtccggcttcggtgccgagtgccaccgcgagtgggccgagacgcggagggaggcgcggccggagctcgggtcgccgacgctggccaggaccgcgcttcttcccggcggcaggcggcgcggtccccgtgactctcagaagccgcccgatgtagagccgcttctttgtctcatacccctgaccattcgtgcgtggcacggagccgggtatctgcgggtacagcgatgaacagggcagacgtggccaggtgagcggcgctgctgaagcctggtttaacacgaaaggccacactaccatcacccctttctccaaccctgaaaaacagttcctgagacctgaactattgaccatcattttaatcggaccaactgcagctgtaacaagcttctctttggggtcacaatgaccactgcaggcaggggaaatttaggcctcatccccaggagcactgctttccagaagcaagaggggcgcctgactgtgaagcaggagccagcaaaccagacctgggggcagggcagcagtctccagaagaactatcctcctgtctgcgaaatcttccggctacacttcaggcaattgtgttaccacgagatgtctgggccgcaggaagcattgagccggcttcgggagctctgccgctggtggctcatgccagaggtgcacaccaaggagcagatcctggagctgctggtgcttgagcagttcctgagcatcctccctggggagctccggacctgggtgcagctgcatcaccctgagagtggtgaggaggctgtggctgtggtggaggatttccagagacacctcagtggatcagaggaggtttcagccccagcacagaaacaggaaatgcattttgaggagacaacagctctgggtacaacaaaggaatctcctcctacctcacccctcagtgggggctcagcccctggagcccacctggagcctccttatgacccagggacacaccacctccccagtggggacttcgctcaatgtacttctccagttcctacccttcctcaagtggggaactcaggagaccaagcaggggcaactgtacttcggatggtcaggccccaggatactgtggcatatgaggacctatctgtagactacactcagaagaaatggaaaagtctcacactcagtcagagagccctgcagtggaacatgatgccagaaaatcaccatagcatggcctccttgggctggagtacaatggcgtgatcttggctcacttcaatctccagctcccgagttcaagcgattctcctgcctcagactcctgagtagctgggattacaggcgcctgccaccatgcccagctaatttttgtaatatttagtagagacggggtttcaccatgttggccaggctggtttcgaactcctgacctcaggtgatccacccgcctcagcctcccaaagtggtgggattacaggcgtgagccaccacacccagcctattctttttaagtttcttgatgtagtggcagtagtcttgtgctcttcaggagagtgtcccgagttctacgtcccacatcaactgagggtgtgaacttgtggaggacttttgtctgaatctctttttcaatctctatacaatgtggcggagttgtgccacctacatgagccaatggagaagaaagctcctggtatactttaagtactcaacaatattaaatactgaatatttgtcaattgacgaagtacttcaaaa

SEQ ID NO: 106814 - DNA, 1692 bp, Artificial Sequence
  derived and/or modified sequence
gcttccggctcggccattgtttttggtctaacgggcagtagagtgtccggcttcggtgccgagtgccaccgcgagtgggccgagacgcggagggaggcgcggccggagctcgggtcgccgacgctggccaggaccgcgcttcttcccggcggcaggcggcgcggtccccgtgactctcagaagccgcccgatgtagagccgcttctttgtctcatacccctgaccattcgtgcgtggcacggagccgggtatctgcgggtacagcgatgaacagggcagacgtggccaggccacactaccatcacccctttctccaaccctgaaaaacagttcctgagacctgaactattgaccatcattttaatcggaccaactgcagctgtaacaagcttctctttggggtcacaatgaccactgcaggcaggggaaatttaggcctcatccccaggagcactgctttccagaagcaagaggggcgcctgactgtgaagcaggagccagcaaaccagacctgggggcagggcagcagtctccagaagaactatcctcctgtctgcgaaatcttccggctacacttcaggcaattgtgttaccacgagatgtctgggccgcaggaagcattgagccggcttcgggagctctgccgctggtggctcatgccagaggtgcacaccaaggagcagatcctggagctgctggtgcttgagcagttcctgagcatcctccctggggagctccggacctgggtgcagctgcatcaccctgagagtggtgaggaggctgtggctgtggtggaggatttccagagacacctcagtggatcagaggaggtttcagccccagcacagaaacaggaaatgcattttgaggagacaacagctctgggtacaacaaaggaatctcctcctacctcacccctcagtgggggctcagcccctggagcccacctggagcctccttatgacccagggacacaccacctccccagtggggacttcgctcaatgtacttctccagttcctacccttcctcaagtggggaactcaggagaccaagcaggggcaactgtacttcggatggtcaggccccaggatactgtggcatatgaggacctatctgtagactacactcagaagaaatggaaaagtctcacactcagtcagagagccctgcagtggaacatgatgccagaaaatcaccatagcatggcctccttgggctggagtacaatggcgtgatcttggctcacttcaatctccagctcccgagttcaagcgattctcctgcctcagactcctgagtagctgggattacaggcgcctgccaccatgcccagctaatttttgtaatatttagtagagacggggtttcaccatgttggccaggctggtttcgaactcctgacctcaggtgatccacccgcctcagcctcccaaagtggtgggattacaggcgtgagccaccacacccagcctattctttttaagtttcttgatgtagtggcagtagtcttgtgctcttcaggagagtgtcccgagttctacgtcccacatcaactgagggtgtgaacttgtggaggacttttgtctgaatctctttttcaatctctatacaatgtggcggagttgtgccacctacatgagccaatggagaagaaagctcctggtatactttaagtactcaacaatatta

SEQ ID NO: 106815 - protein, 108 aa, Artificial Sequence
  derived and/or modified sequence
MASNIFGTPEENQASWAKSAGAKSSGGREDLESSGLQRRNSSEASSGDFLDLKTSGGKIENVDTDLPGSLGQSEEKPVPAAPVPSPVAPAPVPSRRNPPGGKSSLVLG

SEQ ID NO: 106816 - DNA, 327 bp, Artificial Sequence
  derived and/or modified sequence
atggccagcaacatcttcggcacccccgaggagaaccaggccagctgggccaagagcgccggcgccaagagcagcggcggcagagaggacctggagagcagcggcctgcagagaagaaacagcagcgaggccagcagcggcgacttcctggacctgaagaccagcggcggcaagatcgagaacgtggacaccgacctgcccggcagcctgggccagagcgaggagaagcccgtgcccgccgcccccgtgcccagccccgtggcccccgcccccgtgcccagcagaagaaacccccccggcggcaagagcagcctggtgctgggctag

SEQ ID NO: 106817 - DNA, 327 bp, Artificial Sequence
  derived and/or modified sequence
atggccagcaacatcttcggcacccccgaggagaaccaggccagctgggccaagagcgccggcgccaagagcagcggcggcagagaggacctggagagcagcggcctgcagagaagaaacagcagcgaggccagcagcggcgacttcctggacctgaagggcgagggcgacatccacgagaacgtggacaccgacctgcccggcagcctgggccagagcgaggagaagcccgtgcccgccgcccccgtgcccagccccgtggcccccgcccccgtgcccagcagaagaaacccccccggcggcaagagcagcctggtgctgggctag

SEQ ID NO: 106818 - DNA, 327 bp, Artificial Sequence
  derived and/or modified sequence
atggcgtccaacatattcggaacccctgaagaaaaccaagcaagctgggccaagtctgccggcgcaaaatccagcggtggaagagaggacctggagtctagtggtctgcagagaaggaactcctcagaggcctccagtggggactttctggacctgaagacctctggcggaaagattgaaaatgtggatactgacctgcccgggtctttgggacagagcgaggaaaaacccgtcccagccgcacctgtcccctctcccgtggctccagctcccgttccgagtcggcgaaacccccctggaggtaaaagctccctggtcttaggttag

SEQ ID NO: 106819 - DNA, 327 bp, Artificial Sequence
  derived and/or modified sequence
atggccagcaacatatttgggacaccagaagaaaaccaagcgtcatgggcaaagtctgctggtgccaagagcagtggggggagagaggatctcgagagcagcggtctgcagagaagaaacagttccgaggcatcctccggggacttcctagatttgaaaggggagggggatatacatgagaatgtggatacagatttgccaggcagcctgggccagtcagaagagaagcctgtacctgccgccccggtgccatcaccggtggcccctgctccagtcccctccaggcgaaaccctcctgggggcaagtctagtctggtcctgggatag

SEQ ID NO: 106820 - DNA, 327 bp, Artificial Sequence
  derived and/or modified sequence
atggccagcaacatcttcggcaccccagaggagaaccaggcctcctgggccaagtctgctggggccaagagcagcggcggccgggaggacctggagagcagcggcctgcagaggaggaacagcagcgaggccagcagcggggacttcctggacctgaagaccagcggcggcaagattgaaaatgtggacacagacctgcccggcagcctgggccagagcgaggagaagcctgtgcctgctgcccctgtgcccagccctgtggccccagcccctgtgcccagcagaagaaaccccccaggcggcaagagcagcctggtgctgggctag

SEQ ID NO: 106821 - DNA, 327 bp, Artificial Sequence
  derived and/or modified sequence
atggccagcaacatcttcggcaccccagaggagaaccaggcctcctgggccaagtctgctggggccaagagcagcggcggccgggaggacctggagagcagcggcctgcagaggaggaacagcagcgaggccagcagcggggacttcctggacctgaagggggagggggacatccatgaaaatgtggacacagacctgcccggcagcctgggccagagcgaggagaagcctgtgcctgctgcccctgtgcccagccctgtggccccagcccctgtgcccagcagaagaaaccccccaggcggcaagagcagcctggtgctgggctag

SEQ ID NO: 106822 - DNA, 327 bp, Artificial Sequence
  derived and/or modified sequence
atggccagcaacatcttcggcacccccgaggagaaccaggccagctgggcgaaatcagctggggctaagagctctggtggtcgcgaagatctggaaagcagcggactgcagcggcggaactcttcagaagccagtagcggcgatttcctggatctgaagaccagcggtgggaagattgaaaatgtcgatactgacctcccaggcagccttggacagtctgaggagaagccagttcccgcagcccccgtgccttcaccggtcgcaccagcacctgtccccagcaggcgcaacccccctgggggaaagagctcactggttctcggttag

SEQ ID NO: 106823 - DNA, 327 bp, Artificial Sequence
  derived and/or modified sequence
atggccagcaacatcttcggcacccccgaggagaaccaggccagctgggcaaaatcggccggagcaaagagtagtggcggacgggaagatctggaatccagcgggctgcagaggcggaactcatcagaagcctccagcggcgacttcctggatctcaagggggagggagacatacacgagaatgtcgatacagatctgcccggaagtctcggccagagtgaagaaaaacctgtccctgcggctcccgtgcctagcccggttgcacctgccccggtcccctctcgcaggaatccacccggcgggaagagctctcttgtcctgggctag

SEQ ID NO: 106824 - DNA, 327 bp, Artificial Sequence
  derived and/or modified sequence
atggcaagcaatatctttggtacccctgaggagaaccaagcatcttgggctaaaagtgccggtgccaaaagctctggaggtcgtgaagacttggaatcatccggcctccagcgtaggaatagctccgaagcatcctcgggtgacttccttgatctgaaaaccagcggcggtaaaatcgaaaatgtggacaccgacctgcctggaagtctgggtcagagcgaagaaaagcctgtccctgccgctcctgtgccatcgcctgttgcccctgcccctgtgccgagccggcgtaatcccccagggggaaaatcatctttggtgctcgggtag

SEQ ID NO: 106825 - DNA, 327 bp, Artificial Sequence
  derived and/or modified sequence
atggcctccaatatttttggaacacctgaagaaaaccaggcctcctgggcaaagtctgcaggggcaaagtctagtggagggagagaagacctggaatcatcaggattgcaacggagaaattccagtgaggccagcagtggggactttcttgacctgaaaggtgaaggtgacattcacgagaacgttgatacagacctgcccggatcactgggacagagcgaggagaagccagtgcccgcagctcctgtccctagtcctgtagctccggcaccagtgccaagtaggcgaaaccccccaggcggaaagtcgagtttagtgctcggctag

SEQ ID NO: 106826 - DNA, 157 bp, Artificial Sequence
  derived and/or modified sequence
aacatcaaacggaatcaaacggaattatcgaatggaatcgaagagaatcatcgaacggactcgaatggaatcatctaatggaatggaatggaagaatccatggactcgaatgcaatcatcatcgaatgaaatcgaatggaatcatcgaatggactcg

SEQ ID NO: 106827 - protein, 114 aa, Artificial Sequence
  derived and/or modified sequence
QIPGGWIDANVGDTDVKEAARFATEAQSSRSNSLYHHKLLKIHKARTQVVSGINYEVFIETGTTTCKKSEVPLEDLKRCAVPENGVKHLCQAIVWVQAWIPRTKVTKLECQNKG

SEQ ID NO: 106828 - protein, 146 aa, Artificial Sequence
  derived and/or modified sequence
MAGPLRAPLLLLAILAVALAVSPAAGSSPGKPPRLVGGPMDASVEEEGVRRALDFAVGEYNKASNDMYHSRALQVVRARKQIVAGVNYFLDVELGRTTCTKTQPNLDNCPFHDQPHLKRKAFCSFQIYAVPWQGTMTLSKSTCQDA

SEQ ID NO: 106829 - DNA, 441 bp, Artificial Sequence
  derived and/or modified sequence
atggctggacccttgcgggctccattgctcttattggccatactggctgtcgctctggctgtgagcccagccgccgggagctcccctggaaaaccaccacgcttagtgggtgggccaatggatgcaagtgtggaggaagagggggtgcgccgggccttggatttcgctgtcggagaatacaacaaagcttcgaatgatatgtaccactcaagagctcttcaggtggtgagagctcgcaaacagattgtcgccggcgtcaactactttctggatgtagagctcggtcgcacaacctgtacgaagacccagccaaatctagataactgtcctttccacgatcaacctcatctgaagaggaaagctttttgttcattccagatatatgccgtgccatggcagggcacaatgaccctttccaaatcgacttgtcaggatgcatag

SEQ ID NO: 106830 - DNA, 441 bp, Artificial Sequence
  derived and/or modified sequence
atggccggcccactgagagctcccctcttactattagcaattttagcggtggcactcgcggtctcccctgctgctggcagctccccagggaagccaccccggcttgtgggcggcccgatggacgcgagtgtggaggaggaaggcgtgaggcgggccctcgacttcgccgttggtgagtacaataaggcctccaacgatatgtaccacagcagagctcttcaggtagttcgagccagaaaacagattgtcgccggcgttaactattttctagacgtggaattgggtaggacaacatgtactaaaacccagcctaacttagacaactgcccgttccacgatcagccccacctgaagcggaaggcattctgttctttccaaatatatgcagtcccatggcagggaactatgaccctgagtaaatctacatgtcaggatgcctag

SEQ ID NO: 106831 - DNA, 441 bp, Artificial Sequence
  derived and/or modified sequence
atggcaggccctttgagggcccccctgctgctgcttgctatactagccgtcgcacttgctgtctcaccagctgcagggtccagccccgggaagccacccagattggtgggaggacccatggacgcttccgttgaggaggagggagtccgtcgtgccctcgacttcgcagtcggcgaatacaacaaagccagcaacgacatgtaccattcgcgagccctgcaggtcgttcgggcccgtaagcaaattgtggccggtgtcaactactttctcgatgtagaactggggagaacgacatgcaccaaaactcagccaaatctcgataactgtccgttccacgaccagccccacctgaagagaaaagcattctgctcgttccagatctacgcagtgccctggcagggcactatgacgctttcaaagagcacctgtcaggacgcctag

SEQ ID NO: 106832 - DNA, 441 bp, Artificial Sequence
  derived and/or modified sequence
atggccggccccctgcgggcccccctgctgctgctggccatcctggccgtggccctggccgtgtccccagctgctggcagcagccctgggaagccaccccggctggtgggcggccccatggatgcctctgtggaggaggagggcgtgcggcgggccctggactttgctgtgggggagtacaacaaggccagcaatgacatgtaccacagccgggccctgcaggtggtgcgggccaggaagcagatcgtggccggcgtgaactacttcctggatgtggagctgggccgcaccacctgcaccaagacccagcccaacctggacaactgccccttccatgaccagccccacctgaagaggaaggccttctgcagcttccagatctatgctgtgccctggcagggcaccatgaccctgagcaagagcacctgccaggatgcctag

SEQ ID NO: 106833 - DNA, 441 bp, Artificial Sequence
  derived and/or modified sequence
atggccggccccctgcgggcccccctgctgctgctggccatcctggccgtcgccctcgctgtgagtccagccgccggctcttccccggggaaaccccctcggcttgttggtggaccgatggacgcctccgtcgaggaggagggggtgcgcagagcactcgatttcgccgtgggcgagtacaataaggcttctaatgatatgtatcacagtcgcgcactccaggtcgtgagagctcgcaaacagattgtggctggtgtcaattacttcctggacgtggagctcggccggactacatgtactaaaacccaaccaaatctagataattgcccttttcacgaccagccacacctgaagaggaaggcattttgtagcttccaaatatatgctgtgccatggcagggtactatgacactgagcaagagtacttgccaggacgcttag

SEQ ID NO: 106834 - DNA, 441 bp, Artificial Sequence
  derived and/or modified sequence
atggccggccccctgcgggcccccctgctgctgctggccatcctggcagtcgcgctggccgtgtcacctgccgcaggatcttctccaggaaagccacccaggttggtgggaggtccaatggacgcttctgtcgaggaggaaggtgtccgtcgggcactcgacttcgcggttggagaatacaataaagcatcgaacgacatgtatcactctagagccctccaggtagtccgtgctcgtaagcagattgtggctggagtgaactactttcttgatgttgaactgggtaggaccacctgtaccaaaacacagccgaatcttgacaactgccctttccatgatcagcctcatttaaagcggaaagccttttgtagcttccagatctacgccgtaccctggcagggtaccatgactctgtcaaaatcaacctgtcaggatgcctag

SEQ ID NO: 106835 - DNA, 441 bp, Artificial Sequence
  derived and/or modified sequence
atggccggccccctgcgggcccccctgctgctgctggccatcctggctgtggcactggcggtctcccctgctgcagggtctagtcctgggaagcctccacgccttgtgggcgggcctatggacgcctccgttgaggaggagggggtgagacgtgctcttgactttgcagtgggggagtacaacaaggcgtccaatgacatgtaccactctcgggcgcttcaggtggtgcgagcccgcaagcagattgtggctggcgtaaattactttctagatgtggaactcggcagaaccacatgtacaaagacacaaccgaatctggataattgcccatttcacgaccagccgcacctgaaaaggaaggccttttgcagtttccaaatctacgctgttccttggcaggggactatgacattatctaagtctacgtgccaggatgcctag

SEQ ID NO: 106836 - DNA, 441 bp, Artificial Sequence
  derived and/or modified sequence
atggcaggccctttgcgagcgcctcttctgctcctcgcaatcttagccgtagcccttgccgtgtctcctgccgcaggatctagccccggaaaaccaccccgactcgtcggaggccctatggatgcttccgtggaggaggagggtgttaggcgggcactggacttcgccgttggggaatacaataaggcctcgaatgatatgtaccattcacgcgcactccaagttgttcgcgctcggaaacagattgtggccggagttaattattttcttgacgtcgagcttggtcgcactacatgcaccaaaacacaaccaaacctcgataattgcccgttccacgatcagcctcacctgaaacgtaaagccttttgctccttccagatatacgctgtcccttggcagggcacaatgaccctgagcaagtccacttgccaggacgcttag

SEQ ID NO: 106837 - DNA, 441 bp, Artificial Sequence
  derived and/or modified sequence
atggccggtcccctgcgggctcctctgctattgctggccatcctggccgtagcgctcgcagtttccccggctgccggttcctcgcctggcaaacctccccgtctcgtggggggaccgatggacgccagtgttgaggaggagggcgtacgccgagccctcgatttcgccgtcggggaatacaataaagccagtaatgatatgtatcactcaagagccttacaggtggtcagagcacgaaaacagattgtagcgggtgtcaactactttctggatgtggaactcggacggacgacatgcacaaaaacgcagccgaatttagacaactgtccttttcacgaccagccccatctgaagagaaaagccttttgctcgttccagatatatgccgtcccctggcaggggacaatgaccctatctaaaagcacttgccaggacgcatag

SEQ ID NO: 106838 - DNA, 441 bp, Artificial Sequence
  derived and/or modified sequence
atggccggaccgctacgcgcacccctcctcctacttgcgatactagcagtggccctcgccgttagcccagccgcaggctcctcccccggtaaaccaccacggttagtggggggaccgatggacgcaagtgtagaagaggaaggtgtccggcgtgcacttgactttgctgtcggtgagtacaacaaggcttccaacgacatgtatcactctagagcgctgcaggtcgtcagggctagaaaacaaatcgtggccggtgtgaattattttttggacgtcgaactgggacgcaccacatgcacaaaaacccagccgaacctggataactgccccttccatgatcaacctcacttgaagcgcaaagctttctgcagctttcaaatttatgccgtgccgtggcaggggacaatgactctgagcaagagtacatgccaagacgcatag

SEQ ID NO: 106839 - DNA, 873 bp, Artificial Sequence
  derived and/or modified sequence
gcaggccgcggtggggtggggcggcgaaggccggaagggataaaaccgcagtcgccggcctcgcggggctcacggcctcgcctcggtatcgcagcgggtcctctctatctagctccagcctctcgcctgcgccccactccccgcgtcccgcgtcctagccgaccatggccgggcccctgcgcgccccgctgctcctgctggccatcctggccgtggccctggccgtgagccccgcggccggctccagtcccggcaagccgccgcgcctagtgggaggccccatggacgccagcgtggaggaggagggtgtgcggcgtgcactggactttgccgtcggcgagtacaacaaagccagcaacgacatgtaccacagccgcgcgctgcaggtggtgcgcgcccgcaagcagatcgtagctggggtgaactacttcttggacgtggagctgggccgaaccacgtgtaccaagacccagcccaacttggacaactgccccttccatgaccagccacatctgaaaaggaaagcattctgctctttccagatctacgctgtgccttggcagggcacaatgaccttgtcgaaatccacctgtcaggacgcctaggggtctgtaccgggctggcctgtgcctatcacctcttatgcacacctcccaccccctgtattcccacccctggactggtggcccctgccttggggaaggtctccccatgtgcctgcaccaggagacagacagagaaggcagcaggcggcctttgttgctcagcaaggggctctgccctccctccttccttcttgcttctcatagccccggtgtgcggtgcatacacccccacctcctgcaataaaatagtagcatcggctccctctga

SEQ ID NO: 106840 - DNA, 832 bp, Artificial Sequence
  derived and/or modified sequence
ggaaagggacagaggagaaggagcctgaagagtggcggcatggaggggcccgaagtggggagcgggtcctctctatctagctccagcctctcgcctgcgccccactccccgcgtcccgcgtcctagccgaccatggccgggcccctgcgcgccccgctgctcctgctggccatcctggccgtggccctggccgtgagccccgcggccggctccagtcccggcaagccgccgcgcctagtgggaggccccatggacgccagcgtggaggaggagggtgtgcggcgtgcactggactttgccgtcggcgagtacaacaaagccagcaacgacatgtaccacagccgcgcgctgcaggtggtgcgcgcccgcaagcagatcgtagctggggtgaactacttcttggacgtggagctgggccgaaccacgtgtaccaagacccagcccaacttggacaactgccccttccatgaccagccacatctgaaaaggaaagcattctgctctttccagatctacgctgtgccttggcagggcacaatgaccttgtcgaaatccacctgtcaggacgcctaggggtctgtaccgggctggcctgtgcctatcacctcttatgcacacctcccaccccctgtattcccacccctggactggtggcccctgccttggggaaggtctccccatgtgcctgcaccaggagacagacagagaaggcagcaggcggcctttgttgctcagcaaggggctctgccctccctccttccttcttgcttctcatagccccggtgtgcggtgcatacacccccacctcctgcaataaaatagtagcatcggc

SEQ ID NO: 106841 - DNA, 2095 bp, Artificial Sequence
  derived and/or modified sequence
ctcggtatcgcagcgggtcctctctatctagctccagcctctcgcctgcgccccactccccgcgtcccgcgtcctagccgaccatggccgggcccctgcgcgccccgctgctcctgctggccatcctggccgtggccctggccgtgagccccgcggccggctccagtcccggcaagccgccgcgcctagtgggaggccccatggacgccagcgtggaggaggagggtgtgcggcgtgcactggactttgccgtcggcgagtacaacaaagccagcaacgacatgtaccacagccgcgcgctgcaggtggtgcgcgcccgcaagcagatcgtagctggggtgaactacttcttggacgtggagctgggccgaaccacgtgtaccaagacccagcccaacttggacaactgccccttccatgaccagccacatctgaaaaggaaagcattctgctctttccagatctacgctgtgccttggcagggcacaatgaccttgtcgaaatccacctgtcaggacgcctaggggaccctgatgaaaagactgaggaaaatgctgcctttcctgaatggctaccaggcagggaatgatgctgggaagtgtttaccccacaggctctgtgccttctctgactgggcagctcatgctgtatgcatggaggcatcattaccaaacacacctctgaggccagcggccagcgtctgactcacaagccatgactgccccaccttcttacaacaacaatagcagtttccccgtgaggattcacccctcctcccctctcactccgcctttttccagggaagctgactctaccctttggaccacagcttggagcacttgaccctggctaagctggtcagggcagcgggtctccctcccctgaagcctcatgattggcatgaggacaacacgtgacctatgtgtggctgcccaggacccacataggcttaacggtgggattttgtttgactgtgtgataagtgggttcttccttccctgctgagtgtgaagataaaaaagacttgaggtctggggcccacttggagcctgtttgagaatgaagccaagttatgggaagcaacaaaactgaagagacagcaaggaaaccaggcctggtggtgcactcccagctattctggaggctgacgcgggaggactgcgtgagctcagcagtttgaggctgcaatgagccatgatttcactactgaactccagcctgggcaaaagagcgagaccctgtgtctcagaaaaagagagagagaaacagagagcaaggagcaggtgggttataatggagtccctgcaccaagcagagcctgatgcccgcccttgctctgaacttcctagttatgtgaaccaaccaccaggccagttgggttgggtttccagccctgtgctcttgtctgtcctcactgacagacaaaaataactcatcagtcggttctcagacccacagtcccatgacatttcttgactgtttcagaagtaatgcctcaaggaccagcttgcagaaagtggaggacctgccccctggaccttacaagtagcaggccactcttaaaaatgcaaggaccacagatgtcaccatgactgaaaaatagaggctggccctgcctctgaagatgctgcaatggacttgtgttcaaggagaaattggctgtaacttcccttattgagatataatcgggctcatcgttaagctgtggtcagccagaagtgtagctgtgcccctgggattgaaatcagcaatcaatctggacatcctttttctatcttcatgaggcacctccccagtaccaaccaaatttcttggggatcccccgggacttctcataaatggaattgatttgaactcaggaaaccctcaaataggccagaacaactcactaattaaattcatcccctcccaaaaacaaaaacaaaaacaaaaaaaaacaacacacatgataggaaaaaaattttgcaaattatatatctgatatagaacttgtattcagaacatataatgaactcttacaactcaataagactggtaacccaattaaaaattctttttaaaaaaaccaatttaaaaataaaggcaaataacctaa

SEQ ID NO: 106842 - DNA, 441 bp, Artificial Sequence
  derived and/or modified sequence
atggccggccccctgagagcccccctgctgctgctggccatcctggccgtggccctggccgtgagccccgccgccggcagcagccccggcaagccccccagactggtgggcggccccatggacgccagcgtggaggaggagggcgtgagaagagccctggacttcgccgtgggcgagtacaacaaggccagcaacgacatgtaccacagcagagccctgcaggtggtgagagccagaaagcagatcgtggccggcgtgaactacttcctggacgtggagctgggcagaaccacctgcaccaagacccagcccaacctggacaactgccccttccacgaccagccccacctgaagagaaaggccttctgcagcttccagatctacgccgtgccctggcagggcaccatgaccctgagcaagagcacctgccaggacgcctag

SEQ ID NO: 106843 - DNA, 840 bp, Artificial Sequence
  derived and/or modified sequence
atggtgttccagaccagataccccagctggatcatcctgtgctacatctggctgctgagattcgcccacaccggcgaggcccaggccgccaaggaggtgctgctgctggacagcaaggcccagcagaccgagctggagtggatcagcagcccccccaacggctgggaggagatcagcggcctggacgagaactacacccccatcagaacctaccaggtgtgccaggtgatggagcccaaccagaacaactggctgagaaccaactggatcagcaagggcaacgcccagagaatcttcgtggagctgaagttcaccctgagagactgcaacagcctgcccggcgtgctgggcacctgcaaggagaccttcaacctgtactactacgagaccgactacgacaccggcagaaacatcagagagaacctgtacgtgaagatcgacaccatcgccgccgacgagagcttcacccagggcgacctgggcgagagaaagatgaagctgaacaccgaggtgagagagatcggccccctgagcaagaagggcttctacctggccttccaggacgtgggcgcctgcatcgccctggtgagcgtgaaggtgtactacaagaagtgctggagcatcatcgagaacctggccatcttccccgacaccgtgaccggcagcgagttcagcagcctggtggaggtgagaggcacctgcgtgagcagcgccgaggaggaggccgagaacgcccccagaatgcactgcagcgccgagggcgagtggctggtgcccatcggcaagtgcatctgcaaggccggctaccagcagaagggcgacacctgcgagagaaagtag
